United States Patent Application Publication US 2026/0240958 A1 - sequence listing, part 10

SEQ ID NO: 9679 - RNA, 8787 nt, synthetic construct
  source 1..8787: mol_type = other RNA
aggaaataagagagaaaagaagagtaagaagaaatataagagccaccatggcccctaagaagaagcgtaaagtgagccggatgaaccacgaccaggagttcgacccccctaaggtgtaccctcccgtccccgccgagaagagaaagcccatccgggtcctgagcctgttcgatggcatcgccaccggtctgctggtgctgaaggacctgggcatccaggtggataggtacattgcctccgaggtgtgcgaggactccatcaccgtgggaatggtgcgtcatcagggcaagatcatgtacgtgggcgacgtgcggagcgtgacacagaagcatatccaggagtggggccctttcgacctggtgatcggcggcagcccttgcaatgacctgagcatcgtgaacccagcccggaagggcctgtacgagggaaccggcagactgttcttcgagttttacagactgctgcacgacgcccggcctaaggaaggcgacgaccggcccttcttttggctgttcgagaatgtggtggccatgggagtcagcgacaagcgggatattagccggttcctggagagcaaccccgtgatgatcgatgccaaggaagtgagcgccgcccaccgggccagatacttctggggcaatctgcctggcatgaacagacccctggccagcaccgtgaacgacaagctggagctgcaggagtgcctggagcacggccggatcgccaagttcagcaaggtgagaaccatcaccacccgaagcaacagcatcaaacaaggcaaggaccagcactttcctgtgttcatgaacgagaaggaggacatcctgtggtgtaccgagatggagagagtgttcgggttcccagtccactacacagatgtcagcaacatgtctagactggccagacagagactgctgggaagaagctggtccgtccctgtgatcagacacctgttcgcccctctgaaggagtacttcgcctgcgtgagcagcggcaacagcaacgccaacagccggggccccagcttctctagcggcctggtgccactgtccctgagagggagccacatgggccccatggagatctacaaaaccgtgagcgcctggaagcggcagcctgtgcgcgtgctgagcctgtttcggaatatcgataaagtcctgaaaagcctgggattcctggagagcggctctggctccggcggtggcaccctgaagtacgtggaggatgtgacaaacgtggtcagacgggatgtggagaagtggggccccttcgatctggtgtacggcagcacccaacccctgggcagctcttgtgaccggtgccctggctggtacatgtttcagttccaccggatcctgcagtacgccctgccgagacaggagtcccagcggccattcttttggattttcatggacaacttgctgctgaccgaggatgaccaggaaactaccactcggttcctgcagaccgaagccgtgaccctgcaggacgtgagaggccgggactaccagaacgccatgcgggtgtggtccaacatccctggactgaaaagcaagcacgcacctctgacccctaaagaagaggagtacctgcaggcccaggtgcggagcagaagcaagctggacgcccctaaggtggatctgctggtgaagaattgcctcctgcccctgagagagtacttcaagtatttcagccagaatagtctgcccctgggaggcagcggcggcggcttccaggaggccgtgaccttcaaggacgtggccgtggccttcaccgaggaggagctgggcctgctggaccccgcccagaggaagctgtacagggacgtgatgctggagaacttcaggaacctggtgagcgtgggccaccagagcttcaagcccgacatgatcagccagctggagagggaggagaagctgtggatgaaggagttccagacccagaggggcaagcacagcggcgacaggaacctgggcggcccaagcagcggcgcccctcctcccagcggcggcaggcggcccaagcagcggcgcccctcctcccagcggcggcagcccagccggctccccaacctctaccgaggagggcacctctgagtccgccacccccgagagcggccctggcacctccaccgagcccagcgagggcagcgcacccggcagccctgccggcagccccacctccacagaggagggaaccagcaccgagcccagcgaaggcagcgccccaggcaccagcaccgagcctagtgagcaggagattaaacggatcaacaagatcagaagaagacttgtgaaagacagcaacaccaagaaggccggcaagacaggccccatgaaaaccctgctggttagagtgatgacacccgatctgagagagcggctggaaaacctgagaaagaagcctgaaaatatcccccagcccatcagcaatacatctagagccaacctgaataagctgctgaccgattacaccgaaatgaagaaggcgatcctgcatgtgtactgggaagagttccagaaggaccctgtgggcctgatgagccgggtggcccagcctgccagcaagaagatcgatcagaacaagctgaaacctgagatggacgagaagggcaacctgaccaccgccggctttgcctgctctcagtgtggccagcccctgttcgtgtacaagctggagcaggtgtctgagaagggcaaggcttacaccaactacttcggacggtgcaatgtggccgagcacgaaaagctgatcctgctggcccagctgaagcccgagaaggatagcgacgaagccgtgacatatagcctgggaaagtttgggcagagggccctggatttctacagcattcatgtgaccaaggagtccacccaccccgtgaagcccctggcccagatcgccggaaacagatacgcctccggacctgtgggaaaggccctgagcgacgcatgtatgggcacaatcgcctccttcctgtctaagtaccaggacatcatcatcgaacaccagaaggtggtgaagggcaaccagaagagactggagagcctgcgggagctggccggcaaggaaaacctggaataccctagcgtgaccctgccacctcagcctcacaccaaggagggcgttgatgcctacaacgaagtgatcgcccgggtgcgaatgtgggtgaacctgaacctgtggcagaagctgaagctaagcagagatgatgccaagcctctgctgagactgaagggattcccttcctttcctctggtcgagagacaggccaacgaagtggactggtgggacatggtgtgtaacgtgaagaagctgatcaacgagaaaaaggaggatggcaaggtgttttggcagaatctggctggctacaagagacaggaagccctgagaccatacctgagcagcgaggaagatcggaagaagggaaagaaattcgctcggtaccagctgggcgacctgctgctgcacctggaaaagaagcacggcgaggactggggaaaggtgtacgacgaggcctgggagcggattgacaagaaagtggaaggcctgagcaagcacatcaagctggaagaggaacggagaagcgaggacgcccagagcaaggccgccctgaccgactggctgcgggctaaggccagcttcgtgatcgagggcctgaaggaggccgacaaggacgagttctgcagatgcgagctgaagctgcagaagtggtacggggacctgcggggaaagcccttcgccatcgaagccgagaacagcatcctggacatcagcggcttcagcaagcagtacaactgtgccttcatctggcagaaggacggcgtgaagaagctgaacctgtacctgatcatcaactacttcaagggcggcaagctgcggttcaagaagatcaaacctgaagccttcgaagccaacagattctacaccgtgatcaacaaaaagagcggcgagatcgtgcccatggaggtgaacttcaacttcgacgaccccaacctgatcatcctgcctctggcctttggcaagagacagggcagagaattcatctggaacgacctgctgtccctggaaaccggcagcctgaagctggccaacggaagagtgatcgagaagacactgtacaacagaagaacccggcaggatgagcctgccctgttcgtggccctgaccttcgagcggcgggaggtcctggactcctccaatatcaaaccaatgaacctgatcggcgtggcaagaggcgaaaacatccccgccgtgatcgccctgaccgaccccgagggctgcccactgagccggtttaaggatagcctgggaaacccaacccacatcctgagaatcggcgagagctataaggagaagcagcggaccatccaggccaagaaggaggtggagcagcggagagccggcggctacagccggaagtacgccagcaaagccaagaatctggcagacgatatggtgagaaacaccgctagagatctgctgtactacgccgtgacccaggatgccatgctgatcttcgccaacctgagccggggcttcggccggcagggcaagcggaccttcatggccgagagacagtacacacggatggaggactggctgaccgccaagctggcctacgagggcctgagcaagacctacctgtccaagacactggcccagtacacctccaagacatgcagcaactgtgggtttaccatcaccagcgccgactacgacagggtgctggagaagctgaagaagacagcaacaggctggatgaccacaattaacggcaaggagctgaaggtggagggccagattacctactacaacagatacaagagacagaacgtagtcaaggacctgtccgtcgagctggatagactgagcgaagaatctgtgaacaacgacatctcctcctggacaaagggcagaagcggagaagctctgagcctcctgaagaaaagattctcccatagacccgtgcaggagaagttcgtgtgcctgaactgcggcttcgagacacacgcagccgagcaagccgccctgaacatcgccagatcctggctgttcctgcggagccaggagtacaagaaataccagacaaacaagacaaccggcaacaccgataagagagccttcgtcgagacctggcagtccttttaccggaagaagcttaaggaggtgtggaaacctgccgtgcggtctggcggatctggcggaggctccaccagccccaagaaaaagagaaaagtctaagctgccttctgcggggcttgccttctggccatgcccttcttctctcccttgcacctgtacctcttggtctttgaataaagcctgagtaggaaggctagcaaaaaaaaaaaaaaaaaaaaaaaaaaaaaaaaaaaaaaaaaaaaaaaaaaaaaaaaaaaaaaaaaaaaaaaaaaaaaaaagcccagccggctccccaacctctaccgaggagggcacctctgagtccgccacccccgagagcggccctggcacctccaccgagcccagcgagggcagcgcacccggcagccctgccggcagccccacctccacagaggagggaaccagcaccgagcccagcgaaggcagcgccccaggcaccagcaccgagcctagtgagcaggagattaaacggatcaacaagatcagaagaagacttgtgaaagacagcaacaccaagaaggccggcaagacaggccccatgaaaaccctgctggttagagtgatgacacccgatctgagagagcggctggaaaacctgagaaagaagcctgaaaatatcccccagcccatcagcaatacatctagagccaacctgaataagctgctgaccgattacaccgaaatgaagaaggcgatcctgcatgtgtactgggaagagttccagaaggaccctgtgggcctgatgagccgggtggcccagcctgccagcaagaagatcgatcagaacaagctgaaacctgagatggacgagaagggcaacctgaccaccgccggctttgcctgctctcagtgtggccagcccctgttcgtgtacaagctggagcaggtgtctgagaagggcaaggcttacaccaactacttcggacggtgcaatgtggccgagcacgaaaagctgatcctgctggcccagctgaagcccgagaaggatagcgacgaagccgtgacatatagcctgggaaagtttgggcagagggccctggatttctacagcattcatgtgaccaaggagtccacccaccccgtgaagcccctggcccagatcgccggaaacagatacgcctccggacctgtgggaaaggccctgagcgacgcatgtatgggcacaatcgcctccttcctgtctaagtaccaggacatcatcatcgaacaccagaaggtggtgaagggcaaccagaagagactggagagcctgcgggagctggccggcaaggaaaacctggaataccctagcgtgaccctgccacctcagcctcacaccaaggagggcgttgatgcctacaacgaagtgatcgcccgggtgcgaatgtgggtgaacctgaacctgtggcagaagctgaagctaagcagagatgatgccaagcctctgctgagactgaagggattcccttcctttcctctggtcgagagacaggccaacgaagtggactggtgggacatggtgtgtaacgtgaagaagctgatcaacgagaaaaaggaggatggcaaggtgttttggcagaatctggctggctacaagagacaggaagccctgagaccatacctgagcagcgaggaagatcggaagaagggaaagaaattcgctcggtaccagctgggcgacctgctgctgcacctggaaaagaagcacggcgaggactggggaaaggtgtacgacgaggcctgggagcggattgacaagaaagtggaaggcctgagcaagcacatcaagctggaagaggaacggagaagcgaggacgcccagagcaaggccgccctgaccgactggctgcgggctaaggccagcttcgtgatcgagggcctgaaggaggccgacaaggacgagttctgcagatgcgagctgaagctgcagaagtggtacggggacctgcggggaaagcccttcgccatcgaagccgagaacagcatcctggacatcagcggcttcagcaagcagtacaactgtgccttcatctggcagaaggacggcgtgaagaagctgaacctgtacctgatcatcaactacttcaagggcggcaagctgcggttcaagaagatcaaacctgaagccttcgaagccaacagattctacaccgtgatcaacaaaaagagcggcgagatcgtgcccatggaggtgaacttcaacttcgacgaccccaacctgatcatcctgcctctggcctttggcaagagacagggcagagaattcatctggaacgacctgctgtccctggaaaccggcagcctgaagctggccaacggaagagtgatcgagaagacactgtacaacagaagaacccggcaggatgagcctgccctgttcgtggccctgaccttcgagcggcgggaggtcctggactcctccaatatcaaaccaatgaacctgatcggcgtggcaagaggcgaaaacatccccgccgtgatcgccctgaccgaccccgagggctgcccactgagccggtttaaggatagcctgggaaacccaacccacatcctgagaatcggcgagagctataaggagaagcagcggaccatccaggccaagaaggaggtggagcagcggagagccggcggctacagccggaagtacgccagcaaagccaagaatctggcagacgatatggtgagaaacaccgctagagatctgctgtactacgccgtgacccaggatgccatgctgatcttcgccaacctgagccggggcttcggccggcagggcaagcggaccttcatggccgagagacagtacacacggatggaggactggctgaccgccaagctggcctacgagggcctgagcaagacctacctgtccaagacactggcccagtacacctccaagacatgcagcaactgtgggtttaccatcaccagcgccgactacgacagggtgctggagaagctgaagaagacagcaacaggctggatgaccacaattaacggcaaggagctgaaggtggagggccagattacctactacaacagatacaagagacagaacgtagtcaaggacctgtccgtcgagctggatagactgagcgaagaatctgtgaacaacgacatctcctcctggacaaagggcagaagcggagaagctctgagcctcctgaagaaaagattctcccatagacccgtgcaggagaagttcgtgtgcctgaactgcggcttcgagacacacgcagccgagcaagccgccctgaacatcgccagatcctggctgttcctgcggagccaggagtacaagaaataccagacaaacaagacaaccggcaacaccgataagagagccttcgtcgagacctggcagtccttttaccggaagaagcttaaggaggtgtggaaacctgccgtgcggtctggcggatctggcggaggctccaccagccccaagaaaaagagaaaagtctaagctgccttctgcggggcttgccttctggccatgcccttcttctctcccttgcacctgtacctcttggtctttgaataaagcctgagtaggaaggctagcaaaaaaaaaaaaaaaaaaaaaaaaaaaaaaaaaaaaaaaaaaaaaaaaaaaaaaaaaaaaaaaaaaaaaaaaaaaaaaaa

SEQ ID NO: 9680 - RNA, 8787 nt, synthetic construct
  source 1..8787: mol_type = other RNA
aggaaataagagagaaaagaagagtaagaagaaatataagagccaccatggcccctaagaagaagcgtaaagtgagccggatgaaccacgaccaggagttcgacccccctaaggtgtaccctcccgtccccgccgagaagagaaagcccatccgggtcctgagcctgttcgatggcatcgccaccggtctgctggtgctgaaggacctgggcatccaggtggataggtacattgcctccgaggtgtgcgaggactccatcaccgtgggaatggtgcgtcatcagggcaagatcatgtacgtgggcgacgtgcggagcgtgacacagaagcatatccaggagtggggccctttcgacctggtgatcggcggcagcccttgcaatgacctgagcatcgtgaacccagcccggaagggcctgtacgagggaaccggcagactgttcttcgagttttacagactgctgcacgacgcccggcctaaggaaggcgacgaccggcccttcttttggctgttcgagaatgtggtggccatgggagtcagcgacaagcgggatattagccggttcctggagagcaaccccgtgatgatcgatgccaaggaagtgagcgccgcccaccgggccagatacttctggggcaatctgcctggcatgaacagacccctggccagcaccgtgaacgacaagctggagctgcaggagtgcctggagcacggccggatcgccaagttcagcaaggtgagaaccatcaccacccgaagcaacagcatcaaacaaggcaaggaccagcactttcctgtgttcatgaacgagaaggaggacatcctgtggtgtaccgagatggagagagtgttcgggttcccagtccactacacagatgtcagcaacatgtctagactggccagacagagactgctgggaagaagctggtccgtccctgtgatcagacacctgttcgcccctctgaaggagtacttcgcctgcgtgagcagcggcaacagcaacgccaacagccggggccccagcttctctagcggcctggtgccactgtccctgagagggagccacatgggccccatggagatctacaaaaccgtgagcgcctggaagcggcagcctgtgcgcgtgctgagcctgtttcggaatatcgataaagtcctgaaaagcctgggattcctggagagcggctctggctccggcggtggcaccctgaagtacgtggaggatgtgacaaacgtggtcagacgggatgtggagaagtggggccccttcgatctggtgtacggcagcacccaacccctgggcagctcttgtgaccggtgccctggctggtacatgtttcagttccaccggatcctgcagtacgccctgccgagacaggagtcccagcggccattcttttggattttcatggacaacttgctgctgaccgaggatgaccaggaaactaccactcggttcctgcagaccgaagccgtgaccctgcaggacgtgagaggccgggactaccagaacgccatgcgggtgtggtccaacatccctggactgaaaagcaagcacgcacctctgacccctaaagaagaggagtacctgcaggcccaggtgcggagcagaagcaagctggacgcccctaaggtggatctgctggtgaagaattgcctcctgcccctgagagagtacttcaagtatttcagccagaatagtctgcccctgggaggcagcggcggcggcagccaggtgagcgtgaccttcgaggacgtggccgtgctgttcaccagggacgagtggaagaagctggtgcccagccagaggagcctgtacagggaggtgatgctggagaactacagcaacctggccagcctggccggcttccccttcaccaagcccaaggtgatcagcctgctgcagcagggcgaggacccctggaaggtggaggaggagggccccggcggcttcagcctgggcctgaagtgcggcggcccaagcagcggcgcccctcctcccagcggcggcaggcggcccaagcagcggcgcccctcctcccagcggcggcagcccagccggctccccaacctctaccgaggagggcacctctgagtccgccacccccgagagcggccctggcacctccaccgagcccagcgagggcagcgcacccggcagccctgccggcagccccacctccacagaggagggaaccagcaccgagcccagcgaaggcagcgccccaggcaccagcaccgagcctagtgagcaggagattaaacggatcaacaagatcagaagaagacttgtgaaagacagcaacaccaagaaggccggcaagacaggccccatgaaaaccctgctggttagagtgatgacacccgatctgagagagcggctggaaaacctgagaaagaagcctgaaaatatcccccagcccatcagcaatacatctagagccaacctgaataagctgctgaccgattacaccgaaatgaagaaggcgatcctgcatgtgtactgggaagagttccagaaggaccctgtgggcctgatgagccgggtggcccagcctgccagcaagaagatcgatcagaacaagctgaaacctgagatggacgagaagggcaacctgaccaccgccggctttgcctgctctcagtgtggccagcccctgttcgtgtacaagctggagcaggtgtctgagaagggcaaggcttacaccaactacttcggacggtgcaatgtggccgagcacgaaaagctgatcctgctggcccagctgaagcccgagaaggatagcgacgaagccgtgacatatagcctgggaaagtttgggcagagggccctggatttctacagcattcatgtgaccaaggagtccacccaccccgtgaagcccctggcccagatcgccggaaacagatacgcctccggacctgtgggaaaggccctgagcgacgcatgtatgggcacaatcgcctccttcctgtctaagtaccaggacatcatcatcgaacaccagaaggtggtgaagggcaaccagaagagactggagagcctgcgggagctggccggcaaggaaaacctggaataccctagcgtgaccctgccacctcagcctcacaccaaggagggcgttgatgcctacaacgaagtgatcgcccgggtgcgaatgtgggtgaacctgaacctgtggcagaagctgaagctaagcagagatgatgccaagcctctgctgagactgaagggattcccttcctttcctctggtcgagagacaggccaacgaagtggactggtgggacatggtgtgtaacgtgaagaagctgatcaacgagaaaaaggaggatggcaaggtgttttggcagaatctggctggctacaagagacaggaagccctgagaccatacctgagcagcgaggaagatcggaagaagggaaagaaattcgctcggtaccagctgggcgacctgctgctgcacctggaaaagaagcacggcgaggactggggaaaggtgtacgacgaggcctgggagcggattgacaagaaagtggaaggcctgagcaagcacatcaagctggaagaggaacggagaagcgaggacgcccagagcaaggccgccctgaccgactggctgcgggctaaggccagcttcgtgatcgagggcctgaaggaggccgacaaggacgagttctgcagatgcgagctgaagctgcagaagtggtacggggacctgcggggaaagcccttcgccatcgaagccgagaacagcatcctggacatcagcggcttcagcaagcagtacaactgtgccttcatctggcagaaggacggcgtgaagaagctgaacctgtacctgatcatcaactacttcaagggcggcaagctgcggttcaagaagatcaaacctgaagccttcgaagccaacagattctacaccgtgatcaacaaaaagagcggcgagatcgtgcccatggaggtgaacttcaacttcgacgaccccaacctgatcatcctgcctctggcctttggcaagagacagggcagagaattcatctggaacgacctgctgtccctggaaaccggcagcctgaagctggccaacggaagagtgatcgagaagacactgtacaacagaagaacccggcaggatgagcctgccctgttcgtggccctgaccttcgagcggcgggaggtcctggactcctccaatatcaaaccaatgaacctgatcggcgtggcaagaggcgaaaacatccccgccgtgatcgccctgaccgaccccgagggctgcccactgagccggtttaaggatagcctgggaaacccaacccacatcctgagaatcggcgagagctataaggagaagcagcggaccatccaggccaagaaggaggtggagcagcggagagccggcggctacagccggaagtacgccagcaaagccaagaatctggcagacgatatggtgagaaacaccgctagagatctgctgtactacgccgtgacccaggatgccatgctgatcttcgccaacctgagccggggcttcggccggcagggcaagcggaccttcatggccgagagacagtacacacggatggaggactggctgaccgccaagctggcctacgagggcctgagcaagacctacctgtccaagacactggcccagtacacctccaagacatgcagcaactgtgggtttaccatcaccagcgccgactacgacagggtgctggagaagctgaagaagacagcaacaggctggatgaccacaattaacggcaaggagctgaaggtggagggccagattacctactacaacagatacaagagacagaacgtagtcaaggacctgtccgtcgagctggatagactgagcgaagaatctgtgaacaacgacatctcctcctggacaaagggcagaagcggagaagctctgagcctcctgaagaaaagattctcccatagacccgtgcaggagaagttcgtgtgcctgaactgcggcttcgagacacacgcagccgagcaagccgccctgaacatcgccagatcctggctgttcctgcggagccaggagtacaagaaataccagacaaacaagacaaccggcaacaccgataagagagccttcgtcgagacctggcagtccttttaccggaagaagcttaaggaggtgtggaaacctgccgtgcggtctggcggatctggcggaggctccaccagccccaagaaaaagagaaaagtctaagctgccttctgcggggcttgccttctggccatgcccttcttctctcccttgcacctgtacctcttggtctttgaataaagcctgagtaggaaggctagcaaaaaaaaaaaaaaaaaaaaaaaaaaaaaaaaaaaaaaaaaaaaaaaaaaaaaaaaaaaaaaaaaaaaaaaaaaaaaaaagcccagccggctccccaacctctaccgaggagggcacctctgagtccgccacccccgagagcggccctggcacctccaccgagcccagcgagggcagcgcacccggcagccctgccggcagccccacctccacagaggagggaaccagcaccgagcccagcgaaggcagcgccccaggcaccagcaccgagcctagtgagcaggagattaaacggatcaacaagatcagaagaagacttgtgaaagacagcaacaccaagaaggccggcaagacaggccccatgaaaaccctgctggttagagtgatgacacccgatctgagagagcggctggaaaacctgagaaagaagcctgaaaatatcccccagcccatcagcaatacatctagagccaacctgaataagctgctgaccgattacaccgaaatgaagaaggcgatcctgcatgtgtactgggaagagttccagaaggaccctgtgggcctgatgagccgggtggcccagcctgccagcaagaagatcgatcagaacaagctgaaacctgagatggacgagaagggcaacctgaccaccgccggctttgcctgctctcagtgtggccagcccctgttcgtgtacaagctggagcaggtgtctgagaagggcaaggcttacaccaactacttcggacggtgcaatgtggccgagcacgaaaagctgatcctgctggcccagctgaagcccgagaaggatagcgacgaagccgtgacatatagcctgggaaagtttgggcagagggccctggatttctacagcattcatgtgaccaaggagtccacccaccccgtgaagcccctggcccagatcgccggaaacagatacgcctccggacctgtgggaaaggccctgagcgacgcatgtatgggcacaatcgcctccttcctgtctaagtaccaggacatcatcatcgaacaccagaaggtggtgaagggcaaccagaagagactggagagcctgcgggagctggccggcaaggaaaacctggaataccctagcgtgaccctgccacctcagcctcacaccaaggagggcgttgatgcctacaacgaagtgatcgcccgggtgcgaatgtgggtgaacctgaacctgtggcagaagctgaagctaagcagagatgatgccaagcctctgctgagactgaagggattcccttcctttcctctggtcgagagacaggccaacgaagtggactggtgggacatggtgtgtaacgtgaagaagctgatcaacgagaaaaaggaggatggcaaggtgttttggcagaatctggctggctacaagagacaggaagccctgagaccatacctgagcagcgaggaagatcggaagaagggaaagaaattcgctcggtaccagctgggcgacctgctgctgcacctggaaaagaagcacggcgaggactggggaaaggtgtacgacgaggcctgggagcggattgacaagaaagtggaaggcctgagcaagcacatcaagctggaagaggaacggagaagcgaggacgcccagagcaaggccgccctgaccgactggctgcgggctaaggccagcttcgtgatcgagggcctgaaggaggccgacaaggacgagttctgcagatgcgagctgaagctgcagaagtggtacggggacctgcggggaaagcccttcgccatcgaagccgagaacagcatcctggacatcagcggcttcagcaagcagtacaactgtgccttcatctggcagaaggacggcgtgaagaagctgaacctgtacctgatcatcaactacttcaagggcggcaagctgcggttcaagaagatcaaacctgaagccttcgaagccaacagattctacaccgtgatcaacaaaaagagcggcgagatcgtgcccatggaggtgaacttcaacttcgacgaccccaacctgatcatcctgcctctggcctttggcaagagacagggcagagaattcatctggaacgacctgctgtccctggaaaccggcagcctgaagctggccaacggaagagtgatcgagaagacactgtacaacagaagaacccggcaggatgagcctgccctgttcgtggccctgaccttcgagcggcgggaggtcctggactcctccaatatcaaaccaatgaacctgatcggcgtggcaagaggcgaaaacatccccgccgtgatcgccctgaccgaccccgagggctgcccactgagccggtttaaggatagcctgggaaacccaacccacatcctgagaatcggcgagagctataaggagaagcagcggaccatccaggccaagaaggaggtggagcagcggagagccggcggctacagccggaagtacgccagcaaagccaagaatctggcagacgatatggtgagaaacaccgctagagatctgctgtactacgccgtgacccaggatgccatgctgatcttcgccaacctgagccggggcttcggccggcagggcaagcggaccttcatggccgagagacagtacacacggatggaggactggctgaccgccaagctggcctacgagggcctgagcaagacctacctgtccaagacactggcccagtacacctccaagacatgcagcaactgtgggtttaccatcaccagcgccgactacgacagggtgctggagaagctgaagaagacagcaacaggctggatgaccacaattaacggcaaggagctgaaggtggagggccagattacctactacaacagatacaagagacagaacgtagtcaaggacctgtccgtcgagctggatagactgagcgaagaatctgtgaacaacgacatctcctcctggacaaagggcagaagcggagaagctctgagcctcctgaagaaaagattctcccatagacccgtgcaggagaagttcgtgtgcctgaactgcggcttcgagacacacgcagccgagcaagccgccctgaacatcgccagatcctggctgttcctgcggagccaggagtacaagaaataccagacaaacaagacaaccggcaacaccgataagagagccttcgtcgagacctggcagtccttttaccggaagaagcttaaggaggtgtggaaacctgccgtgcggtctggcggatctggcggaggctccaccagccccaagaaaaagagaaaagtctaagctgccttctgcggggcttgccttctggccatgcccttcttctctcccttgcacctgtacctcttggtctttgaataaagcctgagtaggaaggctagcaaaaaaaaaaaaaaaaaaaaaaaaaaaaaaaaaaaaaaaaaaaaaaaaaaaaaaaaaaaaaaaaaaaaaaaaaaaaaaaa

SEQ ID NO: 9681 - RNA, 8787 nt, synthetic construct
  source 1..8787: mol_type = other RNA
aggaaataagagagaaaagaagagtaagaagaaatataagagccaccatggcccctaagaagaagcgtaaagtgagccggatgaaccacgaccaggagttcgacccccctaaggtgtaccctcccgtccccgccgagaagagaaagcccatccgggtcctgagcctgttcgatggcatcgccaccggtctgctggtgctgaaggacctgggcatccaggtggataggtacattgcctccgaggtgtgcgaggactccatcaccgtgggaatggtgcgtcatcagggcaagatcatgtacgtgggcgacgtgcggagcgtgacacagaagcatatccaggagtggggccctttcgacctggtgatcggcggcagcccttgcaatgacctgagcatcgtgaacccagcccggaagggcctgtacgagggaaccggcagactgttcttcgagttttacagactgctgcacgacgcccggcctaaggaaggcgacgaccggcccttcttttggctgttcgagaatgtggtggccatgggagtcagcgacaagcgggatattagccggttcctggagagcaaccccgtgatgatcgatgccaaggaagtgagcgccgcccaccgggccagatacttctggggcaatctgcctggcatgaacagacccctggccagcaccgtgaacgacaagctggagctgcaggagtgcctggagcacggccggatcgccaagttcagcaaggtgagaaccatcaccacccgaagcaacagcatcaaacaaggcaaggaccagcactttcctgtgttcatgaacgagaaggaggacatcctgtggtgtaccgagatggagagagtgttcgggttcccagtccactacacagatgtcagcaacatgtctagactggccagacagagactgctgggaagaagctggtccgtccctgtgatcagacacctgttcgcccctctgaaggagtacttcgcctgcgtgagcagcggcaacagcaacgccaacagccggggccccagcttctctagcggcctggtgccactgtccctgagagggagccacatgggccccatggagatctacaaaaccgtgagcgcctggaagcggcagcctgtgcgcgtgctgagcctgtttcggaatatcgataaagtcctgaaaagcctgggattcctggagagcggctctggctccggcggtggcaccctgaagtacgtggaggatgtgacaaacgtggtcagacgggatgtggagaagtggggccccttcgatctggtgtacggcagcacccaacccctgggcagctcttgtgaccggtgccctggctggtacatgtttcagttccaccggatcctgcagtacgccctgccgagacaggagtcccagcggccattcttttggattttcatggacaacttgctgctgaccgaggatgaccaggaaactaccactcggttcctgcagaccgaagccgtgaccctgcaggacgtgagaggccgggactaccagaacgccatgcgggtgtggtccaacatccctggactgaaaagcaagcacgcacctctgacccctaaagaagaggagtacctgcaggcccaggtgcggagcagaagcaagctggacgcccctaaggtggatctgctggtgaagaattgcctcctgcccctgagagagtacttcaagtatttcagccagaatagtctgcccctgggaggcagcggcggcggcttccaggtgcccgtgaccttcagggacgtggccgtgtacttctgcagggaggagtgggagtgcctgagccccagccagaggaccctgtacaggaacgtgatgctggagaacttcaggaacctgaacgagctgggctgctgcagcaggaggcccggcctgatcaccaggctggagcagtgggacgagccctgggtggacgactgggacaggagcgagttccccgacggccagaagagcttctgcggcggcccaagcagcggcgcccctcctcccagcggcggcaggcggcccaagcagcggcgcccctcctcccagcggcggcagcccagccggctccccaacctctaccgaggagggcacctctgagtccgccacccccgagagcggccctggcacctccaccgagcccagcgagggcagcgcacccggcagccctgccggcagccccacctccacagaggagggaaccagcaccgagcccagcgaaggcagcgccccaggcaccagcaccgagcctagtgagcaggagattaaacggatcaacaagatcagaagaagacttgtgaaagacagcaacaccaagaaggccggcaagacaggccccatgaaaaccctgctggttagagtgatgacacccgatctgagagagcggctggaaaacctgagaaagaagcctgaaaatatcccccagcccatcagcaatacatctagagccaacctgaataagctgctgaccgattacaccgaaatgaagaaggcgatcctgcatgtgtactgggaagagttccagaaggaccctgtgggcctgatgagccgggtggcccagcctgccagcaagaagatcgatcagaacaagctgaaacctgagatggacgagaagggcaacctgaccaccgccggctttgcctgctctcagtgtggccagcccctgttcgtgtacaagctggagcaggtgtctgagaagggcaaggcttacaccaactacttcggacggtgcaatgtggccgagcacgaaaagctgatcctgctggcccagctgaagcccgagaaggatagcgacgaagccgtgacatatagcctgggaaagtttgggcagagggccctggatttctacagcattcatgtgaccaaggagtccacccaccccgtgaagcccctggcccagatcgccggaaacagatacgcctccggacctgtgggaaaggccctgagcgacgcatgtatgggcacaatcgcctccttcctgtctaagtaccaggacatcatcatcgaacaccagaaggtggtgaagggcaaccagaagagactggagagcctgcgggagctggccggcaaggaaaacctggaataccctagcgtgaccctgccacctcagcctcacaccaaggagggcgttgatgcctacaacgaagtgatcgcccgggtgcgaatgtgggtgaacctgaacctgtggcagaagctgaagctaagcagagatgatgccaagcctctgctgagactgaagggattcccttcctttcctctggtcgagagacaggccaacgaagtggactggtgggacatggtgtgtaacgtgaagaagctgatcaacgagaaaaaggaggatggcaaggtgttttggcagaatctggctggctacaagagacaggaagccctgagaccatacctgagcagcgaggaagatcggaagaagggaaagaaattcgctcggtaccagctgggcgacctgctgctgcacctggaaaagaagcacggcgaggactggggaaaggtgtacgacgaggcctgggagcggattgacaagaaagtggaaggcctgagcaagcacatcaagctggaagaggaacggagaagcgaggacgcccagagcaaggccgccctgaccgactggctgcgggctaaggccagcttcgtgatcgagggcctgaaggaggccgacaaggacgagttctgcagatgcgagctgaagctgcagaagtggtacggggacctgcggggaaagcccttcgccatcgaagccgagaacagcatcctggacatcagcggcttcagcaagcagtacaactgtgccttcatctggcagaaggacggcgtgaagaagctgaacctgtacctgatcatcaactacttcaagggcggcaagctgcggttcaagaagatcaaacctgaagccttcgaagccaacagattctacaccgtgatcaacaaaaagagcggcgagatcgtgcccatggaggtgaacttcaacttcgacgaccccaacctgatcatcctgcctctggcctttggcaagagacagggcagagaattcatctggaacgacctgctgtccctggaaaccggcagcctgaagctggccaacggaagagtgatcgagaagacactgtacaacagaagaacccggcaggatgagcctgccctgttcgtggccctgaccttcgagcggcgggaggtcctggactcctccaatatcaaaccaatgaacctgatcggcgtggcaagaggcgaaaacatccccgccgtgatcgccctgaccgaccccgagggctgcccactgagccggtttaaggatagcctgggaaacccaacccacatcctgagaatcggcgagagctataaggagaagcagcggaccatccaggccaagaaggaggtggagcagcggagagccggcggctacagccggaagtacgccagcaaagccaagaatctggcagacgatatggtgagaaacaccgctagagatctgctgtactacgccgtgacccaggatgccatgctgatcttcgccaacctgagccggggcttcggccggcagggcaagcggaccttcatggccgagagacagtacacacggatggaggactggctgaccgccaagctggcctacgagggcctgagcaagacctacctgtccaagacactggcccagtacacctccaagacatgcagcaactgtgggtttaccatcaccagcgccgactacgacagggtgctggagaagctgaagaagacagcaacaggctggatgaccacaattaacggcaaggagctgaaggtggagggccagattacctactacaacagatacaagagacagaacgtagtcaaggacctgtccgtcgagctggatagactgagcgaagaatctgtgaacaacgacatctcctcctggacaaagggcagaagcggagaagctctgagcctcctgaagaaaagattctcccatagacccgtgcaggagaagttcgtgtgcctgaactgcggcttcgagacacacgcagccgagcaagccgccctgaacatcgccagatcctggctgttcctgcggagccaggagtacaagaaataccagacaaacaagacaaccggcaacaccgataagagagccttcgtcgagacctggcagtccttttaccggaagaagcttaaggaggtgtggaaacctgccgtgcggtctggcggatctggcggaggctccaccagccccaagaaaaagagaaaagtctaagctgccttctgcggggcttgccttctggccatgcccttcttctctcccttgcacctgtacctcttggtctttgaataaagcctgagtaggaaggctagcaaaaaaaaaaaaaaaaaaaaaaaaaaaaaaaaaaaaaaaaaaaaaaaaaaaaaaaaaaaaaaaaaaaaaaaaaaaaaaaagcccagccggctccccaacctctaccgaggagggcacctctgagtccgccacccccgagagcggccctggcacctccaccgagcccagcgagggcagcgcacccggcagccctgccggcagccccacctccacagaggagggaaccagcaccgagcccagcgaaggcagcgccccaggcaccagcaccgagcctagtgagcaggagattaaacggatcaacaagatcagaagaagacttgtgaaagacagcaacaccaagaaggccggcaagacaggccccatgaaaaccctgctggttagagtgatgacacccgatctgagagagcggctggaaaacctgagaaagaagcctgaaaatatcccccagcccatcagcaatacatctagagccaacctgaataagctgctgaccgattacaccgaaatgaagaaggcgatcctgcatgtgtactgggaagagttccagaaggaccctgtgggcctgatgagccgggtggcccagcctgccagcaagaagatcgatcagaacaagctgaaacctgagatggacgagaagggcaacctgaccaccgccggctttgcctgctctcagtgtggccagcccctgttcgtgtacaagctggagcaggtgtctgagaagggcaaggcttacaccaactacttcggacggtgcaatgtggccgagcacgaaaagctgatcctgctggcccagctgaagcccgagaaggatagcgacgaagccgtgacatatagcctgggaaagtttgggcagagggccctggatttctacagcattcatgtgaccaaggagtccacccaccccgtgaagcccctggcccagatcgccggaaacagatacgcctccggacctgtgggaaaggccctgagcgacgcatgtatgggcacaatcgcctccttcctgtctaagtaccaggacatcatcatcgaacaccagaaggtggtgaagggcaaccagaagagactggagagcctgcgggagctggccggcaaggaaaacctggaataccctagcgtgaccctgccacctcagcctcacaccaaggagggcgttgatgcctacaacgaagtgatcgcccgggtgcgaatgtgggtgaacctgaacctgtggcagaagctgaagctaagcagagatgatgccaagcctctgctgagactgaagggattcccttcctttcctctggtcgagagacaggccaacgaagtggactggtgggacatggtgtgtaacgtgaagaagctgatcaacgagaaaaaggaggatggcaaggtgttttggcagaatctggctggctacaagagacaggaagccctgagaccatacctgagcagcgaggaagatcggaagaagggaaagaaattcgctcggtaccagctgggcgacctgctgctgcacctggaaaagaagcacggcgaggactggggaaaggtgtacgacgaggcctgggagcggattgacaagaaagtggaaggcctgagcaagcacatcaagctggaagaggaacggagaagcgaggacgcccagagcaaggccgccctgaccgactggctgcgggctaaggccagcttcgtgatcgagggcctgaaggaggccgacaaggacgagttctgcagatgcgagctgaagctgcagaagtggtacggggacctgcggggaaagcccttcgccatcgaagccgagaacagcatcctggacatcagcggcttcagcaagcagtacaactgtgccttcatctggcagaaggacggcgtgaagaagctgaacctgtacctgatcatcaactacttcaagggcggcaagctgcggttcaagaagatcaaacctgaagccttcgaagccaacagattctacaccgtgatcaacaaaaagagcggcgagatcgtgcccatggaggtgaacttcaacttcgacgaccccaacctgatcatcctgcctctggcctttggcaagagacagggcagagaattcatctggaacgacctgctgtccctggaaaccggcagcctgaagctggccaacggaagagtgatcgagaagacactgtacaacagaagaacccggcaggatgagcctgccctgttcgtggccctgaccttcgagcggcgggaggtcctggactcctccaatatcaaaccaatgaacctgatcggcgtggcaagaggcgaaaacatccccgccgtgatcgccctgaccgaccccgagggctgcccactgagccggtttaaggatagcctgggaaacccaacccacatcctgagaatcggcgagagctataaggagaagcagcggaccatccaggccaagaaggaggtggagcagcggagagccggcggctacagccggaagtacgccagcaaagccaagaatctggcagacgatatggtgagaaacaccgctagagatctgctgtactacgccgtgacccaggatgccatgctgatcttcgccaacctgagccggggcttcggccggcagggcaagcggaccttcatggccgagagacagtacacacggatggaggactggctgaccgccaagctggcctacgagggcctgagcaagacctacctgtccaagacactggcccagtacacctccaagacatgcagcaactgtgggtttaccatcaccagcgccgactacgacagggtgctggagaagctgaagaagacagcaacaggctggatgaccacaattaacggcaaggagctgaaggtggagggccagattacctactacaacagatacaagagacagaacgtagtcaaggacctgtccgtcgagctggatagactgagcgaagaatctgtgaacaacgacatctcctcctggacaaagggcagaagcggagaagctctgagcctcctgaagaaaagattctcccatagacccgtgcaggagaagttcgtgtgcctgaactgcggcttcgagacacacgcagccgagcaagccgccctgaacatcgccagatcctggctgttcctgcggagccaggagtacaagaaataccagacaaacaagacaaccggcaacaccgataagagagccttcgtcgagacctggcagtccttttaccggaagaagcttaaggaggtgtggaaacctgccgtgcggtctggcggatctggcggaggctccaccagccccaagaaaaagagaaaagtctaagctgccttctgcggggcttgccttctggccatgcccttcttctctcccttgcacctgtacctcttggtctttgaataaagcctgagtaggaaggctagcaaaaaaaaaaaaaaaaaaaaaaaaaaaaaaaaaaaaaaaaaaaaaaaaaaaaaaaaaaaaaaaaaaaaaaaaaaaaaaaa

SEQ ID NO: 9682 - RNA, 8787 nt, synthetic construct
  source 1..8787: mol_type = other RNA
aggaaataagagagaaaagaagagtaagaagaaatataagagccaccatggcccctaagaagaagcgtaaagtgagccggatgaaccacgaccaggagttcgacccccctaaggtgtaccctcccgtccccgccgagaagagaaagcccatccgggtcctgagcctgttcgatggcatcgccaccggtctgctggtgctgaaggacctgggcatccaggtggataggtacattgcctccgaggtgtgcgaggactccatcaccgtgggaatggtgcgtcatcagggcaagatcatgtacgtgggcgacgtgcggagcgtgacacagaagcatatccaggagtggggccctttcgacctggtgatcggcggcagcccttgcaatgacctgagcatcgtgaacccagcccggaagggcctgtacgagggaaccggcagactgttcttcgagttttacagactgctgcacgacgcccggcctaaggaaggcgacgaccggcccttcttttggctgttcgagaatgtggtggccatgggagtcagcgacaagcgggatattagccggttcctggagagcaaccccgtgatgatcgatgccaaggaagtgagcgccgcccaccgggccagatacttctggggcaatctgcctggcatgaacagacccctggccagcaccgtgaacgacaagctggagctgcaggagtgcctggagcacggccggatcgccaagttcagcaaggtgagaaccatcaccacccgaagcaacagcatcaaacaaggcaaggaccagcactttcctgtgttcatgaacgagaaggaggacatcctgtggtgtaccgagatggagagagtgttcgggttcccagtccactacacagatgtcagcaacatgtctagactggccagacagagactgctgggaagaagctggtccgtccctgtgatcagacacctgttcgcccctctgaaggagtacttcgcctgcgtgagcagcggcaacagcaacgccaacagccggggccccagcttctctagcggcctggtgccactgtccctgagagggagccacatgggccccatggagatctacaaaaccgtgagcgcctggaagcggcagcctgtgcgcgtgctgagcctgtttcggaatatcgataaagtcctgaaaagcctgggattcctggagagcggctctggctccggcggtggcaccctgaagtacgtggaggatgtgacaaacgtggtcagacgggatgtggagaagtggggccccttcgatctggtgtacggcagcacccaacccctgggcagctcttgtgaccggtgccctggctggtacatgtttcagttccaccggatcctgcagtacgccctgccgagacaggagtcccagcggccattcttttggattttcatggacaacttgctgctgaccgaggatgaccaggaaactaccactcggttcctgcagaccgaagccgtgaccctgcaggacgtgagaggccgggactaccagaacgccatgcgggtgtggtccaacatccctggactgaaaagcaagcacgcacctctgacccctaaagaagaggagtacctgcaggcccaggtgcggagcagaagcaagctggacgcccctaaggtggatctgctggtgaagaattgcctcctgcccctgagagagtacttcaagtatttcagccagaatagtctgcccctgggaggcagcggcggcggcagcgtgaccttcgaggacgtggccgtgtacttcagctgggaggagtgggccctgctggacgaggcccagaggtgcctgtaccacgacgtgatgctggagaacttcgccctgaccagcagcctgggctgctggcacggcgccgaggacaagggcgcccccagcgagaagagcatcagcgtggagggcgtgagccagatcaagaccctgaaggccgacagctgcccccagaagggccagcccttcggcggcccaagcagcggcgcccctcctcccagcggcggcaggcggcccaagcagcggcgcccctcctcccagcggcggcagcccagccggctccccaacctctaccgaggagggcacctctgagtccgccacccccgagagcggccctggcacctccaccgagcccagcgagggcagcgcacccggcagccctgccggcagccccacctccacagaggagggaaccagcaccgagcccagcgaaggcagcgccccaggcaccagcaccgagcctagtgagcaggagattaaacggatcaacaagatcagaagaagacttgtgaaagacagcaacaccaagaaggccggcaagacaggccccatgaaaaccctgctggttagagtgatgacacccgatctgagagagcggctggaaaacctgagaaagaagcctgaaaatatcccccagcccatcagcaatacatctagagccaacctgaataagctgctgaccgattacaccgaaatgaagaaggcgatcctgcatgtgtactgggaagagttccagaaggaccctgtgggcctgatgagccgggtggcccagcctgccagcaagaagatcgatcagaacaagctgaaacctgagatggacgagaagggcaacctgaccaccgccggctttgcctgctctcagtgtggccagcccctgttcgtgtacaagctggagcaggtgtctgagaagggcaaggcttacaccaactacttcggacggtgcaatgtggccgagcacgaaaagctgatcctgctggcccagctgaagcccgagaaggatagcgacgaagccgtgacatatagcctgggaaagtttgggcagagggccctggatttctacagcattcatgtgaccaaggagtccacccaccccgtgaagcccctggcccagatcgccggaaacagatacgcctccggacctgtgggaaaggccctgagcgacgcatgtatgggcacaatcgcctccttcctgtctaagtaccaggacatcatcatcgaacaccagaaggtggtgaagggcaaccagaagagactggagagcctgcgggagctggccggcaaggaaaacctggaataccctagcgtgaccctgccacctcagcctcacaccaaggagggcgttgatgcctacaacgaagtgatcgcccgggtgcgaatgtgggtgaacctgaacctgtggcagaagctgaagctaagcagagatgatgccaagcctctgctgagactgaagggattcccttcctttcctctggtcgagagacaggccaacgaagtggactggtgggacatggtgtgtaacgtgaagaagctgatcaacgagaaaaaggaggatggcaaggtgttttggcagaatctggctggctacaagagacaggaagccctgagaccatacctgagcagcgaggaagatcggaagaagggaaagaaattcgctcggtaccagctgggcgacctgctgctgcacctggaaaagaagcacggcgaggactggggaaaggtgtacgacgaggcctgggagcggattgacaagaaagtggaaggcctgagcaagcacatcaagctggaagaggaacggagaagcgaggacgcccagagcaaggccgccctgaccgactggctgcgggctaaggccagcttcgtgatcgagggcctgaaggaggccgacaaggacgagttctgcagatgcgagctgaagctgcagaagtggtacggggacctgcggggaaagcccttcgccatcgaagccgagaacagcatcctggacatcagcggcttcagcaagcagtacaactgtgccttcatctggcagaaggacggcgtgaagaagctgaacctgtacctgatcatcaactacttcaagggcggcaagctgcggttcaagaagatcaaacctgaagccttcgaagccaacagattctacaccgtgatcaacaaaaagagcggcgagatcgtgcccatggaggtgaacttcaacttcgacgaccccaacctgatcatcctgcctctggcctttggcaagagacagggcagagaattcatctggaacgacctgctgtccctggaaaccggcagcctgaagctggccaacggaagagtgatcgagaagacactgtacaacagaagaacccggcaggatgagcctgccctgttcgtggccctgaccttcgagcggcgggaggtcctggactcctccaatatcaaaccaatgaacctgatcggcgtggcaagaggcgaaaacatccccgccgtgatcgccctgaccgaccccgagggctgcccactgagccggtttaaggatagcctgggaaacccaacccacatcctgagaatcggcgagagctataaggagaagcagcggaccatccaggccaagaaggaggtggagcagcggagagccggcggctacagccggaagtacgccagcaaagccaagaatctggcagacgatatggtgagaaacaccgctagagatctgctgtactacgccgtgacccaggatgccatgctgatcttcgccaacctgagccggggcttcggccggcagggcaagcggaccttcatggccgagagacagtacacacggatggaggactggctgaccgccaagctggcctacgagggcctgagcaagacctacctgtccaagacactggcccagtacacctccaagacatgcagcaactgtgggtttaccatcaccagcgccgactacgacagggtgctggagaagctgaagaagacagcaacaggctggatgaccacaattaacggcaaggagctgaaggtggagggccagattacctactacaacagatacaagagacagaacgtagtcaaggacctgtccgtcgagctggatagactgagcgaagaatctgtgaacaacgacatctcctcctggacaaagggcagaagcggagaagctctgagcctcctgaagaaaagattctcccatagacccgtgcaggagaagttcgtgtgcctgaactgcggcttcgagacacacgcagccgagcaagccgccctgaacatcgccagatcctggctgttcctgcggagccaggagtacaagaaataccagacaaacaagacaaccggcaacaccgataagagagccttcgtcgagacctggcagtccttttaccggaagaagcttaaggaggtgtggaaacctgccgtgcggtctggcggatctggcggaggctccaccagccccaagaaaaagagaaaagtctaagctgccttctgcggggcttgccttctggccatgcccttcttctctcccttgcacctgtacctcttggtctttgaataaagcctgagtaggaaggctagcaaaaaaaaaaaaaaaaaaaaaaaaaaaaaaaaaaaaaaaaaaaaaaaaaaaaaaaaaaaaaaaaaaaaaaaaaaaaaaaagcccagccggctccccaacctctaccgaggagggcacctctgagtccgccacccccgagagcggccctggcacctccaccgagcccagcgagggcagcgcacccggcagccctgccggcagccccacctccacagaggagggaaccagcaccgagcccagcgaaggcagcgccccaggcaccagcaccgagcctagtgagcaggagattaaacggatcaacaagatcagaagaagacttgtgaaagacagcaacaccaagaaggccggcaagacaggccccatgaaaaccctgctggttagagtgatgacacccgatctgagagagcggctggaaaacctgagaaagaagcctgaaaatatcccccagcccatcagcaatacatctagagccaacctgaataagctgctgaccgattacaccgaaatgaagaaggcgatcctgcatgtgtactgggaagagttccagaaggaccctgtgggcctgatgagccgggtggcccagcctgccagcaagaagatcgatcagaacaagctgaaacctgagatggacgagaagggcaacctgaccaccgccggctttgcctgctctcagtgtggccagcccctgttcgtgtacaagctggagcaggtgtctgagaagggcaaggcttacaccaactacttcggacggtgcaatgtggccgagcacgaaaagctgatcctgctggcccagctgaagcccgagaaggatagcgacgaagccgtgacatatagcctgggaaagtttgggcagagggccctggatttctacagcattcatgtgaccaaggagtccacccaccccgtgaagcccctggcccagatcgccggaaacagatacgcctccggacctgtgggaaaggccctgagcgacgcatgtatgggcacaatcgcctccttcctgtctaagtaccaggacatcatcatcgaacaccagaaggtggtgaagggcaaccagaagagactggagagcctgcgggagctggccggcaaggaaaacctggaataccctagcgtgaccctgccacctcagcctcacaccaaggagggcgttgatgcctacaacgaagtgatcgcccgggtgcgaatgtgggtgaacctgaacctgtggcagaagctgaagctaagcagagatgatgccaagcctctgctgagactgaagggattcccttcctttcctctggtcgagagacaggccaacgaagtggactggtgggacatggtgtgtaacgtgaagaagctgatcaacgagaaaaaggaggatggcaaggtgttttggcagaatctggctggctacaagagacaggaagccctgagaccatacctgagcagcgaggaagatcggaagaagggaaagaaattcgctcggtaccagctgggcgacctgctgctgcacctggaaaagaagcacggcgaggactggggaaaggtgtacgacgaggcctgggagcggattgacaagaaagtggaaggcctgagcaagcacatcaagctggaagaggaacggagaagcgaggacgcccagagcaaggccgccctgaccgactggctgcgggctaaggccagcttcgtgatcgagggcctgaaggaggccgacaaggacgagttctgcagatgcgagctgaagctgcagaagtggtacggggacctgcggggaaagcccttcgccatcgaagccgagaacagcatcctggacatcagcggcttcagcaagcagtacaactgtgccttcatctggcagaaggacggcgtgaagaagctgaacctgtacctgatcatcaactacttcaagggcggcaagctgcggttcaagaagatcaaacctgaagccttcgaagccaacagattctacaccgtgatcaacaaaaagagcggcgagatcgtgcccatggaggtgaacttcaacttcgacgaccccaacctgatcatcctgcctctggcctttggcaagagacagggcagagaattcatctggaacgacctgctgtccctggaaaccggcagcctgaagctggccaacggaagagtgatcgagaagacactgtacaacagaagaacccggcaggatgagcctgccctgttcgtggccctgaccttcgagcggcgggaggtcctggactcctccaatatcaaaccaatgaacctgatcggcgtggcaagaggcgaaaacatccccgccgtgatcgccctgaccgaccccgagggctgcccactgagccggtttaaggatagcctgggaaacccaacccacatcctgagaatcggcgagagctataaggagaagcagcggaccatccaggccaagaaggaggtggagcagcggagagccggcggctacagccggaagtacgccagcaaagccaagaatctggcagacgatatggtgagaaacaccgctagagatctgctgtactacgccgtgacccaggatgccatgctgatcttcgccaacctgagccggggcttcggccggcagggcaagcggaccttcatggccgagagacagtacacacggatggaggactggctgaccgccaagctggcctacgagggcctgagcaagacctacctgtccaagacactggcccagtacacctccaagacatgcagcaactgtgggtttaccatcaccagcgccgactacgacagggtgctggagaagctgaagaagacagcaacaggctggatgaccacaattaacggcaaggagctgaaggtggagggccagattacctactacaacagatacaagagacagaacgtagtcaaggacctgtccgtcgagctggatagactgagcgaagaatctgtgaacaacgacatctcctcctggacaaagggcagaagcggagaagctctgagcctcctgaagaaaagattctcccatagacccgtgcaggagaagttcgtgtgcctgaactgcggcttcgagacacacgcagccgagcaagccgccctgaacatcgccagatcctggctgttcctgcggagccaggagtacaagaaataccagacaaacaagacaaccggcaacaccgataagagagccttcgtcgagacctggcagtccttttaccggaagaagcttaaggaggtgtggaaacctgccgtgcggtctggcggatctggcggaggctccaccagccccaagaaaaagagaaaagtctaagctgccttctgcggggcttgccttctggccatgcccttcttctctcccttgcacctgtacctcttggtctttgaataaagcctgagtaggaaggctagcaaaaaaaaaaaaaaaaaaaaaaaaaaaaaaaaaaaaaaaaaaaaaaaaaaaaaaaaaaaaaaaaaaaaaaaaaaaaaaaa

SEQ ID NO: 9683 - RNA, 8787 nt, synthetic construct
  source 1..8787: mol_type = other RNA
aggaaataagagagaaaagaagagtaagaagaaatataagagccaccatggcccctaagaagaagcgtaaagtgagccggatgaaccacgaccaggagttcgacccccctaaggtgtaccctcccgtccccgccgagaagagaaagcccatccgggtcctgagcctgttcgatggcatcgccaccggtctgctggtgctgaaggacctgggcatccaggtggataggtacattgcctccgaggtgtgcgaggactccatcaccgtgggaatggtgcgtcatcagggcaagatcatgtacgtgggcgacgtgcggagcgtgacacagaagcatatccaggagtggggccctttcgacctggtgatcggcggcagcccttgcaatgacctgagcatcgtgaacccagcccggaagggcctgtacgagggaaccggcagactgttcttcgagttttacagactgctgcacgacgcccggcctaaggaaggcgacgaccggcccttcttttggctgttcgagaatgtggtggccatgggagtcagcgacaagcgggatattagccggttcctggagagcaaccccgtgatgatcgatgccaaggaagtgagcgccgcccaccgggccagatacttctggggcaatctgcctggcatgaacagacccctggccagcaccgtgaacgacaagctggagctgcaggagtgcctggagcacggccggatcgccaagttcagcaaggtgagaaccatcaccacccgaagcaacagcatcaaacaaggcaaggaccagcactttcctgtgttcatgaacgagaaggaggacatcctgtggtgtaccgagatggagagagtgttcgggttcccagtccactacacagatgtcagcaacatgtctagactggccagacagagactgctgggaagaagctggtccgtccctgtgatcagacacctgttcgcccctctgaaggagtacttcgcctgcgtgagcagcggcaacagcaacgccaacagccggggccccagcttctctagcggcctggtgccactgtccctgagagggagccacatgggccccatggagatctacaaaaccgtgagcgcctggaagcggcagcctgtgcgcgtgctgagcctgtttcggaatatcgataaagtcctgaaaagcctgggattcctggagagcggctctggctccggcggtggcaccctgaagtacgtggaggatgtgacaaacgtggtcagacgggatgtggagaagtggggccccttcgatctggtgtacggcagcacccaacccctgggcagctcttgtgaccggtgccctggctggtacatgtttcagttccaccggatcctgcagtacgccctgccgagacaggagtcccagcggccattcttttggattttcatggacaacttgctgctgaccgaggatgaccaggaaactaccactcggttcctgcagaccgaagccgtgaccctgcaggacgtgagaggccgggactaccagaacgccatgcgggtgtggtccaacatccctggactgaaaagcaagcacgcacctctgacccctaaagaagaggagtacctgcaggcccaggtgcggagcagaagcaagctggacgcccctaaggtggatctgctggtgaagaattgcctcctgcccctgagagagtacttcaagtatttcagccagaatagtctgcccctgggaggcagcggcggcggcatggcccacctgatgatgttcagggacgtggccgtggacttcagccaggaggagtgggagtgcctggacctggagcagagggacctgtacagggacgtgatgctggagaactacagcaacatggtgagcctgggcctgtgcatctaccagcccgaggccttcagcctgctggagaagggcaaggacccctggaagatcctgagggacgagaccaggaggccctgccccgacatgcagagcaggggcggcccaagcagcggcgcccctcctcccagcggcggcaggcggcccaagcagcggcgcccctcctcccagcggcggcagcccagccggctccccaacctctaccgaggagggcacctctgagtccgccacccccgagagcggccctggcacctccaccgagcccagcgagggcagcgcacccggcagccctgccggcagccccacctccacagaggagggaaccagcaccgagcccagcgaaggcagcgccccaggcaccagcaccgagcctagtgagcaggagattaaacggatcaacaagatcagaagaagacttgtgaaagacagcaacaccaagaaggccggcaagacaggccccatgaaaaccctgctggttagagtgatgacacccgatctgagagagcggctggaaaacctgagaaagaagcctgaaaatatcccccagcccatcagcaatacatctagagccaacctgaataagctgctgaccgattacaccgaaatgaagaaggcgatcctgcatgtgtactgggaagagttccagaaggaccctgtgggcctgatgagccgggtggcccagcctgccagcaagaagatcgatcagaacaagctgaaacctgagatggacgagaagggcaacctgaccaccgccggctttgcctgctctcagtgtggccagcccctgttcgtgtacaagctggagcaggtgtctgagaagggcaaggcttacaccaactacttcggacggtgcaatgtggccgagcacgaaaagctgatcctgctggcccagctgaagcccgagaaggatagcgacgaagccgtgacatatagcctgggaaagtttgggcagagggccctggatttctacagcattcatgtgaccaaggagtccacccaccccgtgaagcccctggcccagatcgccggaaacagatacgcctccggacctgtgggaaaggccctgagcgacgcatgtatgggcacaatcgcctccttcctgtctaagtaccaggacatcatcatcgaacaccagaaggtggtgaagggcaaccagaagagactggagagcctgcgggagctggccggcaaggaaaacctggaataccctagcgtgaccctgccacctcagcctcacaccaaggagggcgttgatgcctacaacgaagtgatcgcccgggtgcgaatgtgggtgaacctgaacctgtggcagaagctgaagctaagcagagatgatgccaagcctctgctgagactgaagggattcccttcctttcctctggtcgagagacaggccaacgaagtggactggtgggacatggtgtgtaacgtgaagaagctgatcaacgagaaaaaggaggatggcaaggtgttttggcagaatctggctggctacaagagacaggaagccctgagaccatacctgagcagcgaggaagatcggaagaagggaaagaaattcgctcggtaccagctgggcgacctgctgctgcacctggaaaagaagcacggcgaggactggggaaaggtgtacgacgaggcctgggagcggattgacaagaaagtggaaggcctgagcaagcacatcaagctggaagaggaacggagaagcgaggacgcccagagcaaggccgccctgaccgactggctgcgggctaaggccagcttcgtgatcgagggcctgaaggaggccgacaaggacgagttctgcagatgcgagctgaagctgcagaagtggtacggggacctgcggggaaagcccttcgccatcgaagccgagaacagcatcctggacatcagcggcttcagcaagcagtacaactgtgccttcatctggcagaaggacggcgtgaagaagctgaacctgtacctgatcatcaactacttcaagggcggcaagctgcggttcaagaagatcaaacctgaagccttcgaagccaacagattctacaccgtgatcaacaaaaagagcggcgagatcgtgcccatggaggtgaacttcaacttcgacgaccccaacctgatcatcctgcctctggcctttggcaagagacagggcagagaattcatctggaacgacctgctgtccctggaaaccggcagcctgaagctggccaacggaagagtgatcgagaagacactgtacaacagaagaacccggcaggatgagcctgccctgttcgtggccctgaccttcgagcggcgggaggtcctggactcctccaatatcaaaccaatgaacctgatcggcgtggcaagaggcgaaaacatccccgccgtgatcgccctgaccgaccccgagggctgcccactgagccggtttaaggatagcctgggaaacccaacccacatcctgagaatcggcgagagctataaggagaagcagcggaccatccaggccaagaaggaggtggagcagcggagagccggcggctacagccggaagtacgccagcaaagccaagaatctggcagacgatatggtgagaaacaccgctagagatctgctgtactacgccgtgacccaggatgccatgctgatcttcgccaacctgagccggggcttcggccggcagggcaagcggaccttcatggccgagagacagtacacacggatggaggactggctgaccgccaagctggcctacgagggcctgagcaagacctacctgtccaagacactggcccagtacacctccaagacatgcagcaactgtgggtttaccatcaccagcgccgactacgacagggtgctggagaagctgaagaagacagcaacaggctggatgaccacaattaacggcaaggagctgaaggtggagggccagattacctactacaacagatacaagagacagaacgtagtcaaggacctgtccgtcgagctggatagactgagcgaagaatctgtgaacaacgacatctcctcctggacaaagggcagaagcggagaagctctgagcctcctgaagaaaagattctcccatagacccgtgcaggagaagttcgtgtgcctgaactgcggcttcgagacacacgcagccgagcaagccgccctgaacatcgccagatcctggctgttcctgcggagccaggagtacaagaaataccagacaaacaagacaaccggcaacaccgataagagagccttcgtcgagacctggcagtccttttaccggaagaagcttaaggaggtgtggaaacctgccgtgcggtctggcggatctggcggaggctccaccagccccaagaaaaagagaaaagtctaagctgccttctgcggggcttgccttctggccatgcccttcttctctcccttgcacctgtacctcttggtctttgaataaagcctgagtaggaaggctagcaaaaaaaaaaaaaaaaaaaaaaaaaaaaaaaaaaaaaaaaaaaaaaaaaaaaaaaaaaaaaaaaaaaaaaaaaaaaaaaagcccagccggctccccaacctctaccgaggagggcacctctgagtccgccacccccgagagcggccctggcacctccaccgagcccagcgagggcagcgcacccggcagccctgccggcagccccacctccacagaggagggaaccagcaccgagcccagcgaaggcagcgccccaggcaccagcaccgagcctagtgagcaggagattaaacggatcaacaagatcagaagaagacttgtgaaagacagcaacaccaagaaggccggcaagacaggccccatgaaaaccctgctggttagagtgatgacacccgatctgagagagcggctggaaaacctgagaaagaagcctgaaaatatcccccagcccatcagcaatacatctagagccaacctgaataagctgctgaccgattacaccgaaatgaagaaggcgatcctgcatgtgtactgggaagagttccagaaggaccctgtgggcctgatgagccgggtggcccagcctgccagcaagaagatcgatcagaacaagctgaaacctgagatggacgagaagggcaacctgaccaccgccggctttgcctgctctcagtgtggccagcccctgttcgtgtacaagctggagcaggtgtctgagaagggcaaggcttacaccaactacttcggacggtgcaatgtggccgagcacgaaaagctgatcctgctggcccagctgaagcccgagaaggatagcgacgaagccgtgacatatagcctgggaaagtttgggcagagggccctggatttctacagcattcatgtgaccaaggagtccacccaccccgtgaagcccctggcccagatcgccggaaacagatacgcctccggacctgtgggaaaggccctgagcgacgcatgtatgggcacaatcgcctccttcctgtctaagtaccaggacatcatcatcgaacaccagaaggtggtgaagggcaaccagaagagactggagagcctgcgggagctggccggcaaggaaaacctggaataccctagcgtgaccctgccacctcagcctcacaccaaggagggcgttgatgcctacaacgaagtgatcgcccgggtgcgaatgtgggtgaacctgaacctgtggcagaagctgaagctaagcagagatgatgccaagcctctgctgagactgaagggattcccttcctttcctctggtcgagagacaggccaacgaagtggactggtgggacatggtgtgtaacgtgaagaagctgatcaacgagaaaaaggaggatggcaaggtgttttggcagaatctggctggctacaagagacaggaagccctgagaccatacctgagcagcgaggaagatcggaagaagggaaagaaattcgctcggtaccagctgggcgacctgctgctgcacctggaaaagaagcacggcgaggactggggaaaggtgtacgacgaggcctgggagcggattgacaagaaagtggaaggcctgagcaagcacatcaagctggaagaggaacggagaagcgaggacgcccagagcaaggccgccctgaccgactggctgcgggctaaggccagcttcgtgatcgagggcctgaaggaggccgacaaggacgagttctgcagatgcgagctgaagctgcagaagtggtacggggacctgcggggaaagcccttcgccatcgaagccgagaacagcatcctggacatcagcggcttcagcaagcagtacaactgtgccttcatctggcagaaggacggcgtgaagaagctgaacctgtacctgatcatcaactacttcaagggcggcaagctgcggttcaagaagatcaaacctgaagccttcgaagccaacagattctacaccgtgatcaacaaaaagagcggcgagatcgtgcccatggaggtgaacttcaacttcgacgaccccaacctgatcatcctgcctctggcctttggcaagagacagggcagagaattcatctggaacgacctgctgtccctggaaaccggcagcctgaagctggccaacggaagagtgatcgagaagacactgtacaacagaagaacccggcaggatgagcctgccctgttcgtggccctgaccttcgagcggcgggaggtcctggactcctccaatatcaaaccaatgaacctgatcggcgtggcaagaggcgaaaacatccccgccgtgatcgccctgaccgaccccgagggctgcccactgagccggtttaaggatagcctgggaaacccaacccacatcctgagaatcggcgagagctataaggagaagcagcggaccatccaggccaagaaggaggtggagcagcggagagccggcggctacagccggaagtacgccagcaaagccaagaatctggcagacgatatggtgagaaacaccgctagagatctgctgtactacgccgtgacccaggatgccatgctgatcttcgccaacctgagccggggcttcggccggcagggcaagcggaccttcatggccgagagacagtacacacggatggaggactggctgaccgccaagctggcctacgagggcctgagcaagacctacctgtccaagacactggcccagtacacctccaagacatgcagcaactgtgggtttaccatcaccagcgccgactacgacagggtgctggagaagctgaagaagacagcaacaggctggatgaccacaattaacggcaaggagctgaaggtggagggccagattacctactacaacagatacaagagacagaacgtagtcaaggacctgtccgtcgagctggatagactgagcgaagaatctgtgaacaacgacatctcctcctggacaaagggcagaagcggagaagctctgagcctcctgaagaaaagattctcccatagacccgtgcaggagaagttcgtgtgcctgaactgcggcttcgagacacacgcagccgagcaagccgccctgaacatcgccagatcctggctgttcctgcggagccaggagtacaagaaataccagacaaacaagacaaccggcaacaccgataagagagccttcgtcgagacctggcagtccttttaccggaagaagcttaaggaggtgtggaaacctgccgtgcggtctggcggatctggcggaggctccaccagccccaagaaaaagagaaaagtctaagctgccttctgcggggcttgccttctggccatgcccttcttctctcccttgcacctgtacctcttggtctttgaataaagcctgagtaggaaggctagcaaaaaaaaaaaaaaaaaaaaaaaaaaaaaaaaaaaaaaaaaaaaaaaaaaaaaaaaaaaaaaaaaaaaaaaaaaaaaaaa

SEQ ID NO: 9684 - RNA, 8787 nt, synthetic construct
  source 1..8787: mol_type = other RNA
aggaaataagagagaaaagaagagtaagaagaaatataagagccaccatggcccctaagaagaagcgtaaagtgagccggatgaaccacgaccaggagttcgacccccctaaggtgtaccctcccgtccccgccgagaagagaaagcccatccgggtcctgagcctgttcgatggcatcgccaccggtctgctggtgctgaaggacctgggcatccaggtggataggtacattgcctccgaggtgtgcgaggactccatcaccgtgggaatggtgcgtcatcagggcaagatcatgtacgtgggcgacgtgcggagcgtgacacagaagcatatccaggagtggggccctttcgacctggtgatcggcggcagcccttgcaatgacctgagcatcgtgaacccagcccggaagggcctgtacgagggaaccggcagactgttcttcgagttttacagactgctgcacgacgcccggcctaaggaaggcgacgaccggcccttcttttggctgttcgagaatgtggtggccatgggagtcagcgacaagcgggatattagccggttcctggagagcaaccccgtgatgatcgatgccaaggaagtgagcgccgcccaccgggccagatacttctggggcaatctgcctggcatgaacagacccctggccagcaccgtgaacgacaagctggagctgcaggagtgcctggagcacggccggatcgccaagttcagcaaggtgagaaccatcaccacccgaagcaacagcatcaaacaaggcaaggaccagcactttcctgtgttcatgaacgagaaggaggacatcctgtggtgtaccgagatggagagagtgttcgggttcccagtccactacacagatgtcagcaacatgtctagactggccagacagagactgctgggaagaagctggtccgtccctgtgatcagacacctgttcgcccctctgaaggagtacttcgcctgcgtgagcagcggcaacagcaacgccaacagccggggccccagcttctctagcggcctggtgccactgtccctgagagggagccacatgggccccatggagatctacaaaaccgtgagcgcctggaagcggcagcctgtgcgcgtgctgagcctgtttcggaatatcgataaagtcctgaaaagcctgggattcctggagagcggctctggctccggcggtggcaccctgaagtacgtggaggatgtgacaaacgtggtcagacgggatgtggagaagtggggccccttcgatctggtgtacggcagcacccaacccctgggcagctcttgtgaccggtgccctggctggtacatgtttcagttccaccggatcctgcagtacgccctgccgagacaggagtcccagcggccattcttttggattttcatggacaacttgctgctgaccgaggatgaccaggaaactaccactcggttcctgcagaccgaagccgtgaccctgcaggacgtgagaggccgggactaccagaacgccatgcgggtgtggtccaacatccctggactgaaaagcaagcacgcacctctgacccctaaagaagaggagtacctgcaggcccaggtgcggagcagaagcaagctggacgcccctaaggtggatctgctggtgaagaattgcctcctgcccctgagagagtacttcaagtatttcagccagaatagtctgcccctgggaggcagcggcggcggcaggcccagggccgtgaagttcgccgacgtggccgtgtacttcagcaccgaggagtggggctgcctgaggcccgcccagagggccctgtacagggacgtgatgcaggagacctacggccacctgggcgccctgggctgcgccggccccaagcccgccctgatcagctggctggagaggaacaccgacgactgggagcccgccgccctggacccccaggagtgccccaggggcgtggccgtgcagggcggcccaagcagcggcgcccctcctcccagcggcggcaggcggcccaagcagcggcgcccctcctcccagcggcggcagcccagccggctccccaacctctaccgaggagggcacctctgagtccgccacccccgagagcggccctggcacctccaccgagcccagcgagggcagcgcacccggcagccctgccggcagccccacctccacagaggagggaaccagcaccgagcccagcgaaggcagcgccccaggcaccagcaccgagcctagtgagcaggagattaaacggatcaacaagatcagaagaagacttgtgaaagacagcaacaccaagaaggccggcaagacaggccccatgaaaaccctgctggttagagtgatgacacccgatctgagagagcggctggaaaacctgagaaagaagcctgaaaatatcccccagcccatcagcaatacatctagagccaacctgaataagctgctgaccgattacaccgaaatgaagaaggcgatcctgcatgtgtactgggaagagttccagaaggaccctgtgggcctgatgagccgggtggcccagcctgccagcaagaagatcgatcagaacaagctgaaacctgagatggacgagaagggcaacctgaccaccgccggctttgcctgctctcagtgtggccagcccctgttcgtgtacaagctggagcaggtgtctgagaagggcaaggcttacaccaactacttcggacggtgcaatgtggccgagcacgaaaagctgatcctgctggcccagctgaagcccgagaaggatagcgacgaagccgtgacatatagcctgggaaagtttgggcagagggccctggatttctacagcattcatgtgaccaaggagtccacccaccccgtgaagcccctggcccagatcgccggaaacagatacgcctccggacctgtgggaaaggccctgagcgacgcatgtatgggcacaatcgcctccttcctgtctaagtaccaggacatcatcatcgaacaccagaaggtggtgaagggcaaccagaagagactggagagcctgcgggagctggccggcaaggaaaacctggaataccctagcgtgaccctgccacctcagcctcacaccaaggagggcgttgatgcctacaacgaagtgatcgcccgggtgcgaatgtgggtgaacctgaacctgtggcagaagctgaagctaagcagagatgatgccaagcctctgctgagactgaagggattcccttcctttcctctggtcgagagacaggccaacgaagtggactggtgggacatggtgtgtaacgtgaagaagctgatcaacgagaaaaaggaggatggcaaggtgttttggcagaatctggctggctacaagagacaggaagccctgagaccatacctgagcagcgaggaagatcggaagaagggaaagaaattcgctcggtaccagctgggcgacctgctgctgcacctggaaaagaagcacggcgaggactggggaaaggtgtacgacgaggcctgggagcggattgacaagaaagtggaaggcctgagcaagcacatcaagctggaagaggaacggagaagcgaggacgcccagagcaaggccgccctgaccgactggctgcgggctaaggccagcttcgtgatcgagggcctgaaggaggccgacaaggacgagttctgcagatgcgagctgaagctgcagaagtggtacggggacctgcggggaaagcccttcgccatcgaagccgagaacagcatcctggacatcagcggcttcagcaagcagtacaactgtgccttcatctggcagaaggacggcgtgaagaagctgaacctgtacctgatcatcaactacttcaagggcggcaagctgcggttcaagaagatcaaacctgaagccttcgaagccaacagattctacaccgtgatcaacaaaaagagcggcgagatcgtgcccatggaggtgaacttcaacttcgacgaccccaacctgatcatcctgcctctggcctttggcaagagacagggcagagaattcatctggaacgacctgctgtccctggaaaccggcagcctgaagctggccaacggaagagtgatcgagaagacactgtacaacagaagaacccggcaggatgagcctgccctgttcgtggccctgaccttcgagcggcgggaggtcctggactcctccaatatcaaaccaatgaacctgatcggcgtggcaagaggcgaaaacatccccgccgtgatcgccctgaccgaccccgagggctgcccactgagccggtttaaggatagcctgggaaacccaacccacatcctgagaatcggcgagagctataaggagaagcagcggaccatccaggccaagaaggaggtggagcagcggagagccggcggctacagccggaagtacgccagcaaagccaagaatctggcagacgatatggtgagaaacaccgctagagatctgctgtactacgccgtgacccaggatgccatgctgatcttcgccaacctgagccggggcttcggccggcagggcaagcggaccttcatggccgagagacagtacacacggatggaggactggctgaccgccaagctggcctacgagggcctgagcaagacctacctgtccaagacactggcccagtacacctccaagacatgcagcaactgtgggtttaccatcaccagcgccgactacgacagggtgctggagaagctgaagaagacagcaacaggctggatgaccacaattaacggcaaggagctgaaggtggagggccagattacctactacaacagatacaagagacagaacgtagtcaaggacctgtccgtcgagctggatagactgagcgaagaatctgtgaacaacgacatctcctcctggacaaagggcagaagcggagaagctctgagcctcctgaagaaaagattctcccatagacccgtgcaggagaagttcgtgtgcctgaactgcggcttcgagacacacgcagccgagcaagccgccctgaacatcgccagatcctggctgttcctgcggagccaggagtacaagaaataccagacaaacaagacaaccggcaacaccgataagagagccttcgtcgagacctggcagtccttttaccggaagaagcttaaggaggtgtggaaacctgccgtgcggtctggcggatctggcggaggctccaccagccccaagaaaaagagaaaagtctaagctgccttctgcggggcttgccttctggccatgcccttcttctctcccttgcacctgtacctcttggtctttgaataaagcctgagtaggaaggctagcaaaaaaaaaaaaaaaaaaaaaaaaaaaaaaaaaaaaaaaaaaaaaaaaaaaaaaaaaaaaaaaaaaaaaaaaaaaaaaaagcccagccggctccccaacctctaccgaggagggcacctctgagtccgccacccccgagagcggccctggcacctccaccgagcccagcgagggcagcgcacccggcagccctgccggcagccccacctccacagaggagggaaccagcaccgagcccagcgaaggcagcgccccaggcaccagcaccgagcctagtgagcaggagattaaacggatcaacaagatcagaagaagacttgtgaaagacagcaacaccaagaaggccggcaagacaggccccatgaaaaccctgctggttagagtgatgacacccgatctgagagagcggctggaaaacctgagaaagaagcctgaaaatatcccccagcccatcagcaatacatctagagccaacctgaataagctgctgaccgattacaccgaaatgaagaaggcgatcctgcatgtgtactgggaagagttccagaaggaccctgtgggcctgatgagccgggtggcccagcctgccagcaagaagatcgatcagaacaagctgaaacctgagatggacgagaagggcaacctgaccaccgccggctttgcctgctctcagtgtggccagcccctgttcgtgtacaagctggagcaggtgtctgagaagggcaaggcttacaccaactacttcggacggtgcaatgtggccgagcacgaaaagctgatcctgctggcccagctgaagcccgagaaggatagcgacgaagccgtgacatatagcctgggaaagtttgggcagagggccctggatttctacagcattcatgtgaccaaggagtccacccaccccgtgaagcccctggcccagatcgccggaaacagatacgcctccggacctgtgggaaaggccctgagcgacgcatgtatgggcacaatcgcctccttcctgtctaagtaccaggacatcatcatcgaacaccagaaggtggtgaagggcaaccagaagagactggagagcctgcgggagctggccggcaaggaaaacctggaataccctagcgtgaccctgccacctcagcctcacaccaaggagggcgttgatgcctacaacgaagtgatcgcccgggtgcgaatgtgggtgaacctgaacctgtggcagaagctgaagctaagcagagatgatgccaagcctctgctgagactgaagggattcccttcctttcctctggtcgagagacaggccaacgaagtggactggtgggacatggtgtgtaacgtgaagaagctgatcaacgagaaaaaggaggatggcaaggtgttttggcagaatctggctggctacaagagacaggaagccctgagaccatacctgagcagcgaggaagatcggaagaagggaaagaaattcgctcggtaccagctgggcgacctgctgctgcacctggaaaagaagcacggcgaggactggggaaaggtgtacgacgaggcctgggagcggattgacaagaaagtggaaggcctgagcaagcacatcaagctggaagaggaacggagaagcgaggacgcccagagcaaggccgccctgaccgactggctgcgggctaaggccagcttcgtgatcgagggcctgaaggaggccgacaaggacgagttctgcagatgcgagctgaagctgcagaagtggtacggggacctgcggggaaagcccttcgccatcgaagccgagaacagcatcctggacatcagcggcttcagcaagcagtacaactgtgccttcatctggcagaaggacggcgtgaagaagctgaacctgtacctgatcatcaactacttcaagggcggcaagctgcggttcaagaagatcaaacctgaagccttcgaagccaacagattctacaccgtgatcaacaaaaagagcggcgagatcgtgcccatggaggtgaacttcaacttcgacgaccccaacctgatcatcctgcctctggcctttggcaagagacagggcagagaattcatctggaacgacctgctgtccctggaaaccggcagcctgaagctggccaacggaagagtgatcgagaagacactgtacaacagaagaacccggcaggatgagcctgccctgttcgtggccctgaccttcgagcggcgggaggtcctggactcctccaatatcaaaccaatgaacctgatcggcgtggcaagaggcgaaaacatccccgccgtgatcgccctgaccgaccccgagggctgcccactgagccggtttaaggatagcctgggaaacccaacccacatcctgagaatcggcgagagctataaggagaagcagcggaccatccaggccaagaaggaggtggagcagcggagagccggcggctacagccggaagtacgccagcaaagccaagaatctggcagacgatatggtgagaaacaccgctagagatctgctgtactacgccgtgacccaggatgccatgctgatcttcgccaacctgagccggggcttcggccggcagggcaagcggaccttcatggccgagagacagtacacacggatggaggactggctgaccgccaagctggcctacgagggcctgagcaagacctacctgtccaagacactggcccagtacacctccaagacatgcagcaactgtgggtttaccatcaccagcgccgactacgacagggtgctggagaagctgaagaagacagcaacaggctggatgaccacaattaacggcaaggagctgaaggtggagggccagattacctactacaacagatacaagagacagaacgtagtcaaggacctgtccgtcgagctggatagactgagcgaagaatctgtgaacaacgacatctcctcctggacaaagggcagaagcggagaagctctgagcctcctgaagaaaagattctcccatagacccgtgcaggagaagttcgtgtgcctgaactgcggcttcgagacacacgcagccgagcaagccgccctgaacatcgccagatcctggctgttcctgcggagccaggagtacaagaaataccagacaaacaagacaaccggcaacaccgataagagagccttcgtcgagacctggcagtccttttaccggaagaagcttaaggaggtgtggaaacctgccgtgcggtctggcggatctggcggaggctccaccagccccaagaaaaagagaaaagtctaagctgccttctgcggggcttgccttctggccatgcccttcttctctcccttgcacctgtacctcttggtctttgaataaagcctgagtaggaaggctagcaaaaaaaaaaaaaaaaaaaaaaaaaaaaaaaaaaaaaaaaaaaaaaaaaaaaaaaaaaaaaaaaaaaaaaaaaaaaaaaa

SEQ ID NO: 9685 - RNA, 8787 nt, synthetic construct
  source 1..8787: mol_type = other RNA
aggaaataagagagaaaagaagagtaagaagaaatataagagccaccatggcccctaagaagaagcgtaaagtgagccggatgaaccacgaccaggagttcgacccccctaaggtgtaccctcccgtccccgccgagaagagaaagcccatccgggtcctgagcctgttcgatggcatcgccaccggtctgctggtgctgaaggacctgggcatccaggtggataggtacattgcctccgaggtgtgcgaggactccatcaccgtgggaatggtgcgtcatcagggcaagatcatgtacgtgggcgacgtgcggagcgtgacacagaagcatatccaggagtggggccctttcgacctggtgatcggcggcagcccttgcaatgacctgagcatcgtgaacccagcccggaagggcctgtacgagggaaccggcagactgttcttcgagttttacagactgctgcacgacgcccggcctaaggaaggcgacgaccggcccttcttttggctgttcgagaatgtggtggccatgggagtcagcgacaagcgggatattagccggttcctggagagcaaccccgtgatgatcgatgccaaggaagtgagcgccgcccaccgggccagatacttctggggcaatctgcctggcatgaacagacccctggccagcaccgtgaacgacaagctggagctgcaggagtgcctggagcacggccggatcgccaagttcagcaaggtgagaaccatcaccacccgaagcaacagcatcaaacaaggcaaggaccagcactttcctgtgttcatgaacgagaaggaggacatcctgtggtgtaccgagatggagagagtgttcgggttcccagtccactacacagatgtcagcaacatgtctagactggccagacagagactgctgggaagaagctggtccgtccctgtgatcagacacctgttcgcccctctgaaggagtacttcgcctgcgtgagcagcggcaacagcaacgccaacagccggggccccagcttctctagcggcctggtgccactgtccctgagagggagccacatgggccccatggagatctacaaaaccgtgagcgcctggaagcggcagcctgtgcgcgtgctgagcctgtttcggaatatcgataaagtcctgaaaagcctgggattcctggagagcggctctggctccggcggtggcaccctgaagtacgtggaggatgtgacaaacgtggtcagacgggatgtggagaagtggggccccttcgatctggtgtacggcagcacccaacccctgggcagctcttgtgaccggtgccctggctggtacatgtttcagttccaccggatcctgcagtacgccctgccgagacaggagtcccagcggccattcttttggattttcatggacaacttgctgctgaccgaggatgaccaggaaactaccactcggttcctgcagaccgaagccgtgaccctgcaggacgtgagaggccgggactaccagaacgccatgcgggtgtggtccaacatccctggactgaaaagcaagcacgcacctctgacccctaaagaagaggagtacctgcaggcccaggtgcggagcagaagcaagctggacgcccctaaggtggatctgctggtgaagaattgcctcctgcccctgagagagtacttcaagtatttcagccagaatagtctgcccctgggaggcagcggcggcggcaggcccgagagcgtgaccttcgaggacgtggccatctacttcagcgagaacgagtggaccggcctggcccccgcccagagggccctgtacagggacgtgatgctggagaactacggcgccctggccagcctggccgccttccccttccccaagcccgccctgatcttccagctggagcagggcgaggccccctggagcagcgccccccagggcgccctggacggcgagggccccaggggcatcggcggcccaagcagcggcgcccctcctcccagcggcggcaggcggcccaagcagcggcgcccctcctcccagcggcggcagcccagccggctccccaacctctaccgaggagggcacctctgagtccgccacccccgagagcggccctggcacctccaccgagcccagcgagggcagcgcacccggcagccctgccggcagccccacctccacagaggagggaaccagcaccgagcccagcgaaggcagcgccccaggcaccagcaccgagcctagtgagcaggagattaaacggatcaacaagatcagaagaagacttgtgaaagacagcaacaccaagaaggccggcaagacaggccccatgaaaaccctgctggttagagtgatgacacccgatctgagagagcggctggaaaacctgagaaagaagcctgaaaatatcccccagcccatcagcaatacatctagagccaacctgaataagctgctgaccgattacaccgaaatgaagaaggcgatcctgcatgtgtactgggaagagttccagaaggaccctgtgggcctgatgagccgggtggcccagcctgccagcaagaagatcgatcagaacaagctgaaacctgagatggacgagaagggcaacctgaccaccgccggctttgcctgctctcagtgtggccagcccctgttcgtgtacaagctggagcaggtgtctgagaagggcaaggcttacaccaactacttcggacggtgcaatgtggccgagcacgaaaagctgatcctgctggcccagctgaagcccgagaaggatagcgacgaagccgtgacatatagcctgggaaagtttgggcagagggccctggatttctacagcattcatgtgaccaaggagtccacccaccccgtgaagcccctggcccagatcgccggaaacagatacgcctccggacctgtgggaaaggccctgagcgacgcatgtatgggcacaatcgcctccttcctgtctaagtaccaggacatcatcatcgaacaccagaaggtggtgaagggcaaccagaagagactggagagcctgcgggagctggccggcaaggaaaacctggaataccctagcgtgaccctgccacctcagcctcacaccaaggagggcgttgatgcctacaacgaagtgatcgcccgggtgcgaatgtgggtgaacctgaacctgtggcagaagctgaagctaagcagagatgatgccaagcctctgctgagactgaagggattcccttcctttcctctggtcgagagacaggccaacgaagtggactggtgggacatggtgtgtaacgtgaagaagctgatcaacgagaaaaaggaggatggcaaggtgttttggcagaatctggctggctacaagagacaggaagccctgagaccatacctgagcagcgaggaagatcggaagaagggaaagaaattcgctcggtaccagctgggcgacctgctgctgcacctggaaaagaagcacggcgaggactggggaaaggtgtacgacgaggcctgggagcggattgacaagaaagtggaaggcctgagcaagcacatcaagctggaagaggaacggagaagcgaggacgcccagagcaaggccgccctgaccgactggctgcgggctaaggccagcttcgtgatcgagggcctgaaggaggccgacaaggacgagttctgcagatgcgagctgaagctgcagaagtggtacggggacctgcggggaaagcccttcgccatcgaagccgagaacagcatcctggacatcagcggcttcagcaagcagtacaactgtgccttcatctggcagaaggacggcgtgaagaagctgaacctgtacctgatcatcaactacttcaagggcggcaagctgcggttcaagaagatcaaacctgaagccttcgaagccaacagattctacaccgtgatcaacaaaaagagcggcgagatcgtgcccatggaggtgaacttcaacttcgacgaccccaacctgatcatcctgcctctggcctttggcaagagacagggcagagaattcatctggaacgacctgctgtccctggaaaccggcagcctgaagctggccaacggaagagtgatcgagaagacactgtacaacagaagaacccggcaggatgagcctgccctgttcgtggccctgaccttcgagcggcgggaggtcctggactcctccaatatcaaaccaatgaacctgatcggcgtggcaagaggcgaaaacatccccgccgtgatcgccctgaccgaccccgagggctgcccactgagccggtttaaggatagcctgggaaacccaacccacatcctgagaatcggcgagagctataaggagaagcagcggaccatccaggccaagaaggaggtggagcagcggagagccggcggctacagccggaagtacgccagcaaagccaagaatctggcagacgatatggtgagaaacaccgctagagatctgctgtactacgccgtgacccaggatgccatgctgatcttcgccaacctgagccggggcttcggccggcagggcaagcggaccttcatggccgagagacagtacacacggatggaggactggctgaccgccaagctggcctacgagggcctgagcaagacctacctgtccaagacactggcccagtacacctccaagacatgcagcaactgtgggtttaccatcaccagcgccgactacgacagggtgctggagaagctgaagaagacagcaacaggctggatgaccacaattaacggcaaggagctgaaggtggagggccagattacctactacaacagatacaagagacagaacgtagtcaaggacctgtccgtcgagctggatagactgagcgaagaatctgtgaacaacgacatctcctcctggacaaagggcagaagcggagaagctctgagcctcctgaagaaaagattctcccatagacccgtgcaggagaagttcgtgtgcctgaactgcggcttcgagacacacgcagccgagcaagccgccctgaacatcgccagatcctggctgttcctgcggagccaggagtacaagaaataccagacaaacaagacaaccggcaacaccgataagagagccttcgtcgagacctggcagtccttttaccggaagaagcttaaggaggtgtggaaacctgccgtgcggtctggcggatctggcggaggctccaccagccccaagaaaaagagaaaagtctaagctgccttctgcggggcttgccttctggccatgcccttcttctctcccttgcacctgtacctcttggtctttgaataaagcctgagtaggaaggctagcaaaaaaaaaaaaaaaaaaaaaaaaaaaaaaaaaaaaaaaaaaaaaaaaaaaaaaaaaaaaaaaaaaaaaaaaaaaaaaaagcccagccggctccccaacctctaccgaggagggcacctctgagtccgccacccccgagagcggccctggcacctccaccgagcccagcgagggcagcgcacccggcagccctgccggcagccccacctccacagaggagggaaccagcaccgagcccagcgaaggcagcgccccaggcaccagcaccgagcctagtgagcaggagattaaacggatcaacaagatcagaagaagacttgtgaaagacagcaacaccaagaaggccggcaagacaggccccatgaaaaccctgctggttagagtgatgacacccgatctgagagagcggctggaaaacctgagaaagaagcctgaaaatatcccccagcccatcagcaatacatctagagccaacctgaataagctgctgaccgattacaccgaaatgaagaaggcgatcctgcatgtgtactgggaagagttccagaaggaccctgtgggcctgatgagccgggtggcccagcctgccagcaagaagatcgatcagaacaagctgaaacctgagatggacgagaagggcaacctgaccaccgccggctttgcctgctctcagtgtggccagcccctgttcgtgtacaagctggagcaggtgtctgagaagggcaaggcttacaccaactacttcggacggtgcaatgtggccgagcacgaaaagctgatcctgctggcccagctgaagcccgagaaggatagcgacgaagccgtgacatatagcctgggaaagtttgggcagagggccctggatttctacagcattcatgtgaccaaggagtccacccaccccgtgaagcccctggcccagatcgccggaaacagatacgcctccggacctgtgggaaaggccctgagcgacgcatgtatgggcacaatcgcctccttcctgtctaagtaccaggacatcatcatcgaacaccagaaggtggtgaagggcaaccagaagagactggagagcctgcgggagctggccggcaaggaaaacctggaataccctagcgtgaccctgccacctcagcctcacaccaaggagggcgttgatgcctacaacgaagtgatcgcccgggtgcgaatgtgggtgaacctgaacctgtggcagaagctgaagctaagcagagatgatgccaagcctctgctgagactgaagggattcccttcctttcctctggtcgagagacaggccaacgaagtggactggtgggacatggtgtgtaacgtgaagaagctgatcaacgagaaaaaggaggatggcaaggtgttttggcagaatctggctggctacaagagacaggaagccctgagaccatacctgagcagcgaggaagatcggaagaagggaaagaaattcgctcggtaccagctgggcgacctgctgctgcacctggaaaagaagcacggcgaggactggggaaaggtgtacgacgaggcctgggagcggattgacaagaaagtggaaggcctgagcaagcacatcaagctggaagaggaacggagaagcgaggacgcccagagcaaggccgccctgaccgactggctgcgggctaaggccagcttcgtgatcgagggcctgaaggaggccgacaaggacgagttctgcagatgcgagctgaagctgcagaagtggtacggggacctgcggggaaagcccttcgccatcgaagccgagaacagcatcctggacatcagcggcttcagcaagcagtacaactgtgccttcatctggcagaaggacggcgtgaagaagctgaacctgtacctgatcatcaactacttcaagggcggcaagctgcggttcaagaagatcaaacctgaagccttcgaagccaacagattctacaccgtgatcaacaaaaagagcggcgagatcgtgcccatggaggtgaacttcaacttcgacgaccccaacctgatcatcctgcctctggcctttggcaagagacagggcagagaattcatctggaacgacctgctgtccctggaaaccggcagcctgaagctggccaacggaagagtgatcgagaagacactgtacaacagaagaacccggcaggatgagcctgccctgttcgtggccctgaccttcgagcggcgggaggtcctggactcctccaatatcaaaccaatgaacctgatcggcgtggcaagaggcgaaaacatccccgccgtgatcgccctgaccgaccccgagggctgcccactgagccggtttaaggatagcctgggaaacccaacccacatcctgagaatcggcgagagctataaggagaagcagcggaccatccaggccaagaaggaggtggagcagcggagagccggcggctacagccggaagtacgccagcaaagccaagaatctggcagacgatatggtgagaaacaccgctagagatctgctgtactacgccgtgacccaggatgccatgctgatcttcgccaacctgagccggggcttcggccggcagggcaagcggaccttcatggccgagagacagtacacacggatggaggactggctgaccgccaagctggcctacgagggcctgagcaagacctacctgtccaagacactggcccagtacacctccaagacatgcagcaactgtgggtttaccatcaccagcgccgactacgacagggtgctggagaagctgaagaagacagcaacaggctggatgaccacaattaacggcaaggagctgaaggtggagggccagattacctactacaacagatacaagagacagaacgtagtcaaggacctgtccgtcgagctggatagactgagcgaagaatctgtgaacaacgacatctcctcctggacaaagggcagaagcggagaagctctgagcctcctgaagaaaagattctcccatagacccgtgcaggagaagttcgtgtgcctgaactgcggcttcgagacacacgcagccgagcaagccgccctgaacatcgccagatcctggctgttcctgcggagccaggagtacaagaaataccagacaaacaagacaaccggcaacaccgataagagagccttcgtcgagacctggcagtccttttaccggaagaagcttaaggaggtgtggaaacctgccgtgcggtctggcggatctggcggaggctccaccagccccaagaaaaagagaaaagtctaagctgccttctgcggggcttgccttctggccatgcccttcttctctcccttgcacctgtacctcttggtctttgaataaagcctgagtaggaaggctagcaaaaaaaaaaaaaaaaaaaaaaaaaaaaaaaaaaaaaaaaaaaaaaaaaaaaaaaaaaaaaaaaaaaaaaaaaaaaaaaa

SEQ ID NO: 9686 - RNA, 8787 nt, synthetic construct
  source 1..8787: mol_type = other RNA
aggaaataagagagaaaagaagagtaagaagaaatataagagccaccatggcccctaagaagaagcgtaaagtgagccggatgaaccacgaccaggagttcgacccccctaaggtgtaccctcccgtccccgccgagaagagaaagcccatccgggtcctgagcctgttcgatggcatcgccaccggtctgctggtgctgaaggacctgggcatccaggtggataggtacattgcctccgaggtgtgcgaggactccatcaccgtgggaatggtgcgtcatcagggcaagatcatgtacgtgggcgacgtgcggagcgtgacacagaagcatatccaggagtggggccctttcgacctggtgatcggcggcagcccttgcaatgacctgagcatcgtgaacccagcccggaagggcctgtacgagggaaccggcagactgttcttcgagttttacagactgctgcacgacgcccggcctaaggaaggcgacgaccggcccttcttttggctgttcgagaatgtggtggccatgggagtcagcgacaagcgggatattagccggttcctggagagcaaccccgtgatgatcgatgccaaggaagtgagcgccgcccaccgggccagatacttctggggcaatctgcctggcatgaacagacccctggccagcaccgtgaacgacaagctggagctgcaggagtgcctggagcacggccggatcgccaagttcagcaaggtgagaaccatcaccacccgaagcaacagcatcaaacaaggcaaggaccagcactttcctgtgttcatgaacgagaaggaggacatcctgtggtgtaccgagatggagagagtgttcgggttcccagtccactacacagatgtcagcaacatgtctagactggccagacagagactgctgggaagaagctggtccgtccctgtgatcagacacctgttcgcccctctgaaggagtacttcgcctgcgtgagcagcggcaacagcaacgccaacagccggggccccagcttctctagcggcctggtgccactgtccctgagagggagccacatgggccccatggagatctacaaaaccgtgagcgcctggaagcggcagcctgtgcgcgtgctgagcctgtttcggaatatcgataaagtcctgaaaagcctgggattcctggagagcggctctggctccggcggtggcaccctgaagtacgtggaggatgtgacaaacgtggtcagacgggatgtggagaagtggggccccttcgatctggtgtacggcagcacccaacccctgggcagctcttgtgaccggtgccctggctggtacatgtttcagttccaccggatcctgcagtacgccctgccgagacaggagtcccagcggccattcttttggattttcatggacaacttgctgctgaccgaggatgaccaggaaactaccactcggttcctgcagaccgaagccgtgaccctgcaggacgtgagaggccgggactaccagaacgccatgcgggtgtggtccaacatccctggactgaaaagcaagcacgcacctctgacccctaaagaagaggagtacctgcaggcccaggtgcggagcagaagcaagctggacgcccctaaggtggatctgctggtgaagaattgcctcctgcccctgagagagtacttcaagtatttcagccagaatagtctgcccctgggaggcagcggcggcggcccccagggccacctgaccttcatggacgtggccatcgagttcagccaggaggagtggaagtgcctggaccccggccagagggccctgtacagggacgtgatgctggagaactacaggaacctggtgagcctgggcatctgcctgcccgacctgagcatcatcagcatgctgaagcagaggagggagcccctgaccctgcagagcgaggtgaagatcgtgaagaaccccgacggcagggagtgcggcggcccaagcagcggcgcccctcctcccagcggcggcaggcggcccaagcagcggcgcccctcctcccagcggcggcagcccagccggctccccaacctctaccgaggagggcacctctgagtccgccacccccgagagcggccctggcacctccaccgagcccagcgagggcagcgcacccggcagccctgccggcagccccacctccacagaggagggaaccagcaccgagcccagcgaaggcagcgccccaggcaccagcaccgagcctagtgagcaggagattaaacggatcaacaagatcagaagaagacttgtgaaagacagcaacaccaagaaggccggcaagacaggccccatgaaaaccctgctggttagagtgatgacacccgatctgagagagcggctggaaaacctgagaaagaagcctgaaaatatcccccagcccatcagcaatacatctagagccaacctgaataagctgctgaccgattacaccgaaatgaagaaggcgatcctgcatgtgtactgggaagagttccagaaggaccctgtgggcctgatgagccgggtggcccagcctgccagcaagaagatcgatcagaacaagctgaaacctgagatggacgagaagggcaacctgaccaccgccggctttgcctgctctcagtgtggccagcccctgttcgtgtacaagctggagcaggtgtctgagaagggcaaggcttacaccaactacttcggacggtgcaatgtggccgagcacgaaaagctgatcctgctggcccagctgaagcccgagaaggatagcgacgaagccgtgacatatagcctgggaaagtttgggcagagggccctggatttctacagcattcatgtgaccaaggagtccacccaccccgtgaagcccctggcccagatcgccggaaacagatacgcctccggacctgtgggaaaggccctgagcgacgcatgtatgggcacaatcgcctccttcctgtctaagtaccaggacatcatcatcgaacaccagaaggtggtgaagggcaaccagaagagactggagagcctgcgggagctggccggcaaggaaaacctggaataccctagcgtgaccctgccacctcagcctcacaccaaggagggcgttgatgcctacaacgaagtgatcgcccgggtgcgaatgtgggtgaacctgaacctgtggcagaagctgaagctaagcagagatgatgccaagcctctgctgagactgaagggattcccttcctttcctctggtcgagagacaggccaacgaagtggactggtgggacatggtgtgtaacgtgaagaagctgatcaacgagaaaaaggaggatggcaaggtgttttggcagaatctggctggctacaagagacaggaagccctgagaccatacctgagcagcgaggaagatcggaagaagggaaagaaattcgctcggtaccagctgggcgacctgctgctgcacctggaaaagaagcacggcgaggactggggaaaggtgtacgacgaggcctgggagcggattgacaagaaagtggaaggcctgagcaagcacatcaagctggaagaggaacggagaagcgaggacgcccagagcaaggccgccctgaccgactggctgcgggctaaggccagcttcgtgatcgagggcctgaaggaggccgacaaggacgagttctgcagatgcgagctgaagctgcagaagtggtacggggacctgcggggaaagcccttcgccatcgaagccgagaacagcatcctggacatcagcggcttcagcaagcagtacaactgtgccttcatctggcagaaggacggcgtgaagaagctgaacctgtacctgatcatcaactacttcaagggcggcaagctgcggttcaagaagatcaaacctgaagccttcgaagccaacagattctacaccgtgatcaacaaaaagagcggcgagatcgtgcccatggaggtgaacttcaacttcgacgaccccaacctgatcatcctgcctctggcctttggcaagagacagggcagagaattcatctggaacgacctgctgtccctggaaaccggcagcctgaagctggccaacggaagagtgatcgagaagacactgtacaacagaagaacccggcaggatgagcctgccctgttcgtggccctgaccttcgagcggcgggaggtcctggactcctccaatatcaaaccaatgaacctgatcggcgtggcaagaggcgaaaacatccccgccgtgatcgccctgaccgaccccgagggctgcccactgagccggtttaaggatagcctgggaaacccaacccacatcctgagaatcggcgagagctataaggagaagcagcggaccatccaggccaagaaggaggtggagcagcggagagccggcggctacagccggaagtacgccagcaaagccaagaatctggcagacgatatggtgagaaacaccgctagagatctgctgtactacgccgtgacccaggatgccatgctgatcttcgccaacctgagccggggcttcggccggcagggcaagcggaccttcatggccgagagacagtacacacggatggaggactggctgaccgccaagctggcctacgagggcctgagcaagacctacctgtccaagacactggcccagtacacctccaagacatgcagcaactgtgggtttaccatcaccagcgccgactacgacagggtgctggagaagctgaagaagacagcaacaggctggatgaccacaattaacggcaaggagctgaaggtggagggccagattacctactacaacagatacaagagacagaacgtagtcaaggacctgtccgtcgagctggatagactgagcgaagaatctgtgaacaacgacatctcctcctggacaaagggcagaagcggagaagctctgagcctcctgaagaaaagattctcccatagacccgtgcaggagaagttcgtgtgcctgaactgcggcttcgagacacacgcagccgagcaagccgccctgaacatcgccagatcctggctgttcctgcggagccaggagtacaagaaataccagacaaacaagacaaccggcaacaccgataagagagccttcgtcgagacctggcagtccttttaccggaagaagcttaaggaggtgtggaaacctgccgtgcggtctggcggatctggcggaggctccaccagccccaagaaaaagagaaaagtctaagctgccttctgcggggcttgccttctggccatgcccttcttctctcccttgcacctgtacctcttggtctttgaataaagcctgagtaggaaggctagcaaaaaaaaaaaaaaaaaaaaaaaaaaaaaaaaaaaaaaaaaaaaaaaaaaaaaaaaaaaaaaaaaaaaaaaaaaaaaaaagcccagccggctccccaacctctaccgaggagggcacctctgagtccgccacccccgagagcggccctggcacctccaccgagcccagcgagggcagcgcacccggcagccctgccggcagccccacctccacagaggagggaaccagcaccgagcccagcgaaggcagcgccccaggcaccagcaccgagcctagtgagcaggagattaaacggatcaacaagatcagaagaagacttgtgaaagacagcaacaccaagaaggccggcaagacaggccccatgaaaaccctgctggttagagtgatgacacccgatctgagagagcggctggaaaacctgagaaagaagcctgaaaatatcccccagcccatcagcaatacatctagagccaacctgaataagctgctgaccgattacaccgaaatgaagaaggcgatcctgcatgtgtactgggaagagttccagaaggaccctgtgggcctgatgagccgggtggcccagcctgccagcaagaagatcgatcagaacaagctgaaacctgagatggacgagaagggcaacctgaccaccgccggctttgcctgctctcagtgtggccagcccctgttcgtgtacaagctggagcaggtgtctgagaagggcaaggcttacaccaactacttcggacggtgcaatgtggccgagcacgaaaagctgatcctgctggcccagctgaagcccgagaaggatagcgacgaagccgtgacatatagcctgggaaagtttgggcagagggccctggatttctacagcattcatgtgaccaaggagtccacccaccccgtgaagcccctggcccagatcgccggaaacagatacgcctccggacctgtgggaaaggccctgagcgacgcatgtatgggcacaatcgcctccttcctgtctaagtaccaggacatcatcatcgaacaccagaaggtggtgaagggcaaccagaagagactggagagcctgcgggagctggccggcaaggaaaacctggaataccctagcgtgaccctgccacctcagcctcacaccaaggagggcgttgatgcctacaacgaagtgatcgcccgggtgcgaatgtgggtgaacctgaacctgtggcagaagctgaagctaagcagagatgatgccaagcctctgctgagactgaagggattcccttcctttcctctggtcgagagacaggccaacgaagtggactggtgggacatggtgtgtaacgtgaagaagctgatcaacgagaaaaaggaggatggcaaggtgttttggcagaatctggctggctacaagagacaggaagccctgagaccatacctgagcagcgaggaagatcggaagaagggaaagaaattcgctcggtaccagctgggcgacctgctgctgcacctggaaaagaagcacggcgaggactggggaaaggtgtacgacgaggcctgggagcggattgacaagaaagtggaaggcctgagcaagcacatcaagctggaagaggaacggagaagcgaggacgcccagagcaaggccgccctgaccgactggctgcgggctaaggccagcttcgtgatcgagggcctgaaggaggccgacaaggacgagttctgcagatgcgagctgaagctgcagaagtggtacggggacctgcggggaaagcccttcgccatcgaagccgagaacagcatcctggacatcagcggcttcagcaagcagtacaactgtgccttcatctggcagaaggacggcgtgaagaagctgaacctgtacctgatcatcaactacttcaagggcggcaagctgcggttcaagaagatcaaacctgaagccttcgaagccaacagattctacaccgtgatcaacaaaaagagcggcgagatcgtgcccatggaggtgaacttcaacttcgacgaccccaacctgatcatcctgcctctggcctttggcaagagacagggcagagaattcatctggaacgacctgctgtccctggaaaccggcagcctgaagctggccaacggaagagtgatcgagaagacactgtacaacagaagaacccggcaggatgagcctgccctgttcgtggccctgaccttcgagcggcgggaggtcctggactcctccaatatcaaaccaatgaacctgatcggcgtggcaagaggcgaaaacatccccgccgtgatcgccctgaccgaccccgagggctgcccactgagccggtttaaggatagcctgggaaacccaacccacatcctgagaatcggcgagagctataaggagaagcagcggaccatccaggccaagaaggaggtggagcagcggagagccggcggctacagccggaagtacgccagcaaagccaagaatctggcagacgatatggtgagaaacaccgctagagatctgctgtactacgccgtgacccaggatgccatgctgatcttcgccaacctgagccggggcttcggccggcagggcaagcggaccttcatggccgagagacagtacacacggatggaggactggctgaccgccaagctggcctacgagggcctgagcaagacctacctgtccaagacactggcccagtacacctccaagacatgcagcaactgtgggtttaccatcaccagcgccgactacgacagggtgctggagaagctgaagaagacagcaacaggctggatgaccacaattaacggcaaggagctgaaggtggagggccagattacctactacaacagatacaagagacagaacgtagtcaaggacctgtccgtcgagctggatagactgagcgaagaatctgtgaacaacgacatctcctcctggacaaagggcagaagcggagaagctctgagcctcctgaagaaaagattctcccatagacccgtgcaggagaagttcgtgtgcctgaactgcggcttcgagacacacgcagccgagcaagccgccctgaacatcgccagatcctggctgttcctgcggagccaggagtacaagaaataccagacaaacaagacaaccggcaacaccgataagagagccttcgtcgagacctggcagtccttttaccggaagaagcttaaggaggtgtggaaacctgccgtgcggtctggcggatctggcggaggctccaccagccccaagaaaaagagaaaagtctaagctgccttctgcggggcttgccttctggccatgcccttcttctctcccttgcacctgtacctcttggtctttgaataaagcctgagtaggaaggctagcaaaaaaaaaaaaaaaaaaaaaaaaaaaaaaaaaaaaaaaaaaaaaaaaaaaaaaaaaaaaaaaaaaaaaaaaaaaaaaaa

SEQ ID NO: 9687 - RNA, 8787 nt, synthetic construct
  source 1..8787: mol_type = other RNA
aggaaataagagagaaaagaagagtaagaagaaatataagagccaccatggcccctaagaagaagcgtaaagtgagccggatgaaccacgaccaggagttcgacccccctaaggtgtaccctcccgtccccgccgagaagagaaagcccatccgggtcctgagcctgttcgatggcatcgccaccggtctgctggtgctgaaggacctgggcatccaggtggataggtacattgcctccgaggtgtgcgaggactccatcaccgtgggaatggtgcgtcatcagggcaagatcatgtacgtgggcgacgtgcggagcgtgacacagaagcatatccaggagtggggccctttcgacctggtgatcggcggcagcccttgcaatgacctgagcatcgtgaacccagcccggaagggcctgtacgagggaaccggcagactgttcttcgagttttacagactgctgcacgacgcccggcctaaggaaggcgacgaccggcccttcttttggctgttcgagaatgtggtggccatgggagtcagcgacaagcgggatattagccggttcctggagagcaaccccgtgatgatcgatgccaaggaagtgagcgccgcccaccgggccagatacttctggggcaatctgcctggcatgaacagacccctggccagcaccgtgaacgacaagctggagctgcaggagtgcctggagcacggccggatcgccaagttcagcaaggtgagaaccatcaccacccgaagcaacagcatcaaacaaggcaaggaccagcactttcctgtgttcatgaacgagaaggaggacatcctgtggtgtaccgagatggagagagtgttcgggttcccagtccactacacagatgtcagcaacatgtctagactggccagacagagactgctgggaagaagctggtccgtccctgtgatcagacacctgttcgcccctctgaaggagtacttcgcctgcgtgagcagcggcaacagcaacgccaacagccggggccccagcttctctagcggcctggtgccactgtccctgagagggagccacatgggccccatggagatctacaaaaccgtgagcgcctggaagcggcagcctgtgcgcgtgctgagcctgtttcggaatatcgataaagtcctgaaaagcctgggattcctggagagcggctctggctccggcggtggcaccctgaagtacgtggaggatgtgacaaacgtggtcagacgggatgtggagaagtggggccccttcgatctggtgtacggcagcacccaacccctgggcagctcttgtgaccggtgccctggctggtacatgtttcagttccaccggatcctgcagtacgccctgccgagacaggagtcccagcggccattcttttggattttcatggacaacttgctgctgaccgaggatgaccaggaaactaccactcggttcctgcagaccgaagccgtgaccctgcaggacgtgagaggccgggactaccagaacgccatgcgggtgtggtccaacatccctggactgaaaagcaagcacgcacctctgacccctaaagaagaggagtacctgcaggcccaggtgcggagcagaagcaagctggacgcccctaaggtggatctgctggtgaagaattgcctcctgcccctgagagagtacttcaagtatttcagccagaatagtctgcccctgggaggcagcggcggcggcagcaaggcccccatcaccttcggcgacctggccatctacttcagccaggaggagtgggagtggctgagccccatccagaaggacctgtacgaggacgtgatgctggagaactacaggaacctggtgagcctgggcctgagcttcaggaggcccaacgtgatcaccctgctggagaagggcaaggccccctggatggtggagcccgtgaggaggaggagggcccccgacagcggcagcaagtgcggcggcccaagcagcggcgcccctcctcccagcggcggcaggcggcccaagcagcggcgcccctcctcccagcggcggcagcccagccggctccccaacctctaccgaggagggcacctctgagtccgccacccccgagagcggccctggcacctccaccgagcccagcgagggcagcgcacccggcagccctgccggcagccccacctccacagaggagggaaccagcaccgagcccagcgaaggcagcgccccaggcaccagcaccgagcctagtgagcaggagattaaacggatcaacaagatcagaagaagacttgtgaaagacagcaacaccaagaaggccggcaagacaggccccatgaaaaccctgctggttagagtgatgacacccgatctgagagagcggctggaaaacctgagaaagaagcctgaaaatatcccccagcccatcagcaatacatctagagccaacctgaataagctgctgaccgattacaccgaaatgaagaaggcgatcctgcatgtgtactgggaagagttccagaaggaccctgtgggcctgatgagccgggtggcccagcctgccagcaagaagatcgatcagaacaagctgaaacctgagatggacgagaagggcaacctgaccaccgccggctttgcctgctctcagtgtggccagcccctgttcgtgtacaagctggagcaggtgtctgagaagggcaaggcttacaccaactacttcggacggtgcaatgtggccgagcacgaaaagctgatcctgctggcccagctgaagcccgagaaggatagcgacgaagccgtgacatatagcctgggaaagtttgggcagagggccctggatttctacagcattcatgtgaccaaggagtccacccaccccgtgaagcccctggcccagatcgccggaaacagatacgcctccggacctgtgggaaaggccctgagcgacgcatgtatgggcacaatcgcctccttcctgtctaagtaccaggacatcatcatcgaacaccagaaggtggtgaagggcaaccagaagagactggagagcctgcgggagctggccggcaaggaaaacctggaataccctagcgtgaccctgccacctcagcctcacaccaaggagggcgttgatgcctacaacgaagtgatcgcccgggtgcgaatgtgggtgaacctgaacctgtggcagaagctgaagctaagcagagatgatgccaagcctctgctgagactgaagggattcccttcctttcctctggtcgagagacaggccaacgaagtggactggtgggacatggtgtgtaacgtgaagaagctgatcaacgagaaaaaggaggatggcaaggtgttttggcagaatctggctggctacaagagacaggaagccctgagaccatacctgagcagcgaggaagatcggaagaagggaaagaaattcgctcggtaccagctgggcgacctgctgctgcacctggaaaagaagcacggcgaggactggggaaaggtgtacgacgaggcctgggagcggattgacaagaaagtggaaggcctgagcaagcacatcaagctggaagaggaacggagaagcgaggacgcccagagcaaggccgccctgaccgactggctgcgggctaaggccagcttcgtgatcgagggcctgaaggaggccgacaaggacgagttctgcagatgcgagctgaagctgcagaagtggtacggggacctgcggggaaagcccttcgccatcgaagccgagaacagcatcctggacatcagcggcttcagcaagcagtacaactgtgccttcatctggcagaaggacggcgtgaagaagctgaacctgtacctgatcatcaactacttcaagggcggcaagctgcggttcaagaagatcaaacctgaagccttcgaagccaacagattctacaccgtgatcaacaaaaagagcggcgagatcgtgcccatggaggtgaacttcaacttcgacgaccccaacctgatcatcctgcctctggcctttggcaagagacagggcagagaattcatctggaacgacctgctgtccctggaaaccggcagcctgaagctggccaacggaagagtgatcgagaagacactgtacaacagaagaacccggcaggatgagcctgccctgttcgtggccctgaccttcgagcggcgggaggtcctggactcctccaatatcaaaccaatgaacctgatcggcgtggcaagaggcgaaaacatccccgccgtgatcgccctgaccgaccccgagggctgcccactgagccggtttaaggatagcctgggaaacccaacccacatcctgagaatcggcgagagctataaggagaagcagcggaccatccaggccaagaaggaggtggagcagcggagagccggcggctacagccggaagtacgccagcaaagccaagaatctggcagacgatatggtgagaaacaccgctagagatctgctgtactacgccgtgacccaggatgccatgctgatcttcgccaacctgagccggggcttcggccggcagggcaagcggaccttcatggccgagagacagtacacacggatggaggactggctgaccgccaagctggcctacgagggcctgagcaagacctacctgtccaagacactggcccagtacacctccaagacatgcagcaactgtgggtttaccatcaccagcgccgactacgacagggtgctggagaagctgaagaagacagcaacaggctggatgaccacaattaacggcaaggagctgaaggtggagggccagattacctactacaacagatacaagagacagaacgtagtcaaggacctgtccgtcgagctggatagactgagcgaagaatctgtgaacaacgacatctcctcctggacaaagggcagaagcggagaagctctgagcctcctgaagaaaagattctcccatagacccgtgcaggagaagttcgtgtgcctgaactgcggcttcgagacacacgcagccgagcaagccgccctgaacatcgccagatcctggctgttcctgcggagccaggagtacaagaaataccagacaaacaagacaaccggcaacaccgataagagagccttcgtcgagacctggcagtccttttaccggaagaagcttaaggaggtgtggaaacctgccgtgcggtctggcggatctggcggaggctccaccagccccaagaaaaagagaaaagtctaagctgccttctgcggggcttgccttctggccatgcccttcttctctcccttgcacctgtacctcttggtctttgaataaagcctgagtaggaaggctagcaaaaaaaaaaaaaaaaaaaaaaaaaaaaaaaaaaaaaaaaaaaaaaaaaaaaaaaaaaaaaaaaaaaaaaaaaaaaaaaagcccagccggctccccaacctctaccgaggagggcacctctgagtccgccacccccgagagcggccctggcacctccaccgagcccagcgagggcagcgcacccggcagccctgccggcagccccacctccacagaggagggaaccagcaccgagcccagcgaaggcagcgccccaggcaccagcaccgagcctagtgagcaggagattaaacggatcaacaagatcagaagaagacttgtgaaagacagcaacaccaagaaggccggcaagacaggccccatgaaaaccctgctggttagagtgatgacacccgatctgagagagcggctggaaaacctgagaaagaagcctgaaaatatcccccagcccatcagcaatacatctagagccaacctgaataagctgctgaccgattacaccgaaatgaagaaggcgatcctgcatgtgtactgggaagagttccagaaggaccctgtgggcctgatgagccgggtggcccagcctgccagcaagaagatcgatcagaacaagctgaaacctgagatggacgagaagggcaacctgaccaccgccggctttgcctgctctcagtgtggccagcccctgttcgtgtacaagctggagcaggtgtctgagaagggcaaggcttacaccaactacttcggacggtgcaatgtggccgagcacgaaaagctgatcctgctggcccagctgaagcccgagaaggatagcgacgaagccgtgacatatagcctgggaaagtttgggcagagggccctggatttctacagcattcatgtgaccaaggagtccacccaccccgtgaagcccctggcccagatcgccggaaacagatacgcctccggacctgtgggaaaggccctgagcgacgcatgtatgggcacaatcgcctccttcctgtctaagtaccaggacatcatcatcgaacaccagaaggtggtgaagggcaaccagaagagactggagagcctgcgggagctggccggcaaggaaaacctggaataccctagcgtgaccctgccacctcagcctcacaccaaggagggcgttgatgcctacaacgaagtgatcgcccgggtgcgaatgtgggtgaacctgaacctgtggcagaagctgaagctaagcagagatgatgccaagcctctgctgagactgaagggattcccttcctttcctctggtcgagagacaggccaacgaagtggactggtgggacatggtgtgtaacgtgaagaagctgatcaacgagaaaaaggaggatggcaaggtgttttggcagaatctggctggctacaagagacaggaagccctgagaccatacctgagcagcgaggaagatcggaagaagggaaagaaattcgctcggtaccagctgggcgacctgctgctgcacctggaaaagaagcacggcgaggactggggaaaggtgtacgacgaggcctgggagcggattgacaagaaagtggaaggcctgagcaagcacatcaagctggaagaggaacggagaagcgaggacgcccagagcaaggccgccctgaccgactggctgcgggctaaggccagcttcgtgatcgagggcctgaaggaggccgacaaggacgagttctgcagatgcgagctgaagctgcagaagtggtacggggacctgcggggaaagcccttcgccatcgaagccgagaacagcatcctggacatcagcggcttcagcaagcagtacaactgtgccttcatctggcagaaggacggcgtgaagaagctgaacctgtacctgatcatcaactacttcaagggcggcaagctgcggttcaagaagatcaaacctgaagccttcgaagccaacagattctacaccgtgatcaacaaaaagagcggcgagatcgtgcccatggaggtgaacttcaacttcgacgaccccaacctgatcatcctgcctctggcctttggcaagagacagggcagagaattcatctggaacgacctgctgtccctggaaaccggcagcctgaagctggccaacggaagagtgatcgagaagacactgtacaacagaagaacccggcaggatgagcctgccctgttcgtggccctgaccttcgagcggcgggaggtcctggactcctccaatatcaaaccaatgaacctgatcggcgtggcaagaggcgaaaacatccccgccgtgatcgccctgaccgaccccgagggctgcccactgagccggtttaaggatagcctgggaaacccaacccacatcctgagaatcggcgagagctataaggagaagcagcggaccatccaggccaagaaggaggtggagcagcggagagccggcggctacagccggaagtacgccagcaaagccaagaatctggcagacgatatggtgagaaacaccgctagagatctgctgtactacgccgtgacccaggatgccatgctgatcttcgccaacctgagccggggcttcggccggcagggcaagcggaccttcatggccgagagacagtacacacggatggaggactggctgaccgccaagctggcctacgagggcctgagcaagacctacctgtccaagacactggcccagtacacctccaagacatgcagcaactgtgggtttaccatcaccagcgccgactacgacagggtgctggagaagctgaagaagacagcaacaggctggatgaccacaattaacggcaaggagctgaaggtggagggccagattacctactacaacagatacaagagacagaacgtagtcaaggacctgtccgtcgagctggatagactgagcgaagaatctgtgaacaacgacatctcctcctggacaaagggcagaagcggagaagctctgagcctcctgaagaaaagattctcccatagacccgtgcaggagaagttcgtgtgcctgaactgcggcttcgagacacacgcagccgagcaagccgccctgaacatcgccagatcctggctgttcctgcggagccaggagtacaagaaataccagacaaacaagacaaccggcaacaccgataagagagccttcgtcgagacctggcagtccttttaccggaagaagcttaaggaggtgtggaaacctgccgtgcggtctggcggatctggcggaggctccaccagccccaagaaaaagagaaaagtctaagctgccttctgcggggcttgccttctggccatgcccttcttctctcccttgcacctgtacctcttggtctttgaataaagcctgagtaggaaggctagcaaaaaaaaaaaaaaaaaaaaaaaaaaaaaaaaaaaaaaaaaaaaaaaaaaaaaaaaaaaaaaaaaaaaaaaaaaaaaaaa

SEQ ID NO: 9688 - RNA, 8787 nt, synthetic construct
  source 1..8787: mol_type = other RNA
aggaaataagagagaaaagaagagtaagaagaaatataagagccaccatggcccctaagaagaagcgtaaagtgagccggatgaaccacgaccaggagttcgacccccctaaggtgtaccctcccgtccccgccgagaagagaaagcccatccgggtcctgagcctgttcgatggcatcgccaccggtctgctggtgctgaaggacctgggcatccaggtggataggtacattgcctccgaggtgtgcgaggactccatcaccgtgggaatggtgcgtcatcagggcaagatcatgtacgtgggcgacgtgcggagcgtgacacagaagcatatccaggagtggggccctttcgacctggtgatcggcggcagcccttgcaatgacctgagcatcgtgaacccagcccggaagggcctgtacgagggaaccggcagactgttcttcgagttttacagactgctgcacgacgcccggcctaaggaaggcgacgaccggcccttcttttggctgttcgagaatgtggtggccatgggagtcagcgacaagcgggatattagccggttcctggagagcaaccccgtgatgatcgatgccaaggaagtgagcgccgcccaccgggccagatacttctggggcaatctgcctggcatgaacagacccctggccagcaccgtgaacgacaagctggagctgcaggagtgcctggagcacggccggatcgccaagttcagcaaggtgagaaccatcaccacccgaagcaacagcatcaaacaaggcaaggaccagcactttcctgtgttcatgaacgagaaggaggacatcctgtggtgtaccgagatggagagagtgttcgggttcccagtccactacacagatgtcagcaacatgtctagactggccagacagagactgctgggaagaagctggtccgtccctgtgatcagacacctgttcgcccctctgaaggagtacttcgcctgcgtgagcagcggcaacagcaacgccaacagccggggccccagcttctctagcggcctggtgccactgtccctgagagggagccacatgggccccatggagatctacaaaaccgtgagcgcctggaagcggcagcctgtgcgcgtgctgagcctgtttcggaatatcgataaagtcctgaaaagcctgggattcctggagagcggctctggctccggcggtggcaccctgaagtacgtggaggatgtgacaaacgtggtcagacgggatgtggagaagtggggccccttcgatctggtgtacggcagcacccaacccctgggcagctcttgtgaccggtgccctggctggtacatgtttcagttccaccggatcctgcagtacgccctgccgagacaggagtcccagcggccattcttttggattttcatggacaacttgctgctgaccgaggatgaccaggaaactaccactcggttcctgcagaccgaagccgtgaccctgcaggacgtgagaggccgggactaccagaacgccatgcgggtgtggtccaacatccctggactgaaaagcaagcacgcacctctgacccctaaagaagaggagtacctgcaggcccaggtgcggagcagaagcaagctggacgcccctaaggtggatctgctggtgaagaattgcctcctgcccctgagagagtacttcaagtatttcagccagaatagtctgcccctgggaggcagcggcggcggcagcaaggccagcgtgaccttcggcgacctggccatctacttcagcagggaggagtgggagtggctgagccccatccagaaggacctgtacgaggacgtgatgctggagaactaccagaccctggtgagcctgggcctggtgtgcaggaggcccaacatcatcaccctgctggagaagggcaaggccccctggatggtggagcccagcaggaggaggaggggccccgagagcggcagcaagaggggcggcccaagcagcggcgcccctcctcccagcggcggcaggcggcccaagcagcggcgcccctcctcccagcggcggcagcccagccggctccccaacctctaccgaggagggcacctctgagtccgccacccccgagagcggccctggcacctccaccgagcccagcgagggcagcgcacccggcagccctgccggcagccccacctccacagaggagggaaccagcaccgagcccagcgaaggcagcgccccaggcaccagcaccgagcctagtgagcaggagattaaacggatcaacaagatcagaagaagacttgtgaaagacagcaacaccaagaaggccggcaagacaggccccatgaaaaccctgctggttagagtgatgacacccgatctgagagagcggctggaaaacctgagaaagaagcctgaaaatatcccccagcccatcagcaatacatctagagccaacctgaataagctgctgaccgattacaccgaaatgaagaaggcgatcctgcatgtgtactgggaagagttccagaaggaccctgtgggcctgatgagccgggtggcccagcctgccagcaagaagatcgatcagaacaagctgaaacctgagatggacgagaagggcaacctgaccaccgccggctttgcctgctctcagtgtggccagcccctgttcgtgtacaagctggagcaggtgtctgagaagggcaaggcttacaccaactacttcggacggtgcaatgtggccgagcacgaaaagctgatcctgctggcccagctgaagcccgagaaggatagcgacgaagccgtgacatatagcctgggaaagtttgggcagagggccctggatttctacagcattcatgtgaccaaggagtccacccaccccgtgaagcccctggcccagatcgccggaaacagatacgcctccggacctgtgggaaaggccctgagcgacgcatgtatgggcacaatcgcctccttcctgtctaagtaccaggacatcatcatcgaacaccagaaggtggtgaagggcaaccagaagagactggagagcctgcgggagctggccggcaaggaaaacctggaataccctagcgtgaccctgccacctcagcctcacaccaaggagggcgttgatgcctacaacgaagtgatcgcccgggtgcgaatgtgggtgaacctgaacctgtggcagaagctgaagctaagcagagatgatgccaagcctctgctgagactgaagggattcccttcctttcctctggtcgagagacaggccaacgaagtggactggtgggacatggtgtgtaacgtgaagaagctgatcaacgagaaaaaggaggatggcaaggtgttttggcagaatctggctggctacaagagacaggaagccctgagaccatacctgagcagcgaggaagatcggaagaagggaaagaaattcgctcggtaccagctgggcgacctgctgctgcacctggaaaagaagcacggcgaggactggggaaaggtgtacgacgaggcctgggagcggattgacaagaaagtggaaggcctgagcaagcacatcaagctggaagaggaacggagaagcgaggacgcccagagcaaggccgccctgaccgactggctgcgggctaaggccagcttcgtgatcgagggcctgaaggaggccgacaaggacgagttctgcagatgcgagctgaagctgcagaagtggtacggggacctgcggggaaagcccttcgccatcgaagccgagaacagcatcctggacatcagcggcttcagcaagcagtacaactgtgccttcatctggcagaaggacggcgtgaagaagctgaacctgtacctgatcatcaactacttcaagggcggcaagctgcggttcaagaagatcaaacctgaagccttcgaagccaacagattctacaccgtgatcaacaaaaagagcggcgagatcgtgcccatggaggtgaacttcaacttcgacgaccccaacctgatcatcctgcctctggcctttggcaagagacagggcagagaattcatctggaacgacctgctgtccctggaaaccggcagcctgaagctggccaacggaagagtgatcgagaagacactgtacaacagaagaacccggcaggatgagcctgccctgttcgtggccctgaccttcgagcggcgggaggtcctggactcctccaatatcaaaccaatgaacctgatcggcgtggcaagaggcgaaaacatccccgccgtgatcgccctgaccgaccccgagggctgcccactgagccggtttaaggatagcctgggaaacccaacccacatcctgagaatcggcgagagctataaggagaagcagcggaccatccaggccaagaaggaggtggagcagcggagagccggcggctacagccggaagtacgccagcaaagccaagaatctggcagacgatatggtgagaaacaccgctagagatctgctgtactacgccgtgacccaggatgccatgctgatcttcgccaacctgagccggggcttcggccggcagggcaagcggaccttcatggccgagagacagtacacacggatggaggactggctgaccgccaagctggcctacgagggcctgagcaagacctacctgtccaagacactggcccagtacacctccaagacatgcagcaactgtgggtttaccatcaccagcgccgactacgacagggtgctggagaagctgaagaagacagcaacaggctggatgaccacaattaacggcaaggagctgaaggtggagggccagattacctactacaacagatacaagagacagaacgtagtcaaggacctgtccgtcgagctggatagactgagcgaagaatctgtgaacaacgacatctcctcctggacaaagggcagaagcggagaagctctgagcctcctgaagaaaagattctcccatagacccgtgcaggagaagttcgtgtgcctgaactgcggcttcgagacacacgcagccgagcaagccgccctgaacatcgccagatcctggctgttcctgcggagccaggagtacaagaaataccagacaaacaagacaaccggcaacaccgataagagagccttcgtcgagacctggcagtccttttaccggaagaagcttaaggaggtgtggaaacctgccgtgcggtctggcggatctggcggaggctccaccagccccaagaaaaagagaaaagtctaagctgccttctgcggggcttgccttctggccatgcccttcttctctcccttgcacctgtacctcttggtctttgaataaagcctgagtaggaaggctagcaaaaaaaaaaaaaaaaaaaaaaaaaaaaaaaaaaaaaaaaaaaaaaaaaaaaaaaaaaaaaaaaaaaaaaaaaaaaaaaagcccagccggctccccaacctctaccgaggagggcacctctgagtccgccacccccgagagcggccctggcacctccaccgagcccagcgagggcagcgcacccggcagccctgccggcagccccacctccacagaggagggaaccagcaccgagcccagcgaaggcagcgccccaggcaccagcaccgagcctagtgagcaggagattaaacggatcaacaagatcagaagaagacttgtgaaagacagcaacaccaagaaggccggcaagacaggccccatgaaaaccctgctggttagagtgatgacacccgatctgagagagcggctggaaaacctgagaaagaagcctgaaaatatcccccagcccatcagcaatacatctagagccaacctgaataagctgctgaccgattacaccgaaatgaagaaggcgatcctgcatgtgtactgggaagagttccagaaggaccctgtgggcctgatgagccgggtggcccagcctgccagcaagaagatcgatcagaacaagctgaaacctgagatggacgagaagggcaacctgaccaccgccggctttgcctgctctcagtgtggccagcccctgttcgtgtacaagctggagcaggtgtctgagaagggcaaggcttacaccaactacttcggacggtgcaatgtggccgagcacgaaaagctgatcctgctggcccagctgaagcccgagaaggatagcgacgaagccgtgacatatagcctgggaaagtttgggcagagggccctggatttctacagcattcatgtgaccaaggagtccacccaccccgtgaagcccctggcccagatcgccggaaacagatacgcctccggacctgtgggaaaggccctgagcgacgcatgtatgggcacaatcgcctccttcctgtctaagtaccaggacatcatcatcgaacaccagaaggtggtgaagggcaaccagaagagactggagagcctgcgggagctggccggcaaggaaaacctggaataccctagcgtgaccctgccacctcagcctcacaccaaggagggcgttgatgcctacaacgaagtgatcgcccgggtgcgaatgtgggtgaacctgaacctgtggcagaagctgaagctaagcagagatgatgccaagcctctgctgagactgaagggattcccttcctttcctctggtcgagagacaggccaacgaagtggactggtgggacatggtgtgtaacgtgaagaagctgatcaacgagaaaaaggaggatggcaaggtgttttggcagaatctggctggctacaagagacaggaagccctgagaccatacctgagcagcgaggaagatcggaagaagggaaagaaattcgctcggtaccagctgggcgacctgctgctgcacctggaaaagaagcacggcgaggactggggaaaggtgtacgacgaggcctgggagcggattgacaagaaagtggaaggcctgagcaagcacatcaagctggaagaggaacggagaagcgaggacgcccagagcaaggccgccctgaccgactggctgcgggctaaggccagcttcgtgatcgagggcctgaaggaggccgacaaggacgagttctgcagatgcgagctgaagctgcagaagtggtacggggacctgcggggaaagcccttcgccatcgaagccgagaacagcatcctggacatcagcggcttcagcaagcagtacaactgtgccttcatctggcagaaggacggcgtgaagaagctgaacctgtacctgatcatcaactacttcaagggcggcaagctgcggttcaagaagatcaaacctgaagccttcgaagccaacagattctacaccgtgatcaacaaaaagagcggcgagatcgtgcccatggaggtgaacttcaacttcgacgaccccaacctgatcatcctgcctctggcctttggcaagagacagggcagagaattcatctggaacgacctgctgtccctggaaaccggcagcctgaagctggccaacggaagagtgatcgagaagacactgtacaacagaagaacccggcaggatgagcctgccctgttcgtggccctgaccttcgagcggcgggaggtcctggactcctccaatatcaaaccaatgaacctgatcggcgtggcaagaggcgaaaacatccccgccgtgatcgccctgaccgaccccgagggctgcccactgagccggtttaaggatagcctgggaaacccaacccacatcctgagaatcggcgagagctataaggagaagcagcggaccatccaggccaagaaggaggtggagcagcggagagccggcggctacagccggaagtacgccagcaaagccaagaatctggcagacgatatggtgagaaacaccgctagagatctgctgtactacgccgtgacccaggatgccatgctgatcttcgccaacctgagccggggcttcggccggcagggcaagcggaccttcatggccgagagacagtacacacggatggaggactggctgaccgccaagctggcctacgagggcctgagcaagacctacctgtccaagacactggcccagtacacctccaagacatgcagcaactgtgggtttaccatcaccagcgccgactacgacagggtgctggagaagctgaagaagacagcaacaggctggatgaccacaattaacggcaaggagctgaaggtggagggccagattacctactacaacagatacaagagacagaacgtagtcaaggacctgtccgtcgagctggatagactgagcgaagaatctgtgaacaacgacatctcctcctggacaaagggcagaagcggagaagctctgagcctcctgaagaaaagattctcccatagacccgtgcaggagaagttcgtgtgcctgaactgcggcttcgagacacacgcagccgagcaagccgccctgaacatcgccagatcctggctgttcctgcggagccaggagtacaagaaataccagacaaacaagacaaccggcaacaccgataagagagccttcgtcgagacctggcagtccttttaccggaagaagcttaaggaggtgtggaaacctgccgtgcggtctggcggatctggcggaggctccaccagccccaagaaaaagagaaaagtctaagctgccttctgcggggcttgccttctggccatgcccttcttctctcccttgcacctgtacctcttggtctttgaataaagcctgagtaggaaggctagcaaaaaaaaaaaaaaaaaaaaaaaaaaaaaaaaaaaaaaaaaaaaaaaaaaaaaaaaaaaaaaaaaaaaaaaaaaaaaaaa

SEQ ID NO: 9689 - RNA, 8787 nt, synthetic construct
  source 1..8787: mol_type = other RNA
aggaaataagagagaaaagaagagtaagaagaaatataagagccaccatggcccctaagaagaagcgtaaagtgagccggatgaaccacgaccaggagttcgacccccctaaggtgtaccctcccgtccccgccgagaagagaaagcccatccgggtcctgagcctgttcgatggcatcgccaccggtctgctggtgctgaaggacctgggcatccaggtggataggtacattgcctccgaggtgtgcgaggactccatcaccgtgggaatggtgcgtcatcagggcaagatcatgtacgtgggcgacgtgcggagcgtgacacagaagcatatccaggagtggggccctttcgacctggtgatcggcggcagcccttgcaatgacctgagcatcgtgaacccagcccggaagggcctgtacgagggaaccggcagactgttcttcgagttttacagactgctgcacgacgcccggcctaaggaaggcgacgaccggcccttcttttggctgttcgagaatgtggtggccatgggagtcagcgacaagcgggatattagccggttcctggagagcaaccccgtgatgatcgatgccaaggaagtgagcgccgcccaccgggccagatacttctggggcaatctgcctggcatgaacagacccctggccagcaccgtgaacgacaagctggagctgcaggagtgcctggagcacggccggatcgccaagttcagcaaggtgagaaccatcaccacccgaagcaacagcatcaaacaaggcaaggaccagcactttcctgtgttcatgaacgagaaggaggacatcctgtggtgtaccgagatggagagagtgttcgggttcccagtccactacacagatgtcagcaacatgtctagactggccagacagagactgctgggaagaagctggtccgtccctgtgatcagacacctgttcgcccctctgaaggagtacttcgcctgcgtgagcagcggcaacagcaacgccaacagccggggccccagcttctctagcggcctggtgccactgtccctgagagggagccacatgggccccatggagatctacaaaaccgtgagcgcctggaagcggcagcctgtgcgcgtgctgagcctgtttcggaatatcgataaagtcctgaaaagcctgggattcctggagagcggctctggctccggcggtggcaccctgaagtacgtggaggatgtgacaaacgtggtcagacgggatgtggagaagtggggccccttcgatctggtgtacggcagcacccaacccctgggcagctcttgtgaccggtgccctggctggtacatgtttcagttccaccggatcctgcagtacgccctgccgagacaggagtcccagcggccattcttttggattttcatggacaacttgctgctgaccgaggatgaccaggaaactaccactcggttcctgcagaccgaagccgtgaccctgcaggacgtgagaggccgggactaccagaacgccatgcgggtgtggtccaacatccctggactgaaaagcaagcacgcacctctgacccctaaagaagaggagtacctgcaggcccaggtgcggagcagaagcaagctggacgcccctaaggtggatctgctggtgaagaattgcctcctgcccctgagagagtacttcaagtatttcagccagaatagtctgcccctgggaggcagcggcggcggcacccaggagagcctgaccctggaggacgtggccgtggagttcagctgggaggagtggcagctgctggacaccgcccagaaggacctgtacagggacgtgatggtggagaactacaaccacctggtgagcctgggctaccagaccagcaagcccgacgccctgagcaagctggcccacggccaggagccctggatgaccgacgccaagatccagaacaagaactgccccggcatcaggaaggtgggcggcccaagcagcggcgcccctcctcccagcggcggcaggcggcccaagcagcggcgcccctcctcccagcggcggcagcccagccggctccccaacctctaccgaggagggcacctctgagtccgccacccccgagagcggccctggcacctccaccgagcccagcgagggcagcgcacccggcagccctgccggcagccccacctccacagaggagggaaccagcaccgagcccagcgaaggcagcgccccaggcaccagcaccgagcctagtgagcaggagattaaacggatcaacaagatcagaagaagacttgtgaaagacagcaacaccaagaaggccggcaagacaggccccatgaaaaccctgctggttagagtgatgacacccgatctgagagagcggctggaaaacctgagaaagaagcctgaaaatatcccccagcccatcagcaatacatctagagccaacctgaataagctgctgaccgattacaccgaaatgaagaaggcgatcctgcatgtgtactgggaagagttccagaaggaccctgtgggcctgatgagccgggtggcccagcctgccagcaagaagatcgatcagaacaagctgaaacctgagatggacgagaagggcaacctgaccaccgccggctttgcctgctctcagtgtggccagcccctgttcgtgtacaagctggagcaggtgtctgagaagggcaaggcttacaccaactacttcggacggtgcaatgtggccgagcacgaaaagctgatcctgctggcccagctgaagcccgagaaggatagcgacgaagccgtgacatatagcctgggaaagtttgggcagagggccctggatttctacagcattcatgtgaccaaggagtccacccaccccgtgaagcccctggcccagatcgccggaaacagatacgcctccggacctgtgggaaaggccctgagcgacgcatgtatgggcacaatcgcctccttcctgtctaagtaccaggacatcatcatcgaacaccagaaggtggtgaagggcaaccagaagagactggagagcctgcgggagctggccggcaaggaaaacctggaataccctagcgtgaccctgccacctcagcctcacaccaaggagggcgttgatgcctacaacgaagtgatcgcccgggtgcgaatgtgggtgaacctgaacctgtggcagaagctgaagctaagcagagatgatgccaagcctctgctgagactgaagggattcccttcctttcctctggtcgagagacaggccaacgaagtggactggtgggacatggtgtgtaacgtgaagaagctgatcaacgagaaaaaggaggatggcaaggtgttttggcagaatctggctggctacaagagacaggaagccctgagaccatacctgagcagcgaggaagatcggaagaagggaaagaaattcgctcggtaccagctgggcgacctgctgctgcacctggaaaagaagcacggcgaggactggggaaaggtgtacgacgaggcctgggagcggattgacaagaaagtggaaggcctgagcaagcacatcaagctggaagaggaacggagaagcgaggacgcccagagcaaggccgccctgaccgactggctgcgggctaaggccagcttcgtgatcgagggcctgaaggaggccgacaaggacgagttctgcagatgcgagctgaagctgcagaagtggtacggggacctgcggggaaagcccttcgccatcgaagccgagaacagcatcctggacatcagcggcttcagcaagcagtacaactgtgccttcatctggcagaaggacggcgtgaagaagctgaacctgtacctgatcatcaactacttcaagggcggcaagctgcggttcaagaagatcaaacctgaagccttcgaagccaacagattctacaccgtgatcaacaaaaagagcggcgagatcgtgcccatggaggtgaacttcaacttcgacgaccccaacctgatcatcctgcctctggcctttggcaagagacagggcagagaattcatctggaacgacctgctgtccctggaaaccggcagcctgaagctggccaacggaagagtgatcgagaagacactgtacaacagaagaacccggcaggatgagcctgccctgttcgtggccctgaccttcgagcggcgggaggtcctggactcctccaatatcaaaccaatgaacctgatcggcgtggcaagaggcgaaaacatccccgccgtgatcgccctgaccgaccccgagggctgcccactgagccggtttaaggatagcctgggaaacccaacccacatcctgagaatcggcgagagctataaggagaagcagcggaccatccaggccaagaaggaggtggagcagcggagagccggcggctacagccggaagtacgccagcaaagccaagaatctggcagacgatatggtgagaaacaccgctagagatctgctgtactacgccgtgacccaggatgccatgctgatcttcgccaacctgagccggggcttcggccggcagggcaagcggaccttcatggccgagagacagtacacacggatggaggactggctgaccgccaagctggcctacgagggcctgagcaagacctacctgtccaagacactggcccagtacacctccaagacatgcagcaactgtgggtttaccatcaccagcgccgactacgacagggtgctggagaagctgaagaagacagcaacaggctggatgaccacaattaacggcaaggagctgaaggtggagggccagattacctactacaacagatacaagagacagaacgtagtcaaggacctgtccgtcgagctggatagactgagcgaagaatctgtgaacaacgacatctcctcctggacaaagggcagaagcggagaagctctgagcctcctgaagaaaagattctcccatagacccgtgcaggagaagttcgtgtgcctgaactgcggcttcgagacacacgcagccgagcaagccgccctgaacatcgccagatcctggctgttcctgcggagccaggagtacaagaaataccagacaaacaagacaaccggcaacaccgataagagagccttcgtcgagacctggcagtccttttaccggaagaagcttaaggaggtgtggaaacctgccgtgcggtctggcggatctggcggaggctccaccagccccaagaaaaagagaaaagtctaagctgccttctgcggggcttgccttctggccatgcccttcttctctcccttgcacctgtacctcttggtctttgaataaagcctgagtaggaaggctagcaaaaaaaaaaaaaaaaaaaaaaaaaaaaaaaaaaaaaaaaaaaaaaaaaaaaaaaaaaaaaaaaaaaaaaaaaaaaaaaagcccagccggctccccaacctctaccgaggagggcacctctgagtccgccacccccgagagcggccctggcacctccaccgagcccagcgagggcagcgcacccggcagccctgccggcagccccacctccacagaggagggaaccagcaccgagcccagcgaaggcagcgccccaggcaccagcaccgagcctagtgagcaggagattaaacggatcaacaagatcagaagaagacttgtgaaagacagcaacaccaagaaggccggcaagacaggccccatgaaaaccctgctggttagagtgatgacacccgatctgagagagcggctggaaaacctgagaaagaagcctgaaaatatcccccagcccatcagcaatacatctagagccaacctgaataagctgctgaccgattacaccgaaatgaagaaggcgatcctgcatgtgtactgggaagagttccagaaggaccctgtgggcctgatgagccgggtggcccagcctgccagcaagaagatcgatcagaacaagctgaaacctgagatggacgagaagggcaacctgaccaccgccggctttgcctgctctcagtgtggccagcccctgttcgtgtacaagctggagcaggtgtctgagaagggcaaggcttacaccaactacttcggacggtgcaatgtggccgagcacgaaaagctgatcctgctggcccagctgaagcccgagaaggatagcgacgaagccgtgacatatagcctgggaaagtttgggcagagggccctggatttctacagcattcatgtgaccaaggagtccacccaccccgtgaagcccctggcccagatcgccggaaacagatacgcctccggacctgtgggaaaggccctgagcgacgcatgtatgggcacaatcgcctccttcctgtctaagtaccaggacatcatcatcgaacaccagaaggtggtgaagggcaaccagaagagactggagagcctgcgggagctggccggcaaggaaaacctggaataccctagcgtgaccctgccacctcagcctcacaccaaggagggcgttgatgcctacaacgaagtgatcgcccgggtgcgaatgtgggtgaacctgaacctgtggcagaagctgaagctaagcagagatgatgccaagcctctgctgagactgaagggattcccttcctttcctctggtcgagagacaggccaacgaagtggactggtgggacatggtgtgtaacgtgaagaagctgatcaacgagaaaaaggaggatggcaaggtgttttggcagaatctggctggctacaagagacaggaagccctgagaccatacctgagcagcgaggaagatcggaagaagggaaagaaattcgctcggtaccagctgggcgacctgctgctgcacctggaaaagaagcacggcgaggactggggaaaggtgtacgacgaggcctgggagcggattgacaagaaagtggaaggcctgagcaagcacatcaagctggaagaggaacggagaagcgaggacgcccagagcaaggccgccctgaccgactggctgcgggctaaggccagcttcgtgatcgagggcctgaaggaggccgacaaggacgagttctgcagatgcgagctgaagctgcagaagtggtacggggacctgcggggaaagcccttcgccatcgaagccgagaacagcatcctggacatcagcggcttcagcaagcagtacaactgtgccttcatctggcagaaggacggcgtgaagaagctgaacctgtacctgatcatcaactacttcaagggcggcaagctgcggttcaagaagatcaaacctgaagccttcgaagccaacagattctacaccgtgatcaacaaaaagagcggcgagatcgtgcccatggaggtgaacttcaacttcgacgaccccaacctgatcatcctgcctctggcctttggcaagagacagggcagagaattcatctggaacgacctgctgtccctggaaaccggcagcctgaagctggccaacggaagagtgatcgagaagacactgtacaacagaagaacccggcaggatgagcctgccctgttcgtggccctgaccttcgagcggcgggaggtcctggactcctccaatatcaaaccaatgaacctgatcggcgtggcaagaggcgaaaacatccccgccgtgatcgccctgaccgaccccgagggctgcccactgagccggtttaaggatagcctgggaaacccaacccacatcctgagaatcggcgagagctataaggagaagcagcggaccatccaggccaagaaggaggtggagcagcggagagccggcggctacagccggaagtacgccagcaaagccaagaatctggcagacgatatggtgagaaacaccgctagagatctgctgtactacgccgtgacccaggatgccatgctgatcttcgccaacctgagccggggcttcggccggcagggcaagcggaccttcatggccgagagacagtacacacggatggaggactggctgaccgccaagctggcctacgagggcctgagcaagacctacctgtccaagacactggcccagtacacctccaagacatgcagcaactgtgggtttaccatcaccagcgccgactacgacagggtgctggagaagctgaagaagacagcaacaggctggatgaccacaattaacggcaaggagctgaaggtggagggccagattacctactacaacagatacaagagacagaacgtagtcaaggacctgtccgtcgagctggatagactgagcgaagaatctgtgaacaacgacatctcctcctggacaaagggcagaagcggagaagctctgagcctcctgaagaaaagattctcccatagacccgtgcaggagaagttcgtgtgcctgaactgcggcttcgagacacacgcagccgagcaagccgccctgaacatcgccagatcctggctgttcctgcggagccaggagtacaagaaataccagacaaacaagacaaccggcaacaccgataagagagccttcgtcgagacctggcagtccttttaccggaagaagcttaaggaggtgtggaaacctgccgtgcggtctggcggatctggcggaggctccaccagccccaagaaaaagagaaaagtctaagctgccttctgcggggcttgccttctggccatgcccttcttctctcccttgcacctgtacctcttggtctttgaataaagcctgagtaggaaggctagcaaaaaaaaaaaaaaaaaaaaaaaaaaaaaaaaaaaaaaaaaaaaaaaaaaaaaaaaaaaaaaaaaaaaaaaaaaaaaaaa

SEQ ID NO: 9690 - RNA, 8787 nt, synthetic construct
  source 1..8787: mol_type = other RNA
aggaaataagagagaaaagaagagtaagaagaaatataagagccaccatggcccctaagaagaagcgtaaagtgagccggatgaaccacgaccaggagttcgacccccctaaggtgtaccctcccgtccccgccgagaagagaaagcccatccgggtcctgagcctgttcgatggcatcgccaccggtctgctggtgctgaaggacctgggcatccaggtggataggtacattgcctccgaggtgtgcgaggactccatcaccgtgggaatggtgcgtcatcagggcaagatcatgtacgtgggcgacgtgcggagcgtgacacagaagcatatccaggagtggggccctttcgacctggtgatcggcggcagcccttgcaatgacctgagcatcgtgaacccagcccggaagggcctgtacgagggaaccggcagactgttcttcgagttttacagactgctgcacgacgcccggcctaaggaaggcgacgaccggcccttcttttggctgttcgagaatgtggtggccatgggagtcagcgacaagcgggatattagccggttcctggagagcaaccccgtgatgatcgatgccaaggaagtgagcgccgcccaccgggccagatacttctggggcaatctgcctggcatgaacagacccctggccagcaccgtgaacgacaagctggagctgcaggagtgcctggagcacggccggatcgccaagttcagcaaggtgagaaccatcaccacccgaagcaacagcatcaaacaaggcaaggaccagcactttcctgtgttcatgaacgagaaggaggacatcctgtggtgtaccgagatggagagagtgttcgggttcccagtccactacacagatgtcagcaacatgtctagactggccagacagagactgctgggaagaagctggtccgtccctgtgatcagacacctgttcgcccctctgaaggagtacttcgcctgcgtgagcagcggcaacagcaacgccaacagccggggccccagcttctctagcggcctggtgccactgtccctgagagggagccacatgggccccatggagatctacaaaaccgtgagcgcctggaagcggcagcctgtgcgcgtgctgagcctgtttcggaatatcgataaagtcctgaaaagcctgggattcctggagagcggctctggctccggcggtggcaccctgaagtacgtggaggatgtgacaaacgtggtcagacgggatgtggagaagtggggccccttcgatctggtgtacggcagcacccaacccctgggcagctcttgtgaccggtgccctggctggtacatgtttcagttccaccggatcctgcagtacgccctgccgagacaggagtcccagcggccattcttttggattttcatggacaacttgctgctgaccgaggatgaccaggaaactaccactcggttcctgcagaccgaagccgtgaccctgcaggacgtgagaggccgggactaccagaacgccatgcgggtgtggtccaacatccctggactgaaaagcaagcacgcacctctgacccctaaagaagaggagtacctgcaggcccaggtgcggagcagaagcaagctggacgcccctaaggtggatctgctggtgaagaattgcctcctgcccctgagagagtacttcaagtatttcagccagaatagtctgcccctgggaggcagcggcggcggcagccagggccccgtgaagttcgaggacgtggccatctacctgtggaaggaggagtgggagctgatggacagcacccagaagaggctgtacaggcaggtgatgctggagacctacgagaacgtgctgagcgtgggcaccccccacgacaagcccgccatgatcgtgcacctggagcagggcgagaccgcctggagccccgccctgcagaggcccggcaaggagaagggcaggctgcacggccacggcggcccaagcagcggcgcccctcctcccagcggcggcaggcggcccaagcagcggcgcccctcctcccagcggcggcagcccagccggctccccaacctctaccgaggagggcacctctgagtccgccacccccgagagcggccctggcacctccaccgagcccagcgagggcagcgcacccggcagccctgccggcagccccacctccacagaggagggaaccagcaccgagcccagcgaaggcagcgccccaggcaccagcaccgagcctagtgagcaggagattaaacggatcaacaagatcagaagaagacttgtgaaagacagcaacaccaagaaggccggcaagacaggccccatgaaaaccctgctggttagagtgatgacacccgatctgagagagcggctggaaaacctgagaaagaagcctgaaaatatcccccagcccatcagcaatacatctagagccaacctgaataagctgctgaccgattacaccgaaatgaagaaggcgatcctgcatgtgtactgggaagagttccagaaggaccctgtgggcctgatgagccgggtggcccagcctgccagcaagaagatcgatcagaacaagctgaaacctgagatggacgagaagggcaacctgaccaccgccggctttgcctgctctcagtgtggccagcccctgttcgtgtacaagctggagcaggtgtctgagaagggcaaggcttacaccaactacttcggacggtgcaatgtggccgagcacgaaaagctgatcctgctggcccagctgaagcccgagaaggatagcgacgaagccgtgacatatagcctgggaaagtttgggcagagggccctggatttctacagcattcatgtgaccaaggagtccacccaccccgtgaagcccctggcccagatcgccggaaacagatacgcctccggacctgtgggaaaggccctgagcgacgcatgtatgggcacaatcgcctccttcctgtctaagtaccaggacatcatcatcgaacaccagaaggtggtgaagggcaaccagaagagactggagagcctgcgggagctggccggcaaggaaaacctggaataccctagcgtgaccctgccacctcagcctcacaccaaggagggcgttgatgcctacaacgaagtgatcgcccgggtgcgaatgtgggtgaacctgaacctgtggcagaagctgaagctaagcagagatgatgccaagcctctgctgagactgaagggattcccttcctttcctctggtcgagagacaggccaacgaagtggactggtgggacatggtgtgtaacgtgaagaagctgatcaacgagaaaaaggaggatggcaaggtgttttggcagaatctggctggctacaagagacaggaagccctgagaccatacctgagcagcgaggaagatcggaagaagggaaagaaattcgctcggtaccagctgggcgacctgctgctgcacctggaaaagaagcacggcgaggactggggaaaggtgtacgacgaggcctgggagcggattgacaagaaagtggaaggcctgagcaagcacatcaagctggaagaggaacggagaagcgaggacgcccagagcaaggccgccctgaccgactggctgcgggctaaggccagcttcgtgatcgagggcctgaaggaggccgacaaggacgagttctgcagatgcgagctgaagctgcagaagtggtacggggacctgcggggaaagcccttcgccatcgaagccgagaacagcatcctggacatcagcggcttcagcaagcagtacaactgtgccttcatctggcagaaggacggcgtgaagaagctgaacctgtacctgatcatcaactacttcaagggcggcaagctgcggttcaagaagatcaaacctgaagccttcgaagccaacagattctacaccgtgatcaacaaaaagagcggcgagatcgtgcccatggaggtgaacttcaacttcgacgaccccaacctgatcatcctgcctctggcctttggcaagagacagggcagagaattcatctggaacgacctgctgtccctggaaaccggcagcctgaagctggccaacggaagagtgatcgagaagacactgtacaacagaagaacccggcaggatgagcctgccctgttcgtggccctgaccttcgagcggcgggaggtcctggactcctccaatatcaaaccaatgaacctgatcggcgtggcaagaggcgaaaacatccccgccgtgatcgccctgaccgaccccgagggctgcccactgagccggtttaaggatagcctgggaaacccaacccacatcctgagaatcggcgagagctataaggagaagcagcggaccatccaggccaagaaggaggtggagcagcggagagccggcggctacagccggaagtacgccagcaaagccaagaatctggcagacgatatggtgagaaacaccgctagagatctgctgtactacgccgtgacccaggatgccatgctgatcttcgccaacctgagccggggcttcggccggcagggcaagcggaccttcatggccgagagacagtacacacggatggaggactggctgaccgccaagctggcctacgagggcctgagcaagacctacctgtccaagacactggcccagtacacctccaagacatgcagcaactgtgggtttaccatcaccagcgccgactacgacagggtgctggagaagctgaagaagacagcaacaggctggatgaccacaattaacggcaaggagctgaaggtggagggccagattacctactacaacagatacaagagacagaacgtagtcaaggacctgtccgtcgagctggatagactgagcgaagaatctgtgaacaacgacatctcctcctggacaaagggcagaagcggagaagctctgagcctcctgaagaaaagattctcccatagacccgtgcaggagaagttcgtgtgcctgaactgcggcttcgagacacacgcagccgagcaagccgccctgaacatcgccagatcctggctgttcctgcggagccaggagtacaagaaataccagacaaacaagacaaccggcaacaccgataagagagccttcgtcgagacctggcagtccttttaccggaagaagcttaaggaggtgtggaaacctgccgtgcggtctggcggatctggcggaggctccaccagccccaagaaaaagagaaaagtctaagctgccttctgcggggcttgccttctggccatgcccttcttctctcccttgcacctgtacctcttggtctttgaataaagcctgagtaggaaggctagcaaaaaaaaaaaaaaaaaaaaaaaaaaaaaaaaaaaaaaaaaaaaaaaaaaaaaaaaaaaaaaaaaaaaaaaaaaaaaaaagcccagccggctccccaacctctaccgaggagggcacctctgagtccgccacccccgagagcggccctggcacctccaccgagcccagcgagggcagcgcacccggcagccctgccggcagccccacctccacagaggagggaaccagcaccgagcccagcgaaggcagcgccccaggcaccagcaccgagcctagtgagcaggagattaaacggatcaacaagatcagaagaagacttgtgaaagacagcaacaccaagaaggccggcaagacaggccccatgaaaaccctgctggttagagtgatgacacccgatctgagagagcggctggaaaacctgagaaagaagcctgaaaatatcccccagcccatcagcaatacatctagagccaacctgaataagctgctgaccgattacaccgaaatgaagaaggcgatcctgcatgtgtactgggaagagttccagaaggaccctgtgggcctgatgagccgggtggcccagcctgccagcaagaagatcgatcagaacaagctgaaacctgagatggacgagaagggcaacctgaccaccgccggctttgcctgctctcagtgtggccagcccctgttcgtgtacaagctggagcaggtgtctgagaagggcaaggcttacaccaactacttcggacggtgcaatgtggccgagcacgaaaagctgatcctgctggcccagctgaagcccgagaaggatagcgacgaagccgtgacatatagcctgggaaagtttgggcagagggccctggatttctacagcattcatgtgaccaaggagtccacccaccccgtgaagcccctggcccagatcgccggaaacagatacgcctccggacctgtgggaaaggccctgagcgacgcatgtatgggcacaatcgcctccttcctgtctaagtaccaggacatcatcatcgaacaccagaaggtggtgaagggcaaccagaagagactggagagcctgcgggagctggccggcaaggaaaacctggaataccctagcgtgaccctgccacctcagcctcacaccaaggagggcgttgatgcctacaacgaagtgatcgcccgggtgcgaatgtgggtgaacctgaacctgtggcagaagctgaagctaagcagagatgatgccaagcctctgctgagactgaagggattcccttcctttcctctggtcgagagacaggccaacgaagtggactggtgggacatggtgtgtaacgtgaagaagctgatcaacgagaaaaaggaggatggcaaggtgttttggcagaatctggctggctacaagagacaggaagccctgagaccatacctgagcagcgaggaagatcggaagaagggaaagaaattcgctcggtaccagctgggcgacctgctgctgcacctggaaaagaagcacggcgaggactggggaaaggtgtacgacgaggcctgggagcggattgacaagaaagtggaaggcctgagcaagcacatcaagctggaagaggaacggagaagcgaggacgcccagagcaaggccgccctgaccgactggctgcgggctaaggccagcttcgtgatcgagggcctgaaggaggccgacaaggacgagttctgcagatgcgagctgaagctgcagaagtggtacggggacctgcggggaaagcccttcgccatcgaagccgagaacagcatcctggacatcagcggcttcagcaagcagtacaactgtgccttcatctggcagaaggacggcgtgaagaagctgaacctgtacctgatcatcaactacttcaagggcggcaagctgcggttcaagaagatcaaacctgaagccttcgaagccaacagattctacaccgtgatcaacaaaaagagcggcgagatcgtgcccatggaggtgaacttcaacttcgacgaccccaacctgatcatcctgcctctggcctttggcaagagacagggcagagaattcatctggaacgacctgctgtccctggaaaccggcagcctgaagctggccaacggaagagtgatcgagaagacactgtacaacagaagaacccggcaggatgagcctgccctgttcgtggccctgaccttcgagcggcgggaggtcctggactcctccaatatcaaaccaatgaacctgatcggcgtggcaagaggcgaaaacatccccgccgtgatcgccctgaccgaccccgagggctgcccactgagccggtttaaggatagcctgggaaacccaacccacatcctgagaatcggcgagagctataaggagaagcagcggaccatccaggccaagaaggaggtggagcagcggagagccggcggctacagccggaagtacgccagcaaagccaagaatctggcagacgatatggtgagaaacaccgctagagatctgctgtactacgccgtgacccaggatgccatgctgatcttcgccaacctgagccggggcttcggccggcagggcaagcggaccttcatggccgagagacagtacacacggatggaggactggctgaccgccaagctggcctacgagggcctgagcaagacctacctgtccaagacactggcccagtacacctccaagacatgcagcaactgtgggtttaccatcaccagcgccgactacgacagggtgctggagaagctgaagaagacagcaacaggctggatgaccacaattaacggcaaggagctgaaggtggagggccagattacctactacaacagatacaagagacagaacgtagtcaaggacctgtccgtcgagctggatagactgagcgaagaatctgtgaacaacgacatctcctcctggacaaagggcagaagcggagaagctctgagcctcctgaagaaaagattctcccatagacccgtgcaggagaagttcgtgtgcctgaactgcggcttcgagacacacgcagccgagcaagccgccctgaacatcgccagatcctggctgttcctgcggagccaggagtacaagaaataccagacaaacaagacaaccggcaacaccgataagagagccttcgtcgagacctggcagtccttttaccggaagaagcttaaggaggtgtggaaacctgccgtgcggtctggcggatctggcggaggctccaccagccccaagaaaaagagaaaagtctaagctgccttctgcggggcttgccttctggccatgcccttcttctctcccttgcacctgtacctcttggtctttgaataaagcctgagtaggaaggctagcaaaaaaaaaaaaaaaaaaaaaaaaaaaaaaaaaaaaaaaaaaaaaaaaaaaaaaaaaaaaaaaaaaaaaaaaaaaaaaaa

SEQ ID NO: 9691 - RNA, 8787 nt, synthetic construct
  source 1..8787: mol_type = other RNA
aggaaataagagagaaaagaagagtaagaagaaatataagagccaccatggcccctaagaagaagcgtaaagtgagccggatgaaccacgaccaggagttcgacccccctaaggtgtaccctcccgtccccgccgagaagagaaagcccatccgggtcctgagcctgttcgatggcatcgccaccggtctgctggtgctgaaggacctgggcatccaggtggataggtacattgcctccgaggtgtgcgaggactccatcaccgtgggaatggtgcgtcatcagggcaagatcatgtacgtgggcgacgtgcggagcgtgacacagaagcatatccaggagtggggccctttcgacctggtgatcggcggcagcccttgcaatgacctgagcatcgtgaacccagcccggaagggcctgtacgagggaaccggcagactgttcttcgagttttacagactgctgcacgacgcccggcctaaggaaggcgacgaccggcccttcttttggctgttcgagaatgtggtggccatgggagtcagcgacaagcgggatattagccggttcctggagagcaaccccgtgatgatcgatgccaaggaagtgagcgccgcccaccgggccagatacttctggggcaatctgcctggcatgaacagacccctggccagcaccgtgaacgacaagctggagctgcaggagtgcctggagcacggccggatcgccaagttcagcaaggtgagaaccatcaccacccgaagcaacagcatcaaacaaggcaaggaccagcactttcctgtgttcatgaacgagaaggaggacatcctgtggtgtaccgagatggagagagtgttcgggttcccagtccactacacagatgtcagcaacatgtctagactggccagacagagactgctgggaagaagctggtccgtccctgtgatcagacacctgttcgcccctctgaaggagtacttcgcctgcgtgagcagcggcaacagcaacgccaacagccggggccccagcttctctagcggcctggtgccactgtccctgagagggagccacatgggccccatggagatctacaaaaccgtgagcgcctggaagcggcagcctgtgcgcgtgctgagcctgtttcggaatatcgataaagtcctgaaaagcctgggattcctggagagcggctctggctccggcggtggcaccctgaagtacgtggaggatgtgacaaacgtggtcagacgggatgtggagaagtggggccccttcgatctggtgtacggcagcacccaacccctgggcagctcttgtgaccggtgccctggctggtacatgtttcagttccaccggatcctgcagtacgccctgccgagacaggagtcccagcggccattcttttggattttcatggacaacttgctgctgaccgaggatgaccaggaaactaccactcggttcctgcagaccgaagccgtgaccctgcaggacgtgagaggccgggactaccagaacgccatgcgggtgtggtccaacatccctggactgaaaagcaagcacgcacctctgacccctaaagaagaggagtacctgcaggcccaggtgcggagcagaagcaagctggacgcccctaaggtggatctgctggtgaagaattgcctcctgcccctgagagagtacttcaagtatttcagccagaatagtctgcccctgggaggcagcggcggcggcatgctgagccccgtgaccttcgaggacgtggccgtgtacttcaccgagggccagggcgccctgctggaccccaaccagagggccctgtacagggaggtgatgatggagaactacgagaacatggccagcctgggcttcctgttcatcaagcccgccctgatcagccagctggagcagggcgaggagctgtgggcccccgagagccagggcctggacgccgccgagatcagcgacaccagcgacggcggcccaagcagcggcgcccctcctcccagcggcggcaggcggcccaagcagcggcgcccctcctcccagcggcggcagcccagccggctccccaacctctaccgaggagggcacctctgagtccgccacccccgagagcggccctggcacctccaccgagcccagcgagggcagcgcacccggcagccctgccggcagccccacctccacagaggagggaaccagcaccgagcccagcgaaggcagcgccccaggcaccagcaccgagcctagtgagcaggagattaaacggatcaacaagatcagaagaagacttgtgaaagacagcaacaccaagaaggccggcaagacaggccccatgaaaaccctgctggttagagtgatgacacccgatctgagagagcggctggaaaacctgagaaagaagcctgaaaatatcccccagcccatcagcaatacatctagagccaacctgaataagctgctgaccgattacaccgaaatgaagaaggcgatcctgcatgtgtactgggaagagttccagaaggaccctgtgggcctgatgagccgggtggcccagcctgccagcaagaagatcgatcagaacaagctgaaacctgagatggacgagaagggcaacctgaccaccgccggctttgcctgctctcagtgtggccagcccctgttcgtgtacaagctggagcaggtgtctgagaagggcaaggcttacaccaactacttcggacggtgcaatgtggccgagcacgaaaagctgatcctgctggcccagctgaagcccgagaaggatagcgacgaagccgtgacatatagcctgggaaagtttgggcagagggccctggatttctacagcattcatgtgaccaaggagtccacccaccccgtgaagcccctggcccagatcgccggaaacagatacgcctccggacctgtgggaaaggccctgagcgacgcatgtatgggcacaatcgcctccttcctgtctaagtaccaggacatcatcatcgaacaccagaaggtggtgaagggcaaccagaagagactggagagcctgcgggagctggccggcaaggaaaacctggaataccctagcgtgaccctgccacctcagcctcacaccaaggagggcgttgatgcctacaacgaagtgatcgcccgggtgcgaatgtgggtgaacctgaacctgtggcagaagctgaagctaagcagagatgatgccaagcctctgctgagactgaagggattcccttcctttcctctggtcgagagacaggccaacgaagtggactggtgggacatggtgtgtaacgtgaagaagctgatcaacgagaaaaaggaggatggcaaggtgttttggcagaatctggctggctacaagagacaggaagccctgagaccatacctgagcagcgaggaagatcggaagaagggaaagaaattcgctcggtaccagctgggcgacctgctgctgcacctggaaaagaagcacggcgaggactggggaaaggtgtacgacgaggcctgggagcggattgacaagaaagtggaaggcctgagcaagcacatcaagctggaagaggaacggagaagcgaggacgcccagagcaaggccgccctgaccgactggctgcgggctaaggccagcttcgtgatcgagggcctgaaggaggccgacaaggacgagttctgcagatgcgagctgaagctgcagaagtggtacggggacctgcggggaaagcccttcgccatcgaagccgagaacagcatcctggacatcagcggcttcagcaagcagtacaactgtgccttcatctggcagaaggacggcgtgaagaagctgaacctgtacctgatcatcaactacttcaagggcggcaagctgcggttcaagaagatcaaacctgaagccttcgaagccaacagattctacaccgtgatcaacaaaaagagcggcgagatcgtgcccatggaggtgaacttcaacttcgacgaccccaacctgatcatcctgcctctggcctttggcaagagacagggcagagaattcatctggaacgacctgctgtccctggaaaccggcagcctgaagctggccaacggaagagtgatcgagaagacactgtacaacagaagaacccggcaggatgagcctgccctgttcgtggccctgaccttcgagcggcgggaggtcctggactcctccaatatcaaaccaatgaacctgatcggcgtggcaagaggcgaaaacatccccgccgtgatcgccctgaccgaccccgagggctgcccactgagccggtttaaggatagcctgggaaacccaacccacatcctgagaatcggcgagagctataaggagaagcagcggaccatccaggccaagaaggaggtggagcagcggagagccggcggctacagccggaagtacgccagcaaagccaagaatctggcagacgatatggtgagaaacaccgctagagatctgctgtactacgccgtgacccaggatgccatgctgatcttcgccaacctgagccggggcttcggccggcagggcaagcggaccttcatggccgagagacagtacacacggatggaggactggctgaccgccaagctggcctacgagggcctgagcaagacctacctgtccaagacactggcccagtacacctccaagacatgcagcaactgtgggtttaccatcaccagcgccgactacgacagggtgctggagaagctgaagaagacagcaacaggctggatgaccacaattaacggcaaggagctgaaggtggagggccagattacctactacaacagatacaagagacagaacgtagtcaaggacctgtccgtcgagctggatagactgagcgaagaatctgtgaacaacgacatctcctcctggacaaagggcagaagcggagaagctctgagcctcctgaagaaaagattctcccatagacccgtgcaggagaagttcgtgtgcctgaactgcggcttcgagacacacgcagccgagcaagccgccctgaacatcgccagatcctggctgttcctgcggagccaggagtacaagaaataccagacaaacaagacaaccggcaacaccgataagagagccttcgtcgagacctggcagtccttttaccggaagaagcttaaggaggtgtggaaacctgccgtgcggtctggcggatctggcggaggctccaccagccccaagaaaaagagaaaagtctaagctgccttctgcggggcttgccttctggccatgcccttcttctctcccttgcacctgtacctcttggtctttgaataaagcctgagtaggaaggctagcaaaaaaaaaaaaaaaaaaaaaaaaaaaaaaaaaaaaaaaaaaaaaaaaaaaaaaaaaaaaaaaaaaaaaaaaaaaaaaaagcccagccggctccccaacctctaccgaggagggcacctctgagtccgccacccccgagagcggccctggcacctccaccgagcccagcgagggcagcgcacccggcagccctgccggcagccccacctccacagaggagggaaccagcaccgagcccagcgaaggcagcgccccaggcaccagcaccgagcctagtgagcaggagattaaacggatcaacaagatcagaagaagacttgtgaaagacagcaacaccaagaaggccggcaagacaggccccatgaaaaccctgctggttagagtgatgacacccgatctgagagagcggctggaaaacctgagaaagaagcctgaaaatatcccccagcccatcagcaatacatctagagccaacctgaataagctgctgaccgattacaccgaaatgaagaaggcgatcctgcatgtgtactgggaagagttccagaaggaccctgtgggcctgatgagccgggtggcccagcctgccagcaagaagatcgatcagaacaagctgaaacctgagatggacgagaagggcaacctgaccaccgccggctttgcctgctctcagtgtggccagcccctgttcgtgtacaagctggagcaggtgtctgagaagggcaaggcttacaccaactacttcggacggtgcaatgtggccgagcacgaaaagctgatcctgctggcccagctgaagcccgagaaggatagcgacgaagccgtgacatatagcctgggaaagtttgggcagagggccctggatttctacagcattcatgtgaccaaggagtccacccaccccgtgaagcccctggcccagatcgccggaaacagatacgcctccggacctgtgggaaaggccctgagcgacgcatgtatgggcacaatcgcctccttcctgtctaagtaccaggacatcatcatcgaacaccagaaggtggtgaagggcaaccagaagagactggagagcctgcgggagctggccggcaaggaaaacctggaataccctagcgtgaccctgccacctcagcctcacaccaaggagggcgttgatgcctacaacgaagtgatcgcccgggtgcgaatgtgggtgaacctgaacctgtggcagaagctgaagctaagcagagatgatgccaagcctctgctgagactgaagggattcccttcctttcctctggtcgagagacaggccaacgaagtggactggtgggacatggtgtgtaacgtgaagaagctgatcaacgagaaaaaggaggatggcaaggtgttttggcagaatctggctggctacaagagacaggaagccctgagaccatacctgagcagcgaggaagatcggaagaagggaaagaaattcgctcggtaccagctgggcgacctgctgctgcacctggaaaagaagcacggcgaggactggggaaaggtgtacgacgaggcctgggagcggattgacaagaaagtggaaggcctgagcaagcacatcaagctggaagaggaacggagaagcgaggacgcccagagcaaggccgccctgaccgactggctgcgggctaaggccagcttcgtgatcgagggcctgaaggaggccgacaaggacgagttctgcagatgcgagctgaagctgcagaagtggtacggggacctgcggggaaagcccttcgccatcgaagccgagaacagcatcctggacatcagcggcttcagcaagcagtacaactgtgccttcatctggcagaaggacggcgtgaagaagctgaacctgtacctgatcatcaactacttcaagggcggcaagctgcggttcaagaagatcaaacctgaagccttcgaagccaacagattctacaccgtgatcaacaaaaagagcggcgagatcgtgcccatggaggtgaacttcaacttcgacgaccccaacctgatcatcctgcctctggcctttggcaagagacagggcagagaattcatctggaacgacctgctgtccctggaaaccggcagcctgaagctggccaacggaagagtgatcgagaagacactgtacaacagaagaacccggcaggatgagcctgccctgttcgtggccctgaccttcgagcggcgggaggtcctggactcctccaatatcaaaccaatgaacctgatcggcgtggcaagaggcgaaaacatccccgccgtgatcgccctgaccgaccccgagggctgcccactgagccggtttaaggatagcctgggaaacccaacccacatcctgagaatcggcgagagctataaggagaagcagcggaccatccaggccaagaaggaggtggagcagcggagagccggcggctacagccggaagtacgccagcaaagccaagaatctggcagacgatatggtgagaaacaccgctagagatctgctgtactacgccgtgacccaggatgccatgctgatcttcgccaacctgagccggggcttcggccggcagggcaagcggaccttcatggccgagagacagtacacacggatggaggactggctgaccgccaagctggcctacgagggcctgagcaagacctacctgtccaagacactggcccagtacacctccaagacatgcagcaactgtgggtttaccatcaccagcgccgactacgacagggtgctggagaagctgaagaagacagcaacaggctggatgaccacaattaacggcaaggagctgaaggtggagggccagattacctactacaacagatacaagagacagaacgtagtcaaggacctgtccgtcgagctggatagactgagcgaagaatctgtgaacaacgacatctcctcctggacaaagggcagaagcggagaagctctgagcctcctgaagaaaagattctcccatagacccgtgcaggagaagttcgtgtgcctgaactgcggcttcgagacacacgcagccgagcaagccgccctgaacatcgccagatcctggctgttcctgcggagccaggagtacaagaaataccagacaaacaagacaaccggcaacaccgataagagagccttcgtcgagacctggcagtccttttaccggaagaagcttaaggaggtgtggaaacctgccgtgcggtctggcggatctggcggaggctccaccagccccaagaaaaagagaaaagtctaagctgccttctgcggggcttgccttctggccatgcccttcttctctcccttgcacctgtacctcttggtctttgaataaagcctgagtaggaaggctagcaaaaaaaaaaaaaaaaaaaaaaaaaaaaaaaaaaaaaaaaaaaaaaaaaaaaaaaaaaaaaaaaaaaaaaaaaaaaaaaa

SEQ ID NO: 9692 - RNA, 8787 nt, synthetic construct
  source 1..8787: mol_type = other RNA
aggaaataagagagaaaagaagagtaagaagaaatataagagccaccatggcccctaagaagaagcgtaaagtgagccggatgaaccacgaccaggagttcgacccccctaaggtgtaccctcccgtccccgccgagaagagaaagcccatccgggtcctgagcctgttcgatggcatcgccaccggtctgctggtgctgaaggacctgggcatccaggtggataggtacattgcctccgaggtgtgcgaggactccatcaccgtgggaatggtgcgtcatcagggcaagatcatgtacgtgggcgacgtgcggagcgtgacacagaagcatatccaggagtggggccctttcgacctggtgatcggcggcagcccttgcaatgacctgagcatcgtgaacccagcccggaagggcctgtacgagggaaccggcagactgttcttcgagttttacagactgctgcacgacgcccggcctaaggaaggcgacgaccggcccttcttttggctgttcgagaatgtggtggccatgggagtcagcgacaagcgggatattagccggttcctggagagcaaccccgtgatgatcgatgccaaggaagtgagcgccgcccaccgggccagatacttctggggcaatctgcctggcatgaacagacccctggccagcaccgtgaacgacaagctggagctgcaggagtgcctggagcacggccggatcgccaagttcagcaaggtgagaaccatcaccacccgaagcaacagcatcaaacaaggcaaggaccagcactttcctgtgttcatgaacgagaaggaggacatcctgtggtgtaccgagatggagagagtgttcgggttcccagtccactacacagatgtcagcaacatgtctagactggccagacagagactgctgggaagaagctggtccgtccctgtgatcagacacctgttcgcccctctgaaggagtacttcgcctgcgtgagcagcggcaacagcaacgccaacagccggggccccagcttctctagcggcctggtgccactgtccctgagagggagccacatgggccccatggagatctacaaaaccgtgagcgcctggaagcggcagcctgtgcgcgtgctgagcctgtttcggaatatcgataaagtcctgaaaagcctgggattcctggagagcggctctggctccggcggtggcaccctgaagtacgtggaggatgtgacaaacgtggtcagacgggatgtggagaagtggggccccttcgatctggtgtacggcagcacccaacccctgggcagctcttgtgaccggtgccctggctggtacatgtttcagttccaccggatcctgcagtacgccctgccgagacaggagtcccagcggccattcttttggattttcatggacaacttgctgctgaccgaggatgaccaggaaactaccactcggttcctgcagaccgaagccgtgaccctgcaggacgtgagaggccgggactaccagaacgccatgcgggtgtggtccaacatccctggactgaaaagcaagcacgcacctctgacccctaaagaagaggagtacctgcaggcccaggtgcggagcagaagcaagctggacgcccctaaggtggatctgctggtgaagaattgcctcctgcccctgagagagtacttcaagtatttcagccagaatagtctgcccctgggaggcagcggcggcggcatgatgaccttcagggacgtggccatcgacttcagccaggaggagtggaagtggctgcagcccgcccagagggacctgtacaggtgcgtgatgctggagaactacggccacctggtgagcctgggcctgagcatcagcaagcccgacgtggtgagcctgctggagcagggcaaggagccctggctgggcaagaagggcatcagcgagagcagcggcgagatcaaggacttcagccccaagaacggcggcccaagcagcggcgcccctcctcccagcggcggcaggcggcccaagcagcggcgcccctcctcccagcggcggcagcccagccggctccccaacctctaccgaggagggcacctctgagtccgccacccccgagagcggccctggcacctccaccgagcccagcgagggcagcgcacccggcagccctgccggcagccccacctccacagaggagggaaccagcaccgagcccagcgaaggcagcgccccaggcaccagcaccgagcctagtgagcaggagattaaacggatcaacaagatcagaagaagacttgtgaaagacagcaacaccaagaaggccggcaagacaggccccatgaaaaccctgctggttagagtgatgacacccgatctgagagagcggctggaaaacctgagaaagaagcctgaaaatatcccccagcccatcagcaatacatctagagccaacctgaataagctgctgaccgattacaccgaaatgaagaaggcgatcctgcatgtgtactgggaagagttccagaaggaccctgtgggcctgatgagccgggtggcccagcctgccagcaagaagatcgatcagaacaagctgaaacctgagatggacgagaagggcaacctgaccaccgccggctttgcctgctctcagtgtggccagcccctgttcgtgtacaagctggagcaggtgtctgagaagggcaaggcttacaccaactacttcggacggtgcaatgtggccgagcacgaaaagctgatcctgctggcccagctgaagcccgagaaggatagcgacgaagccgtgacatatagcctgggaaagtttgggcagagggccctggatttctacagcattcatgtgaccaaggagtccacccaccccgtgaagcccctggcccagatcgccggaaacagatacgcctccggacctgtgggaaaggccctgagcgacgcatgtatgggcacaatcgcctccttcctgtctaagtaccaggacatcatcatcgaacaccagaaggtggtgaagggcaaccagaagagactggagagcctgcgggagctggccggcaaggaaaacctggaataccctagcgtgaccctgccacctcagcctcacaccaaggagggcgttgatgcctacaacgaagtgatcgcccgggtgcgaatgtgggtgaacctgaacctgtggcagaagctgaagctaagcagagatgatgccaagcctctgctgagactgaagggattcccttcctttcctctggtcgagagacaggccaacgaagtggactggtgggacatggtgtgtaacgtgaagaagctgatcaacgagaaaaaggaggatggcaaggtgttttggcagaatctggctggctacaagagacaggaagccctgagaccatacctgagcagcgaggaagatcggaagaagggaaagaaattcgctcggtaccagctgggcgacctgctgctgcacctggaaaagaagcacggcgaggactggggaaaggtgtacgacgaggcctgggagcggattgacaagaaagtggaaggcctgagcaagcacatcaagctggaagaggaacggagaagcgaggacgcccagagcaaggccgccctgaccgactggctgcgggctaaggccagcttcgtgatcgagggcctgaaggaggccgacaaggacgagttctgcagatgcgagctgaagctgcagaagtggtacggggacctgcggggaaagcccttcgccatcgaagccgagaacagcatcctggacatcagcggcttcagcaagcagtacaactgtgccttcatctggcagaaggacggcgtgaagaagctgaacctgtacctgatcatcaactacttcaagggcggcaagctgcggttcaagaagatcaaacctgaagccttcgaagccaacagattctacaccgtgatcaacaaaaagagcggcgagatcgtgcccatggaggtgaacttcaacttcgacgaccccaacctgatcatcctgcctctggcctttggcaagagacagggcagagaattcatctggaacgacctgctgtccctggaaaccggcagcctgaagctggccaacggaagagtgatcgagaagacactgtacaacagaagaacccggcaggatgagcctgccctgttcgtggccctgaccttcgagcggcgggaggtcctggactcctccaatatcaaaccaatgaacctgatcggcgtggcaagaggcgaaaacatccccgccgtgatcgccctgaccgaccccgagggctgcccactgagccggtttaaggatagcctgggaaacccaacccacatcctgagaatcggcgagagctataaggagaagcagcggaccatccaggccaagaaggaggtggagcagcggagagccggcggctacagccggaagtacgccagcaaagccaagaatctggcagacgatatggtgagaaacaccgctagagatctgctgtactacgccgtgacccaggatgccatgctgatcttcgccaacctgagccggggcttcggccggcagggcaagcggaccttcatggccgagagacagtacacacggatggaggactggctgaccgccaagctggcctacgagggcctgagcaagacctacctgtccaagacactggcccagtacacctccaagacatgcagcaactgtgggtttaccatcaccagcgccgactacgacagggtgctggagaagctgaagaagacagcaacaggctggatgaccacaattaacggcaaggagctgaaggtggagggccagattacctactacaacagatacaagagacagaacgtagtcaaggacctgtccgtcgagctggatagactgagcgaagaatctgtgaacaacgacatctcctcctggacaaagggcagaagcggagaagctctgagcctcctgaagaaaagattctcccatagacccgtgcaggagaagttcgtgtgcctgaactgcggcttcgagacacacgcagccgagcaagccgccctgaacatcgccagatcctggctgttcctgcggagccaggagtacaagaaataccagacaaacaagacaaccggcaacaccgataagagagccttcgtcgagacctggcagtccttttaccggaagaagcttaaggaggtgtggaaacctgccgtgcggtctggcggatctggcggaggctccaccagccccaagaaaaagagaaaagtctaagctgccttctgcggggcttgccttctggccatgcccttcttctctcccttgcacctgtacctcttggtctttgaataaagcctgagtaggaaggctagcaaaaaaaaaaaaaaaaaaaaaaaaaaaaaaaaaaaaaaaaaaaaaaaaaaaaaaaaaaaaaaaaaaaaaaaaaaaaaaaagcccagccggctccccaacctctaccgaggagggcacctctgagtccgccacccccgagagcggccctggcacctccaccgagcccagcgagggcagcgcacccggcagccctgccggcagccccacctccacagaggagggaaccagcaccgagcccagcgaaggcagcgccccaggcaccagcaccgagcctagtgagcaggagattaaacggatcaacaagatcagaagaagacttgtgaaagacagcaacaccaagaaggccggcaagacaggccccatgaaaaccctgctggttagagtgatgacacccgatctgagagagcggctggaaaacctgagaaagaagcctgaaaatatcccccagcccatcagcaatacatctagagccaacctgaataagctgctgaccgattacaccgaaatgaagaaggcgatcctgcatgtgtactgggaagagttccagaaggaccctgtgggcctgatgagccgggtggcccagcctgccagcaagaagatcgatcagaacaagctgaaacctgagatggacgagaagggcaacctgaccaccgccggctttgcctgctctcagtgtggccagcccctgttcgtgtacaagctggagcaggtgtctgagaagggcaaggcttacaccaactacttcggacggtgcaatgtggccgagcacgaaaagctgatcctgctggcccagctgaagcccgagaaggatagcgacgaagccgtgacatatagcctgggaaagtttgggcagagggccctggatttctacagcattcatgtgaccaaggagtccacccaccccgtgaagcccctggcccagatcgccggaaacagatacgcctccggacctgtgggaaaggccctgagcgacgcatgtatgggcacaatcgcctccttcctgtctaagtaccaggacatcatcatcgaacaccagaaggtggtgaagggcaaccagaagagactggagagcctgcgggagctggccggcaaggaaaacctggaataccctagcgtgaccctgccacctcagcctcacaccaaggagggcgttgatgcctacaacgaagtgatcgcccgggtgcgaatgtgggtgaacctgaacctgtggcagaagctgaagctaagcagagatgatgccaagcctctgctgagactgaagggattcccttcctttcctctggtcgagagacaggccaacgaagtggactggtgggacatggtgtgtaacgtgaagaagctgatcaacgagaaaaaggaggatggcaaggtgttttggcagaatctggctggctacaagagacaggaagccctgagaccatacctgagcagcgaggaagatcggaagaagggaaagaaattcgctcggtaccagctgggcgacctgctgctgcacctggaaaagaagcacggcgaggactggggaaaggtgtacgacgaggcctgggagcggattgacaagaaagtggaaggcctgagcaagcacatcaagctggaagaggaacggagaagcgaggacgcccagagcaaggccgccctgaccgactggctgcgggctaaggccagcttcgtgatcgagggcctgaaggaggccgacaaggacgagttctgcagatgcgagctgaagctgcagaagtggtacggggacctgcggggaaagcccttcgccatcgaagccgagaacagcatcctggacatcagcggcttcagcaagcagtacaactgtgccttcatctggcagaaggacggcgtgaagaagctgaacctgtacctgatcatcaactacttcaagggcggcaagctgcggttcaagaagatcaaacctgaagccttcgaagccaacagattctacaccgtgatcaacaaaaagagcggcgagatcgtgcccatggaggtgaacttcaacttcgacgaccccaacctgatcatcctgcctctggcctttggcaagagacagggcagagaattcatctggaacgacctgctgtccctggaaaccggcagcctgaagctggccaacggaagagtgatcgagaagacactgtacaacagaagaacccggcaggatgagcctgccctgttcgtggccctgaccttcgagcggcgggaggtcctggactcctccaatatcaaaccaatgaacctgatcggcgtggcaagaggcgaaaacatccccgccgtgatcgccctgaccgaccccgagggctgcccactgagccggtttaaggatagcctgggaaacccaacccacatcctgagaatcggcgagagctataaggagaagcagcggaccatccaggccaagaaggaggtggagcagcggagagccggcggctacagccggaagtacgccagcaaagccaagaatctggcagacgatatggtgagaaacaccgctagagatctgctgtactacgccgtgacccaggatgccatgctgatcttcgccaacctgagccggggcttcggccggcagggcaagcggaccttcatggccgagagacagtacacacggatggaggactggctgaccgccaagctggcctacgagggcctgagcaagacctacctgtccaagacactggcccagtacacctccaagacatgcagcaactgtgggtttaccatcaccagcgccgactacgacagggtgctggagaagctgaagaagacagcaacaggctggatgaccacaattaacggcaaggagctgaaggtggagggccagattacctactacaacagatacaagagacagaacgtagtcaaggacctgtccgtcgagctggatagactgagcgaagaatctgtgaacaacgacatctcctcctggacaaagggcagaagcggagaagctctgagcctcctgaagaaaagattctcccatagacccgtgcaggagaagttcgtgtgcctgaactgcggcttcgagacacacgcagccgagcaagccgccctgaacatcgccagatcctggctgttcctgcggagccaggagtacaagaaataccagacaaacaagacaaccggcaacaccgataagagagccttcgtcgagacctggcagtccttttaccggaagaagcttaaggaggtgtggaaacctgccgtgcggtctggcggatctggcggaggctccaccagccccaagaaaaagagaaaagtctaagctgccttctgcggggcttgccttctggccatgcccttcttctctcccttgcacctgtacctcttggtctttgaataaagcctgagtaggaaggctagcaaaaaaaaaaaaaaaaaaaaaaaaaaaaaaaaaaaaaaaaaaaaaaaaaaaaaaaaaaaaaaaaaaaaaaaaaaaaaaaa

SEQ ID NO: 9693 - RNA, 8787 nt, synthetic construct
  source 1..8787: mol_type = other RNA
aggaaataagagagaaaagaagagtaagaagaaatataagagccaccatggcccctaagaagaagcgtaaagtgagccggatgaaccacgaccaggagttcgacccccctaaggtgtaccctcccgtccccgccgagaagagaaagcccatccgggtcctgagcctgttcgatggcatcgccaccggtctgctggtgctgaaggacctgggcatccaggtggataggtacattgcctccgaggtgtgcgaggactccatcaccgtgggaatggtgcgtcatcagggcaagatcatgtacgtgggcgacgtgcggagcgtgacacagaagcatatccaggagtggggccctttcgacctggtgatcggcggcagcccttgcaatgacctgagcatcgtgaacccagcccggaagggcctgtacgagggaaccggcagactgttcttcgagttttacagactgctgcacgacgcccggcctaaggaaggcgacgaccggcccttcttttggctgttcgagaatgtggtggccatgggagtcagcgacaagcgggatattagccggttcctggagagcaaccccgtgatgatcgatgccaaggaagtgagcgccgcccaccgggccagatacttctggggcaatctgcctggcatgaacagacccctggccagcaccgtgaacgacaagctggagctgcaggagtgcctggagcacggccggatcgccaagttcagcaaggtgagaaccatcaccacccgaagcaacagcatcaaacaaggcaaggaccagcactttcctgtgttcatgaacgagaaggaggacatcctgtggtgtaccgagatggagagagtgttcgggttcccagtccactacacagatgtcagcaacatgtctagactggccagacagagactgctgggaagaagctggtccgtccctgtgatcagacacctgttcgcccctctgaaggagtacttcgcctgcgtgagcagcggcaacagcaacgccaacagccggggccccagcttctctagcggcctggtgccactgtccctgagagggagccacatgggccccatggagatctacaaaaccgtgagcgcctggaagcggcagcctgtgcgcgtgctgagcctgtttcggaatatcgataaagtcctgaaaagcctgggattcctggagagcggctctggctccggcggtggcaccctgaagtacgtggaggatgtgacaaacgtggtcagacgggatgtggagaagtggggccccttcgatctggtgtacggcagcacccaacccctgggcagctcttgtgaccggtgccctggctggtacatgtttcagttccaccggatcctgcagtacgccctgccgagacaggagtcccagcggccattcttttggattttcatggacaacttgctgctgaccgaggatgaccaggaaactaccactcggttcctgcagaccgaagccgtgaccctgcaggacgtgagaggccgggactaccagaacgccatgcgggtgtggtccaacatccctggactgaaaagcaagcacgcacctctgacccctaaagaagaggagtacctgcaggcccaggtgcggagcagaagcaagctggacgcccctaaggtggatctgctggtgaagaattgcctcctgcccctgagagagtacttcaagtatttcagccagaatagtctgcccctgggaggcagcggcggcggcgccgtgacccagctgaccttcgaggacgtggccgtgtacttcaccagggaggagtggaggtgcctgacccccgcccagaggaccctgtacagggacgtgatgctggacacctacaggaacctggtgagcgtgggcgtgagcccccccagcatgagcgtgatcctgcccctggagttccaggaggagccctgggtggcccagagccacgtgaccaccctgggcggcctgaacggctgggagggcggcggcccaagcagcggcgcccctcctcccagcggcggcaggcggcccaagcagcggcgcccctcctcccagcggcggcagcccagccggctccccaacctctaccgaggagggcacctctgagtccgccacccccgagagcggccctggcacctccaccgagcccagcgagggcagcgcacccggcagccctgccggcagccccacctccacagaggagggaaccagcaccgagcccagcgaaggcagcgccccaggcaccagcaccgagcctagtgagcaggagattaaacggatcaacaagatcagaagaagacttgtgaaagacagcaacaccaagaaggccggcaagacaggccccatgaaaaccctgctggttagagtgatgacacccgatctgagagagcggctggaaaacctgagaaagaagcctgaaaatatcccccagcccatcagcaatacatctagagccaacctgaataagctgctgaccgattacaccgaaatgaagaaggcgatcctgcatgtgtactgggaagagttccagaaggaccctgtgggcctgatgagccgggtggcccagcctgccagcaagaagatcgatcagaacaagctgaaacctgagatggacgagaagggcaacctgaccaccgccggctttgcctgctctcagtgtggccagcccctgttcgtgtacaagctggagcaggtgtctgagaagggcaaggcttacaccaactacttcggacggtgcaatgtggccgagcacgaaaagctgatcctgctggcccagctgaagcccgagaaggatagcgacgaagccgtgacatatagcctgggaaagtttgggcagagggccctggatttctacagcattcatgtgaccaaggagtccacccaccccgtgaagcccctggcccagatcgccggaaacagatacgcctccggacctgtgggaaaggccctgagcgacgcatgtatgggcacaatcgcctccttcctgtctaagtaccaggacatcatcatcgaacaccagaaggtggtgaagggcaaccagaagagactggagagcctgcgggagctggccggcaaggaaaacctggaataccctagcgtgaccctgccacctcagcctcacaccaaggagggcgttgatgcctacaacgaagtgatcgcccgggtgcgaatgtgggtgaacctgaacctgtggcagaagctgaagctaagcagagatgatgccaagcctctgctgagactgaagggattcccttcctttcctctggtcgagagacaggccaacgaagtggactggtgggacatggtgtgtaacgtgaagaagctgatcaacgagaaaaaggaggatggcaaggtgttttggcagaatctggctggctacaagagacaggaagccctgagaccatacctgagcagcgaggaagatcggaagaagggaaagaaattcgctcggtaccagctgggcgacctgctgctgcacctggaaaagaagcacggcgaggactggggaaaggtgtacgacgaggcctgggagcggattgacaagaaagtggaaggcctgagcaagcacatcaagctggaagaggaacggagaagcgaggacgcccagagcaaggccgccctgaccgactggctgcgggctaaggccagcttcgtgatcgagggcctgaaggaggccgacaaggacgagttctgcagatgcgagctgaagctgcagaagtggtacggggacctgcggggaaagcccttcgccatcgaagccgagaacagcatcctggacatcagcggcttcagcaagcagtacaactgtgccttcatctggcagaaggacggcgtgaagaagctgaacctgtacctgatcatcaactacttcaagggcggcaagctgcggttcaagaagatcaaacctgaagccttcgaagccaacagattctacaccgtgatcaacaaaaagagcggcgagatcgtgcccatggaggtgaacttcaacttcgacgaccccaacctgatcatcctgcctctggcctttggcaagagacagggcagagaattcatctggaacgacctgctgtccctggaaaccggcagcctgaagctggccaacggaagagtgatcgagaagacactgtacaacagaagaacccggcaggatgagcctgccctgttcgtggccctgaccttcgagcggcgggaggtcctggactcctccaatatcaaaccaatgaacctgatcggcgtggcaagaggcgaaaacatccccgccgtgatcgccctgaccgaccccgagggctgcccactgagccggtttaaggatagcctgggaaacccaacccacatcctgagaatcggcgagagctataaggagaagcagcggaccatccaggccaagaaggaggtggagcagcggagagccggcggctacagccggaagtacgccagcaaagccaagaatctggcagacgatatggtgagaaacaccgctagagatctgctgtactacgccgtgacccaggatgccatgctgatcttcgccaacctgagccggggcttcggccggcagggcaagcggaccttcatggccgagagacagtacacacggatggaggactggctgaccgccaagctggcctacgagggcctgagcaagacctacctgtccaagacactggcccagtacacctccaagacatgcagcaactgtgggtttaccatcaccagcgccgactacgacagggtgctggagaagctgaagaagacagcaacaggctggatgaccacaattaacggcaaggagctgaaggtggagggccagattacctactacaacagatacaagagacagaacgtagtcaaggacctgtccgtcgagctggatagactgagcgaagaatctgtgaacaacgacatctcctcctggacaaagggcagaagcggagaagctctgagcctcctgaagaaaagattctcccatagacccgtgcaggagaagttcgtgtgcctgaactgcggcttcgagacacacgcagccgagcaagccgccctgaacatcgccagatcctggctgttcctgcggagccaggagtacaagaaataccagacaaacaagacaaccggcaacaccgataagagagccttcgtcgagacctggcagtccttttaccggaagaagcttaaggaggtgtggaaacctgccgtgcggtctggcggatctggcggaggctccaccagccccaagaaaaagagaaaagtctaagctgccttctgcggggcttgccttctggccatgcccttcttctctcccttgcacctgtacctcttggtctttgaataaagcctgagtaggaaggctagcaaaaaaaaaaaaaaaaaaaaaaaaaaaaaaaaaaaaaaaaaaaaaaaaaaaaaaaaaaaaaaaaaaaaaaaaaaaaaaaagcccagccggctccccaacctctaccgaggagggcacctctgagtccgccacccccgagagcggccctggcacctccaccgagcccagcgagggcagcgcacccggcagccctgccggcagccccacctccacagaggagggaaccagcaccgagcccagcgaaggcagcgccccaggcaccagcaccgagcctagtgagcaggagattaaacggatcaacaagatcagaagaagacttgtgaaagacagcaacaccaagaaggccggcaagacaggccccatgaaaaccctgctggttagagtgatgacacccgatctgagagagcggctggaaaacctgagaaagaagcctgaaaatatcccccagcccatcagcaatacatctagagccaacctgaataagctgctgaccgattacaccgaaatgaagaaggcgatcctgcatgtgtactgggaagagttccagaaggaccctgtgggcctgatgagccgggtggcccagcctgccagcaagaagatcgatcagaacaagctgaaacctgagatggacgagaagggcaacctgaccaccgccggctttgcctgctctcagtgtggccagcccctgttcgtgtacaagctggagcaggtgtctgagaagggcaaggcttacaccaactacttcggacggtgcaatgtggccgagcacgaaaagctgatcctgctggcccagctgaagcccgagaaggatagcgacgaagccgtgacatatagcctgggaaagtttgggcagagggccctggatttctacagcattcatgtgaccaaggagtccacccaccccgtgaagcccctggcccagatcgccggaaacagatacgcctccggacctgtgggaaaggccctgagcgacgcatgtatgggcacaatcgcctccttcctgtctaagtaccaggacatcatcatcgaacaccagaaggtggtgaagggcaaccagaagagactggagagcctgcgggagctggccggcaaggaaaacctggaataccctagcgtgaccctgccacctcagcctcacaccaaggagggcgttgatgcctacaacgaagtgatcgcccgggtgcgaatgtgggtgaacctgaacctgtggcagaagctgaagctaagcagagatgatgccaagcctctgctgagactgaagggattcccttcctttcctctggtcgagagacaggccaacgaagtggactggtgggacatggtgtgtaacgtgaagaagctgatcaacgagaaaaaggaggatggcaaggtgttttggcagaatctggctggctacaagagacaggaagccctgagaccatacctgagcagcgaggaagatcggaagaagggaaagaaattcgctcggtaccagctgggcgacctgctgctgcacctggaaaagaagcacggcgaggactggggaaaggtgtacgacgaggcctgggagcggattgacaagaaagtggaaggcctgagcaagcacatcaagctggaagaggaacggagaagcgaggacgcccagagcaaggccgccctgaccgactggctgcgggctaaggccagcttcgtgatcgagggcctgaaggaggccgacaaggacgagttctgcagatgcgagctgaagctgcagaagtggtacggggacctgcggggaaagcccttcgccatcgaagccgagaacagcatcctggacatcagcggcttcagcaagcagtacaactgtgccttcatctggcagaaggacggcgtgaagaagctgaacctgtacctgatcatcaactacttcaagggcggcaagctgcggttcaagaagatcaaacctgaagccttcgaagccaacagattctacaccgtgatcaacaaaaagagcggcgagatcgtgcccatggaggtgaacttcaacttcgacgaccccaacctgatcatcctgcctctggcctttggcaagagacagggcagagaattcatctggaacgacctgctgtccctggaaaccggcagcctgaagctggccaacggaagagtgatcgagaagacactgtacaacagaagaacccggcaggatgagcctgccctgttcgtggccctgaccttcgagcggcgggaggtcctggactcctccaatatcaaaccaatgaacctgatcggcgtggcaagaggcgaaaacatccccgccgtgatcgccctgaccgaccccgagggctgcccactgagccggtttaaggatagcctgggaaacccaacccacatcctgagaatcggcgagagctataaggagaagcagcggaccatccaggccaagaaggaggtggagcagcggagagccggcggctacagccggaagtacgccagcaaagccaagaatctggcagacgatatggtgagaaacaccgctagagatctgctgtactacgccgtgacccaggatgccatgctgatcttcgccaacctgagccggggcttcggccggcagggcaagcggaccttcatggccgagagacagtacacacggatggaggactggctgaccgccaagctggcctacgagggcctgagcaagacctacctgtccaagacactggcccagtacacctccaagacatgcagcaactgtgggtttaccatcaccagcgccgactacgacagggtgctggagaagctgaagaagacagcaacaggctggatgaccacaattaacggcaaggagctgaaggtggagggccagattacctactacaacagatacaagagacagaacgtagtcaaggacctgtccgtcgagctggatagactgagcgaagaatctgtgaacaacgacatctcctcctggacaaagggcagaagcggagaagctctgagcctcctgaagaaaagattctcccatagacccgtgcaggagaagttcgtgtgcctgaactgcggcttcgagacacacgcagccgagcaagccgccctgaacatcgccagatcctggctgttcctgcggagccaggagtacaagaaataccagacaaacaagacaaccggcaacaccgataagagagccttcgtcgagacctggcagtccttttaccggaagaagcttaaggaggtgtggaaacctgccgtgcggtctggcggatctggcggaggctccaccagccccaagaaaaagagaaaagtctaagctgccttctgcggggcttgccttctggccatgcccttcttctctcccttgcacctgtacctcttggtctttgaataaagcctgagtaggaaggctagcaaaaaaaaaaaaaaaaaaaaaaaaaaaaaaaaaaaaaaaaaaaaaaaaaaaaaaaaaaaaaaaaaaaaaaaaaaaaaaaa

SEQ ID NO: 9694 - RNA, 8787 nt, synthetic construct
  source 1..8787: mol_type = other RNA
aggaaataagagagaaaagaagagtaagaagaaatataagagccaccatggcccctaagaagaagcgtaaagtgagccggatgaaccacgaccaggagttcgacccccctaaggtgtaccctcccgtccccgccgagaagagaaagcccatccgggtcctgagcctgttcgatggcatcgccaccggtctgctggtgctgaaggacctgggcatccaggtggataggtacattgcctccgaggtgtgcgaggactccatcaccgtgggaatggtgcgtcatcagggcaagatcatgtacgtgggcgacgtgcggagcgtgacacagaagcatatccaggagtggggccctttcgacctggtgatcggcggcagcccttgcaatgacctgagcatcgtgaacccagcccggaagggcctgtacgagggaaccggcagactgttcttcgagttttacagactgctgcacgacgcccggcctaaggaaggcgacgaccggcccttcttttggctgttcgagaatgtggtggccatgggagtcagcgacaagcgggatattagccggttcctggagagcaaccccgtgatgatcgatgccaaggaagtgagcgccgcccaccgggccagatacttctggggcaatctgcctggcatgaacagacccctggccagcaccgtgaacgacaagctggagctgcaggagtgcctggagcacggccggatcgccaagttcagcaaggtgagaaccatcaccacccgaagcaacagcatcaaacaaggcaaggaccagcactttcctgtgttcatgaacgagaaggaggacatcctgtggtgtaccgagatggagagagtgttcgggttcccagtccactacacagatgtcagcaacatgtctagactggccagacagagactgctgggaagaagctggtccgtccctgtgatcagacacctgttcgcccctctgaaggagtacttcgcctgcgtgagcagcggcaacagcaacgccaacagccggggccccagcttctctagcggcctggtgccactgtccctgagagggagccacatgggccccatggagatctacaaaaccgtgagcgcctggaagcggcagcctgtgcgcgtgctgagcctgtttcggaatatcgataaagtcctgaaaagcctgggattcctggagagcggctctggctccggcggtggcaccctgaagtacgtggaggatgtgacaaacgtggtcagacgggatgtggagaagtggggccccttcgatctggtgtacggcagcacccaacccctgggcagctcttgtgaccggtgccctggctggtacatgtttcagttccaccggatcctgcagtacgccctgccgagacaggagtcccagcggccattcttttggattttcatggacaacttgctgctgaccgaggatgaccaggaaactaccactcggttcctgcagaccgaagccgtgaccctgcaggacgtgagaggccgggactaccagaacgccatgcgggtgtggtccaacatccctggactgaaaagcaagcacgcacctctgacccctaaagaagaggagtacctgcaggcccaggtgcggagcagaagcaagctggacgcccctaaggtggatctgctggtgaagaattgcctcctgcccctgagagagtacttcaagtatttcagccagaatagtctgcccctgggaggcagcggcggcggcgccctgaggagcgtgatgttcagcgacatcagcatcgacttcagccccgaggagtgggagtacctggacctggagcagaagaacctgtacagggacgtgatgctggagaactacagcaacctggtgagcctgggctgcttcatcagcaagcccgtggtgatcagcctgctggagcagggcaaggagccctggaaggtggtgaggaagaggaggcagtaccccgacctggagaccaagtacgagggcggcccaagcagcggcgcccctcctcccagcggcggcaggcggcccaagcagcggcgcccctcctcccagcggcggcagcccagccggctccccaacctctaccgaggagggcacctctgagtccgccacccccgagagcggccctggcacctccaccgagcccagcgagggcagcgcacccggcagccctgccggcagccccacctccacagaggagggaaccagcaccgagcccagcgaaggcagcgccccaggcaccagcaccgagcctagtgagcaggagattaaacggatcaacaagatcagaagaagacttgtgaaagacagcaacaccaagaaggccggcaagacaggccccatgaaaaccctgctggttagagtgatgacacccgatctgagagagcggctggaaaacctgagaaagaagcctgaaaatatcccccagcccatcagcaatacatctagagccaacctgaataagctgctgaccgattacaccgaaatgaagaaggcgatcctgcatgtgtactgggaagagttccagaaggaccctgtgggcctgatgagccgggtggcccagcctgccagcaagaagatcgatcagaacaagctgaaacctgagatggacgagaagggcaacctgaccaccgccggctttgcctgctctcagtgtggccagcccctgttcgtgtacaagctggagcaggtgtctgagaagggcaaggcttacaccaactacttcggacggtgcaatgtggccgagcacgaaaagctgatcctgctggcccagctgaagcccgagaaggatagcgacgaagccgtgacatatagcctgggaaagtttgggcagagggccctggatttctacagcattcatgtgaccaaggagtccacccaccccgtgaagcccctggcccagatcgccggaaacagatacgcctccggacctgtgggaaaggccctgagcgacgcatgtatgggcacaatcgcctccttcctgtctaagtaccaggacatcatcatcgaacaccagaaggtggtgaagggcaaccagaagagactggagagcctgcgggagctggccggcaaggaaaacctggaataccctagcgtgaccctgccacctcagcctcacaccaaggagggcgttgatgcctacaacgaagtgatcgcccgggtgcgaatgtgggtgaacctgaacctgtggcagaagctgaagctaagcagagatgatgccaagcctctgctgagactgaagggattcccttcctttcctctggtcgagagacaggccaacgaagtggactggtgggacatggtgtgtaacgtgaagaagctgatcaacgagaaaaaggaggatggcaaggtgttttggcagaatctggctggctacaagagacaggaagccctgagaccatacctgagcagcgaggaagatcggaagaagggaaagaaattcgctcggtaccagctgggcgacctgctgctgcacctggaaaagaagcacggcgaggactggggaaaggtgtacgacgaggcctgggagcggattgacaagaaagtggaaggcctgagcaagcacatcaagctggaagaggaacggagaagcgaggacgcccagagcaaggccgccctgaccgactggctgcgggctaaggccagcttcgtgatcgagggcctgaaggaggccgacaaggacgagttctgcagatgcgagctgaagctgcagaagtggtacggggacctgcggggaaagcccttcgccatcgaagccgagaacagcatcctggacatcagcggcttcagcaagcagtacaactgtgccttcatctggcagaaggacggcgtgaagaagctgaacctgtacctgatcatcaactacttcaagggcggcaagctgcggttcaagaagatcaaacctgaagccttcgaagccaacagattctacaccgtgatcaacaaaaagagcggcgagatcgtgcccatggaggtgaacttcaacttcgacgaccccaacctgatcatcctgcctctggcctttggcaagagacagggcagagaattcatctggaacgacctgctgtccctggaaaccggcagcctgaagctggccaacggaagagtgatcgagaagacactgtacaacagaagaacccggcaggatgagcctgccctgttcgtggccctgaccttcgagcggcgggaggtcctggactcctccaatatcaaaccaatgaacctgatcggcgtggcaagaggcgaaaacatccccgccgtgatcgccctgaccgaccccgagggctgcccactgagccggtttaaggatagcctgggaaacccaacccacatcctgagaatcggcgagagctataaggagaagcagcggaccatccaggccaagaaggaggtggagcagcggagagccggcggctacagccggaagtacgccagcaaagccaagaatctggcagacgatatggtgagaaacaccgctagagatctgctgtactacgccgtgacccaggatgccatgctgatcttcgccaacctgagccggggcttcggccggcagggcaagcggaccttcatggccgagagacagtacacacggatggaggactggctgaccgccaagctggcctacgagggcctgagcaagacctacctgtccaagacactggcccagtacacctccaagacatgcagcaactgtgggtttaccatcaccagcgccgactacgacagggtgctggagaagctgaagaagacagcaacaggctggatgaccacaattaacggcaaggagctgaaggtggagggccagattacctactacaacagatacaagagacagaacgtagtcaaggacctgtccgtcgagctggatagactgagcgaagaatctgtgaacaacgacatctcctcctggacaaagggcagaagcggagaagctctgagcctcctgaagaaaagattctcccatagacccgtgcaggagaagttcgtgtgcctgaactgcggcttcgagacacacgcagccgagcaagccgccctgaacatcgccagatcctggctgttcctgcggagccaggagtacaagaaataccagacaaacaagacaaccggcaacaccgataagagagccttcgtcgagacctggcagtccttttaccggaagaagcttaaggaggtgtggaaacctgccgtgcggtctggcggatctggcggaggctccaccagccccaagaaaaagagaaaagtctaagctgccttctgcggggcttgccttctggccatgcccttcttctctcccttgcacctgtacctcttggtctttgaataaagcctgagtaggaaggctagcaaaaaaaaaaaaaaaaaaaaaaaaaaaaaaaaaaaaaaaaaaaaaaaaaaaaaaaaaaaaaaaaaaaaaaaaaaaaaaaagcccagccggctccccaacctctaccgaggagggcacctctgagtccgccacccccgagagcggccctggcacctccaccgagcccagcgagggcagcgcacccggcagccctgccggcagccccacctccacagaggagggaaccagcaccgagcccagcgaaggcagcgccccaggcaccagcaccgagcctagtgagcaggagattaaacggatcaacaagatcagaagaagacttgtgaaagacagcaacaccaagaaggccggcaagacaggccccatgaaaaccctgctggttagagtgatgacacccgatctgagagagcggctggaaaacctgagaaagaagcctgaaaatatcccccagcccatcagcaatacatctagagccaacctgaataagctgctgaccgattacaccgaaatgaagaaggcgatcctgcatgtgtactgggaagagttccagaaggaccctgtgggcctgatgagccgggtggcccagcctgccagcaagaagatcgatcagaacaagctgaaacctgagatggacgagaagggcaacctgaccaccgccggctttgcctgctctcagtgtggccagcccctgttcgtgtacaagctggagcaggtgtctgagaagggcaaggcttacaccaactacttcggacggtgcaatgtggccgagcacgaaaagctgatcctgctggcccagctgaagcccgagaaggatagcgacgaagccgtgacatatagcctgggaaagtttgggcagagggccctggatttctacagcattcatgtgaccaaggagtccacccaccccgtgaagcccctggcccagatcgccggaaacagatacgcctccggacctgtgggaaaggccctgagcgacgcatgtatgggcacaatcgcctccttcctgtctaagtaccaggacatcatcatcgaacaccagaaggtggtgaagggcaaccagaagagactggagagcctgcgggagctggccggcaaggaaaacctggaataccctagcgtgaccctgccacctcagcctcacaccaaggagggcgttgatgcctacaacgaagtgatcgcccgggtgcgaatgtgggtgaacctgaacctgtggcagaagctgaagctaagcagagatgatgccaagcctctgctgagactgaagggattcccttcctttcctctggtcgagagacaggccaacgaagtggactggtgggacatggtgtgtaacgtgaagaagctgatcaacgagaaaaaggaggatggcaaggtgttttggcagaatctggctggctacaagagacaggaagccctgagaccatacctgagcagcgaggaagatcggaagaagggaaagaaattcgctcggtaccagctgggcgacctgctgctgcacctggaaaagaagcacggcgaggactggggaaaggtgtacgacgaggcctgggagcggattgacaagaaagtggaaggcctgagcaagcacatcaagctggaagaggaacggagaagcgaggacgcccagagcaaggccgccctgaccgactggctgcgggctaaggccagcttcgtgatcgagggcctgaaggaggccgacaaggacgagttctgcagatgcgagctgaagctgcagaagtggtacggggacctgcggggaaagcccttcgccatcgaagccgagaacagcatcctggacatcagcggcttcagcaagcagtacaactgtgccttcatctggcagaaggacggcgtgaagaagctgaacctgtacctgatcatcaactacttcaagggcggcaagctgcggttcaagaagatcaaacctgaagccttcgaagccaacagattctacaccgtgatcaacaaaaagagcggcgagatcgtgcccatggaggtgaacttcaacttcgacgaccccaacctgatcatcctgcctctggcctttggcaagagacagggcagagaattcatctggaacgacctgctgtccctggaaaccggcagcctgaagctggccaacggaagagtgatcgagaagacactgtacaacagaagaacccggcaggatgagcctgccctgttcgtggccctgaccttcgagcggcgggaggtcctggactcctccaatatcaaaccaatgaacctgatcggcgtggcaagaggcgaaaacatccccgccgtgatcgccctgaccgaccccgagggctgcccactgagccggtttaaggatagcctgggaaacccaacccacatcctgagaatcggcgagagctataaggagaagcagcggaccatccaggccaagaaggaggtggagcagcggagagccggcggctacagccggaagtacgccagcaaagccaagaatctggcagacgatatggtgagaaacaccgctagagatctgctgtactacgccgtgacccaggatgccatgctgatcttcgccaacctgagccggggcttcggccggcagggcaagcggaccttcatggccgagagacagtacacacggatggaggactggctgaccgccaagctggcctacgagggcctgagcaagacctacctgtccaagacactggcccagtacacctccaagacatgcagcaactgtgggtttaccatcaccagcgccgactacgacagggtgctggagaagctgaagaagacagcaacaggctggatgaccacaattaacggcaaggagctgaaggtggagggccagattacctactacaacagatacaagagacagaacgtagtcaaggacctgtccgtcgagctggatagactgagcgaagaatctgtgaacaacgacatctcctcctggacaaagggcagaagcggagaagctctgagcctcctgaagaaaagattctcccatagacccgtgcaggagaagttcgtgtgcctgaactgcggcttcgagacacacgcagccgagcaagccgccctgaacatcgccagatcctggctgttcctgcggagccaggagtacaagaaataccagacaaacaagacaaccggcaacaccgataagagagccttcgtcgagacctggcagtccttttaccggaagaagcttaaggaggtgtggaaacctgccgtgcggtctggcggatctggcggaggctccaccagccccaagaaaaagagaaaagtctaagctgccttctgcggggcttgccttctggccatgcccttcttctctcccttgcacctgtacctcttggtctttgaataaagcctgagtaggaaggctagcaaaaaaaaaaaaaaaaaaaaaaaaaaaaaaaaaaaaaaaaaaaaaaaaaaaaaaaaaaaaaaaaaaaaaaaaaaaaaaaa

SEQ ID NO: 9695 - RNA, 8787 nt, synthetic construct
  source 1..8787: mol_type = other RNA
aggaaataagagagaaaagaagagtaagaagaaatataagagccaccatggcccctaagaagaagcgtaaagtgagccggatgaaccacgaccaggagttcgacccccctaaggtgtaccctcccgtccccgccgagaagagaaagcccatccgggtcctgagcctgttcgatggcatcgccaccggtctgctggtgctgaaggacctgggcatccaggtggataggtacattgcctccgaggtgtgcgaggactccatcaccgtgggaatggtgcgtcatcagggcaagatcatgtacgtgggcgacgtgcggagcgtgacacagaagcatatccaggagtggggccctttcgacctggtgatcggcggcagcccttgcaatgacctgagcatcgtgaacccagcccggaagggcctgtacgagggaaccggcagactgttcttcgagttttacagactgctgcacgacgcccggcctaaggaaggcgacgaccggcccttcttttggctgttcgagaatgtggtggccatgggagtcagcgacaagcgggatattagccggttcctggagagcaaccccgtgatgatcgatgccaaggaagtgagcgccgcccaccgggccagatacttctggggcaatctgcctggcatgaacagacccctggccagcaccgtgaacgacaagctggagctgcaggagtgcctggagcacggccggatcgccaagttcagcaaggtgagaaccatcaccacccgaagcaacagcatcaaacaaggcaaggaccagcactttcctgtgttcatgaacgagaaggaggacatcctgtggtgtaccgagatggagagagtgttcgggttcccagtccactacacagatgtcagcaacatgtctagactggccagacagagactgctgggaagaagctggtccgtccctgtgatcagacacctgttcgcccctctgaaggagtacttcgcctgcgtgagcagcggcaacagcaacgccaacagccggggccccagcttctctagcggcctggtgccactgtccctgagagggagccacatgggccccatggagatctacaaaaccgtgagcgcctggaagcggcagcctgtgcgcgtgctgagcctgtttcggaatatcgataaagtcctgaaaagcctgggattcctggagagcggctctggctccggcggtggcaccctgaagtacgtggaggatgtgacaaacgtggtcagacgggatgtggagaagtggggccccttcgatctggtgtacggcagcacccaacccctgggcagctcttgtgaccggtgccctggctggtacatgtttcagttccaccggatcctgcagtacgccctgccgagacaggagtcccagcggccattcttttggattttcatggacaacttgctgctgaccgaggatgaccaggaaactaccactcggttcctgcagaccgaagccgtgaccctgcaggacgtgagaggccgggactaccagaacgccatgcgggtgtggtccaacatccctggactgaaaagcaagcacgcacctctgacccctaaagaagaggagtacctgcaggcccaggtgcggagcagaagcaagctggacgcccctaaggtggatctgctggtgaagaattgcctcctgcccctgagagagtacttcaagtatttcagccagaatagtctgcccctgggaggcagcggcggcggcgccgagatcaccctgatgaaccaggcccaggacagcaggagcatcctgttccaggagagcgtgaccttcgaggacgtggccgtgaacttcaccaacagggagtggcagtgcctgacctacgcccagaggcacctgtacaaggacgtgatgctggagaactacggcaacatggtgagcctgggcttccccttccccaagccccccctgatcagccacctggagagggaggtggacccctgcgtgggcggcccaagcagcggcgcccctcctcccagcggcggcaggcggcccaagcagcggcgcccctcctcccagcggcggcagcccagccggctccccaacctctaccgaggagggcacctctgagtccgccacccccgagagcggccctggcacctccaccgagcccagcgagggcagcgcacccggcagccctgccggcagccccacctccacagaggagggaaccagcaccgagcccagcgaaggcagcgccccaggcaccagcaccgagcctagtgagcaggagattaaacggatcaacaagatcagaagaagacttgtgaaagacagcaacaccaagaaggccggcaagacaggccccatgaaaaccctgctggttagagtgatgacacccgatctgagagagcggctggaaaacctgagaaagaagcctgaaaatatcccccagcccatcagcaatacatctagagccaacctgaataagctgctgaccgattacaccgaaatgaagaaggcgatcctgcatgtgtactgggaagagttccagaaggaccctgtgggcctgatgagccgggtggcccagcctgccagcaagaagatcgatcagaacaagctgaaacctgagatggacgagaagggcaacctgaccaccgccggctttgcctgctctcagtgtggccagcccctgttcgtgtacaagctggagcaggtgtctgagaagggcaaggcttacaccaactacttcggacggtgcaatgtggccgagcacgaaaagctgatcctgctggcccagctgaagcccgagaaggatagcgacgaagccgtgacatatagcctgggaaagtttgggcagagggccctggatttctacagcattcatgtgaccaaggagtccacccaccccgtgaagcccctggcccagatcgccggaaacagatacgcctccggacctgtgggaaaggccctgagcgacgcatgtatgggcacaatcgcctccttcctgtctaagtaccaggacatcatcatcgaacaccagaaggtggtgaagggcaaccagaagagactggagagcctgcgggagctggccggcaaggaaaacctggaataccctagcgtgaccctgccacctcagcctcacaccaaggagggcgttgatgcctacaacgaagtgatcgcccgggtgcgaatgtgggtgaacctgaacctgtggcagaagctgaagctaagcagagatgatgccaagcctctgctgagactgaagggattcccttcctttcctctggtcgagagacaggccaacgaagtggactggtgggacatggtgtgtaacgtgaagaagctgatcaacgagaaaaaggaggatggcaaggtgttttggcagaatctggctggctacaagagacaggaagccctgagaccatacctgagcagcgaggaagatcggaagaagggaaagaaattcgctcggtaccagctgggcgacctgctgctgcacctggaaaagaagcacggcgaggactggggaaaggtgtacgacgaggcctgggagcggattgacaagaaagtggaaggcctgagcaagcacatcaagctggaagaggaacggagaagcgaggacgcccagagcaaggccgccctgaccgactggctgcgggctaaggccagcttcgtgatcgagggcctgaaggaggccgacaaggacgagttctgcagatgcgagctgaagctgcagaagtggtacggggacctgcggggaaagcccttcgccatcgaagccgagaacagcatcctggacatcagcggcttcagcaagcagtacaactgtgccttcatctggcagaaggacggcgtgaagaagctgaacctgtacctgatcatcaactacttcaagggcggcaagctgcggttcaagaagatcaaacctgaagccttcgaagccaacagattctacaccgtgatcaacaaaaagagcggcgagatcgtgcccatggaggtgaacttcaacttcgacgaccccaacctgatcatcctgcctctggcctttggcaagagacagggcagagaattcatctggaacgacctgctgtccctggaaaccggcagcctgaagctggccaacggaagagtgatcgagaagacactgtacaacagaagaacccggcaggatgagcctgccctgttcgtggccctgaccttcgagcggcgggaggtcctggactcctccaatatcaaaccaatgaacctgatcggcgtggcaagaggcgaaaacatccccgccgtgatcgccctgaccgaccccgagggctgcccactgagccggtttaaggatagcctgggaaacccaacccacatcctgagaatcggcgagagctataaggagaagcagcggaccatccaggccaagaaggaggtggagcagcggagagccggcggctacagccggaagtacgccagcaaagccaagaatctggcagacgatatggtgagaaacaccgctagagatctgctgtactacgccgtgacccaggatgccatgctgatcttcgccaacctgagccggggcttcggccggcagggcaagcggaccttcatggccgagagacagtacacacggatggaggactggctgaccgccaagctggcctacgagggcctgagcaagacctacctgtccaagacactggcccagtacacctccaagacatgcagcaactgtgggtttaccatcaccagcgccgactacgacagggtgctggagaagctgaagaagacagcaacaggctggatgaccacaattaacggcaaggagctgaaggtggagggccagattacctactacaacagatacaagagacagaacgtagtcaaggacctgtccgtcgagctggatagactgagcgaagaatctgtgaacaacgacatctcctcctggacaaagggcagaagcggagaagctctgagcctcctgaagaaaagattctcccatagacccgtgcaggagaagttcgtgtgcctgaactgcggcttcgagacacacgcagccgagcaagccgccctgaacatcgccagatcctggctgttcctgcggagccaggagtacaagaaataccagacaaacaagacaaccggcaacaccgataagagagccttcgtcgagacctggcagtccttttaccggaagaagcttaaggaggtgtggaaacctgccgtgcggtctggcggatctggcggaggctccaccagccccaagaaaaagagaaaagtctaagctgccttctgcggggcttgccttctggccatgcccttcttctctcccttgcacctgtacctcttggtctttgaataaagcctgagtaggaaggctagcaaaaaaaaaaaaaaaaaaaaaaaaaaaaaaaaaaaaaaaaaaaaaaaaaaaaaaaaaaaaaaaaaaaaaaaaaaaaaaaagcccagccggctccccaacctctaccgaggagggcacctctgagtccgccacccccgagagcggccctggcacctccaccgagcccagcgagggcagcgcacccggcagccctgccggcagccccacctccacagaggagggaaccagcaccgagcccagcgaaggcagcgccccaggcaccagcaccgagcctagtgagcaggagattaaacggatcaacaagatcagaagaagacttgtgaaagacagcaacaccaagaaggccggcaagacaggccccatgaaaaccctgctggttagagtgatgacacccgatctgagagagcggctggaaaacctgagaaagaagcctgaaaatatcccccagcccatcagcaatacatctagagccaacctgaataagctgctgaccgattacaccgaaatgaagaaggcgatcctgcatgtgtactgggaagagttccagaaggaccctgtgggcctgatgagccgggtggcccagcctgccagcaagaagatcgatcagaacaagctgaaacctgagatggacgagaagggcaacctgaccaccgccggctttgcctgctctcagtgtggccagcccctgttcgtgtacaagctggagcaggtgtctgagaagggcaaggcttacaccaactacttcggacggtgcaatgtggccgagcacgaaaagctgatcctgctggcccagctgaagcccgagaaggatagcgacgaagccgtgacatatagcctgggaaagtttgggcagagggccctggatttctacagcattcatgtgaccaaggagtccacccaccccgtgaagcccctggcccagatcgccggaaacagatacgcctccggacctgtgggaaaggccctgagcgacgcatgtatgggcacaatcgcctccttcctgtctaagtaccaggacatcatcatcgaacaccagaaggtggtgaagggcaaccagaagagactggagagcctgcgggagctggccggcaaggaaaacctggaataccctagcgtgaccctgccacctcagcctcacaccaaggagggcgttgatgcctacaacgaagtgatcgcccgggtgcgaatgtgggtgaacctgaacctgtggcagaagctgaagctaagcagagatgatgccaagcctctgctgagactgaagggattcccttcctttcctctggtcgagagacaggccaacgaagtggactggtgggacatggtgtgtaacgtgaagaagctgatcaacgagaaaaaggaggatggcaaggtgttttggcagaatctggctggctacaagagacaggaagccctgagaccatacctgagcagcgaggaagatcggaagaagggaaagaaattcgctcggtaccagctgggcgacctgctgctgcacctggaaaagaagcacggcgaggactggggaaaggtgtacgacgaggcctgggagcggattgacaagaaagtggaaggcctgagcaagcacatcaagctggaagaggaacggagaagcgaggacgcccagagcaaggccgccctgaccgactggctgcgggctaaggccagcttcgtgatcgagggcctgaaggaggccgacaaggacgagttctgcagatgcgagctgaagctgcagaagtggtacggggacctgcggggaaagcccttcgccatcgaagccgagaacagcatcctggacatcagcggcttcagcaagcagtacaactgtgccttcatctggcagaaggacggcgtgaagaagctgaacctgtacctgatcatcaactacttcaagggcggcaagctgcggttcaagaagatcaaacctgaagccttcgaagccaacagattctacaccgtgatcaacaaaaagagcggcgagatcgtgcccatggaggtgaacttcaacttcgacgaccccaacctgatcatcctgcctctggcctttggcaagagacagggcagagaattcatctggaacgacctgctgtccctggaaaccggcagcctgaagctggccaacggaagagtgatcgagaagacactgtacaacagaagaacccggcaggatgagcctgccctgttcgtggccctgaccttcgagcggcgggaggtcctggactcctccaatatcaaaccaatgaacctgatcggcgtggcaagaggcgaaaacatccccgccgtgatcgccctgaccgaccccgagggctgcccactgagccggtttaaggatagcctgggaaacccaacccacatcctgagaatcggcgagagctataaggagaagcagcggaccatccaggccaagaaggaggtggagcagcggagagccggcggctacagccggaagtacgccagcaaagccaagaatctggcagacgatatggtgagaaacaccgctagagatctgctgtactacgccgtgacccaggatgccatgctgatcttcgccaacctgagccggggcttcggccggcagggcaagcggaccttcatggccgagagacagtacacacggatggaggactggctgaccgccaagctggcctacgagggcctgagcaagacctacctgtccaagacactggcccagtacacctccaagacatgcagcaactgtgggtttaccatcaccagcgccgactacgacagggtgctggagaagctgaagaagacagcaacaggctggatgaccacaattaacggcaaggagctgaaggtggagggccagattacctactacaacagatacaagagacagaacgtagtcaaggacctgtccgtcgagctggatagactgagcgaagaatctgtgaacaacgacatctcctcctggacaaagggcagaagcggagaagctctgagcctcctgaagaaaagattctcccatagacccgtgcaggagaagttcgtgtgcctgaactgcggcttcgagacacacgcagccgagcaagccgccctgaacatcgccagatcctggctgttcctgcggagccaggagtacaagaaataccagacaaacaagacaaccggcaacaccgataagagagccttcgtcgagacctggcagtccttttaccggaagaagcttaaggaggtgtggaaacctgccgtgcggtctggcggatctggcggaggctccaccagccccaagaaaaagagaaaagtctaagctgccttctgcggggcttgccttctggccatgcccttcttctctcccttgcacctgtacctcttggtctttgaataaagcctgagtaggaaggctagcaaaaaaaaaaaaaaaaaaaaaaaaaaaaaaaaaaaaaaaaaaaaaaaaaaaaaaaaaaaaaaaaaaaaaaaaaaaaaaaa

SEQ ID NO: 9696 - RNA, 8787 nt, synthetic construct
  source 1..8787: mol_type = other RNA
aggaaataagagagaaaagaagagtaagaagaaatataagagccaccatggcccctaagaagaagcgtaaagtgagccggatgaaccacgaccaggagttcgacccccctaaggtgtaccctcccgtccccgccgagaagagaaagcccatccgggtcctgagcctgttcgatggcatcgccaccggtctgctggtgctgaaggacctgggcatccaggtggataggtacattgcctccgaggtgtgcgaggactccatcaccgtgggaatggtgcgtcatcagggcaagatcatgtacgtgggcgacgtgcggagcgtgacacagaagcatatccaggagtggggccctttcgacctggtgatcggcggcagcccttgcaatgacctgagcatcgtgaacccagcccggaagggcctgtacgagggaaccggcagactgttcttcgagttttacagactgctgcacgacgcccggcctaaggaaggcgacgaccggcccttcttttggctgttcgagaatgtggtggccatgggagtcagcgacaagcgggatattagccggttcctggagagcaaccccgtgatgatcgatgccaaggaagtgagcgccgcccaccgggccagatacttctggggcaatctgcctggcatgaacagacccctggccagcaccgtgaacgacaagctggagctgcaggagtgcctggagcacggccggatcgccaagttcagcaaggtgagaaccatcaccacccgaagcaacagcatcaaacaaggcaaggaccagcactttcctgtgttcatgaacgagaaggaggacatcctgtggtgtaccgagatggagagagtgttcgggttcccagtccactacacagatgtcagcaacatgtctagactggccagacagagactgctgggaagaagctggtccgtccctgtgatcagacacctgttcgcccctctgaaggagtacttcgcctgcgtgagcagcggcaacagcaacgccaacagccggggccccagcttctctagcggcctggtgccactgtccctgagagggagccacatgggccccatggagatctacaaaaccgtgagcgcctggaagcggcagcctgtgcgcgtgctgagcctgtttcggaatatcgataaagtcctgaaaagcctgggattcctggagagcggctctggctccggcggtggcaccctgaagtacgtggaggatgtgacaaacgtggtcagacgggatgtggagaagtggggccccttcgatctggtgtacggcagcacccaacccctgggcagctcttgtgaccggtgccctggctggtacatgtttcagttccaccggatcctgcagtacgccctgccgagacaggagtcccagcggccattcttttggattttcatggacaacttgctgctgaccgaggatgaccaggaaactaccactcggttcctgcagaccgaagccgtgaccctgcaggacgtgagaggccgggactaccagaacgccatgcgggtgtggtccaacatccctggactgaaaagcaagcacgcacctctgacccctaaagaagaggagtacctgcaggcccaggtgcggagcagaagcaagctggacgcccctaaggtggatctgctggtgaagaattgcctcctgcccctgagagagtacttcaagtatttcagccagaatagtctgcccctgggaggcagcggcggcggcaggcccagggccgtgaagttcgccgacgtggccgtgtacttcagcaccgaggagtggggctgcctgaggcccgcccagagggccctgtacagggacgtgatgagggagacctacggccacctgggcgccctgggctgcgccggccccaagcccgccctgatcagctggctggagaggaacaccgacgactgggagcccgccgccctggacccccaggagtgccccaggggcgtggccgtgcagggcggcccaagcagcggcgcccctcctcccagcggcggcaggcggcccaagcagcggcgcccctcctcccagcggcggcagcccagccggctccccaacctctaccgaggagggcacctctgagtccgccacccccgagagcggccctggcacctccaccgagcccagcgagggcagcgcacccggcagccctgccggcagccccacctccacagaggagggaaccagcaccgagcccagcgaaggcagcgccccaggcaccagcaccgagcctagtgagcaggagattaaacggatcaacaagatcagaagaagacttgtgaaagacagcaacaccaagaaggccggcaagacaggccccatgaaaaccctgctggttagagtgatgacacccgatctgagagagcggctggaaaacctgagaaagaagcctgaaaatatcccccagcccatcagcaatacatctagagccaacctgaataagctgctgaccgattacaccgaaatgaagaaggcgatcctgcatgtgtactgggaagagttccagaaggaccctgtgggcctgatgagccgggtggcccagcctgccagcaagaagatcgatcagaacaagctgaaacctgagatggacgagaagggcaacctgaccaccgccggctttgcctgctctcagtgtggccagcccctgttcgtgtacaagctggagcaggtgtctgagaagggcaaggcttacaccaactacttcggacggtgcaatgtggccgagcacgaaaagctgatcctgctggcccagctgaagcccgagaaggatagcgacgaagccgtgacatatagcctgggaaagtttgggcagagggccctggatttctacagcattcatgtgaccaaggagtccacccaccccgtgaagcccctggcccagatcgccggaaacagatacgcctccggacctgtgggaaaggccctgagcgacgcatgtatgggcacaatcgcctccttcctgtctaagtaccaggacatcatcatcgaacaccagaaggtggtgaagggcaaccagaagagactggagagcctgcgggagctggccggcaaggaaaacctggaataccctagcgtgaccctgccacctcagcctcacaccaaggagggcgttgatgcctacaacgaagtgatcgcccgggtgcgaatgtgggtgaacctgaacctgtggcagaagctgaagctaagcagagatgatgccaagcctctgctgagactgaagggattcccttcctttcctctggtcgagagacaggccaacgaagtggactggtgggacatggtgtgtaacgtgaagaagctgatcaacgagaaaaaggaggatggcaaggtgttttggcagaatctggctggctacaagagacaggaagccctgagaccatacctgagcagcgaggaagatcggaagaagggaaagaaattcgctcggtaccagctgggcgacctgctgctgcacctggaaaagaagcacggcgaggactggggaaaggtgtacgacgaggcctgggagcggattgacaagaaagtggaaggcctgagcaagcacatcaagctggaagaggaacggagaagcgaggacgcccagagcaaggccgccctgaccgactggctgcgggctaaggccagcttcgtgatcgagggcctgaaggaggccgacaaggacgagttctgcagatgcgagctgaagctgcagaagtggtacggggacctgcggggaaagcccttcgccatcgaagccgagaacagcatcctggacatcagcggcttcagcaagcagtacaactgtgccttcatctggcagaaggacggcgtgaagaagctgaacctgtacctgatcatcaactacttcaagggcggcaagctgcggttcaagaagatcaaacctgaagccttcgaagccaacagattctacaccgtgatcaacaaaaagagcggcgagatcgtgcccatggaggtgaacttcaacttcgacgaccccaacctgatcatcctgcctctggcctttggcaagagacagggcagagaattcatctggaacgacctgctgtccctggaaaccggcagcctgaagctggccaacggaagagtgatcgagaagacactgtacaacagaagaacccggcaggatgagcctgccctgttcgtggccctgaccttcgagcggcgggaggtcctggactcctccaatatcaaaccaatgaacctgatcggcgtggcaagaggcgaaaacatccccgccgtgatcgccctgaccgaccccgagggctgcccactgagccggtttaaggatagcctgggaaacccaacccacatcctgagaatcggcgagagctataaggagaagcagcggaccatccaggccaagaaggaggtggagcagcggagagccggcggctacagccggaagtacgccagcaaagccaagaatctggcagacgatatggtgagaaacaccgctagagatctgctgtactacgccgtgacccaggatgccatgctgatcttcgccaacctgagccggggcttcggccggcagggcaagcggaccttcatggccgagagacagtacacacggatggaggactggctgaccgccaagctggcctacgagggcctgagcaagacctacctgtccaagacactggcccagtacacctccaagacatgcagcaactgtgggtttaccatcaccagcgccgactacgacagggtgctggagaagctgaagaagacagcaacaggctggatgaccacaattaacggcaaggagctgaaggtggagggccagattacctactacaacagatacaagagacagaacgtagtcaaggacctgtccgtcgagctggatagactgagcgaagaatctgtgaacaacgacatctcctcctggacaaagggcagaagcggagaagctctgagcctcctgaagaaaagattctcccatagacccgtgcaggagaagttcgtgtgcctgaactgcggcttcgagacacacgcagccgagcaagccgccctgaacatcgccagatcctggctgttcctgcggagccaggagtacaagaaataccagacaaacaagacaaccggcaacaccgataagagagccttcgtcgagacctggcagtccttttaccggaagaagcttaaggaggtgtggaaacctgccgtgcggtctggcggatctggcggaggctccaccagccccaagaaaaagagaaaagtctaagctgccttctgcggggcttgccttctggccatgcccttcttctctcccttgcacctgtacctcttggtctttgaataaagcctgagtaggaaggctagcaaaaaaaaaaaaaaaaaaaaaaaaaaaaaaaaaaaaaaaaaaaaaaaaaaaaaaaaaaaaaaaaaaaaaaaaaaaaaaaagcccagccggctccccaacctctaccgaggagggcacctctgagtccgccacccccgagagcggccctggcacctccaccgagcccagcgagggcagcgcacccggcagccctgccggcagccccacctccacagaggagggaaccagcaccgagcccagcgaaggcagcgccccaggcaccagcaccgagcctagtgagcaggagattaaacggatcaacaagatcagaagaagacttgtgaaagacagcaacaccaagaaggccggcaagacaggccccatgaaaaccctgctggttagagtgatgacacccgatctgagagagcggctggaaaacctgagaaagaagcctgaaaatatcccccagcccatcagcaatacatctagagccaacctgaataagctgctgaccgattacaccgaaatgaagaaggcgatcctgcatgtgtactgggaagagttccagaaggaccctgtgggcctgatgagccgggtggcccagcctgccagcaagaagatcgatcagaacaagctgaaacctgagatggacgagaagggcaacctgaccaccgccggctttgcctgctctcagtgtggccagcccctgttcgtgtacaagctggagcaggtgtctgagaagggcaaggcttacaccaactacttcggacggtgcaatgtggccgagcacgaaaagctgatcctgctggcccagctgaagcccgagaaggatagcgacgaagccgtgacatatagcctgggaaagtttgggcagagggccctggatttctacagcattcatgtgaccaaggagtccacccaccccgtgaagcccctggcccagatcgccggaaacagatacgcctccggacctgtgggaaaggccctgagcgacgcatgtatgggcacaatcgcctccttcctgtctaagtaccaggacatcatcatcgaacaccagaaggtggtgaagggcaaccagaagagactggagagcctgcgggagctggccggcaaggaaaacctggaataccctagcgtgaccctgccacctcagcctcacaccaaggagggcgttgatgcctacaacgaagtgatcgcccgggtgcgaatgtgggtgaacctgaacctgtggcagaagctgaagctaagcagagatgatgccaagcctctgctgagactgaagggattcccttcctttcctctggtcgagagacaggccaacgaagtggactggtgggacatggtgtgtaacgtgaagaagctgatcaacgagaaaaaggaggatggcaaggtgttttggcagaatctggctggctacaagagacaggaagccctgagaccatacctgagcagcgaggaagatcggaagaagggaaagaaattcgctcggtaccagctgggcgacctgctgctgcacctggaaaagaagcacggcgaggactggggaaaggtgtacgacgaggcctgggagcggattgacaagaaagtggaaggcctgagcaagcacatcaagctggaagaggaacggagaagcgaggacgcccagagcaaggccgccctgaccgactggctgcgggctaaggccagcttcgtgatcgagggcctgaaggaggccgacaaggacgagttctgcagatgcgagctgaagctgcagaagtggtacggggacctgcggggaaagcccttcgccatcgaagccgagaacagcatcctggacatcagcggcttcagcaagcagtacaactgtgccttcatctggcagaaggacggcgtgaagaagctgaacctgtacctgatcatcaactacttcaagggcggcaagctgcggttcaagaagatcaaacctgaagccttcgaagccaacagattctacaccgtgatcaacaaaaagagcggcgagatcgtgcccatggaggtgaacttcaacttcgacgaccccaacctgatcatcctgcctctggcctttggcaagagacagggcagagaattcatctggaacgacctgctgtccctggaaaccggcagcctgaagctggccaacggaagagtgatcgagaagacactgtacaacagaagaacccggcaggatgagcctgccctgttcgtggccctgaccttcgagcggcgggaggtcctggactcctccaatatcaaaccaatgaacctgatcggcgtggcaagaggcgaaaacatccccgccgtgatcgccctgaccgaccccgagggctgcccactgagccggtttaaggatagcctgggaaacccaacccacatcctgagaatcggcgagagctataaggagaagcagcggaccatccaggccaagaaggaggtggagcagcggagagccggcggctacagccggaagtacgccagcaaagccaagaatctggcagacgatatggtgagaaacaccgctagagatctgctgtactacgccgtgacccaggatgccatgctgatcttcgccaacctgagccggggcttcggccggcagggcaagcggaccttcatggccgagagacagtacacacggatggaggactggctgaccgccaagctggcctacgagggcctgagcaagacctacctgtccaagacactggcccagtacacctccaagacatgcagcaactgtgggtttaccatcaccagcgccgactacgacagggtgctggagaagctgaagaagacagcaacaggctggatgaccacaattaacggcaaggagctgaaggtggagggccagattacctactacaacagatacaagagacagaacgtagtcaaggacctgtccgtcgagctggatagactgagcgaagaatctgtgaacaacgacatctcctcctggacaaagggcagaagcggagaagctctgagcctcctgaagaaaagattctcccatagacccgtgcaggagaagttcgtgtgcctgaactgcggcttcgagacacacgcagccgagcaagccgccctgaacatcgccagatcctggctgttcctgcggagccaggagtacaagaaataccagacaaacaagacaaccggcaacaccgataagagagccttcgtcgagacctggcagtccttttaccggaagaagcttaaggaggtgtggaaacctgccgtgcggtctggcggatctggcggaggctccaccagccccaagaaaaagagaaaagtctaagctgccttctgcggggcttgccttctggccatgcccttcttctctcccttgcacctgtacctcttggtctttgaataaagcctgagtaggaaggctagcaaaaaaaaaaaaaaaaaaaaaaaaaaaaaaaaaaaaaaaaaaaaaaaaaaaaaaaaaaaaaaaaaaaaaaaaaaaaaaaa

SEQ ID NO: 9697 - RNA, 8787 nt, synthetic construct
  source 1..8787: mol_type = other RNA
aggaaataagagagaaaagaagagtaagaagaaatataagagccaccatggcccctaagaagaagcgtaaagtgagccggatgaaccacgaccaggagttcgacccccctaaggtgtaccctcccgtccccgccgagaagagaaagcccatccgggtcctgagcctgttcgatggcatcgccaccggtctgctggtgctgaaggacctgggcatccaggtggataggtacattgcctccgaggtgtgcgaggactccatcaccgtgggaatggtgcgtcatcagggcaagatcatgtacgtgggcgacgtgcggagcgtgacacagaagcatatccaggagtggggccctttcgacctggtgatcggcggcagcccttgcaatgacctgagcatcgtgaacccagcccggaagggcctgtacgagggaaccggcagactgttcttcgagttttacagactgctgcacgacgcccggcctaaggaaggcgacgaccggcccttcttttggctgttcgagaatgtggtggccatgggagtcagcgacaagcgggatattagccggttcctggagagcaaccccgtgatgatcgatgccaaggaagtgagcgccgcccaccgggccagatacttctggggcaatctgcctggcatgaacagacccctggccagcaccgtgaacgacaagctggagctgcaggagtgcctggagcacggccggatcgccaagttcagcaaggtgagaaccatcaccacccgaagcaacagcatcaaacaaggcaaggaccagcactttcctgtgttcatgaacgagaaggaggacatcctgtggtgtaccgagatggagagagtgttcgggttcccagtccactacacagatgtcagcaacatgtctagactggccagacagagactgctgggaagaagctggtccgtccctgtgatcagacacctgttcgcccctctgaaggagtacttcgcctgcgtgagcagcggcaacagcaacgccaacagccggggccccagcttctctagcggcctggtgccactgtccctgagagggagccacatgggccccatggagatctacaaaaccgtgagcgcctggaagcggcagcctgtgcgcgtgctgagcctgtttcggaatatcgataaagtcctgaaaagcctgggattcctggagagcggctctggctccggcggtggcaccctgaagtacgtggaggatgtgacaaacgtggtcagacgggatgtggagaagtggggccccttcgatctggtgtacggcagcacccaacccctgggcagctcttgtgaccggtgccctggctggtacatgtttcagttccaccggatcctgcagtacgccctgccgagacaggagtcccagcggccattcttttggattttcatggacaacttgctgctgaccgaggatgaccaggaaactaccactcggttcctgcagaccgaagccgtgaccctgcaggacgtgagaggccgggactaccagaacgccatgcgggtgtggtccaacatccctggactgaaaagcaagcacgcacctctgacccctaaagaagaggagtacctgcaggcccaggtgcggagcagaagcaagctggacgcccctaaggtggatctgctggtgaagaattgcctcctgcccctgagagagtacttcaagtatttcagccagaatagtctgcccctgggaggcagcggcggcggcggccaggagagcgtgagcttcaaggacgtgaccgtggacttcacctgggacgagtggctgcagctgaccggcatgcagaggaccctgtacagggacgtgatgctggagaactacagccacctggtgagcgtgggctgctgcatcaccaagcccgaggtgatcttcaagctggagcagggcgaggagccctggcccagggagggcgagctgcccggcaggagggaccccgacaggagccaggagggcggcccaagcagcggcgcccctcctcccagcggcggcaggcggcccaagcagcggcgcccctcctcccagcggcggcagcccagccggctccccaacctctaccgaggagggcacctctgagtccgccacccccgagagcggccctggcacctccaccgagcccagcgagggcagcgcacccggcagccctgccggcagccccacctccacagaggagggaaccagcaccgagcccagcgaaggcagcgccccaggcaccagcaccgagcctagtgagcaggagattaaacggatcaacaagatcagaagaagacttgtgaaagacagcaacaccaagaaggccggcaagacaggccccatgaaaaccctgctggttagagtgatgacacccgatctgagagagcggctggaaaacctgagaaagaagcctgaaaatatcccccagcccatcagcaatacatctagagccaacctgaataagctgctgaccgattacaccgaaatgaagaaggcgatcctgcatgtgtactgggaagagttccagaaggaccctgtgggcctgatgagccgggtggcccagcctgccagcaagaagatcgatcagaacaagctgaaacctgagatggacgagaagggcaacctgaccaccgccggctttgcctgctctcagtgtggccagcccctgttcgtgtacaagctggagcaggtgtctgagaagggcaaggcttacaccaactacttcggacggtgcaatgtggccgagcacgaaaagctgatcctgctggcccagctgaagcccgagaaggatagcgacgaagccgtgacatatagcctgggaaagtttgggcagagggccctggatttctacagcattcatgtgaccaaggagtccacccaccccgtgaagcccctggcccagatcgccggaaacagatacgcctccggacctgtgggaaaggccctgagcgacgcatgtatgggcacaatcgcctccttcctgtctaagtaccaggacatcatcatcgaacaccagaaggtggtgaagggcaaccagaagagactggagagcctgcgggagctggccggcaaggaaaacctggaataccctagcgtgaccctgccacctcagcctcacaccaaggagggcgttgatgcctacaacgaagtgatcgcccgggtgcgaatgtgggtgaacctgaacctgtggcagaagctgaagctaagcagagatgatgccaagcctctgctgagactgaagggattcccttcctttcctctggtcgagagacaggccaacgaagtggactggtgggacatggtgtgtaacgtgaagaagctgatcaacgagaaaaaggaggatggcaaggtgttttggcagaatctggctggctacaagagacaggaagccctgagaccatacctgagcagcgaggaagatcggaagaagggaaagaaattcgctcggtaccagctgggcgacctgctgctgcacctggaaaagaagcacggcgaggactggggaaaggtgtacgacgaggcctgggagcggattgacaagaaagtggaaggcctgagcaagcacatcaagctggaagaggaacggagaagcgaggacgcccagagcaaggccgccctgaccgactggctgcgggctaaggccagcttcgtgatcgagggcctgaaggaggccgacaaggacgagttctgcagatgcgagctgaagctgcagaagtggtacggggacctgcggggaaagcccttcgccatcgaagccgagaacagcatcctggacatcagcggcttcagcaagcagtacaactgtgccttcatctggcagaaggacggcgtgaagaagctgaacctgtacctgatcatcaactacttcaagggcggcaagctgcggttcaagaagatcaaacctgaagccttcgaagccaacagattctacaccgtgatcaacaaaaagagcggcgagatcgtgcccatggaggtgaacttcaacttcgacgaccccaacctgatcatcctgcctctggcctttggcaagagacagggcagagaattcatctggaacgacctgctgtccctggaaaccggcagcctgaagctggccaacggaagagtgatcgagaagacactgtacaacagaagaacccggcaggatgagcctgccctgttcgtggccctgaccttcgagcggcgggaggtcctggactcctccaatatcaaaccaatgaacctgatcggcgtggcaagaggcgaaaacatccccgccgtgatcgccctgaccgaccccgagggctgcccactgagccggtttaaggatagcctgggaaacccaacccacatcctgagaatcggcgagagctataaggagaagcagcggaccatccaggccaagaaggaggtggagcagcggagagccggcggctacagccggaagtacgccagcaaagccaagaatctggcagacgatatggtgagaaacaccgctagagatctgctgtactacgccgtgacccaggatgccatgctgatcttcgccaacctgagccggggcttcggccggcagggcaagcggaccttcatggccgagagacagtacacacggatggaggactggctgaccgccaagctggcctacgagggcctgagcaagacctacctgtccaagacactggcccagtacacctccaagacatgcagcaactgtgggtttaccatcaccagcgccgactacgacagggtgctggagaagctgaagaagacagcaacaggctggatgaccacaattaacggcaaggagctgaaggtggagggccagattacctactacaacagatacaagagacagaacgtagtcaaggacctgtccgtcgagctggatagactgagcgaagaatctgtgaacaacgacatctcctcctggacaaagggcagaagcggagaagctctgagcctcctgaagaaaagattctcccatagacccgtgcaggagaagttcgtgtgcctgaactgcggcttcgagacacacgcagccgagcaagccgccctgaacatcgccagatcctggctgttcctgcggagccaggagtacaagaaataccagacaaacaagacaaccggcaacaccgataagagagccttcgtcgagacctggcagtccttttaccggaagaagcttaaggaggtgtggaaacctgccgtgcggtctggcggatctggcggaggctccaccagccccaagaaaaagagaaaagtctaagctgccttctgcggggcttgccttctggccatgcccttcttctctcccttgcacctgtacctcttggtctttgaataaagcctgagtaggaaggctagcaaaaaaaaaaaaaaaaaaaaaaaaaaaaaaaaaaaaaaaaaaaaaaaaaaaaaaaaaaaaaaaaaaaaaaaaaaaaaaaagcccagccggctccccaacctctaccgaggagggcacctctgagtccgccacccccgagagcggccctggcacctccaccgagcccagcgagggcagcgcacccggcagccctgccggcagccccacctccacagaggagggaaccagcaccgagcccagcgaaggcagcgccccaggcaccagcaccgagcctagtgagcaggagattaaacggatcaacaagatcagaagaagacttgtgaaagacagcaacaccaagaaggccggcaagacaggccccatgaaaaccctgctggttagagtgatgacacccgatctgagagagcggctggaaaacctgagaaagaagcctgaaaatatcccccagcccatcagcaatacatctagagccaacctgaataagctgctgaccgattacaccgaaatgaagaaggcgatcctgcatgtgtactgggaagagttccagaaggaccctgtgggcctgatgagccgggtggcccagcctgccagcaagaagatcgatcagaacaagctgaaacctgagatggacgagaagggcaacctgaccaccgccggctttgcctgctctcagtgtggccagcccctgttcgtgtacaagctggagcaggtgtctgagaagggcaaggcttacaccaactacttcggacggtgcaatgtggccgagcacgaaaagctgatcctgctggcccagctgaagcccgagaaggatagcgacgaagccgtgacatatagcctgggaaagtttgggcagagggccctggatttctacagcattcatgtgaccaaggagtccacccaccccgtgaagcccctggcccagatcgccggaaacagatacgcctccggacctgtgggaaaggccctgagcgacgcatgtatgggcacaatcgcctccttcctgtctaagtaccaggacatcatcatcgaacaccagaaggtggtgaagggcaaccagaagagactggagagcctgcgggagctggccggcaaggaaaacctggaataccctagcgtgaccctgccacctcagcctcacaccaaggagggcgttgatgcctacaacgaagtgatcgcccgggtgcgaatgtgggtgaacctgaacctgtggcagaagctgaagctaagcagagatgatgccaagcctctgctgagactgaagggattcccttcctttcctctggtcgagagacaggccaacgaagtggactggtgggacatggtgtgtaacgtgaagaagctgatcaacgagaaaaaggaggatggcaaggtgttttggcagaatctggctggctacaagagacaggaagccctgagaccatacctgagcagcgaggaagatcggaagaagggaaagaaattcgctcggtaccagctgggcgacctgctgctgcacctggaaaagaagcacggcgaggactggggaaaggtgtacgacgaggcctgggagcggattgacaagaaagtggaaggcctgagcaagcacatcaagctggaagaggaacggagaagcgaggacgcccagagcaaggccgccctgaccgactggctgcgggctaaggccagcttcgtgatcgagggcctgaaggaggccgacaaggacgagttctgcagatgcgagctgaagctgcagaagtggtacggggacctgcggggaaagcccttcgccatcgaagccgagaacagcatcctggacatcagcggcttcagcaagcagtacaactgtgccttcatctggcagaaggacggcgtgaagaagctgaacctgtacctgatcatcaactacttcaagggcggcaagctgcggttcaagaagatcaaacctgaagccttcgaagccaacagattctacaccgtgatcaacaaaaagagcggcgagatcgtgcccatggaggtgaacttcaacttcgacgaccccaacctgatcatcctgcctctggcctttggcaagagacagggcagagaattcatctggaacgacctgctgtccctggaaaccggcagcctgaagctggccaacggaagagtgatcgagaagacactgtacaacagaagaacccggcaggatgagcctgccctgttcgtggccctgaccttcgagcggcgggaggtcctggactcctccaatatcaaaccaatgaacctgatcggcgtggcaagaggcgaaaacatccccgccgtgatcgccctgaccgaccccgagggctgcccactgagccggtttaaggatagcctgggaaacccaacccacatcctgagaatcggcgagagctataaggagaagcagcggaccatccaggccaagaaggaggtggagcagcggagagccggcggctacagccggaagtacgccagcaaagccaagaatctggcagacgatatggtgagaaacaccgctagagatctgctgtactacgccgtgacccaggatgccatgctgatcttcgccaacctgagccggggcttcggccggcagggcaagcggaccttcatggccgagagacagtacacacggatggaggactggctgaccgccaagctggcctacgagggcctgagcaagacctacctgtccaagacactggcccagtacacctccaagacatgcagcaactgtgggtttaccatcaccagcgccgactacgacagggtgctggagaagctgaagaagacagcaacaggctggatgaccacaattaacggcaaggagctgaaggtggagggccagattacctactacaacagatacaagagacagaacgtagtcaaggacctgtccgtcgagctggatagactgagcgaagaatctgtgaacaacgacatctcctcctggacaaagggcagaagcggagaagctctgagcctcctgaagaaaagattctcccatagacccgtgcaggagaagttcgtgtgcctgaactgcggcttcgagacacacgcagccgagcaagccgccctgaacatcgccagatcctggctgttcctgcggagccaggagtacaagaaataccagacaaacaagacaaccggcaacaccgataagagagccttcgtcgagacctggcagtccttttaccggaagaagcttaaggaggtgtggaaacctgccgtgcggtctggcggatctggcggaggctccaccagccccaagaaaaagagaaaagtctaagctgccttctgcggggcttgccttctggccatgcccttcttctctcccttgcacctgtacctcttggtctttgaataaagcctgagtaggaaggctagcaaaaaaaaaaaaaaaaaaaaaaaaaaaaaaaaaaaaaaaaaaaaaaaaaaaaaaaaaaaaaaaaaaaaaaaaaaaaaaaa

SEQ ID NO: 9698 - RNA, 8787 nt, synthetic construct
  source 1..8787: mol_type = other RNA
aggaaataagagagaaaagaagagtaagaagaaatataagagccaccatggcccctaagaagaagcgtaaagtgagccggatgaaccacgaccaggagttcgacccccctaaggtgtaccctcccgtccccgccgagaagagaaagcccatccgggtcctgagcctgttcgatggcatcgccaccggtctgctggtgctgaaggacctgggcatccaggtggataggtacattgcctccgaggtgtgcgaggactccatcaccgtgggaatggtgcgtcatcagggcaagatcatgtacgtgggcgacgtgcggagcgtgacacagaagcatatccaggagtggggccctttcgacctggtgatcggcggcagcccttgcaatgacctgagcatcgtgaacccagcccggaagggcctgtacgagggaaccggcagactgttcttcgagttttacagactgctgcacgacgcccggcctaaggaaggcgacgaccggcccttcttttggctgttcgagaatgtggtggccatgggagtcagcgacaagcgggatattagccggttcctggagagcaaccccgtgatgatcgatgccaaggaagtgagcgccgcccaccgggccagatacttctggggcaatctgcctggcatgaacagacccctggccagcaccgtgaacgacaagctggagctgcaggagtgcctggagcacggccggatcgccaagttcagcaaggtgagaaccatcaccacccgaagcaacagcatcaaacaaggcaaggaccagcactttcctgtgttcatgaacgagaaggaggacatcctgtggtgtaccgagatggagagagtgttcgggttcccagtccactacacagatgtcagcaacatgtctagactggccagacagagactgctgggaagaagctggtccgtccctgtgatcagacacctgttcgcccctctgaaggagtacttcgcctgcgtgagcagcggcaacagcaacgccaacagccggggccccagcttctctagcggcctggtgccactgtccctgagagggagccacatgggccccatggagatctacaaaaccgtgagcgcctggaagcggcagcctgtgcgcgtgctgagcctgtttcggaatatcgataaagtcctgaaaagcctgggattcctggagagcggctctggctccggcggtggcaccctgaagtacgtggaggatgtgacaaacgtggtcagacgggatgtggagaagtggggccccttcgatctggtgtacggcagcacccaacccctgggcagctcttgtgaccggtgccctggctggtacatgtttcagttccaccggatcctgcagtacgccctgccgagacaggagtcccagcggccattcttttggattttcatggacaacttgctgctgaccgaggatgaccaggaaactaccactcggttcctgcagaccgaagccgtgaccctgcaggacgtgagaggccgggactaccagaacgccatgcgggtgtggtccaacatccctggactgaaaagcaagcacgcacctctgacccctaaagaagaggagtacctgcaggcccaggtgcggagcagaagcaagctggacgcccctaaggtggatctgctggtgaagaattgcctcctgcccctgagagagtacttcaagtatttcagccagaatagtctgcccctgggaggcagcggcggcggccaggacgccgtgaccttcaaggacgtggccatctacttcagccccgaggagtgggtgaggctgagcgccggccagagggagctgtaccaggaggtgatgctggacaactacgagctggtgaccagcctggacagggagtgcaagctgctgtacaagatggaccccgaggaggagccctgcgagggcgtgccctgcaggggcgtggacagcggcgccctggacaacagcagcaccagcgcctgcggcggcccaagcagcggcgcccctcctcccagcggcggcaggcggcccaagcagcggcgcccctcctcccagcggcggcagcccagccggctccccaacctctaccgaggagggcacctctgagtccgccacccccgagagcggccctggcacctccaccgagcccagcgagggcagcgcacccggcagccctgccggcagccccacctccacagaggagggaaccagcaccgagcccagcgaaggcagcgccccaggcaccagcaccgagcctagtgagcaggagattaaacggatcaacaagatcagaagaagacttgtgaaagacagcaacaccaagaaggccggcaagacaggccccatgaaaaccctgctggttagagtgatgacacccgatctgagagagcggctggaaaacctgagaaagaagcctgaaaatatcccccagcccatcagcaatacatctagagccaacctgaataagctgctgaccgattacaccgaaatgaagaaggcgatcctgcatgtgtactgggaagagttccagaaggaccctgtgggcctgatgagccgggtggcccagcctgccagcaagaagatcgatcagaacaagctgaaacctgagatggacgagaagggcaacctgaccaccgccggctttgcctgctctcagtgtggccagcccctgttcgtgtacaagctggagcaggtgtctgagaagggcaaggcttacaccaactacttcggacggtgcaatgtggccgagcacgaaaagctgatcctgctggcccagctgaagcccgagaaggatagcgacgaagccgtgacatatagcctgggaaagtttgggcagagggccctggatttctacagcattcatgtgaccaaggagtccacccaccccgtgaagcccctggcccagatcgccggaaacagatacgcctccggacctgtgggaaaggccctgagcgacgcatgtatgggcacaatcgcctccttcctgtctaagtaccaggacatcatcatcgaacaccagaaggtggtgaagggcaaccagaagagactggagagcctgcgggagctggccggcaaggaaaacctggaataccctagcgtgaccctgccacctcagcctcacaccaaggagggcgttgatgcctacaacgaagtgatcgcccgggtgcgaatgtgggtgaacctgaacctgtggcagaagctgaagctaagcagagatgatgccaagcctctgctgagactgaagggattcccttcctttcctctggtcgagagacaggccaacgaagtggactggtgggacatggtgtgtaacgtgaagaagctgatcaacgagaaaaaggaggatggcaaggtgttttggcagaatctggctggctacaagagacaggaagccctgagaccatacctgagcagcgaggaagatcggaagaagggaaagaaattcgctcggtaccagctgggcgacctgctgctgcacctggaaaagaagcacggcgaggactggggaaaggtgtacgacgaggcctgggagcggattgacaagaaagtggaaggcctgagcaagcacatcaagctggaagaggaacggagaagcgaggacgcccagagcaaggccgccctgaccgactggctgcgggctaaggccagcttcgtgatcgagggcctgaaggaggccgacaaggacgagttctgcagatgcgagctgaagctgcagaagtggtacggggacctgcggggaaagcccttcgccatcgaagccgagaacagcatcctggacatcagcggcttcagcaagcagtacaactgtgccttcatctggcagaaggacggcgtgaagaagctgaacctgtacctgatcatcaactacttcaagggcggcaagctgcggttcaagaagatcaaacctgaagccttcgaagccaacagattctacaccgtgatcaacaaaaagagcggcgagatcgtgcccatggaggtgaacttcaacttcgacgaccccaacctgatcatcctgcctctggcctttggcaagagacagggcagagaattcatctggaacgacctgctgtccctggaaaccggcagcctgaagctggccaacggaagagtgatcgagaagacactgtacaacagaagaacccggcaggatgagcctgccctgttcgtggccctgaccttcgagcggcgggaggtcctggactcctccaatatcaaaccaatgaacctgatcggcgtggcaagaggcgaaaacatccccgccgtgatcgccctgaccgaccccgagggctgcccactgagccggtttaaggatagcctgggaaacccaacccacatcctgagaatcggcgagagctataaggagaagcagcggaccatccaggccaagaaggaggtggagcagcggagagccggcggctacagccggaagtacgccagcaaagccaagaatctggcagacgatatggtgagaaacaccgctagagatctgctgtactacgccgtgacccaggatgccatgctgatcttcgccaacctgagccggggcttcggccggcagggcaagcggaccttcatggccgagagacagtacacacggatggaggactggctgaccgccaagctggcctacgagggcctgagcaagacctacctgtccaagacactggcccagtacacctccaagacatgcagcaactgtgggtttaccatcaccagcgccgactacgacagggtgctggagaagctgaagaagacagcaacaggctggatgaccacaattaacggcaaggagctgaaggtggagggccagattacctactacaacagatacaagagacagaacgtagtcaaggacctgtccgtcgagctggatagactgagcgaagaatctgtgaacaacgacatctcctcctggacaaagggcagaagcggagaagctctgagcctcctgaagaaaagattctcccatagacccgtgcaggagaagttcgtgtgcctgaactgcggcttcgagacacacgcagccgagcaagccgccctgaacatcgccagatcctggctgttcctgcggagccaggagtacaagaaataccagacaaacaagacaaccggcaacaccgataagagagccttcgtcgagacctggcagtccttttaccggaagaagcttaaggaggtgtggaaacctgccgtgcggtctggcggatctggcggaggctccaccagccccaagaaaaagagaaaagtctaagctgccttctgcggggcttgccttctggccatgcccttcttctctcccttgcacctgtacctcttggtctttgaataaagcctgagtaggaaggctagcaaaaaaaaaaaaaaaaaaaaaaaaaaaaaaaaaaaaaaaaaaaaaaaaaaaaaaaaaaaaaaaaaaaaaaaaaaaaaaaagcccagccggctccccaacctctaccgaggagggcacctctgagtccgccacccccgagagcggccctggcacctccaccgagcccagcgagggcagcgcacccggcagccctgccggcagccccacctccacagaggagggaaccagcaccgagcccagcgaaggcagcgccccaggcaccagcaccgagcctagtgagcaggagattaaacggatcaacaagatcagaagaagacttgtgaaagacagcaacaccaagaaggccggcaagacaggccccatgaaaaccctgctggttagagtgatgacacccgatctgagagagcggctggaaaacctgagaaagaagcctgaaaatatcccccagcccatcagcaatacatctagagccaacctgaataagctgctgaccgattacaccgaaatgaagaaggcgatcctgcatgtgtactgggaagagttccagaaggaccctgtgggcctgatgagccgggtggcccagcctgccagcaagaagatcgatcagaacaagctgaaacctgagatggacgagaagggcaacctgaccaccgccggctttgcctgctctcagtgtggccagcccctgttcgtgtacaagctggagcaggtgtctgagaagggcaaggcttacaccaactacttcggacggtgcaatgtggccgagcacgaaaagctgatcctgctggcccagctgaagcccgagaaggatagcgacgaagccgtgacatatagcctgggaaagtttgggcagagggccctggatttctacagcattcatgtgaccaaggagtccacccaccccgtgaagcccctggcccagatcgccggaaacagatacgcctccggacctgtgggaaaggccctgagcgacgcatgtatgggcacaatcgcctccttcctgtctaagtaccaggacatcatcatcgaacaccagaaggtggtgaagggcaaccagaagagactggagagcctgcgggagctggccggcaaggaaaacctggaataccctagcgtgaccctgccacctcagcctcacaccaaggagggcgttgatgcctacaacgaagtgatcgcccgggtgcgaatgtgggtgaacctgaacctgtggcagaagctgaagctaagcagagatgatgccaagcctctgctgagactgaagggattcccttcctttcctctggtcgagagacaggccaacgaagtggactggtgggacatggtgtgtaacgtgaagaagctgatcaacgagaaaaaggaggatggcaaggtgttttggcagaatctggctggctacaagagacaggaagccctgagaccatacctgagcagcgaggaagatcggaagaagggaaagaaattcgctcggtaccagctgggcgacctgctgctgcacctggaaaagaagcacggcgaggactggggaaaggtgtacgacgaggcctgggagcggattgacaagaaagtggaaggcctgagcaagcacatcaagctggaagaggaacggagaagcgaggacgcccagagcaaggccgccctgaccgactggctgcgggctaaggccagcttcgtgatcgagggcctgaaggaggccgacaaggacgagttctgcagatgcgagctgaagctgcagaagtggtacggggacctgcggggaaagcccttcgccatcgaagccgagaacagcatcctggacatcagcggcttcagcaagcagtacaactgtgccttcatctggcagaaggacggcgtgaagaagctgaacctgtacctgatcatcaactacttcaagggcggcaagctgcggttcaagaagatcaaacctgaagccttcgaagccaacagattctacaccgtgatcaacaaaaagagcggcgagatcgtgcccatggaggtgaacttcaacttcgacgaccccaacctgatcatcctgcctctggcctttggcaagagacagggcagagaattcatctggaacgacctgctgtccctggaaaccggcagcctgaagctggccaacggaagagtgatcgagaagacactgtacaacagaagaacccggcaggatgagcctgccctgttcgtggccctgaccttcgagcggcgggaggtcctggactcctccaatatcaaaccaatgaacctgatcggcgtggcaagaggcgaaaacatccccgccgtgatcgccctgaccgaccccgagggctgcccactgagccggtttaaggatagcctgggaaacccaacccacatcctgagaatcggcgagagctataaggagaagcagcggaccatccaggccaagaaggaggtggagcagcggagagccggcggctacagccggaagtacgccagcaaagccaagaatctggcagacgatatggtgagaaacaccgctagagatctgctgtactacgccgtgacccaggatgccatgctgatcttcgccaacctgagccggggcttcggccggcagggcaagcggaccttcatggccgagagacagtacacacggatggaggactggctgaccgccaagctggcctacgagggcctgagcaagacctacctgtccaagacactggcccagtacacctccaagacatgcagcaactgtgggtttaccatcaccagcgccgactacgacagggtgctggagaagctgaagaagacagcaacaggctggatgaccacaattaacggcaaggagctgaaggtggagggccagattacctactacaacagatacaagagacagaacgtagtcaaggacctgtccgtcgagctggatagactgagcgaagaatctgtgaacaacgacatctcctcctggacaaagggcagaagcggagaagctctgagcctcctgaagaaaagattctcccatagacccgtgcaggagaagttcgtgtgcctgaactgcggcttcgagacacacgcagccgagcaagccgccctgaacatcgccagatcctggctgttcctgcggagccaggagtacaagaaataccagacaaacaagacaaccggcaacaccgataagagagccttcgtcgagacctggcagtccttttaccggaagaagcttaaggaggtgtggaaacctgccgtgcggtctggcggatctggcggaggctccaccagccccaagaaaaagagaaaagtctaagctgccttctgcggggcttgccttctggccatgcccttcttctctcccttgcacctgtacctcttggtctttgaataaagcctgagtaggaaggctagcaaaaaaaaaaaaaaaaaaaaaaaaaaaaaaaaaaaaaaaaaaaaaaaaaaaaaaaaaaaaaaaaaaaaaaaaaaaaaaaa

SEQ ID NO: 9699 - RNA, 8787 nt, synthetic construct
  source 1..8787: mol_type = other RNA
aggaaataagagagaaaagaagagtaagaagaaatataagagccaccatggcccctaagaagaagcgtaaagtgagccggatgaaccacgaccaggagttcgacccccctaaggtgtaccctcccgtccccgccgagaagagaaagcccatccgggtcctgagcctgttcgatggcatcgccaccggtctgctggtgctgaaggacctgggcatccaggtggataggtacattgcctccgaggtgtgcgaggactccatcaccgtgggaatggtgcgtcatcagggcaagatcatgtacgtgggcgacgtgcggagcgtgacacagaagcatatccaggagtggggccctttcgacctggtgatcggcggcagcccttgcaatgacctgagcatcgtgaacccagcccggaagggcctgtacgagggaaccggcagactgttcttcgagttttacagactgctgcacgacgcccggcctaaggaaggcgacgaccggcccttcttttggctgttcgagaatgtggtggccatgggagtcagcgacaagcgggatattagccggttcctggagagcaaccccgtgatgatcgatgccaaggaagtgagcgccgcccaccgggccagatacttctggggcaatctgcctggcatgaacagacccctggccagcaccgtgaacgacaagctggagctgcaggagtgcctggagcacggccggatcgccaagttcagcaaggtgagaaccatcaccacccgaagcaacagcatcaaacaaggcaaggaccagcactttcctgtgttcatgaacgagaaggaggacatcctgtggtgtaccgagatggagagagtgttcgggttcccagtccactacacagatgtcagcaacatgtctagactggccagacagagactgctgggaagaagctggtccgtccctgtgatcagacacctgttcgcccctctgaaggagtacttcgcctgcgtgagcagcggcaacagcaacgccaacagccggggccccagcttctctagcggcctggtgccactgtccctgagagggagccacatgggccccatggagatctacaaaaccgtgagcgcctggaagcggcagcctgtgcgcgtgctgagcctgtttcggaatatcgataaagtcctgaaaagcctgggattcctggagagcggctctggctccggcggtggcaccctgaagtacgtggaggatgtgacaaacgtggtcagacgggatgtggagaagtggggccccttcgatctggtgtacggcagcacccaacccctgggcagctcttgtgaccggtgccctggctggtacatgtttcagttccaccggatcctgcagtacgccctgccgagacaggagtcccagcggccattcttttggattttcatggacaacttgctgctgaccgaggatgaccaggaaactaccactcggttcctgcagaccgaagccgtgaccctgcaggacgtgagaggccgggactaccagaacgccatgcgggtgtggtccaacatccctggactgaaaagcaagcacgcacctctgacccctaaagaagaggagtacctgcaggcccaggtgcggagcagaagcaagctggacgcccctaaggtggatctgctggtgaagaattgcctcctgcccctgagagagtacttcaagtatttcagccagaatagtctgcccctgggaggcagcggcggcggcatggacagcgtggccttcgaggacgtggccgtgaacttcacccaggaggagtggagcctgctggaccccagccagaagaacctgtacagggaggtgatgcaggagaccctgaggaacctggccagcatcggcgagaagtggaaggaccagtacatcgaggaccagtacaagaaccccaggaacaacctgaggagcctgctgggcgagagggtggacgagaacaccgaggagaaccactgcggcggcggcccaagcagcggcgcccctcctcccagcggcggcaggcggcccaagcagcggcgcccctcctcccagcggcggcagcccagccggctccccaacctctaccgaggagggcacctctgagtccgccacccccgagagcggccctggcacctccaccgagcccagcgagggcagcgcacccggcagccctgccggcagccccacctccacagaggagggaaccagcaccgagcccagcgaaggcagcgccccaggcaccagcaccgagcctagtgagcaggagattaaacggatcaacaagatcagaagaagacttgtgaaagacagcaacaccaagaaggccggcaagacaggccccatgaaaaccctgctggttagagtgatgacacccgatctgagagagcggctggaaaacctgagaaagaagcctgaaaatatcccccagcccatcagcaatacatctagagccaacctgaataagctgctgaccgattacaccgaaatgaagaaggcgatcctgcatgtgtactgggaagagttccagaaggaccctgtgggcctgatgagccgggtggcccagcctgccagcaagaagatcgatcagaacaagctgaaacctgagatggacgagaagggcaacctgaccaccgccggctttgcctgctctcagtgtggccagcccctgttcgtgtacaagctggagcaggtgtctgagaagggcaaggcttacaccaactacttcggacggtgcaatgtggccgagcacgaaaagctgatcctgctggcccagctgaagcccgagaaggatagcgacgaagccgtgacatatagcctgggaaagtttgggcagagggccctggatttctacagcattcatgtgaccaaggagtccacccaccccgtgaagcccctggcccagatcgccggaaacagatacgcctccggacctgtgggaaaggccctgagcgacgcatgtatgggcacaatcgcctccttcctgtctaagtaccaggacatcatcatcgaacaccagaaggtggtgaagggcaaccagaagagactggagagcctgcgggagctggccggcaaggaaaacctggaataccctagcgtgaccctgccacctcagcctcacaccaaggagggcgttgatgcctacaacgaagtgatcgcccgggtgcgaatgtgggtgaacctgaacctgtggcagaagctgaagctaagcagagatgatgccaagcctctgctgagactgaagggattcccttcctttcctctggtcgagagacaggccaacgaagtggactggtgggacatggtgtgtaacgtgaagaagctgatcaacgagaaaaaggaggatggcaaggtgttttggcagaatctggctggctacaagagacaggaagccctgagaccatacctgagcagcgaggaagatcggaagaagggaaagaaattcgctcggtaccagctgggcgacctgctgctgcacctggaaaagaagcacggcgaggactggggaaaggtgtacgacgaggcctgggagcggattgacaagaaagtggaaggcctgagcaagcacatcaagctggaagaggaacggagaagcgaggacgcccagagcaaggccgccctgaccgactggctgcgggctaaggccagcttcgtgatcgagggcctgaaggaggccgacaaggacgagttctgcagatgcgagctgaagctgcagaagtggtacggggacctgcggggaaagcccttcgccatcgaagccgagaacagcatcctggacatcagcggcttcagcaagcagtacaactgtgccttcatctggcagaaggacggcgtgaagaagctgaacctgtacctgatcatcaactacttcaagggcggcaagctgcggttcaagaagatcaaacctgaagccttcgaagccaacagattctacaccgtgatcaacaaaaagagcggcgagatcgtgcccatggaggtgaacttcaacttcgacgaccccaacctgatcatcctgcctctggcctttggcaagagacagggcagagaattcatctggaacgacctgctgtccctggaaaccggcagcctgaagctggccaacggaagagtgatcgagaagacactgtacaacagaagaacccggcaggatgagcctgccctgttcgtggccctgaccttcgagcggcgggaggtcctggactcctccaatatcaaaccaatgaacctgatcggcgtggcaagaggcgaaaacatccccgccgtgatcgccctgaccgaccccgagggctgcccactgagccggtttaaggatagcctgggaaacccaacccacatcctgagaatcggcgagagctataaggagaagcagcggaccatccaggccaagaaggaggtggagcagcggagagccggcggctacagccggaagtacgccagcaaagccaagaatctggcagacgatatggtgagaaacaccgctagagatctgctgtactacgccgtgacccaggatgccatgctgatcttcgccaacctgagccggggcttcggccggcagggcaagcggaccttcatggccgagagacagtacacacggatggaggactggctgaccgccaagctggcctacgagggcctgagcaagacctacctgtccaagacactggcccagtacacctccaagacatgcagcaactgtgggtttaccatcaccagcgccgactacgacagggtgctggagaagctgaagaagacagcaacaggctggatgaccacaattaacggcaaggagctgaaggtggagggccagattacctactacaacagatacaagagacagaacgtagtcaaggacctgtccgtcgagctggatagactgagcgaagaatctgtgaacaacgacatctcctcctggacaaagggcagaagcggagaagctctgagcctcctgaagaaaagattctcccatagacccgtgcaggagaagttcgtgtgcctgaactgcggcttcgagacacacgcagccgagcaagccgccctgaacatcgccagatcctggctgttcctgcggagccaggagtacaagaaataccagacaaacaagacaaccggcaacaccgataagagagccttcgtcgagacctggcagtccttttaccggaagaagcttaaggaggtgtggaaacctgccgtgcggtctggcggatctggcggaggctccaccagccccaagaaaaagagaaaagtctaagctgccttctgcggggcttgccttctggccatgcccttcttctctcccttgcacctgtacctcttggtctttgaataaagcctgagtaggaaggctagcaaaaaaaaaaaaaaaaaaaaaaaaaaaaaaaaaaaaaaaaaaaaaaaaaaaaaaaaaaaaaaaaaaaaaaaaaaaaaaaagcccagccggctccccaacctctaccgaggagggcacctctgagtccgccacccccgagagcggccctggcacctccaccgagcccagcgagggcagcgcacccggcagccctgccggcagccccacctccacagaggagggaaccagcaccgagcccagcgaaggcagcgccccaggcaccagcaccgagcctagtgagcaggagattaaacggatcaacaagatcagaagaagacttgtgaaagacagcaacaccaagaaggccggcaagacaggccccatgaaaaccctgctggttagagtgatgacacccgatctgagagagcggctggaaaacctgagaaagaagcctgaaaatatcccccagcccatcagcaatacatctagagccaacctgaataagctgctgaccgattacaccgaaatgaagaaggcgatcctgcatgtgtactgggaagagttccagaaggaccctgtgggcctgatgagccgggtggcccagcctgccagcaagaagatcgatcagaacaagctgaaacctgagatggacgagaagggcaacctgaccaccgccggctttgcctgctctcagtgtggccagcccctgttcgtgtacaagctggagcaggtgtctgagaagggcaaggcttacaccaactacttcggacggtgcaatgtggccgagcacgaaaagctgatcctgctggcccagctgaagcccgagaaggatagcgacgaagccgtgacatatagcctgggaaagtttgggcagagggccctggatttctacagcattcatgtgaccaaggagtccacccaccccgtgaagcccctggcccagatcgccggaaacagatacgcctccggacctgtgggaaaggccctgagcgacgcatgtatgggcacaatcgcctccttcctgtctaagtaccaggacatcatcatcgaacaccagaaggtggtgaagggcaaccagaagagactggagagcctgcgggagctggccggcaaggaaaacctggaataccctagcgtgaccctgccacctcagcctcacaccaaggagggcgttgatgcctacaacgaagtgatcgcccgggtgcgaatgtgggtgaacctgaacctgtggcagaagctgaagctaagcagagatgatgccaagcctctgctgagactgaagggattcccttcctttcctctggtcgagagacaggccaacgaagtggactggtgggacatggtgtgtaacgtgaagaagctgatcaacgagaaaaaggaggatggcaaggtgttttggcagaatctggctggctacaagagacaggaagccctgagaccatacctgagcagcgaggaagatcggaagaagggaaagaaattcgctcggtaccagctgggcgacctgctgctgcacctggaaaagaagcacggcgaggactggggaaaggtgtacgacgaggcctgggagcggattgacaagaaagtggaaggcctgagcaagcacatcaagctggaagaggaacggagaagcgaggacgcccagagcaaggccgccctgaccgactggctgcgggctaaggccagcttcgtgatcgagggcctgaaggaggccgacaaggacgagttctgcagatgcgagctgaagctgcagaagtggtacggggacctgcggggaaagcccttcgccatcgaagccgagaacagcatcctggacatcagcggcttcagcaagcagtacaactgtgccttcatctggcagaaggacggcgtgaagaagctgaacctgtacctgatcatcaactacttcaagggcggcaagctgcggttcaagaagatcaaacctgaagccttcgaagccaacagattctacaccgtgatcaacaaaaagagcggcgagatcgtgcccatggaggtgaacttcaacttcgacgaccccaacctgatcatcctgcctctggcctttggcaagagacagggcagagaattcatctggaacgacctgctgtccctggaaaccggcagcctgaagctggccaacggaagagtgatcgagaagacactgtacaacagaagaacccggcaggatgagcctgccctgttcgtggccctgaccttcgagcggcgggaggtcctggactcctccaatatcaaaccaatgaacctgatcggcgtggcaagaggcgaaaacatccccgccgtgatcgccctgaccgaccccgagggctgcccactgagccggtttaaggatagcctgggaaacccaacccacatcctgagaatcggcgagagctataaggagaagcagcggaccatccaggccaagaaggaggtggagcagcggagagccggcggctacagccggaagtacgccagcaaagccaagaatctggcagacgatatggtgagaaacaccgctagagatctgctgtactacgccgtgacccaggatgccatgctgatcttcgccaacctgagccggggcttcggccggcagggcaagcggaccttcatggccgagagacagtacacacggatggaggactggctgaccgccaagctggcctacgagggcctgagcaagacctacctgtccaagacactggcccagtacacctccaagacatgcagcaactgtgggtttaccatcaccagcgccgactacgacagggtgctggagaagctgaagaagacagcaacaggctggatgaccacaattaacggcaaggagctgaaggtggagggccagattacctactacaacagatacaagagacagaacgtagtcaaggacctgtccgtcgagctggatagactgagcgaagaatctgtgaacaacgacatctcctcctggacaaagggcagaagcggagaagctctgagcctcctgaagaaaagattctcccatagacccgtgcaggagaagttcgtgtgcctgaactgcggcttcgagacacacgcagccgagcaagccgccctgaacatcgccagatcctggctgttcctgcggagccaggagtacaagaaataccagacaaacaagacaaccggcaacaccgataagagagccttcgtcgagacctggcagtccttttaccggaagaagcttaaggaggtgtggaaacctgccgtgcggtctggcggatctggcggaggctccaccagccccaagaaaaagagaaaagtctaagctgccttctgcggggcttgccttctggccatgcccttcttctctcccttgcacctgtacctcttggtctttgaataaagcctgagtaggaaggctagcaaaaaaaaaaaaaaaaaaaaaaaaaaaaaaaaaaaaaaaaaaaaaaaaaaaaaaaaaaaaaaaaaaaaaaaaaaaaaaaa

SEQ ID NO: 9700 - RNA, 8787 nt, synthetic construct
  source 1..8787: mol_type = other RNA
aggaaataagagagaaaagaagagtaagaagaaatataagagccaccatggcccctaagaagaagcgtaaagtgagccggatgaaccacgaccaggagttcgacccccctaaggtgtaccctcccgtccccgccgagaagagaaagcccatccgggtcctgagcctgttcgatggcatcgccaccggtctgctggtgctgaaggacctgggcatccaggtggataggtacattgcctccgaggtgtgcgaggactccatcaccgtgggaatggtgcgtcatcagggcaagatcatgtacgtgggcgacgtgcggagcgtgacacagaagcatatccaggagtggggccctttcgacctggtgatcggcggcagcccttgcaatgacctgagcatcgtgaacccagcccggaagggcctgtacgagggaaccggcagactgttcttcgagttttacagactgctgcacgacgcccggcctaaggaaggcgacgaccggcccttcttttggctgttcgagaatgtggtggccatgggagtcagcgacaagcgggatattagccggttcctggagagcaaccccgtgatgatcgatgccaaggaagtgagcgccgcccaccgggccagatacttctggggcaatctgcctggcatgaacagacccctggccagcaccgtgaacgacaagctggagctgcaggagtgcctggagcacggccggatcgccaagttcagcaaggtgagaaccatcaccacccgaagcaacagcatcaaacaaggcaaggaccagcactttcctgtgttcatgaacgagaaggaggacatcctgtggtgtaccgagatggagagagtgttcgggttcccagtccactacacagatgtcagcaacatgtctagactggccagacagagactgctgggaagaagctggtccgtccctgtgatcagacacctgttcgcccctctgaaggagtacttcgcctgcgtgagcagcggcaacagcaacgccaacagccggggccccagcttctctagcggcctggtgccactgtccctgagagggagccacatgggccccatggagatctacaaaaccgtgagcgcctggaagcggcagcctgtgcgcgtgctgagcctgtttcggaatatcgataaagtcctgaaaagcctgggattcctggagagcggctctggctccggcggtggcaccctgaagtacgtggaggatgtgacaaacgtggtcagacgggatgtggagaagtggggccccttcgatctggtgtacggcagcacccaacccctgggcagctcttgtgaccggtgccctggctggtacatgtttcagttccaccggatcctgcagtacgccctgccgagacaggagtcccagcggccattcttttggattttcatggacaacttgctgctgaccgaggatgaccaggaaactaccactcggttcctgcagaccgaagccgtgaccctgcaggacgtgagaggccgggactaccagaacgccatgcgggtgtggtccaacatccctggactgaaaagcaagcacgcacctctgacccctaaagaagaggagtacctgcaggcccaggtgcggagcagaagcaagctggacgcccctaaggtggatctgctggtgaagaattgcctcctgcccctgagagagtacttcaagtatttcagccagaatagtctgcccctgggaggcagcggcggcggccaggcccaggaggtgctgatgttcgacgacgtggccgtgaggttcacctgggaggagtggcagctgctgaaccccgcccagaaggccctgtacagggacgtgatgctggagaactacaggagcctggtgagcgtgggctggagggccagcaagcccgacctgctgagccagctggagaggggcgagccctggaccatcgagggcgagaaccactgcggcaccccccccgagatctggaaggccggcggcccaagcagcggcgcccctcctcccagcggcggcaggcggcccaagcagcggcgcccctcctcccagcggcggcagcccagccggctccccaacctctaccgaggagggcacctctgagtccgccacccccgagagcggccctggcacctccaccgagcccagcgagggcagcgcacccggcagccctgccggcagccccacctccacagaggagggaaccagcaccgagcccagcgaaggcagcgccccaggcaccagcaccgagcctagtgagcaggagattaaacggatcaacaagatcagaagaagacttgtgaaagacagcaacaccaagaaggccggcaagacaggccccatgaaaaccctgctggttagagtgatgacacccgatctgagagagcggctggaaaacctgagaaagaagcctgaaaatatcccccagcccatcagcaatacatctagagccaacctgaataagctgctgaccgattacaccgaaatgaagaaggcgatcctgcatgtgtactgggaagagttccagaaggaccctgtgggcctgatgagccgggtggcccagcctgccagcaagaagatcgatcagaacaagctgaaacctgagatggacgagaagggcaacctgaccaccgccggctttgcctgctctcagtgtggccagcccctgttcgtgtacaagctggagcaggtgtctgagaagggcaaggcttacaccaactacttcggacggtgcaatgtggccgagcacgaaaagctgatcctgctggcccagctgaagcccgagaaggatagcgacgaagccgtgacatatagcctgggaaagtttgggcagagggccctggatttctacagcattcatgtgaccaaggagtccacccaccccgtgaagcccctggcccagatcgccggaaacagatacgcctccggacctgtgggaaaggccctgagcgacgcatgtatgggcacaatcgcctccttcctgtctaagtaccaggacatcatcatcgaacaccagaaggtggtgaagggcaaccagaagagactggagagcctgcgggagctggccggcaaggaaaacctggaataccctagcgtgaccctgccacctcagcctcacaccaaggagggcgttgatgcctacaacgaagtgatcgcccgggtgcgaatgtgggtgaacctgaacctgtggcagaagctgaagctaagcagagatgatgccaagcctctgctgagactgaagggattcccttcctttcctctggtcgagagacaggccaacgaagtggactggtgggacatggtgtgtaacgtgaagaagctgatcaacgagaaaaaggaggatggcaaggtgttttggcagaatctggctggctacaagagacaggaagccctgagaccatacctgagcagcgaggaagatcggaagaagggaaagaaattcgctcggtaccagctgggcgacctgctgctgcacctggaaaagaagcacggcgaggactggggaaaggtgtacgacgaggcctgggagcggattgacaagaaagtggaaggcctgagcaagcacatcaagctggaagaggaacggagaagcgaggacgcccagagcaaggccgccctgaccgactggctgcgggctaaggccagcttcgtgatcgagggcctgaaggaggccgacaaggacgagttctgcagatgcgagctgaagctgcagaagtggtacggggacctgcggggaaagcccttcgccatcgaagccgagaacagcatcctggacatcagcggcttcagcaagcagtacaactgtgccttcatctggcagaaggacggcgtgaagaagctgaacctgtacctgatcatcaactacttcaagggcggcaagctgcggttcaagaagatcaaacctgaagccttcgaagccaacagattctacaccgtgatcaacaaaaagagcggcgagatcgtgcccatggaggtgaacttcaacttcgacgaccccaacctgatcatcctgcctctggcctttggcaagagacagggcagagaattcatctggaacgacctgctgtccctggaaaccggcagcctgaagctggccaacggaagagtgatcgagaagacactgtacaacagaagaacccggcaggatgagcctgccctgttcgtggccctgaccttcgagcggcgggaggtcctggactcctccaatatcaaaccaatgaacctgatcggcgtggcaagaggcgaaaacatccccgccgtgatcgccctgaccgaccccgagggctgcccactgagccggtttaaggatagcctgggaaacccaacccacatcctgagaatcggcgagagctataaggagaagcagcggaccatccaggccaagaaggaggtggagcagcggagagccggcggctacagccggaagtacgccagcaaagccaagaatctggcagacgatatggtgagaaacaccgctagagatctgctgtactacgccgtgacccaggatgccatgctgatcttcgccaacctgagccggggcttcggccggcagggcaagcggaccttcatggccgagagacagtacacacggatggaggactggctgaccgccaagctggcctacgagggcctgagcaagacctacctgtccaagacactggcccagtacacctccaagacatgcagcaactgtgggtttaccatcaccagcgccgactacgacagggtgctggagaagctgaagaagacagcaacaggctggatgaccacaattaacggcaaggagctgaaggtggagggccagattacctactacaacagatacaagagacagaacgtagtcaaggacctgtccgtcgagctggatagactgagcgaagaatctgtgaacaacgacatctcctcctggacaaagggcagaagcggagaagctctgagcctcctgaagaaaagattctcccatagacccgtgcaggagaagttcgtgtgcctgaactgcggcttcgagacacacgcagccgagcaagccgccctgaacatcgccagatcctggctgttcctgcggagccaggagtacaagaaataccagacaaacaagacaaccggcaacaccgataagagagccttcgtcgagacctggcagtccttttaccggaagaagcttaaggaggtgtggaaacctgccgtgcggtctggcggatctggcggaggctccaccagccccaagaaaaagagaaaagtctaagctgccttctgcggggcttgccttctggccatgcccttcttctctcccttgcacctgtacctcttggtctttgaataaagcctgagtaggaaggctagcaaaaaaaaaaaaaaaaaaaaaaaaaaaaaaaaaaaaaaaaaaaaaaaaaaaaaaaaaaaaaaaaaaaaaaaaaaaaaaaagcccagccggctccccaacctctaccgaggagggcacctctgagtccgccacccccgagagcggccctggcacctccaccgagcccagcgagggcagcgcacccggcagccctgccggcagccccacctccacagaggagggaaccagcaccgagcccagcgaaggcagcgccccaggcaccagcaccgagcctagtgagcaggagattaaacggatcaacaagatcagaagaagacttgtgaaagacagcaacaccaagaaggccggcaagacaggccccatgaaaaccctgctggttagagtgatgacacccgatctgagagagcggctggaaaacctgagaaagaagcctgaaaatatcccccagcccatcagcaatacatctagagccaacctgaataagctgctgaccgattacaccgaaatgaagaaggcgatcctgcatgtgtactgggaagagttccagaaggaccctgtgggcctgatgagccgggtggcccagcctgccagcaagaagatcgatcagaacaagctgaaacctgagatggacgagaagggcaacctgaccaccgccggctttgcctgctctcagtgtggccagcccctgttcgtgtacaagctggagcaggtgtctgagaagggcaaggcttacaccaactacttcggacggtgcaatgtggccgagcacgaaaagctgatcctgctggcccagctgaagcccgagaaggatagcgacgaagccgtgacatatagcctgggaaagtttgggcagagggccctggatttctacagcattcatgtgaccaaggagtccacccaccccgtgaagcccctggcccagatcgccggaaacagatacgcctccggacctgtgggaaaggccctgagcgacgcatgtatgggcacaatcgcctccttcctgtctaagtaccaggacatcatcatcgaacaccagaaggtggtgaagggcaaccagaagagactggagagcctgcgggagctggccggcaaggaaaacctggaataccctagcgtgaccctgccacctcagcctcacaccaaggagggcgttgatgcctacaacgaagtgatcgcccgggtgcgaatgtgggtgaacctgaacctgtggcagaagctgaagctaagcagagatgatgccaagcctctgctgagactgaagggattcccttcctttcctctggtcgagagacaggccaacgaagtggactggtgggacatggtgtgtaacgtgaagaagctgatcaacgagaaaaaggaggatggcaaggtgttttggcagaatctggctggctacaagagacaggaagccctgagaccatacctgagcagcgaggaagatcggaagaagggaaagaaattcgctcggtaccagctgggcgacctgctgctgcacctggaaaagaagcacggcgaggactggggaaaggtgtacgacgaggcctgggagcggattgacaagaaagtggaaggcctgagcaagcacatcaagctggaagaggaacggagaagcgaggacgcccagagcaaggccgccctgaccgactggctgcgggctaaggccagcttcgtgatcgagggcctgaaggaggccgacaaggacgagttctgcagatgcgagctgaagctgcagaagtggtacggggacctgcggggaaagcccttcgccatcgaagccgagaacagcatcctggacatcagcggcttcagcaagcagtacaactgtgccttcatctggcagaaggacggcgtgaagaagctgaacctgtacctgatcatcaactacttcaagggcggcaagctgcggttcaagaagatcaaacctgaagccttcgaagccaacagattctacaccgtgatcaacaaaaagagcggcgagatcgtgcccatggaggtgaacttcaacttcgacgaccccaacctgatcatcctgcctctggcctttggcaagagacagggcagagaattcatctggaacgacctgctgtccctggaaaccggcagcctgaagctggccaacggaagagtgatcgagaagacactgtacaacagaagaacccggcaggatgagcctgccctgttcgtggccctgaccttcgagcggcgggaggtcctggactcctccaatatcaaaccaatgaacctgatcggcgtggcaagaggcgaaaacatccccgccgtgatcgccctgaccgaccccgagggctgcccactgagccggtttaaggatagcctgggaaacccaacccacatcctgagaatcggcgagagctataaggagaagcagcggaccatccaggccaagaaggaggtggagcagcggagagccggcggctacagccggaagtacgccagcaaagccaagaatctggcagacgatatggtgagaaacaccgctagagatctgctgtactacgccgtgacccaggatgccatgctgatcttcgccaacctgagccggggcttcggccggcagggcaagcggaccttcatggccgagagacagtacacacggatggaggactggctgaccgccaagctggcctacgagggcctgagcaagacctacctgtccaagacactggcccagtacacctccaagacatgcagcaactgtgggtttaccatcaccagcgccgactacgacagggtgctggagaagctgaagaagacagcaacaggctggatgaccacaattaacggcaaggagctgaaggtggagggccagattacctactacaacagatacaagagacagaacgtagtcaaggacctgtccgtcgagctggatagactgagcgaagaatctgtgaacaacgacatctcctcctggacaaagggcagaagcggagaagctctgagcctcctgaagaaaagattctcccatagacccgtgcaggagaagttcgtgtgcctgaactgcggcttcgagacacacgcagccgagcaagccgccctgaacatcgccagatcctggctgttcctgcggagccaggagtacaagaaataccagacaaacaagacaaccggcaacaccgataagagagccttcgtcgagacctggcagtccttttaccggaagaagcttaaggaggtgtggaaacctgccgtgcggtctggcggatctggcggaggctccaccagccccaagaaaaagagaaaagtctaagctgccttctgcggggcttgccttctggccatgcccttcttctctcccttgcacctgtacctcttggtctttgaataaagcctgagtaggaaggctagcaaaaaaaaaaaaaaaaaaaaaaaaaaaaaaaaaaaaaaaaaaaaaaaaaaaaaaaaaaaaaaaaaaaaaaaaaaaaaaaa

SEQ ID NO: 9701 - RNA, 8787 nt, synthetic construct
  source 1..8787: mol_type = other RNA
aggaaataagagagaaaagaagagtaagaagaaatataagagccaccatggcccctaagaagaagcgtaaagtgagccggatgaaccacgaccaggagttcgacccccctaaggtgtaccctcccgtccccgccgagaagagaaagcccatccgggtcctgagcctgttcgatggcatcgccaccggtctgctggtgctgaaggacctgggcatccaggtggataggtacattgcctccgaggtgtgcgaggactccatcaccgtgggaatggtgcgtcatcagggcaagatcatgtacgtgggcgacgtgcggagcgtgacacagaagcatatccaggagtggggccctttcgacctggtgatcggcggcagcccttgcaatgacctgagcatcgtgaacccagcccggaagggcctgtacgagggaaccggcagactgttcttcgagttttacagactgctgcacgacgcccggcctaaggaaggcgacgaccggcccttcttttggctgttcgagaatgtggtggccatgggagtcagcgacaagcgggatattagccggttcctggagagcaaccccgtgatgatcgatgccaaggaagtgagcgccgcccaccgggccagatacttctggggcaatctgcctggcatgaacagacccctggccagcaccgtgaacgacaagctggagctgcaggagtgcctggagcacggccggatcgccaagttcagcaaggtgagaaccatcaccacccgaagcaacagcatcaaacaaggcaaggaccagcactttcctgtgttcatgaacgagaaggaggacatcctgtggtgtaccgagatggagagagtgttcgggttcccagtccactacacagatgtcagcaacatgtctagactggccagacagagactgctgggaagaagctggtccgtccctgtgatcagacacctgttcgcccctctgaaggagtacttcgcctgcgtgagcagcggcaacagcaacgccaacagccggggccccagcttctctagcggcctggtgccactgtccctgagagggagccacatgggccccatggagatctacaaaaccgtgagcgcctggaagcggcagcctgtgcgcgtgctgagcctgtttcggaatatcgataaagtcctgaaaagcctgggattcctggagagcggctctggctccggcggtggcaccctgaagtacgtggaggatgtgacaaacgtggtcagacgggatgtggagaagtggggccccttcgatctggtgtacggcagcacccaacccctgggcagctcttgtgaccggtgccctggctggtacatgtttcagttccaccggatcctgcagtacgccctgccgagacaggagtcccagcggccattcttttggattttcatggacaacttgctgctgaccgaggatgaccaggaaactaccactcggttcctgcagaccgaagccgtgaccctgcaggacgtgagaggccgggactaccagaacgccatgcgggtgtggtccaacatccctggactgaaaagcaagcacgcacctctgacccctaaagaagaggagtacctgcaggcccaggtgcggagcagaagcaagctggacgcccctaaggtggatctgctggtgaagaattgcctcctgcccctgagagagtacttcaagtatttcagccagaatagtctgcccctgggaggcagcggcggcggcctgcaggagagcgtgaccttcagggacgtggccgtgctgttcagccaggacgagtggctgcacctggacagcgcccagaggaccctgtacagggaggtgatgctggagaactacaacaacctggccagcctgggcatccccttcagcatgcccaaggtgatctgccagctgcagcagggcgaggacccctgcaccgtggagggcgaggtgcccagcgacagctgcatcgacgccaagggccagggcggcccaagcagcggcgcccctcctcccagcggcggcaggcggcccaagcagcggcgcccctcctcccagcggcggcagcccagccggctccccaacctctaccgaggagggcacctctgagtccgccacccccgagagcggccctggcacctccaccgagcccagcgagggcagcgcacccggcagccctgccggcagccccacctccacagaggagggaaccagcaccgagcccagcgaaggcagcgccccaggcaccagcaccgagcctagtgagcaggagattaaacggatcaacaagatcagaagaagacttgtgaaagacagcaacaccaagaaggccggcaagacaggccccatgaaaaccctgctggttagagtgatgacacccgatctgagagagcggctggaaaacctgagaaagaagcctgaaaatatcccccagcccatcagcaatacatctagagccaacctgaataagctgctgaccgattacaccgaaatgaagaaggcgatcctgcatgtgtactgggaagagttccagaaggaccctgtgggcctgatgagccgggtggcccagcctgccagcaagaagatcgatcagaacaagctgaaacctgagatggacgagaagggcaacctgaccaccgccggctttgcctgctctcagtgtggccagcccctgttcgtgtacaagctggagcaggtgtctgagaagggcaaggcttacaccaactacttcggacggtgcaatgtggccgagcacgaaaagctgatcctgctggcccagctgaagcccgagaaggatagcgacgaagccgtgacatatagcctgggaaagtttgggcagagggccctggatttctacagcattcatgtgaccaaggagtccacccaccccgtgaagcccctggcccagatcgccggaaacagatacgcctccggacctgtgggaaaggccctgagcgacgcatgtatgggcacaatcgcctccttcctgtctaagtaccaggacatcatcatcgaacaccagaaggtggtgaagggcaaccagaagagactggagagcctgcgggagctggccggcaaggaaaacctggaataccctagcgtgaccctgccacctcagcctcacaccaaggagggcgttgatgcctacaacgaagtgatcgcccgggtgcgaatgtgggtgaacctgaacctgtggcagaagctgaagctaagcagagatgatgccaagcctctgctgagactgaagggattcccttcctttcctctggtcgagagacaggccaacgaagtggactggtgggacatggtgtgtaacgtgaagaagctgatcaacgagaaaaaggaggatggcaaggtgttttggcagaatctggctggctacaagagacaggaagccctgagaccatacctgagcagcgaggaagatcggaagaagggaaagaaattcgctcggtaccagctgggcgacctgctgctgcacctggaaaagaagcacggcgaggactggggaaaggtgtacgacgaggcctgggagcggattgacaagaaagtggaaggcctgagcaagcacatcaagctggaagaggaacggagaagcgaggacgcccagagcaaggccgccctgaccgactggctgcgggctaaggccagcttcgtgatcgagggcctgaaggaggccgacaaggacgagttctgcagatgcgagctgaagctgcagaagtggtacggggacctgcggggaaagcccttcgccatcgaagccgagaacagcatcctggacatcagcggcttcagcaagcagtacaactgtgccttcatctggcagaaggacggcgtgaagaagctgaacctgtacctgatcatcaactacttcaagggcggcaagctgcggttcaagaagatcaaacctgaagccttcgaagccaacagattctacaccgtgatcaacaaaaagagcggcgagatcgtgcccatggaggtgaacttcaacttcgacgaccccaacctgatcatcctgcctctggcctttggcaagagacagggcagagaattcatctggaacgacctgctgtccctggaaaccggcagcctgaagctggccaacggaagagtgatcgagaagacactgtacaacagaagaacccggcaggatgagcctgccctgttcgtggccctgaccttcgagcggcgggaggtcctggactcctccaatatcaaaccaatgaacctgatcggcgtggcaagaggcgaaaacatccccgccgtgatcgccctgaccgaccccgagggctgcccactgagccggtttaaggatagcctgggaaacccaacccacatcctgagaatcggcgagagctataaggagaagcagcggaccatccaggccaagaaggaggtggagcagcggagagccggcggctacagccggaagtacgccagcaaagccaagaatctggcagacgatatggtgagaaacaccgctagagatctgctgtactacgccgtgacccaggatgccatgctgatcttcgccaacctgagccggggcttcggccggcagggcaagcggaccttcatggccgagagacagtacacacggatggaggactggctgaccgccaagctggcctacgagggcctgagcaagacctacctgtccaagacactggcccagtacacctccaagacatgcagcaactgtgggtttaccatcaccagcgccgactacgacagggtgctggagaagctgaagaagacagcaacaggctggatgaccacaattaacggcaaggagctgaaggtggagggccagattacctactacaacagatacaagagacagaacgtagtcaaggacctgtccgtcgagctggatagactgagcgaagaatctgtgaacaacgacatctcctcctggacaaagggcagaagcggagaagctctgagcctcctgaagaaaagattctcccatagacccgtgcaggagaagttcgtgtgcctgaactgcggcttcgagacacacgcagccgagcaagccgccctgaacatcgccagatcctggctgttcctgcggagccaggagtacaagaaataccagacaaacaagacaaccggcaacaccgataagagagccttcgtcgagacctggcagtccttttaccggaagaagcttaaggaggtgtggaaacctgccgtgcggtctggcggatctggcggaggctccaccagccccaagaaaaagagaaaagtctaagctgccttctgcggggcttgccttctggccatgcccttcttctctcccttgcacctgtacctcttggtctttgaataaagcctgagtaggaaggctagcaaaaaaaaaaaaaaaaaaaaaaaaaaaaaaaaaaaaaaaaaaaaaaaaaaaaaaaaaaaaaaaaaaaaaaaaaaaaaaaagcccagccggctccccaacctctaccgaggagggcacctctgagtccgccacccccgagagcggccctggcacctccaccgagcccagcgagggcagcgcacccggcagccctgccggcagccccacctccacagaggagggaaccagcaccgagcccagcgaaggcagcgccccaggcaccagcaccgagcctagtgagcaggagattaaacggatcaacaagatcagaagaagacttgtgaaagacagcaacaccaagaaggccggcaagacaggccccatgaaaaccctgctggttagagtgatgacacccgatctgagagagcggctggaaaacctgagaaagaagcctgaaaatatcccccagcccatcagcaatacatctagagccaacctgaataagctgctgaccgattacaccgaaatgaagaaggcgatcctgcatgtgtactgggaagagttccagaaggaccctgtgggcctgatgagccgggtggcccagcctgccagcaagaagatcgatcagaacaagctgaaacctgagatggacgagaagggcaacctgaccaccgccggctttgcctgctctcagtgtggccagcccctgttcgtgtacaagctggagcaggtgtctgagaagggcaaggcttacaccaactacttcggacggtgcaatgtggccgagcacgaaaagctgatcctgctggcccagctgaagcccgagaaggatagcgacgaagccgtgacatatagcctgggaaagtttgggcagagggccctggatttctacagcattcatgtgaccaaggagtccacccaccccgtgaagcccctggcccagatcgccggaaacagatacgcctccggacctgtgggaaaggccctgagcgacgcatgtatgggcacaatcgcctccttcctgtctaagtaccaggacatcatcatcgaacaccagaaggtggtgaagggcaaccagaagagactggagagcctgcgggagctggccggcaaggaaaacctggaataccctagcgtgaccctgccacctcagcctcacaccaaggagggcgttgatgcctacaacgaagtgatcgcccgggtgcgaatgtgggtgaacctgaacctgtggcagaagctgaagctaagcagagatgatgccaagcctctgctgagactgaagggattcccttcctttcctctggtcgagagacaggccaacgaagtggactggtgggacatggtgtgtaacgtgaagaagctgatcaacgagaaaaaggaggatggcaaggtgttttggcagaatctggctggctacaagagacaggaagccctgagaccatacctgagcagcgaggaagatcggaagaagggaaagaaattcgctcggtaccagctgggcgacctgctgctgcacctggaaaagaagcacggcgaggactggggaaaggtgtacgacgaggcctgggagcggattgacaagaaagtggaaggcctgagcaagcacatcaagctggaagaggaacggagaagcgaggacgcccagagcaaggccgccctgaccgactggctgcgggctaaggccagcttcgtgatcgagggcctgaaggaggccgacaaggacgagttctgcagatgcgagctgaagctgcagaagtggtacggggacctgcggggaaagcccttcgccatcgaagccgagaacagcatcctggacatcagcggcttcagcaagcagtacaactgtgccttcatctggcagaaggacggcgtgaagaagctgaacctgtacctgatcatcaactacttcaagggcggcaagctgcggttcaagaagatcaaacctgaagccttcgaagccaacagattctacaccgtgatcaacaaaaagagcggcgagatcgtgcccatggaggtgaacttcaacttcgacgaccccaacctgatcatcctgcctctggcctttggcaagagacagggcagagaattcatctggaacgacctgctgtccctggaaaccggcagcctgaagctggccaacggaagagtgatcgagaagacactgtacaacagaagaacccggcaggatgagcctgccctgttcgtggccctgaccttcgagcggcgggaggtcctggactcctccaatatcaaaccaatgaacctgatcggcgtggcaagaggcgaaaacatccccgccgtgatcgccctgaccgaccccgagggctgcccactgagccggtttaaggatagcctgggaaacccaacccacatcctgagaatcggcgagagctataaggagaagcagcggaccatccaggccaagaaggaggtggagcagcggagagccggcggctacagccggaagtacgccagcaaagccaagaatctggcagacgatatggtgagaaacaccgctagagatctgctgtactacgccgtgacccaggatgccatgctgatcttcgccaacctgagccggggcttcggccggcagggcaagcggaccttcatggccgagagacagtacacacggatggaggactggctgaccgccaagctggcctacgagggcctgagcaagacctacctgtccaagacactggcccagtacacctccaagacatgcagcaactgtgggtttaccatcaccagcgccgactacgacagggtgctggagaagctgaagaagacagcaacaggctggatgaccacaattaacggcaaggagctgaaggtggagggccagattacctactacaacagatacaagagacagaacgtagtcaaggacctgtccgtcgagctggatagactgagcgaagaatctgtgaacaacgacatctcctcctggacaaagggcagaagcggagaagctctgagcctcctgaagaaaagattctcccatagacccgtgcaggagaagttcgtgtgcctgaactgcggcttcgagacacacgcagccgagcaagccgccctgaacatcgccagatcctggctgttcctgcggagccaggagtacaagaaataccagacaaacaagacaaccggcaacaccgataagagagccttcgtcgagacctggcagtccttttaccggaagaagcttaaggaggtgtggaaacctgccgtgcggtctggcggatctggcggaggctccaccagccccaagaaaaagagaaaagtctaagctgccttctgcggggcttgccttctggccatgcccttcttctctcccttgcacctgtacctcttggtctttgaataaagcctgagtaggaaggctagcaaaaaaaaaaaaaaaaaaaaaaaaaaaaaaaaaaaaaaaaaaaaaaaaaaaaaaaaaaaaaaaaaaaaaaaaaaaaaaaa

SEQ ID NO: 9702 - RNA, 8784 nt, synthetic construct
  source 1..8784: mol_type = other RNA
aggaaataagagagaaaagaagagtaagaagaaatataagagccaccatggcccctaagaagaagcgtaaagtgagccggatgaaccacgaccaggagttcgacccccctaaggtgtaccctcccgtccccgccgagaagagaaagcccatccgggtcctgagcctgttcgatggcatcgccaccggtctgctggtgctgaaggacctgggcatccaggtggataggtacattgcctccgaggtgtgcgaggactccatcaccgtgggaatggtgcgtcatcagggcaagatcatgtacgtgggcgacgtgcggagcgtgacacagaagcatatccaggagtggggccctttcgacctggtgatcggcggcagcccttgcaatgacctgagcatcgtgaacccagcccggaagggcctgtacgagggaaccggcagactgttcttcgagttttacagactgctgcacgacgcccggcctaaggaaggcgacgaccggcccttcttttggctgttcgagaatgtggtggccatgggagtcagcgacaagcgggatattagccggttcctggagagcaaccccgtgatgatcgatgccaaggaagtgagcgccgcccaccgggccagatacttctggggcaatctgcctggcatgaacagacccctggccagcaccgtgaacgacaagctggagctgcaggagtgcctggagcacggccggatcgccaagttcagcaaggtgagaaccatcaccacccgaagcaacagcatcaaacaaggcaaggaccagcactttcctgtgttcatgaacgagaaggaggacatcctgtggtgtaccgagatggagagagtgttcgggttcccagtccactacacagatgtcagcaacatgtctagactggccagacagagactgctgggaagaagctggtccgtccctgtgatcagacacctgttcgcccctctgaaggagtacttcgcctgcgtgagcagcggcaacagcaacgccaacagccggggccccagcttctctagcggcctggtgccactgtccctgagagggagccacatgggccccatggagatctacaaaaccgtgagcgcctggaagcggcagcctgtgcgcgtgctgagcctgtttcggaatatcgataaagtcctgaaaagcctgggattcctggagagcggctctggctccggcggtggcaccctgaagtacgtggaggatgtgacaaacgtggtcagacgggatgtggagaagtggggccccttcgatctggtgtacggcagcacccaacccctgggcagctcttgtgaccggtgccctggctggtacatgtttcagttccaccggatcctgcagtacgccctgccgagacaggagtcccagcggccattcttttggattttcatggacaacttgctgctgaccgaggatgaccaggaaactaccactcggttcctgcagaccgaagccgtgaccctgcaggacgtgagaggccgggactaccagaacgccatgcgggtgtggtccaacatccctggactgaaaagcaagcacgcacctctgacccctaaagaagaggagtacctgcaggcccaggtgcggagcagaagcaagctggacgcccctaaggtggatctgctggtgaagaattgcctcctgcccctgagagagtacttcaagtatttcagccagaatagtctgcccctgggaggcagcggcggcggcagccaggtgaccttcagcgacgtggccatcgacttcagccacgaggagtgggcctgcctggacagcgcccagagagacctgtacaaggacgtgatggtgcagaactacgagaacctggtgagcgtgggcctgagcgtgaccaagccctacgtgatcatgctgctggaggacggcaaggagccctggatgatggagaagaagctgagcaaggcctaccccttccccctgagccacagcgtgggcggcccaagcagcggcgcccctcctcccagcggcggcaggcggcccaagcagcggcgcccctcctcccagcggcggcagcccagccggctccccaacctctaccgaggagggcacctctgagtccgccacccccgagagcggccctggcacctccaccgagcccagcgagggcagcgcacccggcagccctgccggcagccccacctccacagaggagggaaccagcaccgagcccagcgaaggcagcgccccaggcaccagcaccgagcctagtgagcaggagattaaacggatcaacaagatcagaagaagacttgtgaaagacagcaacaccaagaaggccggcaagacaggccccatgaaaaccctgctggttagagtgatgacacccgatctgagagagcggctggaaaacctgagaaagaagcctgaaaatatcccccagcccatcagcaatacatctagagccaacctgaataagctgctgaccgattacaccgaaatgaagaaggcgatcctgcatgtgtactgggaagagttccagaaggaccctgtgggcctgatgagccgggtggcccagcctgccagcaagaagatcgatcagaacaagctgaaacctgagatggacgagaagggcaacctgaccaccgccggctttgcctgctctcagtgtggccagcccctgttcgtgtacaagctggagcaggtgtctgagaagggcaaggcttacaccaactacttcggacggtgcaatgtggccgagcacgaaaagctgatcctgctggcccagctgaagcccgagaaggatagcgacgaagccgtgacatatagcctgggaaagtttgggcagagggccctggatttctacagcattcatgtgaccaaggagtccacccaccccgtgaagcccctggcccagatcgccggaaacagatacgcctccggacctgtgggaaaggccctgagcgacgcatgtatgggcacaatcgcctccttcctgtctaagtaccaggacatcatcatcgaacaccagaaggtggtgaagggcaaccagaagagactggagagcctgcgggagctggccggcaaggaaaacctggaataccctagcgtgaccctgccacctcagcctcacaccaaggagggcgttgatgcctacaacgaagtgatcgcccgggtgcgaatgtgggtgaacctgaacctgtggcagaagctgaagctaagcagagatgatgccaagcctctgctgagactgaagggattcccttcctttcctctggtcgagagacaggccaacgaagtggactggtgggacatggtgtgtaacgtgaagaagctgatcaacgagaaaaaggaggatggcaaggtgttttggcagaatctggctggctacaagagacaggaagccctgagaccatacctgagcagcgaggaagatcggaagaagggaaagaaattcgctcggtaccagctgggcgacctgctgctgcacctggaaaagaagcacggcgaggactggggaaaggtgtacgacgaggcctgggagcggattgacaagaaagtggaaggcctgagcaagcacatcaagctggaagaggaacggagaagcgaggacgcccagagcaaggccgccctgaccgactggctgcgggctaaggccagcttcgtgatcgagggcctgaaggaggccgacaaggacgagttctgcagatgcgagctgaagctgcagaagtggtacggggacctgcggggaaagcccttcgccatcgaagccgagaacagcatcctggacatcagcggcttcagcaagcagtacaactgtgccttcatctggcagaaggacggcgtgaagaagctgaacctgtacctgatcatcaactacttcaagggcggcaagctgcggttcaagaagatcaaacctgaagccttcgaagccaacagattctacaccgtgatcaacaaaaagagcggcgagatcgtgcccatggaggtgaacttcaacttcgacgaccccaacctgatcatcctgcctctggcctttggcaagagacagggcagagaattcatctggaacgacctgctgtccctggaaaccggcagcctgaagctggccaacggaagagtgatcgagaagacactgtacaacagaagaacccggcaggatgagcctgccctgttcgtggccctgaccttcgagcggcgggaggtcctggactcctccaatatcaaaccaatgaacctgatcggcgtggcaagaggcgaaaacatccccgccgtgatcgccctgaccgaccccgagggctgcccactgagccggtttaaggatagcctgggaaacccaacccacatcctgagaatcggcgagagctataaggagaagcagcggaccatccaggccaagaaggaggtggagcagcggagagccggcggctacagccggaagtacgccagcaaagccaagaatctggcagacgatatggtgagaaacaccgctagagatctgctgtactacgccgtgacccaggatgccatgctgatcttcgccaacctgagccggggcttcggccggcagggcaagcggaccttcatggccgagagacagtacacacggatggaggactggctgaccgccaagctggcctacgagggcctgagcaagacctacctgtccaagacactggcccagtacacctccaagacatgcagcaactgtgggtttaccatcaccagcgccgactacgacagggtgctggagaagctgaagaagacagcaacaggctggatgaccacaattaacggcaaggagctgaaggtggagggccagattacctactacaacagatacaagagacagaacgtagtcaaggacctgtccgtcgagctggatagactgagcgaagaatctgtgaacaacgacatctcctcctggacaaagggcagaagcggagaagctctgagcctcctgaagaaaagattctcccatagacccgtgcaggagaagttcgtgtgcctgaactgcggcttcgagacacacgcagccgagcaagccgccctgaacatcgccagatcctggctgttcctgcggagccaggagtacaagaaataccagacaaacaagacaaccggcaacaccgataagagagccttcgtcgagacctggcagtccttttaccggaagaagcttaaggaggtgtggaaacctgccgtgcggtctggcggatctggcggaggctccaccagccccaagaaaaagagaaaagtctaagctgccttctgcggggcttgccttctggccatgcccttcttctctcccttgcacctgtacctcttggtctttgaataaagcctgagtaggaaggctagcaaaaaaaaaaaaaaaaaaaaaaaaaaaaaaaaaaaaaaaaaaaaaaaaaaaaaaaaaaaaaaaaaaaaaaaaaaaaaaaagcccagccggctccccaacctctaccgaggagggcacctctgagtccgccacccccgagagcggccctggcacctccaccgagcccagcgagggcagcgcacccggcagccctgccggcagccccacctccacagaggagggaaccagcaccgagcccagcgaaggcagcgccccaggcaccagcaccgagcctagtgagcaggagattaaacggatcaacaagatcagaagaagacttgtgaaagacagcaacaccaagaaggccggcaagacaggccccatgaaaaccctgctggttagagtgatgacacccgatctgagagagcggctggaaaacctgagaaagaagcctgaaaatatcccccagcccatcagcaatacatctagagccaacctgaataagctgctgaccgattacaccgaaatgaagaaggcgatcctgcatgtgtactgggaagagttccagaaggaccctgtgggcctgatgagccgggtggcccagcctgccagcaagaagatcgatcagaacaagctgaaacctgagatggacgagaagggcaacctgaccaccgccggctttgcctgctctcagtgtggccagcccctgttcgtgtacaagctggagcaggtgtctgagaagggcaaggcttacaccaactacttcggacggtgcaatgtggccgagcacgaaaagctgatcctgctggcccagctgaagcccgagaaggatagcgacgaagccgtgacatatagcctgggaaagtttgggcagagggccctggatttctacagcattcatgtgaccaaggagtccacccaccccgtgaagcccctggcccagatcgccggaaacagatacgcctccggacctgtgggaaaggccctgagcgacgcatgtatgggcacaatcgcctccttcctgtctaagtaccaggacatcatcatcgaacaccagaaggtggtgaagggcaaccagaagagactggagagcctgcgggagctggccggcaaggaaaacctggaataccctagcgtgaccctgccacctcagcctcacaccaaggagggcgttgatgcctacaacgaagtgatcgcccgggtgcgaatgtgggtgaacctgaacctgtggcagaagctgaagctaagcagagatgatgccaagcctctgctgagactgaagggattcccttcctttcctctggtcgagagacaggccaacgaagtggactggtgggacatggtgtgtaacgtgaagaagctgatcaacgagaaaaaggaggatggcaaggtgttttggcagaatctggctggctacaagagacaggaagccctgagaccatacctgagcagcgaggaagatcggaagaagggaaagaaattcgctcggtaccagctgggcgacctgctgctgcacctggaaaagaagcacggcgaggactggggaaaggtgtacgacgaggcctgggagcggattgacaagaaagtggaaggcctgagcaagcacatcaagctggaagaggaacggagaagcgaggacgcccagagcaaggccgccctgaccgactggctgcgggctaaggccagcttcgtgatcgagggcctgaaggaggccgacaaggacgagttctgcagatgcgagctgaagctgcagaagtggtacggggacctgcggggaaagcccttcgccatcgaagccgagaacagcatcctggacatcagcggcttcagcaagcagtacaactgtgccttcatctggcagaaggacggcgtgaagaagctgaacctgtacctgatcatcaactacttcaagggcggcaagctgcggttcaagaagatcaaacctgaagccttcgaagccaacagattctacaccgtgatcaacaaaaagagcggcgagatcgtgcccatggaggtgaacttcaacttcgacgaccccaacctgatcatcctgcctctggcctttggcaagagacagggcagagaattcatctggaacgacctgctgtccctggaaaccggcagcctgaagctggccaacggaagagtgatcgagaagacactgtacaacagaagaacccggcaggatgagcctgccctgttcgtggccctgaccttcgagcggcgggaggtcctggactcctccaatatcaaaccaatgaacctgatcggcgtggcaagaggcgaaaacatccccgccgtgatcgccctgaccgaccccgagggctgcccactgagccggtttaaggatagcctgggaaacccaacccacatcctgagaatcggcgagagctataaggagaagcagcggaccatccaggccaagaaggaggtggagcagcggagagccggcggctacagccggaagtacgccagcaaagccaagaatctggcagacgatatggtgagaaacaccgctagagatctgctgtactacgccgtgacccaggatgccatgctgatcttcgccaacctgagccggggcttcggccggcagggcaagcggaccttcatggccgagagacagtacacacggatggaggactggctgaccgccaagctggcctacgagggcctgagcaagacctacctgtccaagacactggcccagtacacctccaagacatgcagcaactgtgggtttaccatcaccagcgccgactacgacagggtgctggagaagctgaagaagacagcaacaggctggatgaccacaattaacggcaaggagctgaaggtggagggccagattacctactacaacagatacaagagacagaacgtagtcaaggacctgtccgtcgagctggatagactgagcgaagaatctgtgaacaacgacatctcctcctggacaaagggcagaagcggagaagctctgagcctcctgaagaaaagattctcccatagacccgtgcaggagaagttcgtgtgcctgaactgcggcttcgagacacacgcagccgagcaagccgccctgaacatcgccagatcctggctgttcctgcggagccaggagtacaagaaataccagacaaacaagacaaccggcaacaccgataagagagccttcgtcgagacctggcagtccttttaccggaagaagcttaaggaggtgtggaaacctgccgtgcggtctggcggatctggcggaggctccaccagccccaagaaaaagagaaaagtctaagctgccttctgcggggcttgccttctggccatgcccttcttctctcccttgcacctgtacctcttggtctttgaataaagcctgagtaggaaggctagcaaaaaaaaaaaaaaaaaaaaaaaaaaaaaaaaaaaaaaaaaaaaaaaaaaaaaaaaaaaaaaaaaaaaaaaaaaaaaaaa

SEQ ID NO: 9703 - RNA, 8787 nt, synthetic construct
  source 1..8787: mol_type = other RNA
aggaaataagagagaaaagaagagtaagaagaaatataagagccaccatggcccctaagaagaagcgtaaagtgagccggatgaaccacgaccaggagttcgacccccctaaggtgtaccctcccgtccccgccgagaagagaaagcccatccgggtcctgagcctgttcgatggcatcgccaccggtctgctggtgctgaaggacctgggcatccaggtggataggtacattgcctccgaggtgtgcgaggactccatcaccgtgggaatggtgcgtcatcagggcaagatcatgtacgtgggcgacgtgcggagcgtgacacagaagcatatccaggagtggggccctttcgacctggtgatcggcggcagcccttgcaatgacctgagcatcgtgaacccagcccggaagggcctgtacgagggaaccggcagactgttcttcgagttttacagactgctgcacgacgcccggcctaaggaaggcgacgaccggcccttcttttggctgttcgagaatgtggtggccatgggagtcagcgacaagcgggatattagccggttcctggagagcaaccccgtgatgatcgatgccaaggaagtgagcgccgcccaccgggccagatacttctggggcaatctgcctggcatgaacagacccctggccagcaccgtgaacgacaagctggagctgcaggagtgcctggagcacggccggatcgccaagttcagcaaggtgagaaccatcaccacccgaagcaacagcatcaaacaaggcaaggaccagcactttcctgtgttcatgaacgagaaggaggacatcctgtggtgtaccgagatggagagagtgttcgggttcccagtccactacacagatgtcagcaacatgtctagactggccagacagagactgctgggaagaagctggtccgtccctgtgatcagacacctgttcgcccctctgaaggagtacttcgcctgcgtgagcagcggcaacagcaacgccaacagccggggccccagcttctctagcggcctggtgccactgtccctgagagggagccacatgggccccatggagatctacaaaaccgtgagcgcctggaagcggcagcctgtgcgcgtgctgagcctgtttcggaatatcgataaagtcctgaaaagcctgggattcctggagagcggctctggctccggcggtggcaccctgaagtacgtggaggatgtgacaaacgtggtcagacgggatgtggagaagtggggccccttcgatctggtgtacggcagcacccaacccctgggcagctcttgtgaccggtgccctggctggtacatgtttcagttccaccggatcctgcagtacgccctgccgagacaggagtcccagcggccattcttttggattttcatggacaacttgctgctgaccgaggatgaccaggaaactaccactcggttcctgcagaccgaagccgtgaccctgcaggacgtgagaggccgggactaccagaacgccatgcgggtgtggtccaacatccctggactgaaaagcaagcacgcacctctgacccctaaagaagaggagtacctgcaggcccaggtgcggagcagaagcaagctggacgcccctaaggtggatctgctggtgaagaattgcctcctgcccctgagagagtacttcaagtatttcagccagaatagtctgcccctgggaggcagcggcggcggcgacgccgtgaccttccccgacgtggccatcgacttcagcagggacgagtgggagtgcctgaacctggcccagaggaccctgtacaggaaggtgatgctggagaactacaggaccctggtgagcgtgggcctgtgcgtgagcaagcccgacgtgatcagcctgctggagcagggcgaggagccctgggtgaccgacggcgagatggccggcggcctgtgcccccacagcgagtgcgtgtggatgggcggcccaagcagcggcgcccctcctcccagcggcggcaggcggcccaagcagcggcgcccctcctcccagcggcggcagcccagccggctccccaacctctaccgaggagggcacctctgagtccgccacccccgagagcggccctggcacctccaccgagcccagcgagggcagcgcacccggcagccctgccggcagccccacctccacagaggagggaaccagcaccgagcccagcgaaggcagcgccccaggcaccagcaccgagcctagtgagcaggagattaaacggatcaacaagatcagaagaagacttgtgaaagacagcaacaccaagaaggccggcaagacaggccccatgaaaaccctgctggttagagtgatgacacccgatctgagagagcggctggaaaacctgagaaagaagcctgaaaatatcccccagcccatcagcaatacatctagagccaacctgaataagctgctgaccgattacaccgaaatgaagaaggcgatcctgcatgtgtactgggaagagttccagaaggaccctgtgggcctgatgagccgggtggcccagcctgccagcaagaagatcgatcagaacaagctgaaacctgagatggacgagaagggcaacctgaccaccgccggctttgcctgctctcagtgtggccagcccctgttcgtgtacaagctggagcaggtgtctgagaagggcaaggcttacaccaactacttcggacggtgcaatgtggccgagcacgaaaagctgatcctgctggcccagctgaagcccgagaaggatagcgacgaagccgtgacatatagcctgggaaagtttgggcagagggccctggatttctacagcattcatgtgaccaaggagtccacccaccccgtgaagcccctggcccagatcgccggaaacagatacgcctccggacctgtgggaaaggccctgagcgacgcatgtatgggcacaatcgcctccttcctgtctaagtaccaggacatcatcatcgaacaccagaaggtggtgaagggcaaccagaagagactggagagcctgcgggagctggccggcaaggaaaacctggaataccctagcgtgaccctgccacctcagcctcacaccaaggagggcgttgatgcctacaacgaagtgatcgcccgggtgcgaatgtgggtgaacctgaacctgtggcagaagctgaagctaagcagagatgatgccaagcctctgctgagactgaagggattcccttcctttcctctggtcgagagacaggccaacgaagtggactggtgggacatggtgtgtaacgtgaagaagctgatcaacgagaaaaaggaggatggcaaggtgttttggcagaatctggctggctacaagagacaggaagccctgagaccatacctgagcagcgaggaagatcggaagaagggaaagaaattcgctcggtaccagctgggcgacctgctgctgcacctggaaaagaagcacggcgaggactggggaaaggtgtacgacgaggcctgggagcggattgacaagaaagtggaaggcctgagcaagcacatcaagctggaagaggaacggagaagcgaggacgcccagagcaaggccgccctgaccgactggctgcgggctaaggccagcttcgtgatcgagggcctgaaggaggccgacaaggacgagttctgcagatgcgagctgaagctgcagaagtggtacggggacctgcggggaaagcccttcgccatcgaagccgagaacagcatcctggacatcagcggcttcagcaagcagtacaactgtgccttcatctggcagaaggacggcgtgaagaagctgaacctgtacctgatcatcaactacttcaagggcggcaagctgcggttcaagaagatcaaacctgaagccttcgaagccaacagattctacaccgtgatcaacaaaaagagcggcgagatcgtgcccatggaggtgaacttcaacttcgacgaccccaacctgatcatcctgcctctggcctttggcaagagacagggcagagaattcatctggaacgacctgctgtccctggaaaccggcagcctgaagctggccaacggaagagtgatcgagaagacactgtacaacagaagaacccggcaggatgagcctgccctgttcgtggccctgaccttcgagcggcgggaggtcctggactcctccaatatcaaaccaatgaacctgatcggcgtggcaagaggcgaaaacatccccgccgtgatcgccctgaccgaccccgagggctgcccactgagccggtttaaggatagcctgggaaacccaacccacatcctgagaatcggcgagagctataaggagaagcagcggaccatccaggccaagaaggaggtggagcagcggagagccggcggctacagccggaagtacgccagcaaagccaagaatctggcagacgatatggtgagaaacaccgctagagatctgctgtactacgccgtgacccaggatgccatgctgatcttcgccaacctgagccggggcttcggccggcagggcaagcggaccttcatggccgagagacagtacacacggatggaggactggctgaccgccaagctggcctacgagggcctgagcaagacctacctgtccaagacactggcccagtacacctccaagacatgcagcaactgtgggtttaccatcaccagcgccgactacgacagggtgctggagaagctgaagaagacagcaacaggctggatgaccacaattaacggcaaggagctgaaggtggagggccagattacctactacaacagatacaagagacagaacgtagtcaaggacctgtccgtcgagctggatagactgagcgaagaatctgtgaacaacgacatctcctcctggacaaagggcagaagcggagaagctctgagcctcctgaagaaaagattctcccatagacccgtgcaggagaagttcgtgtgcctgaactgcggcttcgagacacacgcagccgagcaagccgccctgaacatcgccagatcctggctgttcctgcggagccaggagtacaagaaataccagacaaacaagacaaccggcaacaccgataagagagccttcgtcgagacctggcagtccttttaccggaagaagcttaaggaggtgtggaaacctgccgtgcggtctggcggatctggcggaggctccaccagccccaagaaaaagagaaaagtctaagctgccttctgcggggcttgccttctggccatgcccttcttctctcccttgcacctgtacctcttggtctttgaataaagcctgagtaggaaggctagcaaaaaaaaaaaaaaaaaaaaaaaaaaaaaaaaaaaaaaaaaaaaaaaaaaaaaaaaaaaaaaaaaaaaaaaaaaaaaaaagcccagccggctccccaacctctaccgaggagggcacctctgagtccgccacccccgagagcggccctggcacctccaccgagcccagcgagggcagcgcacccggcagccctgccggcagccccacctccacagaggagggaaccagcaccgagcccagcgaaggcagcgccccaggcaccagcaccgagcctagtgagcaggagattaaacggatcaacaagatcagaagaagacttgtgaaagacagcaacaccaagaaggccggcaagacaggccccatgaaaaccctgctggttagagtgatgacacccgatctgagagagcggctggaaaacctgagaaagaagcctgaaaatatcccccagcccatcagcaatacatctagagccaacctgaataagctgctgaccgattacaccgaaatgaagaaggcgatcctgcatgtgtactgggaagagttccagaaggaccctgtgggcctgatgagccgggtggcccagcctgccagcaagaagatcgatcagaacaagctgaaacctgagatggacgagaagggcaacctgaccaccgccggctttgcctgctctcagtgtggccagcccctgttcgtgtacaagctggagcaggtgtctgagaagggcaaggcttacaccaactacttcggacggtgcaatgtggccgagcacgaaaagctgatcctgctggcccagctgaagcccgagaaggatagcgacgaagccgtgacatatagcctgggaaagtttgggcagagggccctggatttctacagcattcatgtgaccaaggagtccacccaccccgtgaagcccctggcccagatcgccggaaacagatacgcctccggacctgtgggaaaggccctgagcgacgcatgtatgggcacaatcgcctccttcctgtctaagtaccaggacatcatcatcgaacaccagaaggtggtgaagggcaaccagaagagactggagagcctgcgggagctggccggcaaggaaaacctggaataccctagcgtgaccctgccacctcagcctcacaccaaggagggcgttgatgcctacaacgaagtgatcgcccgggtgcgaatgtgggtgaacctgaacctgtggcagaagctgaagctaagcagagatgatgccaagcctctgctgagactgaagggattcccttcctttcctctggtcgagagacaggccaacgaagtggactggtgggacatggtgtgtaacgtgaagaagctgatcaacgagaaaaaggaggatggcaaggtgttttggcagaatctggctggctacaagagacaggaagccctgagaccatacctgagcagcgaggaagatcggaagaagggaaagaaattcgctcggtaccagctgggcgacctgctgctgcacctggaaaagaagcacggcgaggactggggaaaggtgtacgacgaggcctgggagcggattgacaagaaagtggaaggcctgagcaagcacatcaagctggaagaggaacggagaagcgaggacgcccagagcaaggccgccctgaccgactggctgcgggctaaggccagcttcgtgatcgagggcctgaaggaggccgacaaggacgagttctgcagatgcgagctgaagctgcagaagtggtacggggacctgcggggaaagcccttcgccatcgaagccgagaacagcatcctggacatcagcggcttcagcaagcagtacaactgtgccttcatctggcagaaggacggcgtgaagaagctgaacctgtacctgatcatcaactacttcaagggcggcaagctgcggttcaagaagatcaaacctgaagccttcgaagccaacagattctacaccgtgatcaacaaaaagagcggcgagatcgtgcccatggaggtgaacttcaacttcgacgaccccaacctgatcatcctgcctctggcctttggcaagagacagggcagagaattcatctggaacgacctgctgtccctggaaaccggcagcctgaagctggccaacggaagagtgatcgagaagacactgtacaacagaagaacccggcaggatgagcctgccctgttcgtggccctgaccttcgagcggcgggaggtcctggactcctccaatatcaaaccaatgaacctgatcggcgtggcaagaggcgaaaacatccccgccgtgatcgccctgaccgaccccgagggctgcccactgagccggtttaaggatagcctgggaaacccaacccacatcctgagaatcggcgagagctataaggagaagcagcggaccatccaggccaagaaggaggtggagcagcggagagccggcggctacagccggaagtacgccagcaaagccaagaatctggcagacgatatggtgagaaacaccgctagagatctgctgtactacgccgtgacccaggatgccatgctgatcttcgccaacctgagccggggcttcggccggcagggcaagcggaccttcatggccgagagacagtacacacggatggaggactggctgaccgccaagctggcctacgagggcctgagcaagacctacctgtccaagacactggcccagtacacctccaagacatgcagcaactgtgggtttaccatcaccagcgccgactacgacagggtgctggagaagctgaagaagacagcaacaggctggatgaccacaattaacggcaaggagctgaaggtggagggccagattacctactacaacagatacaagagacagaacgtagtcaaggacctgtccgtcgagctggatagactgagcgaagaatctgtgaacaacgacatctcctcctggacaaagggcagaagcggagaagctctgagcctcctgaagaaaagattctcccatagacccgtgcaggagaagttcgtgtgcctgaactgcggcttcgagacacacgcagccgagcaagccgccctgaacatcgccagatcctggctgttcctgcggagccaggagtacaagaaataccagacaaacaagacaaccggcaacaccgataagagagccttcgtcgagacctggcagtccttttaccggaagaagcttaaggaggtgtggaaacctgccgtgcggtctggcggatctggcggaggctccaccagccccaagaaaaagagaaaagtctaagctgccttctgcggggcttgccttctggccatgcccttcttctctcccttgcacctgtacctcttggtctttgaataaagcctgagtaggaaggctagcaaaaaaaaaaaaaaaaaaaaaaaaaaaaaaaaaaaaaaaaaaaaaaaaaaaaaaaaaaaaaaaaaaaaaaaaaaaaaaaa

SEQ ID NO: 9704 - RNA, 8787 nt, synthetic construct
  source 1..8787: mol_type = other RNA
aggaaataagagagaaaagaagagtaagaagaaatataagagccaccatggcccctaagaagaagcgtaaagtgagccggatgaaccacgaccaggagttcgacccccctaaggtgtaccctcccgtccccgccgagaagagaaagcccatccgggtcctgagcctgttcgatggcatcgccaccggtctgctggtgctgaaggacctgggcatccaggtggataggtacattgcctccgaggtgtgcgaggactccatcaccgtgggaatggtgcgtcatcagggcaagatcatgtacgtgggcgacgtgcggagcgtgacacagaagcatatccaggagtggggccctttcgacctggtgatcggcggcagcccttgcaatgacctgagcatcgtgaacccagcccggaagggcctgtacgagggaaccggcagactgttcttcgagttttacagactgctgcacgacgcccggcctaaggaaggcgacgaccggcccttcttttggctgttcgagaatgtggtggccatgggagtcagcgacaagcgggatattagccggttcctggagagcaaccccgtgatgatcgatgccaaggaagtgagcgccgcccaccgggccagatacttctggggcaatctgcctggcatgaacagacccctggccagcaccgtgaacgacaagctggagctgcaggagtgcctggagcacggccggatcgccaagttcagcaaggtgagaaccatcaccacccgaagcaacagcatcaaacaaggcaaggaccagcactttcctgtgttcatgaacgagaaggaggacatcctgtggtgtaccgagatggagagagtgttcgggttcccagtccactacacagatgtcagcaacatgtctagactggccagacagagactgctgggaagaagctggtccgtccctgtgatcagacacctgttcgcccctctgaaggagtacttcgcctgcgtgagcagcggcaacagcaacgccaacagccggggccccagcttctctagcggcctggtgccactgtccctgagagggagccacatgggccccatggagatctacaaaaccgtgagcgcctggaagcggcagcctgtgcgcgtgctgagcctgtttcggaatatcgataaagtcctgaaaagcctgggattcctggagagcggctctggctccggcggtggcaccctgaagtacgtggaggatgtgacaaacgtggtcagacgggatgtggagaagtggggccccttcgatctggtgtacggcagcacccaacccctgggcagctcttgtgaccggtgccctggctggtacatgtttcagttccaccggatcctgcagtacgccctgccgagacaggagtcccagcggccattcttttggattttcatggacaacttgctgctgaccgaggatgaccaggaaactaccactcggttcctgcagaccgaagccgtgaccctgcaggacgtgagaggccgggactaccagaacgccatgcgggtgtggtccaacatccctggactgaaaagcaagcacgcacctctgacccctaaagaagaggagtacctgcaggcccaggtgcggagcagaagcaagctggacgcccctaaggtggatctgctggtgaagaattgcctcctgcccctgagagagtacttcaagtatttcagccagaatagtctgcccctgggaggcagcggcggcggcttccagggcctgatgaccttcgaggacgtgaccgtggagttcacccagtgggagtggggccagctggaccccgcccagaaggacctgtacagggaggtgatgctggagaacttcaggaacctggccagcctgggcctgcccctgagcaagccctacgtgatctgccagctggaggagggccaggagccctgcatgctggagaaggagatcagcgtgggcacccagagcgtgggcgaggccaccggcggcccaagcagcggcgcccctcctcccagcggcggcaggcggcccaagcagcggcgcccctcctcccagcggcggcagcccagccggctccccaacctctaccgaggagggcacctctgagtccgccacccccgagagcggccctggcacctccaccgagcccagcgagggcagcgcacccggcagccctgccggcagccccacctccacagaggagggaaccagcaccgagcccagcgaaggcagcgccccaggcaccagcaccgagcctagtgagcaggagattaaacggatcaacaagatcagaagaagacttgtgaaagacagcaacaccaagaaggccggcaagacaggccccatgaaaaccctgctggttagagtgatgacacccgatctgagagagcggctggaaaacctgagaaagaagcctgaaaatatcccccagcccatcagcaatacatctagagccaacctgaataagctgctgaccgattacaccgaaatgaagaaggcgatcctgcatgtgtactgggaagagttccagaaggaccctgtgggcctgatgagccgggtggcccagcctgccagcaagaagatcgatcagaacaagctgaaacctgagatggacgagaagggcaacctgaccaccgccggctttgcctgctctcagtgtggccagcccctgttcgtgtacaagctggagcaggtgtctgagaagggcaaggcttacaccaactacttcggacggtgcaatgtggccgagcacgaaaagctgatcctgctggcccagctgaagcccgagaaggatagcgacgaagccgtgacatatagcctgggaaagtttgggcagagggccctggatttctacagcattcatgtgaccaaggagtccacccaccccgtgaagcccctggcccagatcgccggaaacagatacgcctccggacctgtgggaaaggccctgagcgacgcatgtatgggcacaatcgcctccttcctgtctaagtaccaggacatcatcatcgaacaccagaaggtggtgaagggcaaccagaagagactggagagcctgcgggagctggccggcaaggaaaacctggaataccctagcgtgaccctgccacctcagcctcacaccaaggagggcgttgatgcctacaacgaagtgatcgcccgggtgcgaatgtgggtgaacctgaacctgtggcagaagctgaagctaagcagagatgatgccaagcctctgctgagactgaagggattcccttcctttcctctggtcgagagacaggccaacgaagtggactggtgggacatggtgtgtaacgtgaagaagctgatcaacgagaaaaaggaggatggcaaggtgttttggcagaatctggctggctacaagagacaggaagccctgagaccatacctgagcagcgaggaagatcggaagaagggaaagaaattcgctcggtaccagctgggcgacctgctgctgcacctggaaaagaagcacggcgaggactggggaaaggtgtacgacgaggcctgggagcggattgacaagaaagtggaaggcctgagcaagcacatcaagctggaagaggaacggagaagcgaggacgcccagagcaaggccgccctgaccgactggctgcgggctaaggccagcttcgtgatcgagggcctgaaggaggccgacaaggacgagttctgcagatgcgagctgaagctgcagaagtggtacggggacctgcggggaaagcccttcgccatcgaagccgagaacagcatcctggacatcagcggcttcagcaagcagtacaactgtgccttcatctggcagaaggacggcgtgaagaagctgaacctgtacctgatcatcaactacttcaagggcggcaagctgcggttcaagaagatcaaacctgaagccttcgaagccaacagattctacaccgtgatcaacaaaaagagcggcgagatcgtgcccatggaggtgaacttcaacttcgacgaccccaacctgatcatcctgcctctggcctttggcaagagacagggcagagaattcatctggaacgacctgctgtccctggaaaccggcagcctgaagctggccaacggaagagtgatcgagaagacactgtacaacagaagaacccggcaggatgagcctgccctgttcgtggccctgaccttcgagcggcgggaggtcctggactcctccaatatcaaaccaatgaacctgatcggcgtggcaagaggcgaaaacatccccgccgtgatcgccctgaccgaccccgagggctgcccactgagccggtttaaggatagcctgggaaacccaacccacatcctgagaatcggcgagagctataaggagaagcagcggaccatccaggccaagaaggaggtggagcagcggagagccggcggctacagccggaagtacgccagcaaagccaagaatctggcagacgatatggtgagaaacaccgctagagatctgctgtactacgccgtgacccaggatgccatgctgatcttcgccaacctgagccggggcttcggccggcagggcaagcggaccttcatggccgagagacagtacacacggatggaggactggctgaccgccaagctggcctacgagggcctgagcaagacctacctgtccaagacactggcccagtacacctccaagacatgcagcaactgtgggtttaccatcaccagcgccgactacgacagggtgctggagaagctgaagaagacagcaacaggctggatgaccacaattaacggcaaggagctgaaggtggagggccagattacctactacaacagatacaagagacagaacgtagtcaaggacctgtccgtcgagctggatagactgagcgaagaatctgtgaacaacgacatctcctcctggacaaagggcagaagcggagaagctctgagcctcctgaagaaaagattctcccatagacccgtgcaggagaagttcgtgtgcctgaactgcggcttcgagacacacgcagccgagcaagccgccctgaacatcgccagatcctggctgttcctgcggagccaggagtacaagaaataccagacaaacaagacaaccggcaacaccgataagagagccttcgtcgagacctggcagtccttttaccggaagaagcttaaggaggtgtggaaacctgccgtgcggtctggcggatctggcggaggctccaccagccccaagaaaaagagaaaagtctaagctgccttctgcggggcttgccttctggccatgcccttcttctctcccttgcacctgtacctcttggtctttgaataaagcctgagtaggaaggctagcaaaaaaaaaaaaaaaaaaaaaaaaaaaaaaaaaaaaaaaaaaaaaaaaaaaaaaaaaaaaaaaaaaaaaaaaaaaaaaaagcccagccggctccccaacctctaccgaggagggcacctctgagtccgccacccccgagagcggccctggcacctccaccgagcccagcgagggcagcgcacccggcagccctgccggcagccccacctccacagaggagggaaccagcaccgagcccagcgaaggcagcgccccaggcaccagcaccgagcctagtgagcaggagattaaacggatcaacaagatcagaagaagacttgtgaaagacagcaacaccaagaaggccggcaagacaggccccatgaaaaccctgctggttagagtgatgacacccgatctgagagagcggctggaaaacctgagaaagaagcctgaaaatatcccccagcccatcagcaatacatctagagccaacctgaataagctgctgaccgattacaccgaaatgaagaaggcgatcctgcatgtgtactgggaagagttccagaaggaccctgtgggcctgatgagccgggtggcccagcctgccagcaagaagatcgatcagaacaagctgaaacctgagatggacgagaagggcaacctgaccaccgccggctttgcctgctctcagtgtggccagcccctgttcgtgtacaagctggagcaggtgtctgagaagggcaaggcttacaccaactacttcggacggtgcaatgtggccgagcacgaaaagctgatcctgctggcccagctgaagcccgagaaggatagcgacgaagccgtgacatatagcctgggaaagtttgggcagagggccctggatttctacagcattcatgtgaccaaggagtccacccaccccgtgaagcccctggcccagatcgccggaaacagatacgcctccggacctgtgggaaaggccctgagcgacgcatgtatgggcacaatcgcctccttcctgtctaagtaccaggacatcatcatcgaacaccagaaggtggtgaagggcaaccagaagagactggagagcctgcgggagctggccggcaaggaaaacctggaataccctagcgtgaccctgccacctcagcctcacaccaaggagggcgttgatgcctacaacgaagtgatcgcccgggtgcgaatgtgggtgaacctgaacctgtggcagaagctgaagctaagcagagatgatgccaagcctctgctgagactgaagggattcccttcctttcctctggtcgagagacaggccaacgaagtggactggtgggacatggtgtgtaacgtgaagaagctgatcaacgagaaaaaggaggatggcaaggtgttttggcagaatctggctggctacaagagacaggaagccctgagaccatacctgagcagcgaggaagatcggaagaagggaaagaaattcgctcggtaccagctgggcgacctgctgctgcacctggaaaagaagcacggcgaggactggggaaaggtgtacgacgaggcctgggagcggattgacaagaaagtggaaggcctgagcaagcacatcaagctggaagaggaacggagaagcgaggacgcccagagcaaggccgccctgaccgactggctgcgggctaaggccagcttcgtgatcgagggcctgaaggaggccgacaaggacgagttctgcagatgcgagctgaagctgcagaagtggtacggggacctgcggggaaagcccttcgccatcgaagccgagaacagcatcctggacatcagcggcttcagcaagcagtacaactgtgccttcatctggcagaaggacggcgtgaagaagctgaacctgtacctgatcatcaactacttcaagggcggcaagctgcggttcaagaagatcaaacctgaagccttcgaagccaacagattctacaccgtgatcaacaaaaagagcggcgagatcgtgcccatggaggtgaacttcaacttcgacgaccccaacctgatcatcctgcctctggcctttggcaagagacagggcagagaattcatctggaacgacctgctgtccctggaaaccggcagcctgaagctggccaacggaagagtgatcgagaagacactgtacaacagaagaacccggcaggatgagcctgccctgttcgtggccctgaccttcgagcggcgggaggtcctggactcctccaatatcaaaccaatgaacctgatcggcgtggcaagaggcgaaaacatccccgccgtgatcgccctgaccgaccccgagggctgcccactgagccggtttaaggatagcctgggaaacccaacccacatcctgagaatcggcgagagctataaggagaagcagcggaccatccaggccaagaaggaggtggagcagcggagagccggcggctacagccggaagtacgccagcaaagccaagaatctggcagacgatatggtgagaaacaccgctagagatctgctgtactacgccgtgacccaggatgccatgctgatcttcgccaacctgagccggggcttcggccggcagggcaagcggaccttcatggccgagagacagtacacacggatggaggactggctgaccgccaagctggcctacgagggcctgagcaagacctacctgtccaagacactggcccagtacacctccaagacatgcagcaactgtgggtttaccatcaccagcgccgactacgacagggtgctggagaagctgaagaagacagcaacaggctggatgaccacaattaacggcaaggagctgaaggtggagggccagattacctactacaacagatacaagagacagaacgtagtcaaggacctgtccgtcgagctggatagactgagcgaagaatctgtgaacaacgacatctcctcctggacaaagggcagaagcggagaagctctgagcctcctgaagaaaagattctcccatagacccgtgcaggagaagttcgtgtgcctgaactgcggcttcgagacacacgcagccgagcaagccgccctgaacatcgccagatcctggctgttcctgcggagccaggagtacaagaaataccagacaaacaagacaaccggcaacaccgataagagagccttcgtcgagacctggcagtccttttaccggaagaagcttaaggaggtgtggaaacctgccgtgcggtctggcggatctggcggaggctccaccagccccaagaaaaagagaaaagtctaagctgccttctgcggggcttgccttctggccatgcccttcttctctcccttgcacctgtacctcttggtctttgaataaagcctgagtaggaaggctagcaaaaaaaaaaaaaaaaaaaaaaaaaaaaaaaaaaaaaaaaaaaaaaaaaaaaaaaaaaaaaaaaaaaaaaaaaaaaaaaa

SEQ ID NO: 9705 - RNA, 8787 nt, synthetic construct
  source 1..8787: mol_type = other RNA
aggaaataagagagaaaagaagagtaagaagaaatataagagccaccatggcccctaagaagaagcgtaaagtgagccggatgaaccacgaccaggagttcgacccccctaaggtgtaccctcccgtccccgccgagaagagaaagcccatccgggtcctgagcctgttcgatggcatcgccaccggtctgctggtgctgaaggacctgggcatccaggtggataggtacattgcctccgaggtgtgcgaggactccatcaccgtgggaatggtgcgtcatcagggcaagatcatgtacgtgggcgacgtgcggagcgtgacacagaagcatatccaggagtggggccctttcgacctggtgatcggcggcagcccttgcaatgacctgagcatcgtgaacccagcccggaagggcctgtacgagggaaccggcagactgttcttcgagttttacagactgctgcacgacgcccggcctaaggaaggcgacgaccggcccttcttttggctgttcgagaatgtggtggccatgggagtcagcgacaagcgggatattagccggttcctggagagcaaccccgtgatgatcgatgccaaggaagtgagcgccgcccaccgggccagatacttctggggcaatctgcctggcatgaacagacccctggccagcaccgtgaacgacaagctggagctgcaggagtgcctggagcacggccggatcgccaagttcagcaaggtgagaaccatcaccacccgaagcaacagcatcaaacaaggcaaggaccagcactttcctgtgttcatgaacgagaaggaggacatcctgtggtgtaccgagatggagagagtgttcgggttcccagtccactacacagatgtcagcaacatgtctagactggccagacagagactgctgggaagaagctggtccgtccctgtgatcagacacctgttcgcccctctgaaggagtacttcgcctgcgtgagcagcggcaacagcaacgccaacagccggggccccagcttctctagcggcctggtgccactgtccctgagagggagccacatgggccccatggagatctacaaaaccgtgagcgcctggaagcggcagcctgtgcgcgtgctgagcctgtttcggaatatcgataaagtcctgaaaagcctgggattcctggagagcggctctggctccggcggtggcaccctgaagtacgtggaggatgtgacaaacgtggtcagacgggatgtggagaagtggggccccttcgatctggtgtacggcagcacccaacccctgggcagctcttgtgaccggtgccctggctggtacatgtttcagttccaccggatcctgcagtacgccctgccgagacaggagtcccagcggccattcttttggattttcatggacaacttgctgctgaccgaggatgaccaggaaactaccactcggttcctgcagaccgaagccgtgaccctgcaggacgtgagaggccgggactaccagaacgccatgcgggtgtggtccaacatccctggactgaaaagcaagcacgcacctctgacccctaaagaagaggagtacctgcaggcccaggtgcggagcagaagcaagctggacgcccctaaggtggatctgctggtgaagaattgcctcctgcccctgagagagtacttcaagtatttcagccagaatagtctgcccctgggaggcagcggcggcggcagcgaggagagcgtgaccttcgaggacgtggccatctacttcagcgagaacgagtggaccggcctggcccccgcccagagggtgctgtacagggacgtgatgctggagaactacggcgccgtggccgccctggccgccttccccttccccaagcccgccctgatcagccagctggagaggggcgaggccccctggtgcaaggccccccagggcgccctggacggcgagggccccaggggcatcggcggcccaagcagcggcgcccctcctcccagcggcggcaggcggcccaagcagcggcgcccctcctcccagcggcggcagcccagccggctccccaacctctaccgaggagggcacctctgagtccgccacccccgagagcggccctggcacctccaccgagcccagcgagggcagcgcacccggcagccctgccggcagccccacctccacagaggagggaaccagcaccgagcccagcgaaggcagcgccccaggcaccagcaccgagcctagtgagcaggagattaaacggatcaacaagatcagaagaagacttgtgaaagacagcaacaccaagaaggccggcaagacaggccccatgaaaaccctgctggttagagtgatgacacccgatctgagagagcggctggaaaacctgagaaagaagcctgaaaatatcccccagcccatcagcaatacatctagagccaacctgaataagctgctgaccgattacaccgaaatgaagaaggcgatcctgcatgtgtactgggaagagttccagaaggaccctgtgggcctgatgagccgggtggcccagcctgccagcaagaagatcgatcagaacaagctgaaacctgagatggacgagaagggcaacctgaccaccgccggctttgcctgctctcagtgtggccagcccctgttcgtgtacaagctggagcaggtgtctgagaagggcaaggcttacaccaactacttcggacggtgcaatgtggccgagcacgaaaagctgatcctgctggcccagctgaagcccgagaaggatagcgacgaagccgtgacatatagcctgggaaagtttgggcagagggccctggatttctacagcattcatgtgaccaaggagtccacccaccccgtgaagcccctggcccagatcgccggaaacagatacgcctccggacctgtgggaaaggccctgagcgacgcatgtatgggcacaatcgcctccttcctgtctaagtaccaggacatcatcatcgaacaccagaaggtggtgaagggcaaccagaagagactggagagcctgcgggagctggccggcaaggaaaacctggaataccctagcgtgaccctgccacctcagcctcacaccaaggagggcgttgatgcctacaacgaagtgatcgcccgggtgcgaatgtgggtgaacctgaacctgtggcagaagctgaagctaagcagagatgatgccaagcctctgctgagactgaagggattcccttcctttcctctggtcgagagacaggccaacgaagtggactggtgggacatggtgtgtaacgtgaagaagctgatcaacgagaaaaaggaggatggcaaggtgttttggcagaatctggctggctacaagagacaggaagccctgagaccatacctgagcagcgaggaagatcggaagaagggaaagaaattcgctcggtaccagctgggcgacctgctgctgcacctggaaaagaagcacggcgaggactggggaaaggtgtacgacgaggcctgggagcggattgacaagaaagtggaaggcctgagcaagcacatcaagctggaagaggaacggagaagcgaggacgcccagagcaaggccgccctgaccgactggctgcgggctaaggccagcttcgtgatcgagggcctgaaggaggccgacaaggacgagttctgcagatgcgagctgaagctgcagaagtggtacggggacctgcggggaaagcccttcgccatcgaagccgagaacagcatcctggacatcagcggcttcagcaagcagtacaactgtgccttcatctggcagaaggacggcgtgaagaagctgaacctgtacctgatcatcaactacttcaagggcggcaagctgcggttcaagaagatcaaacctgaagccttcgaagccaacagattctacaccgtgatcaacaaaaagagcggcgagatcgtgcccatggaggtgaacttcaacttcgacgaccccaacctgatcatcctgcctctggcctttggcaagagacagggcagagaattcatctggaacgacctgctgtccctggaaaccggcagcctgaagctggccaacggaagagtgatcgagaagacactgtacaacagaagaacccggcaggatgagcctgccctgttcgtggccctgaccttcgagcggcgggaggtcctggactcctccaatatcaaaccaatgaacctgatcggcgtggcaagaggcgaaaacatccccgccgtgatcgccctgaccgaccccgagggctgcccactgagccggtttaaggatagcctgggaaacccaacccacatcctgagaatcggcgagagctataaggagaagcagcggaccatccaggccaagaaggaggtggagcagcggagagccggcggctacagccggaagtacgccagcaaagccaagaatctggcagacgatatggtgagaaacaccgctagagatctgctgtactacgccgtgacccaggatgccatgctgatcttcgccaacctgagccggggcttcggccggcagggcaagcggaccttcatggccgagagacagtacacacggatggaggactggctgaccgccaagctggcctacgagggcctgagcaagacctacctgtccaagacactggcccagtacacctccaagacatgcagcaactgtgggtttaccatcaccagcgccgactacgacagggtgctggagaagctgaagaagacagcaacaggctggatgaccacaattaacggcaaggagctgaaggtggagggccagattacctactacaacagatacaagagacagaacgtagtcaaggacctgtccgtcgagctggatagactgagcgaagaatctgtgaacaacgacatctcctcctggacaaagggcagaagcggagaagctctgagcctcctgaagaaaagattctcccatagacccgtgcaggagaagttcgtgtgcctgaactgcggcttcgagacacacgcagccgagcaagccgccctgaacatcgccagatcctggctgttcctgcggagccaggagtacaagaaataccagacaaacaagacaaccggcaacaccgataagagagccttcgtcgagacctggcagtccttttaccggaagaagcttaaggaggtgtggaaacctgccgtgcggtctggcggatctggcggaggctccaccagccccaagaaaaagagaaaagtctaagctgccttctgcggggcttgccttctggccatgcccttcttctctcccttgcacctgtacctcttggtctttgaataaagcctgagtaggaaggctagcaaaaaaaaaaaaaaaaaaaaaaaaaaaaaaaaaaaaaaaaaaaaaaaaaaaaaaaaaaaaaaaaaaaaaaaaaaaaaaaagcccagccggctccccaacctctaccgaggagggcacctctgagtccgccacccccgagagcggccctggcacctccaccgagcccagcgagggcagcgcacccggcagccctgccggcagccccacctccacagaggagggaaccagcaccgagcccagcgaaggcagcgccccaggcaccagcaccgagcctagtgagcaggagattaaacggatcaacaagatcagaagaagacttgtgaaagacagcaacaccaagaaggccggcaagacaggccccatgaaaaccctgctggttagagtgatgacacccgatctgagagagcggctggaaaacctgagaaagaagcctgaaaatatcccccagcccatcagcaatacatctagagccaacctgaataagctgctgaccgattacaccgaaatgaagaaggcgatcctgcatgtgtactgggaagagttccagaaggaccctgtgggcctgatgagccgggtggcccagcctgccagcaagaagatcgatcagaacaagctgaaacctgagatggacgagaagggcaacctgaccaccgccggctttgcctgctctcagtgtggccagcccctgttcgtgtacaagctggagcaggtgtctgagaagggcaaggcttacaccaactacttcggacggtgcaatgtggccgagcacgaaaagctgatcctgctggcccagctgaagcccgagaaggatagcgacgaagccgtgacatatagcctgggaaagtttgggcagagggccctggatttctacagcattcatgtgaccaaggagtccacccaccccgtgaagcccctggcccagatcgccggaaacagatacgcctccggacctgtgggaaaggccctgagcgacgcatgtatgggcacaatcgcctccttcctgtctaagtaccaggacatcatcatcgaacaccagaaggtggtgaagggcaaccagaagagactggagagcctgcgggagctggccggcaaggaaaacctggaataccctagcgtgaccctgccacctcagcctcacaccaaggagggcgttgatgcctacaacgaagtgatcgcccgggtgcgaatgtgggtgaacctgaacctgtggcagaagctgaagctaagcagagatgatgccaagcctctgctgagactgaagggattcccttcctttcctctggtcgagagacaggccaacgaagtggactggtgggacatggtgtgtaacgtgaagaagctgatcaacgagaaaaaggaggatggcaaggtgttttggcagaatctggctggctacaagagacaggaagccctgagaccatacctgagcagcgaggaagatcggaagaagggaaagaaattcgctcggtaccagctgggcgacctgctgctgcacctggaaaagaagcacggcgaggactggggaaaggtgtacgacgaggcctgggagcggattgacaagaaagtggaaggcctgagcaagcacatcaagctggaagaggaacggagaagcgaggacgcccagagcaaggccgccctgaccgactggctgcgggctaaggccagcttcgtgatcgagggcctgaaggaggccgacaaggacgagttctgcagatgcgagctgaagctgcagaagtggtacggggacctgcggggaaagcccttcgccatcgaagccgagaacagcatcctggacatcagcggcttcagcaagcagtacaactgtgccttcatctggcagaaggacggcgtgaagaagctgaacctgtacctgatcatcaactacttcaagggcggcaagctgcggttcaagaagatcaaacctgaagccttcgaagccaacagattctacaccgtgatcaacaaaaagagcggcgagatcgtgcccatggaggtgaacttcaacttcgacgaccccaacctgatcatcctgcctctggcctttggcaagagacagggcagagaattcatctggaacgacctgctgtccctggaaaccggcagcctgaagctggccaacggaagagtgatcgagaagacactgtacaacagaagaacccggcaggatgagcctgccctgttcgtggccctgaccttcgagcggcgggaggtcctggactcctccaatatcaaaccaatgaacctgatcggcgtggcaagaggcgaaaacatccccgccgtgatcgccctgaccgaccccgagggctgcccactgagccggtttaaggatagcctgggaaacccaacccacatcctgagaatcggcgagagctataaggagaagcagcggaccatccaggccaagaaggaggtggagcagcggagagccggcggctacagccggaagtacgccagcaaagccaagaatctggcagacgatatggtgagaaacaccgctagagatctgctgtactacgccgtgacccaggatgccatgctgatcttcgccaacctgagccggggcttcggccggcagggcaagcggaccttcatggccgagagacagtacacacggatggaggactggctgaccgccaagctggcctacgagggcctgagcaagacctacctgtccaagacactggcccagtacacctccaagacatgcagcaactgtgggtttaccatcaccagcgccgactacgacagggtgctggagaagctgaagaagacagcaacaggctggatgaccacaattaacggcaaggagctgaaggtggagggccagattacctactacaacagatacaagagacagaacgtagtcaaggacctgtccgtcgagctggatagactgagcgaagaatctgtgaacaacgacatctcctcctggacaaagggcagaagcggagaagctctgagcctcctgaagaaaagattctcccatagacccgtgcaggagaagttcgtgtgcctgaactgcggcttcgagacacacgcagccgagcaagccgccctgaacatcgccagatcctggctgttcctgcggagccaggagtacaagaaataccagacaaacaagacaaccggcaacaccgataagagagccttcgtcgagacctggcagtccttttaccggaagaagcttaaggaggtgtggaaacctgccgtgcggtctggcggatctggcggaggctccaccagccccaagaaaaagagaaaagtctaagctgccttctgcggggcttgccttctggccatgcccttcttctctcccttgcacctgtacctcttggtctttgaataaagcctgagtaggaaggctagcaaaaaaaaaaaaaaaaaaaaaaaaaaaaaaaaaaaaaaaaaaaaaaaaaaaaaaaaaaaaaaaaaaaaaaaaaaaaaaaa

SEQ ID NO: 9706 - RNA, 8784 nt, synthetic construct
  source 1..8784: mol_type = other RNA
aggaaataagagagaaaagaagagtaagaagaaatataagagccaccatggcccctaagaagaagcgtaaagtgagccggatgaaccacgaccaggagttcgacccccctaaggtgtaccctcccgtccccgccgagaagagaaagcccatccgggtcctgagcctgttcgatggcatcgccaccggtctgctggtgctgaaggacctgggcatccaggtggataggtacattgcctccgaggtgtgcgaggactccatcaccgtgggaatggtgcgtcatcagggcaagatcatgtacgtgggcgacgtgcggagcgtgacacagaagcatatccaggagtggggccctttcgacctggtgatcggcggcagcccttgcaatgacctgagcatcgtgaacccagcccggaagggcctgtacgagggaaccggcagactgttcttcgagttttacagactgctgcacgacgcccggcctaaggaaggcgacgaccggcccttcttttggctgttcgagaatgtggtggccatgggagtcagcgacaagcgggatattagccggttcctggagagcaaccccgtgatgatcgatgccaaggaagtgagcgccgcccaccgggccagatacttctggggcaatctgcctggcatgaacagacccctggccagcaccgtgaacgacaagctggagctgcaggagtgcctggagcacggccggatcgccaagttcagcaaggtgagaaccatcaccacccgaagcaacagcatcaaacaaggcaaggaccagcactttcctgtgttcatgaacgagaaggaggacatcctgtggtgtaccgagatggagagagtgttcgggttcccagtccactacacagatgtcagcaacatgtctagactggccagacagagactgctgggaagaagctggtccgtccctgtgatcagacacctgttcgcccctctgaaggagtacttcgcctgcgtgagcagcggcaacagcaacgccaacagccggggccccagcttctctagcggcctggtgccactgtccctgagagggagccacatgggccccatggagatctacaaaaccgtgagcgcctggaagcggcagcctgtgcgcgtgctgagcctgtttcggaatatcgataaagtcctgaaaagcctgggattcctggagagcggctctggctccggcggtggcaccctgaagtacgtggaggatgtgacaaacgtggtcagacgggatgtggagaagtggggccccttcgatctggtgtacggcagcacccaacccctgggcagctcttgtgaccggtgccctggctggtacatgtttcagttccaccggatcctgcagtacgccctgccgagacaggagtcccagcggccattcttttggattttcatggacaacttgctgctgaccgaggatgaccaggaaactaccactcggttcctgcagaccgaagccgtgaccctgcaggacgtgagaggccgggactaccagaacgccatgcgggtgtggtccaacatccctggactgaaaagcaagcacgcacctctgacccctaaagaagaggagtacctgcaggcccaggtgcggagcagaagcaagctggacgcccctaaggtggatctgctggtgaagaattgcctcctgcccctgagagagtacttcaagtatttcagccagaatagtctgcccctgggaggcagcggcggcggcgagcccctgaagttcagagacgtggccatcgagttcagcctggaggagtggcagtgcctggacaccatccagcagaacctgtacagaaacgtgatgctggagaactacagaaacctggtgttcctgggcatcgtggtgagcaagcccgacctgatcacctgcctggagcaggagaaggagccctggaccagaaagagacacagaatggtggccgagccccccgtgatctgcagccacttcggcggcccaagcagcggcgcccctcctcccagcggcggcaggcggcccaagcagcggcgcccctcctcccagcggcggcagcccagccggctccccaacctctaccgaggagggcacctctgagtccgccacccccgagagcggccctggcacctccaccgagcccagcgagggcagcgcacccggcagccctgccggcagccccacctccacagaggagggaaccagcaccgagcccagcgaaggcagcgccccaggcaccagcaccgagcctagtgagcaggagattaaacggatcaacaagatcagaagaagacttgtgaaagacagcaacaccaagaaggccggcaagacaggccccatgaaaaccctgctggttagagtgatgacacccgatctgagagagcggctggaaaacctgagaaagaagcctgaaaatatcccccagcccatcagcaatacatctagagccaacctgaataagctgctgaccgattacaccgaaatgaagaaggcgatcctgcatgtgtactgggaagagttccagaaggaccctgtgggcctgatgagccgggtggcccagcctgccagcaagaagatcgatcagaacaagctgaaacctgagatggacgagaagggcaacctgaccaccgccggctttgcctgctctcagtgtggccagcccctgttcgtgtacaagctggagcaggtgtctgagaagggcaaggcttacaccaactacttcggacggtgcaatgtggccgagcacgaaaagctgatcctgctggcccagctgaagcccgagaaggatagcgacgaagccgtgacatatagcctgggaaagtttgggcagagggccctggatttctacagcattcatgtgaccaaggagtccacccaccccgtgaagcccctggcccagatcgccggaaacagatacgcctccggacctgtgggaaaggccctgagcgacgcatgtatgggcacaatcgcctccttcctgtctaagtaccaggacatcatcatcgaacaccagaaggtggtgaagggcaaccagaagagactggagagcctgcgggagctggccggcaaggaaaacctggaataccctagcgtgaccctgccacctcagcctcacaccaaggagggcgttgatgcctacaacgaagtgatcgcccgggtgcgaatgtgggtgaacctgaacctgtggcagaagctgaagctaagcagagatgatgccaagcctctgctgagactgaagggattcccttcctttcctctggtcgagagacaggccaacgaagtggactggtgggacatggtgtgtaacgtgaagaagctgatcaacgagaaaaaggaggatggcaaggtgttttggcagaatctggctggctacaagagacaggaagccctgagaccatacctgagcagcgaggaagatcggaagaagggaaagaaattcgctcggtaccagctgggcgacctgctgctgcacctggaaaagaagcacggcgaggactggggaaaggtgtacgacgaggcctgggagcggattgacaagaaagtggaaggcctgagcaagcacatcaagctggaagaggaacggagaagcgaggacgcccagagcaaggccgccctgaccgactggctgcgggctaaggccagcttcgtgatcgagggcctgaaggaggccgacaaggacgagttctgcagatgcgagctgaagctgcagaagtggtacggggacctgcggggaaagcccttcgccatcgaagccgagaacagcatcctggacatcagcggcttcagcaagcagtacaactgtgccttcatctggcagaaggacggcgtgaagaagctgaacctgtacctgatcatcaactacttcaagggcggcaagctgcggttcaagaagatcaaacctgaagccttcgaagccaacagattctacaccgtgatcaacaaaaagagcggcgagatcgtgcccatggaggtgaacttcaacttcgacgaccccaacctgatcatcctgcctctggcctttggcaagagacagggcagagaattcatctggaacgacctgctgtccctggaaaccggcagcctgaagctggccaacggaagagtgatcgagaagacactgtacaacagaagaacccggcaggatgagcctgccctgttcgtggccctgaccttcgagcggcgggaggtcctggactcctccaatatcaaaccaatgaacctgatcggcgtggcaagaggcgaaaacatccccgccgtgatcgccctgaccgaccccgagggctgcccactgagccggtttaaggatagcctgggaaacccaacccacatcctgagaatcggcgagagctataaggagaagcagcggaccatccaggccaagaaggaggtggagcagcggagagccggcggctacagccggaagtacgccagcaaagccaagaatctggcagacgatatggtgagaaacaccgctagagatctgctgtactacgccgtgacccaggatgccatgctgatcttcgccaacctgagccggggcttcggccggcagggcaagcggaccttcatggccgagagacagtacacacggatggaggactggctgaccgccaagctggcctacgagggcctgagcaagacctacctgtccaagacactggcccagtacacctccaagacatgcagcaactgtgggtttaccatcaccagcgccgactacgacagggtgctggagaagctgaagaagacagcaacaggctggatgaccacaattaacggcaaggagctgaaggtggagggccagattacctactacaacagatacaagagacagaacgtagtcaaggacctgtccgtcgagctggatagactgagcgaagaatctgtgaacaacgacatctcctcctggacaaagggcagaagcggagaagctctgagcctcctgaagaaaagattctcccatagacccgtgcaggagaagttcgtgtgcctgaactgcggcttcgagacacacgcagccgagcaagccgccctgaacatcgccagatcctggctgttcctgcggagccaggagtacaagaaataccagacaaacaagacaaccggcaacaccgataagagagccttcgtcgagacctggcagtccttttaccggaagaagcttaaggaggtgtggaaacctgccgtgcggtctggcggatctggcggaggctccaccagccccaagaaaaagagaaaagtctaagctgccttctgcggggcttgccttctggccatgcccttcttctctcccttgcacctgtacctcttggtctttgaataaagcctgagtaggaaggctagcaaaaaaaaaaaaaaaaaaaaaaaaaaaaaaaaaaaaaaaaaaaaaaaaaaaaaaaaaaaaaaaaaaaaaaaaaaaaaaaagcccagccggctccccaacctctaccgaggagggcacctctgagtccgccacccccgagagcggccctggcacctccaccgagcccagcgagggcagcgcacccggcagccctgccggcagccccacctccacagaggagggaaccagcaccgagcccagcgaaggcagcgccccaggcaccagcaccgagcctagtgagcaggagattaaacggatcaacaagatcagaagaagacttgtgaaagacagcaacaccaagaaggccggcaagacaggccccatgaaaaccctgctggttagagtgatgacacccgatctgagagagcggctggaaaacctgagaaagaagcctgaaaatatcccccagcccatcagcaatacatctagagccaacctgaataagctgctgaccgattacaccgaaatgaagaaggcgatcctgcatgtgtactgggaagagttccagaaggaccctgtgggcctgatgagccgggtggcccagcctgccagcaagaagatcgatcagaacaagctgaaacctgagatggacgagaagggcaacctgaccaccgccggctttgcctgctctcagtgtggccagcccctgttcgtgtacaagctggagcaggtgtctgagaagggcaaggcttacaccaactacttcggacggtgcaatgtggccgagcacgaaaagctgatcctgctggcccagctgaagcccgagaaggatagcgacgaagccgtgacatatagcctgggaaagtttgggcagagggccctggatttctacagcattcatgtgaccaaggagtccacccaccccgtgaagcccctggcccagatcgccggaaacagatacgcctccggacctgtgggaaaggccctgagcgacgcatgtatgggcacaatcgcctccttcctgtctaagtaccaggacatcatcatcgaacaccagaaggtggtgaagggcaaccagaagagactggagagcctgcgggagctggccggcaaggaaaacctggaataccctagcgtgaccctgccacctcagcctcacaccaaggagggcgttgatgcctacaacgaagtgatcgcccgggtgcgaatgtgggtgaacctgaacctgtggcagaagctgaagctaagcagagatgatgccaagcctctgctgagactgaagggattcccttcctttcctctggtcgagagacaggccaacgaagtggactggtgggacatggtgtgtaacgtgaagaagctgatcaacgagaaaaaggaggatggcaaggtgttttggcagaatctggctggctacaagagacaggaagccctgagaccatacctgagcagcgaggaagatcggaagaagggaaagaaattcgctcggtaccagctgggcgacctgctgctgcacctggaaaagaagcacggcgaggactggggaaaggtgtacgacgaggcctgggagcggattgacaagaaagtggaaggcctgagcaagcacatcaagctggaagaggaacggagaagcgaggacgcccagagcaaggccgccctgaccgactggctgcgggctaaggccagcttcgtgatcgagggcctgaaggaggccgacaaggacgagttctgcagatgcgagctgaagctgcagaagtggtacggggacctgcggggaaagcccttcgccatcgaagccgagaacagcatcctggacatcagcggcttcagcaagcagtacaactgtgccttcatctggcagaaggacggcgtgaagaagctgaacctgtacctgatcatcaactacttcaagggcggcaagctgcggttcaagaagatcaaacctgaagccttcgaagccaacagattctacaccgtgatcaacaaaaagagcggcgagatcgtgcccatggaggtgaacttcaacttcgacgaccccaacctgatcatcctgcctctggcctttggcaagagacagggcagagaattcatctggaacgacctgctgtccctggaaaccggcagcctgaagctggccaacggaagagtgatcgagaagacactgtacaacagaagaacccggcaggatgagcctgccctgttcgtggccctgaccttcgagcggcgggaggtcctggactcctccaatatcaaaccaatgaacctgatcggcgtggcaagaggcgaaaacatccccgccgtgatcgccctgaccgaccccgagggctgcccactgagccggtttaaggatagcctgggaaacccaacccacatcctgagaatcggcgagagctataaggagaagcagcggaccatccaggccaagaaggaggtggagcagcggagagccggcggctacagccggaagtacgccagcaaagccaagaatctggcagacgatatggtgagaaacaccgctagagatctgctgtactacgccgtgacccaggatgccatgctgatcttcgccaacctgagccggggcttcggccggcagggcaagcggaccttcatggccgagagacagtacacacggatggaggactggctgaccgccaagctggcctacgagggcctgagcaagacctacctgtccaagacactggcccagtacacctccaagacatgcagcaactgtgggtttaccatcaccagcgccgactacgacagggtgctggagaagctgaagaagacagcaacaggctggatgaccacaattaacggcaaggagctgaaggtggagggccagattacctactacaacagatacaagagacagaacgtagtcaaggacctgtccgtcgagctggatagactgagcgaagaatctgtgaacaacgacatctcctcctggacaaagggcagaagcggagaagctctgagcctcctgaagaaaagattctcccatagacccgtgcaggagaagttcgtgtgcctgaactgcggcttcgagacacacgcagccgagcaagccgccctgaacatcgccagatcctggctgttcctgcggagccaggagtacaagaaataccagacaaacaagacaaccggcaacaccgataagagagccttcgtcgagacctggcagtccttttaccggaagaagcttaaggaggtgtggaaacctgccgtgcggtctggcggatctggcggaggctccaccagccccaagaaaaagagaaaagtctaagctgccttctgcggggcttgccttctggccatgcccttcttctctcccttgcacctgtacctcttggtctttgaataaagcctgagtaggaaggctagcaaaaaaaaaaaaaaaaaaaaaaaaaaaaaaaaaaaaaaaaaaaaaaaaaaaaaaaaaaaaaaaaaaaaaaaaaaaaaaaa

SEQ ID NO: 9707 - RNA, 8787 nt, synthetic construct
  source 1..8787: mol_type = other RNA
aggaaataagagagaaaagaagagtaagaagaaatataagagccaccatggcccctaagaagaagcgtaaagtgagccggatgaaccacgaccaggagttcgacccccctaaggtgtaccctcccgtccccgccgagaagagaaagcccatccgggtcctgagcctgttcgatggcatcgccaccggtctgctggtgctgaaggacctgggcatccaggtggataggtacattgcctccgaggtgtgcgaggactccatcaccgtgggaatggtgcgtcatcagggcaagatcatgtacgtgggcgacgtgcggagcgtgacacagaagcatatccaggagtggggccctttcgacctggtgatcggcggcagcccttgcaatgacctgagcatcgtgaacccagcccggaagggcctgtacgagggaaccggcagactgttcttcgagttttacagactgctgcacgacgcccggcctaaggaaggcgacgaccggcccttcttttggctgttcgagaatgtggtggccatgggagtcagcgacaagcgggatattagccggttcctggagagcaaccccgtgatgatcgatgccaaggaagtgagcgccgcccaccgggccagatacttctggggcaatctgcctggcatgaacagacccctggccagcaccgtgaacgacaagctggagctgcaggagtgcctggagcacggccggatcgccaagttcagcaaggtgagaaccatcaccacccgaagcaacagcatcaaacaaggcaaggaccagcactttcctgtgttcatgaacgagaaggaggacatcctgtggtgtaccgagatggagagagtgttcgggttcccagtccactacacagatgtcagcaacatgtctagactggccagacagagactgctgggaagaagctggtccgtccctgtgatcagacacctgttcgcccctctgaaggagtacttcgcctgcgtgagcagcggcaacagcaacgccaacagccggggccccagcttctctagcggcctggtgccactgtccctgagagggagccacatgggccccatggagatctacaaaaccgtgagcgcctggaagcggcagcctgtgcgcgtgctgagcctgtttcggaatatcgataaagtcctgaaaagcctgggattcctggagagcggctctggctccggcggtggcaccctgaagtacgtggaggatgtgacaaacgtggtcagacgggatgtggagaagtggggccccttcgatctggtgtacggcagcacccaacccctgggcagctcttgtgaccggtgccctggctggtacatgtttcagttccaccggatcctgcagtacgccctgccgagacaggagtcccagcggccattcttttggattttcatggacaacttgctgctgaccgaggatgaccaggaaactaccactcggttcctgcagaccgaagccgtgaccctgcaggacgtgagaggccgggactaccagaacgccatgcgggtgtggtccaacatccctggactgaaaagcaagcacgcacctctgacccctaaagaagaggagtacctgcaggcccaggtgcggagcagaagcaagctggacgcccctaaggtggatctgctggtgaagaattgcctcctgcccctgagagagtacttcaagtatttcagccagaatagtctgcccctgggaggcagcggcggcggcctgctgaccttcgaggacgtggccgtgagcttcagcgaggaggagtggaagctgctggaccccgcccagaagatcctgtacaacgacgtgatgcaggagaactacgagaccgtgatcagcctgggcctgaagctgaagaacgacaccggcaacgaccagcccatcagcgtgagcgccctggagatccaggccagcggcaggaaggtgctgaggaaggccaggatgaaggtggcccagaagaccggcggcccaagcagcggcgcccctcctcccagcggcggcaggcggcccaagcagcggcgcccctcctcccagcggcggcagcccagccggctccccaacctctaccgaggagggcacctctgagtccgccacccccgagagcggccctggcacctccaccgagcccagcgagggcagcgcacccggcagccctgccggcagccccacctccacagaggagggaaccagcaccgagcccagcgaaggcagcgccccaggcaccagcaccgagcctagtgagcaggagattaaacggatcaacaagatcagaagaagacttgtgaaagacagcaacaccaagaaggccggcaagacaggccccatgaaaaccctgctggttagagtgatgacacccgatctgagagagcggctggaaaacctgagaaagaagcctgaaaatatcccccagcccatcagcaatacatctagagccaacctgaataagctgctgaccgattacaccgaaatgaagaaggcgatcctgcatgtgtactgggaagagttccagaaggaccctgtgggcctgatgagccgggtggcccagcctgccagcaagaagatcgatcagaacaagctgaaacctgagatggacgagaagggcaacctgaccaccgccggctttgcctgctctcagtgtggccagcccctgttcgtgtacaagctggagcaggtgtctgagaagggcaaggcttacaccaactacttcggacggtgcaatgtggccgagcacgaaaagctgatcctgctggcccagctgaagcccgagaaggatagcgacgaagccgtgacatatagcctgggaaagtttgggcagagggccctggatttctacagcattcatgtgaccaaggagtccacccaccccgtgaagcccctggcccagatcgccggaaacagatacgcctccggacctgtgggaaaggccctgagcgacgcatgtatgggcacaatcgcctccttcctgtctaagtaccaggacatcatcatcgaacaccagaaggtggtgaagggcaaccagaagagactggagagcctgcgggagctggccggcaaggaaaacctggaataccctagcgtgaccctgccacctcagcctcacaccaaggagggcgttgatgcctacaacgaagtgatcgcccgggtgcgaatgtgggtgaacctgaacctgtggcagaagctgaagctaagcagagatgatgccaagcctctgctgagactgaagggattcccttcctttcctctggtcgagagacaggccaacgaagtggactggtgggacatggtgtgtaacgtgaagaagctgatcaacgagaaaaaggaggatggcaaggtgttttggcagaatctggctggctacaagagacaggaagccctgagaccatacctgagcagcgaggaagatcggaagaagggaaagaaattcgctcggtaccagctgggcgacctgctgctgcacctggaaaagaagcacggcgaggactggggaaaggtgtacgacgaggcctgggagcggattgacaagaaagtggaaggcctgagcaagcacatcaagctggaagaggaacggagaagcgaggacgcccagagcaaggccgccctgaccgactggctgcgggctaaggccagcttcgtgatcgagggcctgaaggaggccgacaaggacgagttctgcagatgcgagctgaagctgcagaagtggtacggggacctgcggggaaagcccttcgccatcgaagccgagaacagcatcctggacatcagcggcttcagcaagcagtacaactgtgccttcatctggcagaaggacggcgtgaagaagctgaacctgtacctgatcatcaactacttcaagggcggcaagctgcggttcaagaagatcaaacctgaagccttcgaagccaacagattctacaccgtgatcaacaaaaagagcggcgagatcgtgcccatggaggtgaacttcaacttcgacgaccccaacctgatcatcctgcctctggcctttggcaagagacagggcagagaattcatctggaacgacctgctgtccctggaaaccggcagcctgaagctggccaacggaagagtgatcgagaagacactgtacaacagaagaacccggcaggatgagcctgccctgttcgtggccctgaccttcgagcggcgggaggtcctggactcctccaatatcaaaccaatgaacctgatcggcgtggcaagaggcgaaaacatccccgccgtgatcgccctgaccgaccccgagggctgcccactgagccggtttaaggatagcctgggaaacccaacccacatcctgagaatcggcgagagctataaggagaagcagcggaccatccaggccaagaaggaggtggagcagcggagagccggcggctacagccggaagtacgccagcaaagccaagaatctggcagacgatatggtgagaaacaccgctagagatctgctgtactacgccgtgacccaggatgccatgctgatcttcgccaacctgagccggggcttcggccggcagggcaagcggaccttcatggccgagagacagtacacacggatggaggactggctgaccgccaagctggcctacgagggcctgagcaagacctacctgtccaagacactggcccagtacacctccaagacatgcagcaactgtgggtttaccatcaccagcgccgactacgacagggtgctggagaagctgaagaagacagcaacaggctggatgaccacaattaacggcaaggagctgaaggtggagggccagattacctactacaacagatacaagagacagaacgtagtcaaggacctgtccgtcgagctggatagactgagcgaagaatctgtgaacaacgacatctcctcctggacaaagggcagaagcggagaagctctgagcctcctgaagaaaagattctcccatagacccgtgcaggagaagttcgtgtgcctgaactgcggcttcgagacacacgcagccgagcaagccgccctgaacatcgccagatcctggctgttcctgcggagccaggagtacaagaaataccagacaaacaagacaaccggcaacaccgataagagagccttcgtcgagacctggcagtccttttaccggaagaagcttaaggaggtgtggaaacctgccgtgcggtctggcggatctggcggaggctccaccagccccaagaaaaagagaaaagtctaagctgccttctgcggggcttgccttctggccatgcccttcttctctcccttgcacctgtacctcttggtctttgaataaagcctgagtaggaaggctagcaaaaaaaaaaaaaaaaaaaaaaaaaaaaaaaaaaaaaaaaaaaaaaaaaaaaaaaaaaaaaaaaaaaaaaaaaaaaaaaagcccagccggctccccaacctctaccgaggagggcacctctgagtccgccacccccgagagcggccctggcacctccaccgagcccagcgagggcagcgcacccggcagccctgccggcagccccacctccacagaggagggaaccagcaccgagcccagcgaaggcagcgccccaggcaccagcaccgagcctagtgagcaggagattaaacggatcaacaagatcagaagaagacttgtgaaagacagcaacaccaagaaggccggcaagacaggccccatgaaaaccctgctggttagagtgatgacacccgatctgagagagcggctggaaaacctgagaaagaagcctgaaaatatcccccagcccatcagcaatacatctagagccaacctgaataagctgctgaccgattacaccgaaatgaagaaggcgatcctgcatgtgtactgggaagagttccagaaggaccctgtgggcctgatgagccgggtggcccagcctgccagcaagaagatcgatcagaacaagctgaaacctgagatggacgagaagggcaacctgaccaccgccggctttgcctgctctcagtgtggccagcccctgttcgtgtacaagctggagcaggtgtctgagaagggcaaggcttacaccaactacttcggacggtgcaatgtggccgagcacgaaaagctgatcctgctggcccagctgaagcccgagaaggatagcgacgaagccgtgacatatagcctgggaaagtttgggcagagggccctggatttctacagcattcatgtgaccaaggagtccacccaccccgtgaagcccctggcccagatcgccggaaacagatacgcctccggacctgtgggaaaggccctgagcgacgcatgtatgggcacaatcgcctccttcctgtctaagtaccaggacatcatcatcgaacaccagaaggtggtgaagggcaaccagaagagactggagagcctgcgggagctggccggcaaggaaaacctggaataccctagcgtgaccctgccacctcagcctcacaccaaggagggcgttgatgcctacaacgaagtgatcgcccgggtgcgaatgtgggtgaacctgaacctgtggcagaagctgaagctaagcagagatgatgccaagcctctgctgagactgaagggattcccttcctttcctctggtcgagagacaggccaacgaagtggactggtgggacatggtgtgtaacgtgaagaagctgatcaacgagaaaaaggaggatggcaaggtgttttggcagaatctggctggctacaagagacaggaagccctgagaccatacctgagcagcgaggaagatcggaagaagggaaagaaattcgctcggtaccagctgggcgacctgctgctgcacctggaaaagaagcacggcgaggactggggaaaggtgtacgacgaggcctgggagcggattgacaagaaagtggaaggcctgagcaagcacatcaagctggaagaggaacggagaagcgaggacgcccagagcaaggccgccctgaccgactggctgcgggctaaggccagcttcgtgatcgagggcctgaaggaggccgacaaggacgagttctgcagatgcgagctgaagctgcagaagtggtacggggacctgcggggaaagcccttcgccatcgaagccgagaacagcatcctggacatcagcggcttcagcaagcagtacaactgtgccttcatctggcagaaggacggcgtgaagaagctgaacctgtacctgatcatcaactacttcaagggcggcaagctgcggttcaagaagatcaaacctgaagccttcgaagccaacagattctacaccgtgatcaacaaaaagagcggcgagatcgtgcccatggaggtgaacttcaacttcgacgaccccaacctgatcatcctgcctctggcctttggcaagagacagggcagagaattcatctggaacgacctgctgtccctggaaaccggcagcctgaagctggccaacggaagagtgatcgagaagacactgtacaacagaagaacccggcaggatgagcctgccctgttcgtggccctgaccttcgagcggcgggaggtcctggactcctccaatatcaaaccaatgaacctgatcggcgtggcaagaggcgaaaacatccccgccgtgatcgccctgaccgaccccgagggctgcccactgagccggtttaaggatagcctgggaaacccaacccacatcctgagaatcggcgagagctataaggagaagcagcggaccatccaggccaagaaggaggtggagcagcggagagccggcggctacagccggaagtacgccagcaaagccaagaatctggcagacgatatggtgagaaacaccgctagagatctgctgtactacgccgtgacccaggatgccatgctgatcttcgccaacctgagccggggcttcggccggcagggcaagcggaccttcatggccgagagacagtacacacggatggaggactggctgaccgccaagctggcctacgagggcctgagcaagacctacctgtccaagacactggcccagtacacctccaagacatgcagcaactgtgggtttaccatcaccagcgccgactacgacagggtgctggagaagctgaagaagacagcaacaggctggatgaccacaattaacggcaaggagctgaaggtggagggccagattacctactacaacagatacaagagacagaacgtagtcaaggacctgtccgtcgagctggatagactgagcgaagaatctgtgaacaacgacatctcctcctggacaaagggcagaagcggagaagctctgagcctcctgaagaaaagattctcccatagacccgtgcaggagaagttcgtgtgcctgaactgcggcttcgagacacacgcagccgagcaagccgccctgaacatcgccagatcctggctgttcctgcggagccaggagtacaagaaataccagacaaacaagacaaccggcaacaccgataagagagccttcgtcgagacctggcagtccttttaccggaagaagcttaaggaggtgtggaaacctgccgtgcggtctggcggatctggcggaggctccaccagccccaagaaaaagagaaaagtctaagctgccttctgcggggcttgccttctggccatgcccttcttctctcccttgcacctgtacctcttggtctttgaataaagcctgagtaggaaggctagcaaaaaaaaaaaaaaaaaaaaaaaaaaaaaaaaaaaaaaaaaaaaaaaaaaaaaaaaaaaaaaaaaaaaaaaaaaaaaaaa

SEQ ID NO: 9708 - RNA, 8787 nt, synthetic construct
  source 1..8787: mol_type = other RNA
aggaaataagagagaaaagaagagtaagaagaaatataagagccaccatggcccctaagaagaagcgtaaagtgagccggatgaaccacgaccaggagttcgacccccctaaggtgtaccctcccgtccccgccgagaagagaaagcccatccgggtcctgagcctgttcgatggcatcgccaccggtctgctggtgctgaaggacctgggcatccaggtggataggtacattgcctccgaggtgtgcgaggactccatcaccgtgggaatggtgcgtcatcagggcaagatcatgtacgtgggcgacgtgcggagcgtgacacagaagcatatccaggagtggggccctttcgacctggtgatcggcggcagcccttgcaatgacctgagcatcgtgaacccagcccggaagggcctgtacgagggaaccggcagactgttcttcgagttttacagactgctgcacgacgcccggcctaaggaaggcgacgaccggcccttcttttggctgttcgagaatgtggtggccatgggagtcagcgacaagcgggatattagccggttcctggagagcaaccccgtgatgatcgatgccaaggaagtgagcgccgcccaccgggccagatacttctggggcaatctgcctggcatgaacagacccctggccagcaccgtgaacgacaagctggagctgcaggagtgcctggagcacggccggatcgccaagttcagcaaggtgagaaccatcaccacccgaagcaacagcatcaaacaaggcaaggaccagcactttcctgtgttcatgaacgagaaggaggacatcctgtggtgtaccgagatggagagagtgttcgggttcccagtccactacacagatgtcagcaacatgtctagactggccagacagagactgctgggaagaagctggtccgtccctgtgatcagacacctgttcgcccctctgaaggagtacttcgcctgcgtgagcagcggcaacagcaacgccaacagccggggccccagcttctctagcggcctggtgccactgtccctgagagggagccacatgggccccatggagatctacaaaaccgtgagcgcctggaagcggcagcctgtgcgcgtgctgagcctgtttcggaatatcgataaagtcctgaaaagcctgggattcctggagagcggctctggctccggcggtggcaccctgaagtacgtggaggatgtgacaaacgtggtcagacgggatgtggagaagtggggccccttcgatctggtgtacggcagcacccaacccctgggcagctcttgtgaccggtgccctggctggtacatgtttcagttccaccggatcctgcagtacgccctgccgagacaggagtcccagcggccattcttttggattttcatggacaacttgctgctgaccgaggatgaccaggaaactaccactcggttcctgcagaccgaagccgtgaccctgcaggacgtgagaggccgggactaccagaacgccatgcgggtgtggtccaacatccctggactgaaaagcaagcacgcacctctgacccctaaagaagaggagtacctgcaggcccaggtgcggagcagaagcaagctggacgcccctaaggtggatctgctggtgaagaattgcctcctgcccctgagagagtacttcaagtatttcagccagaatagtctgcccctgggaggcagcggcggcggcccccagggctgcgccatcagcgaggacgtgttcgtgtacttcagcagggaggagtgggtgctgctggacgaggaccagaggctgctgtacagggacgtgatgctggagaacttcgccctgctggccagcctgggcatcgccagcagcaggagccacctggtgacccagctggagcagggcgaggagccctggatgcccgcccaggtggacatgacccccgccaccgagaaggaggcccagaagggcggcccaagcagcggcgcccctcctcccagcggcggcaggcggcccaagcagcggcgcccctcctcccagcggcggcagcccagccggctccccaacctctaccgaggagggcacctctgagtccgccacccccgagagcggccctggcacctccaccgagcccagcgagggcagcgcacccggcagccctgccggcagccccacctccacagaggagggaaccagcaccgagcccagcgaaggcagcgccccaggcaccagcaccgagcctagtgagcaggagattaaacggatcaacaagatcagaagaagacttgtgaaagacagcaacaccaagaaggccggcaagacaggccccatgaaaaccctgctggttagagtgatgacacccgatctgagagagcggctggaaaacctgagaaagaagcctgaaaatatcccccagcccatcagcaatacatctagagccaacctgaataagctgctgaccgattacaccgaaatgaagaaggcgatcctgcatgtgtactgggaagagttccagaaggaccctgtgggcctgatgagccgggtggcccagcctgccagcaagaagatcgatcagaacaagctgaaacctgagatggacgagaagggcaacctgaccaccgccggctttgcctgctctcagtgtggccagcccctgttcgtgtacaagctggagcaggtgtctgagaagggcaaggcttacaccaactacttcggacggtgcaatgtggccgagcacgaaaagctgatcctgctggcccagctgaagcccgagaaggatagcgacgaagccgtgacatatagcctgggaaagtttgggcagagggccctggatttctacagcattcatgtgaccaaggagtccacccaccccgtgaagcccctggcccagatcgccggaaacagatacgcctccggacctgtgggaaaggccctgagcgacgcatgtatgggcacaatcgcctccttcctgtctaagtaccaggacatcatcatcgaacaccagaaggtggtgaagggcaaccagaagagactggagagcctgcgggagctggccggcaaggaaaacctggaataccctagcgtgaccctgccacctcagcctcacaccaaggagggcgttgatgcctacaacgaagtgatcgcccgggtgcgaatgtgggtgaacctgaacctgtggcagaagctgaagctaagcagagatgatgccaagcctctgctgagactgaagggattcccttcctttcctctggtcgagagacaggccaacgaagtggactggtgggacatggtgtgtaacgtgaagaagctgatcaacgagaaaaaggaggatggcaaggtgttttggcagaatctggctggctacaagagacaggaagccctgagaccatacctgagcagcgaggaagatcggaagaagggaaagaaattcgctcggtaccagctgggcgacctgctgctgcacctggaaaagaagcacggcgaggactggggaaaggtgtacgacgaggcctgggagcggattgacaagaaagtggaaggcctgagcaagcacatcaagctggaagaggaacggagaagcgaggacgcccagagcaaggccgccctgaccgactggctgcgggctaaggccagcttcgtgatcgagggcctgaaggaggccgacaaggacgagttctgcagatgcgagctgaagctgcagaagtggtacggggacctgcggggaaagcccttcgccatcgaagccgagaacagcatcctggacatcagcggcttcagcaagcagtacaactgtgccttcatctggcagaaggacggcgtgaagaagctgaacctgtacctgatcatcaactacttcaagggcggcaagctgcggttcaagaagatcaaacctgaagccttcgaagccaacagattctacaccgtgatcaacaaaaagagcggcgagatcgtgcccatggaggtgaacttcaacttcgacgaccccaacctgatcatcctgcctctggcctttggcaagagacagggcagagaattcatctggaacgacctgctgtccctggaaaccggcagcctgaagctggccaacggaagagtgatcgagaagacactgtacaacagaagaacccggcaggatgagcctgccctgttcgtggccctgaccttcgagcggcgggaggtcctggactcctccaatatcaaaccaatgaacctgatcggcgtggcaagaggcgaaaacatccccgccgtgatcgccctgaccgaccccgagggctgcccactgagccggtttaaggatagcctgggaaacccaacccacatcctgagaatcggcgagagctataaggagaagcagcggaccatccaggccaagaaggaggtggagcagcggagagccggcggctacagccggaagtacgccagcaaagccaagaatctggcagacgatatggtgagaaacaccgctagagatctgctgtactacgccgtgacccaggatgccatgctgatcttcgccaacctgagccggggcttcggccggcagggcaagcggaccttcatggccgagagacagtacacacggatggaggactggctgaccgccaagctggcctacgagggcctgagcaagacctacctgtccaagacactggcccagtacacctccaagacatgcagcaactgtgggtttaccatcaccagcgccgactacgacagggtgctggagaagctgaagaagacagcaacaggctggatgaccacaattaacggcaaggagctgaaggtggagggccagattacctactacaacagatacaagagacagaacgtagtcaaggacctgtccgtcgagctggatagactgagcgaagaatctgtgaacaacgacatctcctcctggacaaagggcagaagcggagaagctctgagcctcctgaagaaaagattctcccatagacccgtgcaggagaagttcgtgtgcctgaactgcggcttcgagacacacgcagccgagcaagccgccctgaacatcgccagatcctggctgttcctgcggagccaggagtacaagaaataccagacaaacaagacaaccggcaacaccgataagagagccttcgtcgagacctggcagtccttttaccggaagaagcttaaggaggtgtggaaacctgccgtgcggtctggcggatctggcggaggctccaccagccccaagaaaaagagaaaagtctaagctgccttctgcggggcttgccttctggccatgcccttcttctctcccttgcacctgtacctcttggtctttgaataaagcctgagtaggaaggctagcaaaaaaaaaaaaaaaaaaaaaaaaaaaaaaaaaaaaaaaaaaaaaaaaaaaaaaaaaaaaaaaaaaaaaaaaaaaaaaaagcccagccggctccccaacctctaccgaggagggcacctctgagtccgccacccccgagagcggccctggcacctccaccgagcccagcgagggcagcgcacccggcagccctgccggcagccccacctccacagaggagggaaccagcaccgagcccagcgaaggcagcgccccaggcaccagcaccgagcctagtgagcaggagattaaacggatcaacaagatcagaagaagacttgtgaaagacagcaacaccaagaaggccggcaagacaggccccatgaaaaccctgctggttagagtgatgacacccgatctgagagagcggctggaaaacctgagaaagaagcctgaaaatatcccccagcccatcagcaatacatctagagccaacctgaataagctgctgaccgattacaccgaaatgaagaaggcgatcctgcatgtgtactgggaagagttccagaaggaccctgtgggcctgatgagccgggtggcccagcctgccagcaagaagatcgatcagaacaagctgaaacctgagatggacgagaagggcaacctgaccaccgccggctttgcctgctctcagtgtggccagcccctgttcgtgtacaagctggagcaggtgtctgagaagggcaaggcttacaccaactacttcggacggtgcaatgtggccgagcacgaaaagctgatcctgctggcccagctgaagcccgagaaggatagcgacgaagccgtgacatatagcctgggaaagtttgggcagagggccctggatttctacagcattcatgtgaccaaggagtccacccaccccgtgaagcccctggcccagatcgccggaaacagatacgcctccggacctgtgggaaaggccctgagcgacgcatgtatgggcacaatcgcctccttcctgtctaagtaccaggacatcatcatcgaacaccagaaggtggtgaagggcaaccagaagagactggagagcctgcgggagctggccggcaaggaaaacctggaataccctagcgtgaccctgccacctcagcctcacaccaaggagggcgttgatgcctacaacgaagtgatcgcccgggtgcgaatgtgggtgaacctgaacctgtggcagaagctgaagctaagcagagatgatgccaagcctctgctgagactgaagggattcccttcctttcctctggtcgagagacaggccaacgaagtggactggtgggacatggtgtgtaacgtgaagaagctgatcaacgagaaaaaggaggatggcaaggtgttttggcagaatctggctggctacaagagacaggaagccctgagaccatacctgagcagcgaggaagatcggaagaagggaaagaaattcgctcggtaccagctgggcgacctgctgctgcacctggaaaagaagcacggcgaggactggggaaaggtgtacgacgaggcctgggagcggattgacaagaaagtggaaggcctgagcaagcacatcaagctggaagaggaacggagaagcgaggacgcccagagcaaggccgccctgaccgactggctgcgggctaaggccagcttcgtgatcgagggcctgaaggaggccgacaaggacgagttctgcagatgcgagctgaagctgcagaagtggtacggggacctgcggggaaagcccttcgccatcgaagccgagaacagcatcctggacatcagcggcttcagcaagcagtacaactgtgccttcatctggcagaaggacggcgtgaagaagctgaacctgtacctgatcatcaactacttcaagggcggcaagctgcggttcaagaagatcaaacctgaagccttcgaagccaacagattctacaccgtgatcaacaaaaagagcggcgagatcgtgcccatggaggtgaacttcaacttcgacgaccccaacctgatcatcctgcctctggcctttggcaagagacagggcagagaattcatctggaacgacctgctgtccctggaaaccggcagcctgaagctggccaacggaagagtgatcgagaagacactgtacaacagaagaacccggcaggatgagcctgccctgttcgtggccctgaccttcgagcggcgggaggtcctggactcctccaatatcaaaccaatgaacctgatcggcgtggcaagaggcgaaaacatccccgccgtgatcgccctgaccgaccccgagggctgcccactgagccggtttaaggatagcctgggaaacccaacccacatcctgagaatcggcgagagctataaggagaagcagcggaccatccaggccaagaaggaggtggagcagcggagagccggcggctacagccggaagtacgccagcaaagccaagaatctggcagacgatatggtgagaaacaccgctagagatctgctgtactacgccgtgacccaggatgccatgctgatcttcgccaacctgagccggggcttcggccggcagggcaagcggaccttcatggccgagagacagtacacacggatggaggactggctgaccgccaagctggcctacgagggcctgagcaagacctacctgtccaagacactggcccagtacacctccaagacatgcagcaactgtgggtttaccatcaccagcgccgactacgacagggtgctggagaagctgaagaagacagcaacaggctggatgaccacaattaacggcaaggagctgaaggtggagggccagattacctactacaacagatacaagagacagaacgtagtcaaggacctgtccgtcgagctggatagactgagcgaagaatctgtgaacaacgacatctcctcctggacaaagggcagaagcggagaagctctgagcctcctgaagaaaagattctcccatagacccgtgcaggagaagttcgtgtgcctgaactgcggcttcgagacacacgcagccgagcaagccgccctgaacatcgccagatcctggctgttcctgcggagccaggagtacaagaaataccagacaaacaagacaaccggcaacaccgataagagagccttcgtcgagacctggcagtccttttaccggaagaagcttaaggaggtgtggaaacctgccgtgcggtctggcggatctggcggaggctccaccagccccaagaaaaagagaaaagtctaagctgccttctgcggggcttgccttctggccatgcccttcttctctcccttgcacctgtacctcttggtctttgaataaagcctgagtaggaaggctagcaaaaaaaaaaaaaaaaaaaaaaaaaaaaaaaaaaaaaaaaaaaaaaaaaaaaaaaaaaaaaaaaaaaaaaaaaaaaaaaa

SEQ ID NO: 9709 - RNA, 8787 nt, synthetic construct
  source 1..8787: mol_type = other RNA
aggaaataagagagaaaagaagagtaagaagaaatataagagccaccatggcccctaagaagaagcgtaaagtgagccggatgaaccacgaccaggagttcgacccccctaaggtgtaccctcccgtccccgccgagaagagaaagcccatccgggtcctgagcctgttcgatggcatcgccaccggtctgctggtgctgaaggacctgggcatccaggtggataggtacattgcctccgaggtgtgcgaggactccatcaccgtgggaatggtgcgtcatcagggcaagatcatgtacgtgggcgacgtgcggagcgtgacacagaagcatatccaggagtggggccctttcgacctggtgatcggcggcagcccttgcaatgacctgagcatcgtgaacccagcccggaagggcctgtacgagggaaccggcagactgttcttcgagttttacagactgctgcacgacgcccggcctaaggaaggcgacgaccggcccttcttttggctgttcgagaatgtggtggccatgggagtcagcgacaagcgggatattagccggttcctggagagcaaccccgtgatgatcgatgccaaggaagtgagcgccgcccaccgggccagatacttctggggcaatctgcctggcatgaacagacccctggccagcaccgtgaacgacaagctggagctgcaggagtgcctggagcacggccggatcgccaagttcagcaaggtgagaaccatcaccacccgaagcaacagcatcaaacaaggcaaggaccagcactttcctgtgttcatgaacgagaaggaggacatcctgtggtgtaccgagatggagagagtgttcgggttcccagtccactacacagatgtcagcaacatgtctagactggccagacagagactgctgggaagaagctggtccgtccctgtgatcagacacctgttcgcccctctgaaggagtacttcgcctgcgtgagcagcggcaacagcaacgccaacagccggggccccagcttctctagcggcctggtgccactgtccctgagagggagccacatgggccccatggagatctacaaaaccgtgagcgcctggaagcggcagcctgtgcgcgtgctgagcctgtttcggaatatcgataaagtcctgaaaagcctgggattcctggagagcggctctggctccggcggtggcaccctgaagtacgtggaggatgtgacaaacgtggtcagacgggatgtggagaagtggggccccttcgatctggtgtacggcagcacccaacccctgggcagctcttgtgaccggtgccctggctggtacatgtttcagttccaccggatcctgcagtacgccctgccgagacaggagtcccagcggccattcttttggattttcatggacaacttgctgctgaccgaggatgaccaggaaactaccactcggttcctgcagaccgaagccgtgaccctgcaggacgtgagaggccgggactaccagaacgccatgcgggtgtggtccaacatccctggactgaaaagcaagcacgcacctctgacccctaaagaagaggagtacctgcaggcccaggtgcggagcagaagcaagctggacgcccctaaggtggatctgctggtgaagaattgcctcctgcccctgagagagtacttcaagtatttcagccagaatagtctgcccctgggaggcagcggcggcggcgtgcagggcagcgtgaccttcagggacgtggccgtgctgttcagccaggacgagtggctgcacctggacaccgcccagaggaccctgtacagggaggtgatgctggagaactacagcaacctggtgagcctgggcatcctgttcagcaagcccaaggtgatcagccagctggagcagggccaggacccctggaaggtggagcacggcgccccccagggcacctgccccggctgggagagcctgggcggcccaagcagcggcgcccctcctcccagcggcggcaggcggcccaagcagcggcgcccctcctcccagcggcggcagcccagccggctccccaacctctaccgaggagggcacctctgagtccgccacccccgagagcggccctggcacctccaccgagcccagcgagggcagcgcacccggcagccctgccggcagccccacctccacagaggagggaaccagcaccgagcccagcgaaggcagcgccccaggcaccagcaccgagcctagtgagcaggagattaaacggatcaacaagatcagaagaagacttgtgaaagacagcaacaccaagaaggccggcaagacaggccccatgaaaaccctgctggttagagtgatgacacccgatctgagagagcggctggaaaacctgagaaagaagcctgaaaatatcccccagcccatcagcaatacatctagagccaacctgaataagctgctgaccgattacaccgaaatgaagaaggcgatcctgcatgtgtactgggaagagttccagaaggaccctgtgggcctgatgagccgggtggcccagcctgccagcaagaagatcgatcagaacaagctgaaacctgagatggacgagaagggcaacctgaccaccgccggctttgcctgctctcagtgtggccagcccctgttcgtgtacaagctggagcaggtgtctgagaagggcaaggcttacaccaactacttcggacggtgcaatgtggccgagcacgaaaagctgatcctgctggcccagctgaagcccgagaaggatagcgacgaagccgtgacatatagcctgggaaagtttgggcagagggccctggatttctacagcattcatgtgaccaaggagtccacccaccccgtgaagcccctggcccagatcgccggaaacagatacgcctccggacctgtgggaaaggccctgagcgacgcatgtatgggcacaatcgcctccttcctgtctaagtaccaggacatcatcatcgaacaccagaaggtggtgaagggcaaccagaagagactggagagcctgcgggagctggccggcaaggaaaacctggaataccctagcgtgaccctgccacctcagcctcacaccaaggagggcgttgatgcctacaacgaagtgatcgcccgggtgcgaatgtgggtgaacctgaacctgtggcagaagctgaagctaagcagagatgatgccaagcctctgctgagactgaagggattcccttcctttcctctggtcgagagacaggccaacgaagtggactggtgggacatggtgtgtaacgtgaagaagctgatcaacgagaaaaaggaggatggcaaggtgttttggcagaatctggctggctacaagagacaggaagccctgagaccatacctgagcagcgaggaagatcggaagaagggaaagaaattcgctcggtaccagctgggcgacctgctgctgcacctggaaaagaagcacggcgaggactggggaaaggtgtacgacgaggcctgggagcggattgacaagaaagtggaaggcctgagcaagcacatcaagctggaagaggaacggagaagcgaggacgcccagagcaaggccgccctgaccgactggctgcgggctaaggccagcttcgtgatcgagggcctgaaggaggccgacaaggacgagttctgcagatgcgagctgaagctgcagaagtggtacggggacctgcggggaaagcccttcgccatcgaagccgagaacagcatcctggacatcagcggcttcagcaagcagtacaactgtgccttcatctggcagaaggacggcgtgaagaagctgaacctgtacctgatcatcaactacttcaagggcggcaagctgcggttcaagaagatcaaacctgaagccttcgaagccaacagattctacaccgtgatcaacaaaaagagcggcgagatcgtgcccatggaggtgaacttcaacttcgacgaccccaacctgatcatcctgcctctggcctttggcaagagacagggcagagaattcatctggaacgacctgctgtccctggaaaccggcagcctgaagctggccaacggaagagtgatcgagaagacactgtacaacagaagaacccggcaggatgagcctgccctgttcgtggccctgaccttcgagcggcgggaggtcctggactcctccaatatcaaaccaatgaacctgatcggcgtggcaagaggcgaaaacatccccgccgtgatcgccctgaccgaccccgagggctgcccactgagccggtttaaggatagcctgggaaacccaacccacatcctgagaatcggcgagagctataaggagaagcagcggaccatccaggccaagaaggaggtggagcagcggagagccggcggctacagccggaagtacgccagcaaagccaagaatctggcagacgatatggtgagaaacaccgctagagatctgctgtactacgccgtgacccaggatgccatgctgatcttcgccaacctgagccggggcttcggccggcagggcaagcggaccttcatggccgagagacagtacacacggatggaggactggctgaccgccaagctggcctacgagggcctgagcaagacctacctgtccaagacactggcccagtacacctccaagacatgcagcaactgtgggtttaccatcaccagcgccgactacgacagggtgctggagaagctgaagaagacagcaacaggctggatgaccacaattaacggcaaggagctgaaggtggagggccagattacctactacaacagatacaagagacagaacgtagtcaaggacctgtccgtcgagctggatagactgagcgaagaatctgtgaacaacgacatctcctcctggacaaagggcagaagcggagaagctctgagcctcctgaagaaaagattctcccatagacccgtgcaggagaagttcgtgtgcctgaactgcggcttcgagacacacgcagccgagcaagccgccctgaacatcgccagatcctggctgttcctgcggagccaggagtacaagaaataccagacaaacaagacaaccggcaacaccgataagagagccttcgtcgagacctggcagtccttttaccggaagaagcttaaggaggtgtggaaacctgccgtgcggtctggcggatctggcggaggctccaccagccccaagaaaaagagaaaagtctaagctgccttctgcggggcttgccttctggccatgcccttcttctctcccttgcacctgtacctcttggtctttgaataaagcctgagtaggaaggctagcaaaaaaaaaaaaaaaaaaaaaaaaaaaaaaaaaaaaaaaaaaaaaaaaaaaaaaaaaaaaaaaaaaaaaaaaaaaaaaaagcccagccggctccccaacctctaccgaggagggcacctctgagtccgccacccccgagagcggccctggcacctccaccgagcccagcgagggcagcgcacccggcagccctgccggcagccccacctccacagaggagggaaccagcaccgagcccagcgaaggcagcgccccaggcaccagcaccgagcctagtgagcaggagattaaacggatcaacaagatcagaagaagacttgtgaaagacagcaacaccaagaaggccggcaagacaggccccatgaaaaccctgctggttagagtgatgacacccgatctgagagagcggctggaaaacctgagaaagaagcctgaaaatatcccccagcccatcagcaatacatctagagccaacctgaataagctgctgaccgattacaccgaaatgaagaaggcgatcctgcatgtgtactgggaagagttccagaaggaccctgtgggcctgatgagccgggtggcccagcctgccagcaagaagatcgatcagaacaagctgaaacctgagatggacgagaagggcaacctgaccaccgccggctttgcctgctctcagtgtggccagcccctgttcgtgtacaagctggagcaggtgtctgagaagggcaaggcttacaccaactacttcggacggtgcaatgtggccgagcacgaaaagctgatcctgctggcccagctgaagcccgagaaggatagcgacgaagccgtgacatatagcctgggaaagtttgggcagagggccctggatttctacagcattcatgtgaccaaggagtccacccaccccgtgaagcccctggcccagatcgccggaaacagatacgcctccggacctgtgggaaaggccctgagcgacgcatgtatgggcacaatcgcctccttcctgtctaagtaccaggacatcatcatcgaacaccagaaggtggtgaagggcaaccagaagagactggagagcctgcgggagctggccggcaaggaaaacctggaataccctagcgtgaccctgccacctcagcctcacaccaaggagggcgttgatgcctacaacgaagtgatcgcccgggtgcgaatgtgggtgaacctgaacctgtggcagaagctgaagctaagcagagatgatgccaagcctctgctgagactgaagggattcccttcctttcctctggtcgagagacaggccaacgaagtggactggtgggacatggtgtgtaacgtgaagaagctgatcaacgagaaaaaggaggatggcaaggtgttttggcagaatctggctggctacaagagacaggaagccctgagaccatacctgagcagcgaggaagatcggaagaagggaaagaaattcgctcggtaccagctgggcgacctgctgctgcacctggaaaagaagcacggcgaggactggggaaaggtgtacgacgaggcctgggagcggattgacaagaaagtggaaggcctgagcaagcacatcaagctggaagaggaacggagaagcgaggacgcccagagcaaggccgccctgaccgactggctgcgggctaaggccagcttcgtgatcgagggcctgaaggaggccgacaaggacgagttctgcagatgcgagctgaagctgcagaagtggtacggggacctgcggggaaagcccttcgccatcgaagccgagaacagcatcctggacatcagcggcttcagcaagcagtacaactgtgccttcatctggcagaaggacggcgtgaagaagctgaacctgtacctgatcatcaactacttcaagggcggcaagctgcggttcaagaagatcaaacctgaagccttcgaagccaacagattctacaccgtgatcaacaaaaagagcggcgagatcgtgcccatggaggtgaacttcaacttcgacgaccccaacctgatcatcctgcctctggcctttggcaagagacagggcagagaattcatctggaacgacctgctgtccctggaaaccggcagcctgaagctggccaacggaagagtgatcgagaagacactgtacaacagaagaacccggcaggatgagcctgccctgttcgtggccctgaccttcgagcggcgggaggtcctggactcctccaatatcaaaccaatgaacctgatcggcgtggcaagaggcgaaaacatccccgccgtgatcgccctgaccgaccccgagggctgcccactgagccggtttaaggatagcctgggaaacccaacccacatcctgagaatcggcgagagctataaggagaagcagcggaccatccaggccaagaaggaggtggagcagcggagagccggcggctacagccggaagtacgccagcaaagccaagaatctggcagacgatatggtgagaaacaccgctagagatctgctgtactacgccgtgacccaggatgccatgctgatcttcgccaacctgagccggggcttcggccggcagggcaagcggaccttcatggccgagagacagtacacacggatggaggactggctgaccgccaagctggcctacgagggcctgagcaagacctacctgtccaagacactggcccagtacacctccaagacatgcagcaactgtgggtttaccatcaccagcgccgactacgacagggtgctggagaagctgaagaagacagcaacaggctggatgaccacaattaacggcaaggagctgaaggtggagggccagattacctactacaacagatacaagagacagaacgtagtcaaggacctgtccgtcgagctggatagactgagcgaagaatctgtgaacaacgacatctcctcctggacaaagggcagaagcggagaagctctgagcctcctgaagaaaagattctcccatagacccgtgcaggagaagttcgtgtgcctgaactgcggcttcgagacacacgcagccgagcaagccgccctgaacatcgccagatcctggctgttcctgcggagccaggagtacaagaaataccagacaaacaagacaaccggcaacaccgataagagagccttcgtcgagacctggcagtccttttaccggaagaagcttaaggaggtgtggaaacctgccgtgcggtctggcggatctggcggaggctccaccagccccaagaaaaagagaaaagtctaagctgccttctgcggggcttgccttctggccatgcccttcttctctcccttgcacctgtacctcttggtctttgaataaagcctgagtaggaaggctagcaaaaaaaaaaaaaaaaaaaaaaaaaaaaaaaaaaaaaaaaaaaaaaaaaaaaaaaaaaaaaaaaaaaaaaaaaaaaaaaa

SEQ ID NO: 9710 - RNA, 8787 nt, synthetic construct
  source 1..8787: mol_type = other RNA
aggaaataagagagaaaagaagagtaagaagaaatataagagccaccatggcccctaagaagaagcgtaaagtgagccggatgaaccacgaccaggagttcgacccccctaaggtgtaccctcccgtccccgccgagaagagaaagcccatccgggtcctgagcctgttcgatggcatcgccaccggtctgctggtgctgaaggacctgggcatccaggtggataggtacattgcctccgaggtgtgcgaggactccatcaccgtgggaatggtgcgtcatcagggcaagatcatgtacgtgggcgacgtgcggagcgtgacacagaagcatatccaggagtggggccctttcgacctggtgatcggcggcagcccttgcaatgacctgagcatcgtgaacccagcccggaagggcctgtacgagggaaccggcagactgttcttcgagttttacagactgctgcacgacgcccggcctaaggaaggcgacgaccggcccttcttttggctgttcgagaatgtggtggccatgggagtcagcgacaagcgggatattagccggttcctggagagcaaccccgtgatgatcgatgccaaggaagtgagcgccgcccaccgggccagatacttctggggcaatctgcctggcatgaacagacccctggccagcaccgtgaacgacaagctggagctgcaggagtgcctggagcacggccggatcgccaagttcagcaaggtgagaaccatcaccacccgaagcaacagcatcaaacaaggcaaggaccagcactttcctgtgttcatgaacgagaaggaggacatcctgtggtgtaccgagatggagagagtgttcgggttcccagtccactacacagatgtcagcaacatgtctagactggccagacagagactgctgggaagaagctggtccgtccctgtgatcagacacctgttcgcccctctgaaggagtacttcgcctgcgtgagcagcggcaacagcaacgccaacagccggggccccagcttctctagcggcctggtgccactgtccctgagagggagccacatgggccccatggagatctacaaaaccgtgagcgcctggaagcggcagcctgtgcgcgtgctgagcctgtttcggaatatcgataaagtcctgaaaagcctgggattcctggagagcggctctggctccggcggtggcaccctgaagtacgtggaggatgtgacaaacgtggtcagacgggatgtggagaagtggggccccttcgatctggtgtacggcagcacccaacccctgggcagctcttgtgaccggtgccctggctggtacatgtttcagttccaccggatcctgcagtacgccctgccgagacaggagtcccagcggccattcttttggattttcatggacaacttgctgctgaccgaggatgaccaggaaactaccactcggttcctgcagaccgaagccgtgaccctgcaggacgtgagaggccgggactaccagaacgccatgcgggtgtggtccaacatccctggactgaaaagcaagcacgcacctctgacccctaaagaagaggagtacctgcaggcccaggtgcggagcagaagcaagctggacgcccctaaggtggatctgctggtgaagaattgcctcctgcccctgagagagtacttcaagtatttcagccagaatagtctgcccctgggaggcagcggcggcggccaccaggacctggtgaccttcaaggacgtggccgtgtacttcacccagaccgagtgggccggcctgagccccgcccagaaggccctgtacaggagcgtgatgctggagaactacggcaacctgaccagcctgggctaccccgtgcccaagcccgccctgatcagcctgctggagggcggcaacctgccctggggcctggaggcccaggacaaccccagcgccgagaggaccaaggacatctgcggcggcccaagcagcggcgcccctcctcccagcggcggcaggcggcccaagcagcggcgcccctcctcccagcggcggcagcccagccggctccccaacctctaccgaggagggcacctctgagtccgccacccccgagagcggccctggcacctccaccgagcccagcgagggcagcgcacccggcagccctgccggcagccccacctccacagaggagggaaccagcaccgagcccagcgaaggcagcgccccaggcaccagcaccgagcctagtgagcaggagattaaacggatcaacaagatcagaagaagacttgtgaaagacagcaacaccaagaaggccggcaagacaggccccatgaaaaccctgctggttagagtgatgacacccgatctgagagagcggctggaaaacctgagaaagaagcctgaaaatatcccccagcccatcagcaatacatctagagccaacctgaataagctgctgaccgattacaccgaaatgaagaaggcgatcctgcatgtgtactgggaagagttccagaaggaccctgtgggcctgatgagccgggtggcccagcctgccagcaagaagatcgatcagaacaagctgaaacctgagatggacgagaagggcaacctgaccaccgccggctttgcctgctctcagtgtggccagcccctgttcgtgtacaagctggagcaggtgtctgagaagggcaaggcttacaccaactacttcggacggtgcaatgtggccgagcacgaaaagctgatcctgctggcccagctgaagcccgagaaggatagcgacgaagccgtgacatatagcctgggaaagtttgggcagagggccctggatttctacagcattcatgtgaccaaggagtccacccaccccgtgaagcccctggcccagatcgccggaaacagatacgcctccggacctgtgggaaaggccctgagcgacgcatgtatgggcacaatcgcctccttcctgtctaagtaccaggacatcatcatcgaacaccagaaggtggtgaagggcaaccagaagagactggagagcctgcgggagctggccggcaaggaaaacctggaataccctagcgtgaccctgccacctcagcctcacaccaaggagggcgttgatgcctacaacgaagtgatcgcccgggtgcgaatgtgggtgaacctgaacctgtggcagaagctgaagctaagcagagatgatgccaagcctctgctgagactgaagggattcccttcctttcctctggtcgagagacaggccaacgaagtggactggtgggacatggtgtgtaacgtgaagaagctgatcaacgagaaaaaggaggatggcaaggtgttttggcagaatctggctggctacaagagacaggaagccctgagaccatacctgagcagcgaggaagatcggaagaagggaaagaaattcgctcggtaccagctgggcgacctgctgctgcacctggaaaagaagcacggcgaggactggggaaaggtgtacgacgaggcctgggagcggattgacaagaaagtggaaggcctgagcaagcacatcaagctggaagaggaacggagaagcgaggacgcccagagcaaggccgccctgaccgactggctgcgggctaaggccagcttcgtgatcgagggcctgaaggaggccgacaaggacgagttctgcagatgcgagctgaagctgcagaagtggtacggggacctgcggggaaagcccttcgccatcgaagccgagaacagcatcctggacatcagcggcttcagcaagcagtacaactgtgccttcatctggcagaaggacggcgtgaagaagctgaacctgtacctgatcatcaactacttcaagggcggcaagctgcggttcaagaagatcaaacctgaagccttcgaagccaacagattctacaccgtgatcaacaaaaagagcggcgagatcgtgcccatggaggtgaacttcaacttcgacgaccccaacctgatcatcctgcctctggcctttggcaagagacagggcagagaattcatctggaacgacctgctgtccctggaaaccggcagcctgaagctggccaacggaagagtgatcgagaagacactgtacaacagaagaacccggcaggatgagcctgccctgttcgtggccctgaccttcgagcggcgggaggtcctggactcctccaatatcaaaccaatgaacctgatcggcgtggcaagaggcgaaaacatccccgccgtgatcgccctgaccgaccccgagggctgcccactgagccggtttaaggatagcctgggaaacccaacccacatcctgagaatcggcgagagctataaggagaagcagcggaccatccaggccaagaaggaggtggagcagcggagagccggcggctacagccggaagtacgccagcaaagccaagaatctggcagacgatatggtgagaaacaccgctagagatctgctgtactacgccgtgacccaggatgccatgctgatcttcgccaacctgagccggggcttcggccggcagggcaagcggaccttcatggccgagagacagtacacacggatggaggactggctgaccgccaagctggcctacgagggcctgagcaagacctacctgtccaagacactggcccagtacacctccaagacatgcagcaactgtgggtttaccatcaccagcgccgactacgacagggtgctggagaagctgaagaagacagcaacaggctggatgaccacaattaacggcaaggagctgaaggtggagggccagattacctactacaacagatacaagagacagaacgtagtcaaggacctgtccgtcgagctggatagactgagcgaagaatctgtgaacaacgacatctcctcctggacaaagggcagaagcggagaagctctgagcctcctgaagaaaagattctcccatagacccgtgcaggagaagttcgtgtgcctgaactgcggcttcgagacacacgcagccgagcaagccgccctgaacatcgccagatcctggctgttcctgcggagccaggagtacaagaaataccagacaaacaagacaaccggcaacaccgataagagagccttcgtcgagacctggcagtccttttaccggaagaagcttaaggaggtgtggaaacctgccgtgcggtctggcggatctggcggaggctccaccagccccaagaaaaagagaaaagtctaagctgccttctgcggggcttgccttctggccatgcccttcttctctcccttgcacctgtacctcttggtctttgaataaagcctgagtaggaaggctagcaaaaaaaaaaaaaaaaaaaaaaaaaaaaaaaaaaaaaaaaaaaaaaaaaaaaaaaaaaaaaaaaaaaaaaaaaaaaaaaagcccagccggctccccaacctctaccgaggagggcacctctgagtccgccacccccgagagcggccctggcacctccaccgagcccagcgagggcagcgcacccggcagccctgccggcagccccacctccacagaggagggaaccagcaccgagcccagcgaaggcagcgccccaggcaccagcaccgagcctagtgagcaggagattaaacggatcaacaagatcagaagaagacttgtgaaagacagcaacaccaagaaggccggcaagacaggccccatgaaaaccctgctggttagagtgatgacacccgatctgagagagcggctggaaaacctgagaaagaagcctgaaaatatcccccagcccatcagcaatacatctagagccaacctgaataagctgctgaccgattacaccgaaatgaagaaggcgatcctgcatgtgtactgggaagagttccagaaggaccctgtgggcctgatgagccgggtggcccagcctgccagcaagaagatcgatcagaacaagctgaaacctgagatggacgagaagggcaacctgaccaccgccggctttgcctgctctcagtgtggccagcccctgttcgtgtacaagctggagcaggtgtctgagaagggcaaggcttacaccaactacttcggacggtgcaatgtggccgagcacgaaaagctgatcctgctggcccagctgaagcccgagaaggatagcgacgaagccgtgacatatagcctgggaaagtttgggcagagggccctggatttctacagcattcatgtgaccaaggagtccacccaccccgtgaagcccctggcccagatcgccggaaacagatacgcctccggacctgtgggaaaggccctgagcgacgcatgtatgggcacaatcgcctccttcctgtctaagtaccaggacatcatcatcgaacaccagaaggtggtgaagggcaaccagaagagactggagagcctgcgggagctggccggcaaggaaaacctggaataccctagcgtgaccctgccacctcagcctcacaccaaggagggcgttgatgcctacaacgaagtgatcgcccgggtgcgaatgtgggtgaacctgaacctgtggcagaagctgaagctaagcagagatgatgccaagcctctgctgagactgaagggattcccttcctttcctctggtcgagagacaggccaacgaagtggactggtgggacatggtgtgtaacgtgaagaagctgatcaacgagaaaaaggaggatggcaaggtgttttggcagaatctggctggctacaagagacaggaagccctgagaccatacctgagcagcgaggaagatcggaagaagggaaagaaattcgctcggtaccagctgggcgacctgctgctgcacctggaaaagaagcacggcgaggactggggaaaggtgtacgacgaggcctgggagcggattgacaagaaagtggaaggcctgagcaagcacatcaagctggaagaggaacggagaagcgaggacgcccagagcaaggccgccctgaccgactggctgcgggctaaggccagcttcgtgatcgagggcctgaaggaggccgacaaggacgagttctgcagatgcgagctgaagctgcagaagtggtacggggacctgcggggaaagcccttcgccatcgaagccgagaacagcatcctggacatcagcggcttcagcaagcagtacaactgtgccttcatctggcagaaggacggcgtgaagaagctgaacctgtacctgatcatcaactacttcaagggcggcaagctgcggttcaagaagatcaaacctgaagccttcgaagccaacagattctacaccgtgatcaacaaaaagagcggcgagatcgtgcccatggaggtgaacttcaacttcgacgaccccaacctgatcatcctgcctctggcctttggcaagagacagggcagagaattcatctggaacgacctgctgtccctggaaaccggcagcctgaagctggccaacggaagagtgatcgagaagacactgtacaacagaagaacccggcaggatgagcctgccctgttcgtggccctgaccttcgagcggcgggaggtcctggactcctccaatatcaaaccaatgaacctgatcggcgtggcaagaggcgaaaacatccccgccgtgatcgccctgaccgaccccgagggctgcccactgagccggtttaaggatagcctgggaaacccaacccacatcctgagaatcggcgagagctataaggagaagcagcggaccatccaggccaagaaggaggtggagcagcggagagccggcggctacagccggaagtacgccagcaaagccaagaatctggcagacgatatggtgagaaacaccgctagagatctgctgtactacgccgtgacccaggatgccatgctgatcttcgccaacctgagccggggcttcggccggcagggcaagcggaccttcatggccgagagacagtacacacggatggaggactggctgaccgccaagctggcctacgagggcctgagcaagacctacctgtccaagacactggcccagtacacctccaagacatgcagcaactgtgggtttaccatcaccagcgccgactacgacagggtgctggagaagctgaagaagacagcaacaggctggatgaccacaattaacggcaaggagctgaaggtggagggccagattacctactacaacagatacaagagacagaacgtagtcaaggacctgtccgtcgagctggatagactgagcgaagaatctgtgaacaacgacatctcctcctggacaaagggcagaagcggagaagctctgagcctcctgaagaaaagattctcccatagacccgtgcaggagaagttcgtgtgcctgaactgcggcttcgagacacacgcagccgagcaagccgccctgaacatcgccagatcctggctgttcctgcggagccaggagtacaagaaataccagacaaacaagacaaccggcaacaccgataagagagccttcgtcgagacctggcagtccttttaccggaagaagcttaaggaggtgtggaaacctgccgtgcggtctggcggatctggcggaggctccaccagccccaagaaaaagagaaaagtctaagctgccttctgcggggcttgccttctggccatgcccttcttctctcccttgcacctgtacctcttggtctttgaataaagcctgagtaggaaggctagcaaaaaaaaaaaaaaaaaaaaaaaaaaaaaaaaaaaaaaaaaaaaaaaaaaaaaaaaaaaaaaaaaaaaaaaaaaaaaaaa

SEQ ID NO: 9711 - RNA, 8787 nt, synthetic construct
  source 1..8787: mol_type = other RNA
aggaaataagagagaaaagaagagtaagaagaaatataagagccaccatggcccctaagaagaagcgtaaagtgagccggatgaaccacgaccaggagttcgacccccctaaggtgtaccctcccgtccccgccgagaagagaaagcccatccgggtcctgagcctgttcgatggcatcgccaccggtctgctggtgctgaaggacctgggcatccaggtggataggtacattgcctccgaggtgtgcgaggactccatcaccgtgggaatggtgcgtcatcagggcaagatcatgtacgtgggcgacgtgcggagcgtgacacagaagcatatccaggagtggggccctttcgacctggtgatcggcggcagcccttgcaatgacctgagcatcgtgaacccagcccggaagggcctgtacgagggaaccggcagactgttcttcgagttttacagactgctgcacgacgcccggcctaaggaaggcgacgaccggcccttcttttggctgttcgagaatgtggtggccatgggagtcagcgacaagcgggatattagccggttcctggagagcaaccccgtgatgatcgatgccaaggaagtgagcgccgcccaccgggccagatacttctggggcaatctgcctggcatgaacagacccctggccagcaccgtgaacgacaagctggagctgcaggagtgcctggagcacggccggatcgccaagttcagcaaggtgagaaccatcaccacccgaagcaacagcatcaaacaaggcaaggaccagcactttcctgtgttcatgaacgagaaggaggacatcctgtggtgtaccgagatggagagagtgttcgggttcccagtccactacacagatgtcagcaacatgtctagactggccagacagagactgctgggaagaagctggtccgtccctgtgatcagacacctgttcgcccctctgaaggagtacttcgcctgcgtgagcagcggcaacagcaacgccaacagccggggccccagcttctctagcggcctggtgccactgtccctgagagggagccacatgggccccatggagatctacaaaaccgtgagcgcctggaagcggcagcctgtgcgcgtgctgagcctgtttcggaatatcgataaagtcctgaaaagcctgggattcctggagagcggctctggctccggcggtggcaccctgaagtacgtggaggatgtgacaaacgtggtcagacgggatgtggagaagtggggccccttcgatctggtgtacggcagcacccaacccctgggcagctcttgtgaccggtgccctggctggtacatgtttcagttccaccggatcctgcagtacgccctgccgagacaggagtcccagcggccattcttttggattttcatggacaacttgctgctgaccgaggatgaccaggaaactaccactcggttcctgcagaccgaagccgtgaccctgcaggacgtgagaggccgggactaccagaacgccatgcgggtgtggtccaacatccctggactgaaaagcaagcacgcacctctgacccctaaagaagaggagtacctgcaggcccaggtgcggagcagaagcaagctggacgcccctaaggtggatctgctggtgaagaattgcctcctgcccctgagagagtacttcaagtatttcagccagaatagtctgcccctgggaggcagcggcggcggcgtgaccttcgaggacgtggccctgtacttcagcagggacgagtggaggctgctggacgaggcccagaggaggctgtaccacgacgtgatgctgcagaacttcagcctgatcagcagcctgggctgctgctgcggcgccgaggacgccgagagccccttccagcccagcatgttcagggacgtgagccaggccaggaccctgaaggccgccagcctgagccagaagaaccacccctgcgagaagggcggcccaagcagcggcgcccctcctcccagcggcggcaggcggcccaagcagcggcgcccctcctcccagcggcggcagcccagccggctccccaacctctaccgaggagggcacctctgagtccgccacccccgagagcggccctggcacctccaccgagcccagcgagggcagcgcacccggcagccctgccggcagccccacctccacagaggagggaaccagcaccgagcccagcgaaggcagcgccccaggcaccagcaccgagcctagtgagcaggagattaaacggatcaacaagatcagaagaagacttgtgaaagacagcaacaccaagaaggccggcaagacaggccccatgaaaaccctgctggttagagtgatgacacccgatctgagagagcggctggaaaacctgagaaagaagcctgaaaatatcccccagcccatcagcaatacatctagagccaacctgaataagctgctgaccgattacaccgaaatgaagaaggcgatcctgcatgtgtactgggaagagttccagaaggaccctgtgggcctgatgagccgggtggcccagcctgccagcaagaagatcgatcagaacaagctgaaacctgagatggacgagaagggcaacctgaccaccgccggctttgcctgctctcagtgtggccagcccctgttcgtgtacaagctggagcaggtgtctgagaagggcaaggcttacaccaactacttcggacggtgcaatgtggccgagcacgaaaagctgatcctgctggcccagctgaagcccgagaaggatagcgacgaagccgtgacatatagcctgggaaagtttgggcagagggccctggatttctacagcattcatgtgaccaaggagtccacccaccccgtgaagcccctggcccagatcgccggaaacagatacgcctccggacctgtgggaaaggccctgagcgacgcatgtatgggcacaatcgcctccttcctgtctaagtaccaggacatcatcatcgaacaccagaaggtggtgaagggcaaccagaagagactggagagcctgcgggagctggccggcaaggaaaacctggaataccctagcgtgaccctgccacctcagcctcacaccaaggagggcgttgatgcctacaacgaagtgatcgcccgggtgcgaatgtgggtgaacctgaacctgtggcagaagctgaagctaagcagagatgatgccaagcctctgctgagactgaagggattcccttcctttcctctggtcgagagacaggccaacgaagtggactggtgggacatggtgtgtaacgtgaagaagctgatcaacgagaaaaaggaggatggcaaggtgttttggcagaatctggctggctacaagagacaggaagccctgagaccatacctgagcagcgaggaagatcggaagaagggaaagaaattcgctcggtaccagctgggcgacctgctgctgcacctggaaaagaagcacggcgaggactggggaaaggtgtacgacgaggcctgggagcggattgacaagaaagtggaaggcctgagcaagcacatcaagctggaagaggaacggagaagcgaggacgcccagagcaaggccgccctgaccgactggctgcgggctaaggccagcttcgtgatcgagggcctgaaggaggccgacaaggacgagttctgcagatgcgagctgaagctgcagaagtggtacggggacctgcggggaaagcccttcgccatcgaagccgagaacagcatcctggacatcagcggcttcagcaagcagtacaactgtgccttcatctggcagaaggacggcgtgaagaagctgaacctgtacctgatcatcaactacttcaagggcggcaagctgcggttcaagaagatcaaacctgaagccttcgaagccaacagattctacaccgtgatcaacaaaaagagcggcgagatcgtgcccatggaggtgaacttcaacttcgacgaccccaacctgatcatcctgcctctggcctttggcaagagacagggcagagaattcatctggaacgacctgctgtccctggaaaccggcagcctgaagctggccaacggaagagtgatcgagaagacactgtacaacagaagaacccggcaggatgagcctgccctgttcgtggccctgaccttcgagcggcgggaggtcctggactcctccaatatcaaaccaatgaacctgatcggcgtggcaagaggcgaaaacatccccgccgtgatcgccctgaccgaccccgagggctgcccactgagccggtttaaggatagcctgggaaacccaacccacatcctgagaatcggcgagagctataaggagaagcagcggaccatccaggccaagaaggaggtggagcagcggagagccggcggctacagccggaagtacgccagcaaagccaagaatctggcagacgatatggtgagaaacaccgctagagatctgctgtactacgccgtgacccaggatgccatgctgatcttcgccaacctgagccggggcttcggccggcagggcaagcggaccttcatggccgagagacagtacacacggatggaggactggctgaccgccaagctggcctacgagggcctgagcaagacctacctgtccaagacactggcccagtacacctccaagacatgcagcaactgtgggtttaccatcaccagcgccgactacgacagggtgctggagaagctgaagaagacagcaacaggctggatgaccacaattaacggcaaggagctgaaggtggagggccagattacctactacaacagatacaagagacagaacgtagtcaaggacctgtccgtcgagctggatagactgagcgaagaatctgtgaacaacgacatctcctcctggacaaagggcagaagcggagaagctctgagcctcctgaagaaaagattctcccatagacccgtgcaggagaagttcgtgtgcctgaactgcggcttcgagacacacgcagccgagcaagccgccctgaacatcgccagatcctggctgttcctgcggagccaggagtacaagaaataccagacaaacaagacaaccggcaacaccgataagagagccttcgtcgagacctggcagtccttttaccggaagaagcttaaggaggtgtggaaacctgccgtgcggtctggcggatctggcggaggctccaccagccccaagaaaaagagaaaagtctaagctgccttctgcggggcttgccttctggccatgcccttcttctctcccttgcacctgtacctcttggtctttgaataaagcctgagtaggaaggctagcaaaaaaaaaaaaaaaaaaaaaaaaaaaaaaaaaaaaaaaaaaaaaaaaaaaaaaaaaaaaaaaaaaaaaaaaaaaaaaaagcccagccggctccccaacctctaccgaggagggcacctctgagtccgccacccccgagagcggccctggcacctccaccgagcccagcgagggcagcgcacccggcagccctgccggcagccccacctccacagaggagggaaccagcaccgagcccagcgaaggcagcgccccaggcaccagcaccgagcctagtgagcaggagattaaacggatcaacaagatcagaagaagacttgtgaaagacagcaacaccaagaaggccggcaagacaggccccatgaaaaccctgctggttagagtgatgacacccgatctgagagagcggctggaaaacctgagaaagaagcctgaaaatatcccccagcccatcagcaatacatctagagccaacctgaataagctgctgaccgattacaccgaaatgaagaaggcgatcctgcatgtgtactgggaagagttccagaaggaccctgtgggcctgatgagccgggtggcccagcctgccagcaagaagatcgatcagaacaagctgaaacctgagatggacgagaagggcaacctgaccaccgccggctttgcctgctctcagtgtggccagcccctgttcgtgtacaagctggagcaggtgtctgagaagggcaaggcttacaccaactacttcggacggtgcaatgtggccgagcacgaaaagctgatcctgctggcccagctgaagcccgagaaggatagcgacgaagccgtgacatatagcctgggaaagtttgggcagagggccctggatttctacagcattcatgtgaccaaggagtccacccaccccgtgaagcccctggcccagatcgccggaaacagatacgcctccggacctgtgggaaaggccctgagcgacgcatgtatgggcacaatcgcctccttcctgtctaagtaccaggacatcatcatcgaacaccagaaggtggtgaagggcaaccagaagagactggagagcctgcgggagctggccggcaaggaaaacctggaataccctagcgtgaccctgccacctcagcctcacaccaaggagggcgttgatgcctacaacgaagtgatcgcccgggtgcgaatgtgggtgaacctgaacctgtggcagaagctgaagctaagcagagatgatgccaagcctctgctgagactgaagggattcccttcctttcctctggtcgagagacaggccaacgaagtggactggtgggacatggtgtgtaacgtgaagaagctgatcaacgagaaaaaggaggatggcaaggtgttttggcagaatctggctggctacaagagacaggaagccctgagaccatacctgagcagcgaggaagatcggaagaagggaaagaaattcgctcggtaccagctgggcgacctgctgctgcacctggaaaagaagcacggcgaggactggggaaaggtgtacgacgaggcctgggagcggattgacaagaaagtggaaggcctgagcaagcacatcaagctggaagaggaacggagaagcgaggacgcccagagcaaggccgccctgaccgactggctgcgggctaaggccagcttcgtgatcgagggcctgaaggaggccgacaaggacgagttctgcagatgcgagctgaagctgcagaagtggtacggggacctgcggggaaagcccttcgccatcgaagccgagaacagcatcctggacatcagcggcttcagcaagcagtacaactgtgccttcatctggcagaaggacggcgtgaagaagctgaacctgtacctgatcatcaactacttcaagggcggcaagctgcggttcaagaagatcaaacctgaagccttcgaagccaacagattctacaccgtgatcaacaaaaagagcggcgagatcgtgcccatggaggtgaacttcaacttcgacgaccccaacctgatcatcctgcctctggcctttggcaagagacagggcagagaattcatctggaacgacctgctgtccctggaaaccggcagcctgaagctggccaacggaagagtgatcgagaagacactgtacaacagaagaacccggcaggatgagcctgccctgttcgtggccctgaccttcgagcggcgggaggtcctggactcctccaatatcaaaccaatgaacctgatcggcgtggcaagaggcgaaaacatccccgccgtgatcgccctgaccgaccccgagggctgcccactgagccggtttaaggatagcctgggaaacccaacccacatcctgagaatcggcgagagctataaggagaagcagcggaccatccaggccaagaaggaggtggagcagcggagagccggcggctacagccggaagtacgccagcaaagccaagaatctggcagacgatatggtgagaaacaccgctagagatctgctgtactacgccgtgacccaggatgccatgctgatcttcgccaacctgagccggggcttcggccggcagggcaagcggaccttcatggccgagagacagtacacacggatggaggactggctgaccgccaagctggcctacgagggcctgagcaagacctacctgtccaagacactggcccagtacacctccaagacatgcagcaactgtgggtttaccatcaccagcgccgactacgacagggtgctggagaagctgaagaagacagcaacaggctggatgaccacaattaacggcaaggagctgaaggtggagggccagattacctactacaacagatacaagagacagaacgtagtcaaggacctgtccgtcgagctggatagactgagcgaagaatctgtgaacaacgacatctcctcctggacaaagggcagaagcggagaagctctgagcctcctgaagaaaagattctcccatagacccgtgcaggagaagttcgtgtgcctgaactgcggcttcgagacacacgcagccgagcaagccgccctgaacatcgccagatcctggctgttcctgcggagccaggagtacaagaaataccagacaaacaagacaaccggcaacaccgataagagagccttcgtcgagacctggcagtccttttaccggaagaagcttaaggaggtgtggaaacctgccgtgcggtctggcggatctggcggaggctccaccagccccaagaaaaagagaaaagtctaagctgccttctgcggggcttgccttctggccatgcccttcttctctcccttgcacctgtacctcttggtctttgaataaagcctgagtaggaaggctagcaaaaaaaaaaaaaaaaaaaaaaaaaaaaaaaaaaaaaaaaaaaaaaaaaaaaaaaaaaaaaaaaaaaaaaaaaaaaaaaa

SEQ ID NO: 9712 - RNA, 8787 nt, synthetic construct
  source 1..8787: mol_type = other RNA
aggaaataagagagaaaagaagagtaagaagaaatataagagccaccatggcccctaagaagaagcgtaaagtgagccggatgaaccacgaccaggagttcgacccccctaaggtgtaccctcccgtccccgccgagaagagaaagcccatccgggtcctgagcctgttcgatggcatcgccaccggtctgctggtgctgaaggacctgggcatccaggtggataggtacattgcctccgaggtgtgcgaggactccatcaccgtgggaatggtgcgtcatcagggcaagatcatgtacgtgggcgacgtgcggagcgtgacacagaagcatatccaggagtggggccctttcgacctggtgatcggcggcagcccttgcaatgacctgagcatcgtgaacccagcccggaagggcctgtacgagggaaccggcagactgttcttcgagttttacagactgctgcacgacgcccggcctaaggaaggcgacgaccggcccttcttttggctgttcgagaatgtggtggccatgggagtcagcgacaagcgggatattagccggttcctggagagcaaccccgtgatgatcgatgccaaggaagtgagcgccgcccaccgggccagatacttctggggcaatctgcctggcatgaacagacccctggccagcaccgtgaacgacaagctggagctgcaggagtgcctggagcacggccggatcgccaagttcagcaaggtgagaaccatcaccacccgaagcaacagcatcaaacaaggcaaggaccagcactttcctgtgttcatgaacgagaaggaggacatcctgtggtgtaccgagatggagagagtgttcgggttcccagtccactacacagatgtcagcaacatgtctagactggccagacagagactgctgggaagaagctggtccgtccctgtgatcagacacctgttcgcccctctgaaggagtacttcgcctgcgtgagcagcggcaacagcaacgccaacagccggggccccagcttctctagcggcctggtgccactgtccctgagagggagccacatgggccccatggagatctacaaaaccgtgagcgcctggaagcggcagcctgtgcgcgtgctgagcctgtttcggaatatcgataaagtcctgaaaagcctgggattcctggagagcggctctggctccggcggtggcaccctgaagtacgtggaggatgtgacaaacgtggtcagacgggatgtggagaagtggggccccttcgatctggtgtacggcagcacccaacccctgggcagctcttgtgaccggtgccctggctggtacatgtttcagttccaccggatcctgcagtacgccctgccgagacaggagtcccagcggccattcttttggattttcatggacaacttgctgctgaccgaggatgaccaggaaactaccactcggttcctgcagaccgaagccgtgaccctgcaggacgtgagaggccgggactaccagaacgccatgcgggtgtggtccaacatccctggactgaaaagcaagcacgcacctctgacccctaaagaagaggagtacctgcaggcccaggtgcggagcagaagcaagctggacgcccctaaggtggatctgctggtgaagaattgcctcctgcccctgagagagtacttcaagtatttcagccagaatagtctgcccctgggaggcagcggcggcggcatgcccgccaacgaggacaccccccagcccggcggccacggcagcgcctgcgaggtgagcgtgagcttcgaggacgtgaccgtggacttcagcagggaggagtggcagcagctggacagcacccagaggaggctgtaccaggacgtgatgctggagaactacagccacctgctgagcgtgggcttcgaggtgcccaagcccgaggtgatcttcaagctggagcagggcgagggcccctggaccggcggcccaagcagcggcgcccctcctcccagcggcggcaggcggcccaagcagcggcgcccctcctcccagcggcggcagcccagccggctccccaacctctaccgaggagggcacctctgagtccgccacccccgagagcggccctggcacctccaccgagcccagcgagggcagcgcacccggcagccctgccggcagccccacctccacagaggagggaaccagcaccgagcccagcgaaggcagcgccccaggcaccagcaccgagcctagtgagcaggagattaaacggatcaacaagatcagaagaagacttgtgaaagacagcaacaccaagaaggccggcaagacaggccccatgaaaaccctgctggttagagtgatgacacccgatctgagagagcggctggaaaacctgagaaagaagcctgaaaatatcccccagcccatcagcaatacatctagagccaacctgaataagctgctgaccgattacaccgaaatgaagaaggcgatcctgcatgtgtactgggaagagttccagaaggaccctgtgggcctgatgagccgggtggcccagcctgccagcaagaagatcgatcagaacaagctgaaacctgagatggacgagaagggcaacctgaccaccgccggctttgcctgctctcagtgtggccagcccctgttcgtgtacaagctggagcaggtgtctgagaagggcaaggcttacaccaactacttcggacggtgcaatgtggccgagcacgaaaagctgatcctgctggcccagctgaagcccgagaaggatagcgacgaagccgtgacatatagcctgggaaagtttgggcagagggccctggatttctacagcattcatgtgaccaaggagtccacccaccccgtgaagcccctggcccagatcgccggaaacagatacgcctccggacctgtgggaaaggccctgagcgacgcatgtatgggcacaatcgcctccttcctgtctaagtaccaggacatcatcatcgaacaccagaaggtggtgaagggcaaccagaagagactggagagcctgcgggagctggccggcaaggaaaacctggaataccctagcgtgaccctgccacctcagcctcacaccaaggagggcgttgatgcctacaacgaagtgatcgcccgggtgcgaatgtgggtgaacctgaacctgtggcagaagctgaagctaagcagagatgatgccaagcctctgctgagactgaagggattcccttcctttcctctggtcgagagacaggccaacgaagtggactggtgggacatggtgtgtaacgtgaagaagctgatcaacgagaaaaaggaggatggcaaggtgttttggcagaatctggctggctacaagagacaggaagccctgagaccatacctgagcagcgaggaagatcggaagaagggaaagaaattcgctcggtaccagctgggcgacctgctgctgcacctggaaaagaagcacggcgaggactggggaaaggtgtacgacgaggcctgggagcggattgacaagaaagtggaaggcctgagcaagcacatcaagctggaagaggaacggagaagcgaggacgcccagagcaaggccgccctgaccgactggctgcgggctaaggccagcttcgtgatcgagggcctgaaggaggccgacaaggacgagttctgcagatgcgagctgaagctgcagaagtggtacggggacctgcggggaaagcccttcgccatcgaagccgagaacagcatcctggacatcagcggcttcagcaagcagtacaactgtgccttcatctggcagaaggacggcgtgaagaagctgaacctgtacctgatcatcaactacttcaagggcggcaagctgcggttcaagaagatcaaacctgaagccttcgaagccaacagattctacaccgtgatcaacaaaaagagcggcgagatcgtgcccatggaggtgaacttcaacttcgacgaccccaacctgatcatcctgcctctggcctttggcaagagacagggcagagaattcatctggaacgacctgctgtccctggaaaccggcagcctgaagctggccaacggaagagtgatcgagaagacactgtacaacagaagaacccggcaggatgagcctgccctgttcgtggccctgaccttcgagcggcgggaggtcctggactcctccaatatcaaaccaatgaacctgatcggcgtggcaagaggcgaaaacatccccgccgtgatcgccctgaccgaccccgagggctgcccactgagccggtttaaggatagcctgggaaacccaacccacatcctgagaatcggcgagagctataaggagaagcagcggaccatccaggccaagaaggaggtggagcagcggagagccggcggctacagccggaagtacgccagcaaagccaagaatctggcagacgatatggtgagaaacaccgctagagatctgctgtactacgccgtgacccaggatgccatgctgatcttcgccaacctgagccggggcttcggccggcagggcaagcggaccttcatggccgagagacagtacacacggatggaggactggctgaccgccaagctggcctacgagggcctgagcaagacctacctgtccaagacactggcccagtacacctccaagacatgcagcaactgtgggtttaccatcaccagcgccgactacgacagggtgctggagaagctgaagaagacagcaacaggctggatgaccacaattaacggcaaggagctgaaggtggagggccagattacctactacaacagatacaagagacagaacgtagtcaaggacctgtccgtcgagctggatagactgagcgaagaatctgtgaacaacgacatctcctcctggacaaagggcagaagcggagaagctctgagcctcctgaagaaaagattctcccatagacccgtgcaggagaagttcgtgtgcctgaactgcggcttcgagacacacgcagccgagcaagccgccctgaacatcgccagatcctggctgttcctgcggagccaggagtacaagaaataccagacaaacaagacaaccggcaacaccgataagagagccttcgtcgagacctggcagtccttttaccggaagaagcttaaggaggtgtggaaacctgccgtgcggtctggcggatctggcggaggctccaccagccccaagaaaaagagaaaagtctaagctgccttctgcggggcttgccttctggccatgcccttcttctctcccttgcacctgtacctcttggtctttgaataaagcctgagtaggaaggctagcaaaaaaaaaaaaaaaaaaaaaaaaaaaaaaaaaaaaaaaaaaaaaaaaaaaaaaaaaaaaaaaaaaaaaaaaaaaaaaaagcccagccggctccccaacctctaccgaggagggcacctctgagtccgccacccccgagagcggccctggcacctccaccgagcccagcgagggcagcgcacccggcagccctgccggcagccccacctccacagaggagggaaccagcaccgagcccagcgaaggcagcgccccaggcaccagcaccgagcctagtgagcaggagattaaacggatcaacaagatcagaagaagacttgtgaaagacagcaacaccaagaaggccggcaagacaggccccatgaaaaccctgctggttagagtgatgacacccgatctgagagagcggctggaaaacctgagaaagaagcctgaaaatatcccccagcccatcagcaatacatctagagccaacctgaataagctgctgaccgattacaccgaaatgaagaaggcgatcctgcatgtgtactgggaagagttccagaaggaccctgtgggcctgatgagccgggtggcccagcctgccagcaagaagatcgatcagaacaagctgaaacctgagatggacgagaagggcaacctgaccaccgccggctttgcctgctctcagtgtggccagcccctgttcgtgtacaagctggagcaggtgtctgagaagggcaaggcttacaccaactacttcggacggtgcaatgtggccgagcacgaaaagctgatcctgctggcccagctgaagcccgagaaggatagcgacgaagccgtgacatatagcctgggaaagtttgggcagagggccctggatttctacagcattcatgtgaccaaggagtccacccaccccgtgaagcccctggcccagatcgccggaaacagatacgcctccggacctgtgggaaaggccctgagcgacgcatgtatgggcacaatcgcctccttcctgtctaagtaccaggacatcatcatcgaacaccagaaggtggtgaagggcaaccagaagagactggagagcctgcgggagctggccggcaaggaaaacctggaataccctagcgtgaccctgccacctcagcctcacaccaaggagggcgttgatgcctacaacgaagtgatcgcccgggtgcgaatgtgggtgaacctgaacctgtggcagaagctgaagctaagcagagatgatgccaagcctctgctgagactgaagggattcccttcctttcctctggtcgagagacaggccaacgaagtggactggtgggacatggtgtgtaacgtgaagaagctgatcaacgagaaaaaggaggatggcaaggtgttttggcagaatctggctggctacaagagacaggaagccctgagaccatacctgagcagcgaggaagatcggaagaagggaaagaaattcgctcggtaccagctgggcgacctgctgctgcacctggaaaagaagcacggcgaggactggggaaaggtgtacgacgaggcctgggagcggattgacaagaaagtggaaggcctgagcaagcacatcaagctggaagaggaacggagaagcgaggacgcccagagcaaggccgccctgaccgactggctgcgggctaaggccagcttcgtgatcgagggcctgaaggaggccgacaaggacgagttctgcagatgcgagctgaagctgcagaagtggtacggggacctgcggggaaagcccttcgccatcgaagccgagaacagcatcctggacatcagcggcttcagcaagcagtacaactgtgccttcatctggcagaaggacggcgtgaagaagctgaacctgtacctgatcatcaactacttcaagggcggcaagctgcggttcaagaagatcaaacctgaagccttcgaagccaacagattctacaccgtgatcaacaaaaagagcggcgagatcgtgcccatggaggtgaacttcaacttcgacgaccccaacctgatcatcctgcctctggcctttggcaagagacagggcagagaattcatctggaacgacctgctgtccctggaaaccggcagcctgaagctggccaacggaagagtgatcgagaagacactgtacaacagaagaacccggcaggatgagcctgccctgttcgtggccctgaccttcgagcggcgggaggtcctggactcctccaatatcaaaccaatgaacctgatcggcgtggcaagaggcgaaaacatccccgccgtgatcgccctgaccgaccccgagggctgcccactgagccggtttaaggatagcctgggaaacccaacccacatcctgagaatcggcgagagctataaggagaagcagcggaccatccaggccaagaaggaggtggagcagcggagagccggcggctacagccggaagtacgccagcaaagccaagaatctggcagacgatatggtgagaaacaccgctagagatctgctgtactacgccgtgacccaggatgccatgctgatcttcgccaacctgagccggggcttcggccggcagggcaagcggaccttcatggccgagagacagtacacacggatggaggactggctgaccgccaagctggcctacgagggcctgagcaagacctacctgtccaagacactggcccagtacacctccaagacatgcagcaactgtgggtttaccatcaccagcgccgactacgacagggtgctggagaagctgaagaagacagcaacaggctggatgaccacaattaacggcaaggagctgaaggtggagggccagattacctactacaacagatacaagagacagaacgtagtcaaggacctgtccgtcgagctggatagactgagcgaagaatctgtgaacaacgacatctcctcctggacaaagggcagaagcggagaagctctgagcctcctgaagaaaagattctcccatagacccgtgcaggagaagttcgtgtgcctgaactgcggcttcgagacacacgcagccgagcaagccgccctgaacatcgccagatcctggctgttcctgcggagccaggagtacaagaaataccagacaaacaagacaaccggcaacaccgataagagagccttcgtcgagacctggcagtccttttaccggaagaagcttaaggaggtgtggaaacctgccgtgcggtctggcggatctggcggaggctccaccagccccaagaaaaagagaaaagtctaagctgccttctgcggggcttgccttctggccatgcccttcttctctcccttgcacctgtacctcttggtctttgaataaagcctgagtaggaaggctagcaaaaaaaaaaaaaaaaaaaaaaaaaaaaaaaaaaaaaaaaaaaaaaaaaaaaaaaaaaaaaaaaaaaaaaaaaaaaaaaa

SEQ ID NO: 9713 - RNA, 8787 nt, synthetic construct
  source 1..8787: mol_type = other RNA
aggaaataagagagaaaagaagagtaagaagaaatataagagccaccatggcccctaagaagaagcgtaaagtgagccggatgaaccacgaccaggagttcgacccccctaaggtgtaccctcccgtccccgccgagaagagaaagcccatccgggtcctgagcctgttcgatggcatcgccaccggtctgctggtgctgaaggacctgggcatccaggtggataggtacattgcctccgaggtgtgcgaggactccatcaccgtgggaatggtgcgtcatcagggcaagatcatgtacgtgggcgacgtgcggagcgtgacacagaagcatatccaggagtggggccctttcgacctggtgatcggcggcagcccttgcaatgacctgagcatcgtgaacccagcccggaagggcctgtacgagggaaccggcagactgttcttcgagttttacagactgctgcacgacgcccggcctaaggaaggcgacgaccggcccttcttttggctgttcgagaatgtggtggccatgggagtcagcgacaagcgggatattagccggttcctggagagcaaccccgtgatgatcgatgccaaggaagtgagcgccgcccaccgggccagatacttctggggcaatctgcctggcatgaacagacccctggccagcaccgtgaacgacaagctggagctgcaggagtgcctggagcacggccggatcgccaagttcagcaaggtgagaaccatcaccacccgaagcaacagcatcaaacaaggcaaggaccagcactttcctgtgttcatgaacgagaaggaggacatcctgtggtgtaccgagatggagagagtgttcgggttcccagtccactacacagatgtcagcaacatgtctagactggccagacagagactgctgggaagaagctggtccgtccctgtgatcagacacctgttcgcccctctgaaggagtacttcgcctgcgtgagcagcggcaacagcaacgccaacagccggggccccagcttctctagcggcctggtgccactgtccctgagagggagccacatgggccccatggagatctacaaaaccgtgagcgcctggaagcggcagcctgtgcgcgtgctgagcctgtttcggaatatcgataaagtcctgaaaagcctgggattcctggagagcggctctggctccggcggtggcaccctgaagtacgtggaggatgtgacaaacgtggtcagacgggatgtggagaagtggggccccttcgatctggtgtacggcagcacccaacccctgggcagctcttgtgaccggtgccctggctggtacatgtttcagttccaccggatcctgcagtacgccctgccgagacaggagtcccagcggccattcttttggattttcatggacaacttgctgctgaccgaggatgaccaggaaactaccactcggttcctgcagaccgaagccgtgaccctgcaggacgtgagaggccgggactaccagaacgccatgcgggtgtggtccaacatccctggactgaaaagcaagcacgcacctctgacccctaaagaagaggagtacctgcaggcccaggtgcggagcagaagcaagctggacgcccctaaggtggatctgctggtgaagaattgcctcctgcccctgagagagtacttcaagtatttcagccagaatagtctgcccctgggaggcagcggcggcggccaggaccccagcgccgagcagctgagcgaggaggtgcccgtggtgttcgaggagctgcccgtggtgttcgaggacgtggccgtgtacttcaccagggaggagtggggcatgctggacaagaggcagaaggagctgtacagggacgtgatgaggatgaactacgagctgctggccagcctgggccccgccgccgccaagcccgacctgatcagcaagctggagaggagggccgccccctggatcggcggcccaagcagcggcgcccctcctcccagcggcggcaggcggcccaagcagcggcgcccctcctcccagcggcggcagcccagccggctccccaacctctaccgaggagggcacctctgagtccgccacccccgagagcggccctggcacctccaccgagcccagcgagggcagcgcacccggcagccctgccggcagccccacctccacagaggagggaaccagcaccgagcccagcgaaggcagcgccccaggcaccagcaccgagcctagtgagcaggagattaaacggatcaacaagatcagaagaagacttgtgaaagacagcaacaccaagaaggccggcaagacaggccccatgaaaaccctgctggttagagtgatgacacccgatctgagagagcggctggaaaacctgagaaagaagcctgaaaatatcccccagcccatcagcaatacatctagagccaacctgaataagctgctgaccgattacaccgaaatgaagaaggcgatcctgcatgtgtactgggaagagttccagaaggaccctgtgggcctgatgagccgggtggcccagcctgccagcaagaagatcgatcagaacaagctgaaacctgagatggacgagaagggcaacctgaccaccgccggctttgcctgctctcagtgtggccagcccctgttcgtgtacaagctggagcaggtgtctgagaagggcaaggcttacaccaactacttcggacggtgcaatgtggccgagcacgaaaagctgatcctgctggcccagctgaagcccgagaaggatagcgacgaagccgtgacatatagcctgggaaagtttgggcagagggccctggatttctacagcattcatgtgaccaaggagtccacccaccccgtgaagcccctggcccagatcgccggaaacagatacgcctccggacctgtgggaaaggccctgagcgacgcatgtatgggcacaatcgcctccttcctgtctaagtaccaggacatcatcatcgaacaccagaaggtggtgaagggcaaccagaagagactggagagcctgcgggagctggccggcaaggaaaacctggaataccctagcgtgaccctgccacctcagcctcacaccaaggagggcgttgatgcctacaacgaagtgatcgcccgggtgcgaatgtgggtgaacctgaacctgtggcagaagctgaagctaagcagagatgatgccaagcctctgctgagactgaagggattcccttcctttcctctggtcgagagacaggccaacgaagtggactggtgggacatggtgtgtaacgtgaagaagctgatcaacgagaaaaaggaggatggcaaggtgttttggcagaatctggctggctacaagagacaggaagccctgagaccatacctgagcagcgaggaagatcggaagaagggaaagaaattcgctcggtaccagctgggcgacctgctgctgcacctggaaaagaagcacggcgaggactggggaaaggtgtacgacgaggcctgggagcggattgacaagaaagtggaaggcctgagcaagcacatcaagctggaagaggaacggagaagcgaggacgcccagagcaaggccgccctgaccgactggctgcgggctaaggccagcttcgtgatcgagggcctgaaggaggccgacaaggacgagttctgcagatgcgagctgaagctgcagaagtggtacggggacctgcggggaaagcccttcgccatcgaagccgagaacagcatcctggacatcagcggcttcagcaagcagtacaactgtgccttcatctggcagaaggacggcgtgaagaagctgaacctgtacctgatcatcaactacttcaagggcggcaagctgcggttcaagaagatcaaacctgaagccttcgaagccaacagattctacaccgtgatcaacaaaaagagcggcgagatcgtgcccatggaggtgaacttcaacttcgacgaccccaacctgatcatcctgcctctggcctttggcaagagacagggcagagaattcatctggaacgacctgctgtccctggaaaccggcagcctgaagctggccaacggaagagtgatcgagaagacactgtacaacagaagaacccggcaggatgagcctgccctgttcgtggccctgaccttcgagcggcgggaggtcctggactcctccaatatcaaaccaatgaacctgatcggcgtggcaagaggcgaaaacatccccgccgtgatcgccctgaccgaccccgagggctgcccactgagccggtttaaggatagcctgggaaacccaacccacatcctgagaatcggcgagagctataaggagaagcagcggaccatccaggccaagaaggaggtggagcagcggagagccggcggctacagccggaagtacgccagcaaagccaagaatctggcagacgatatggtgagaaacaccgctagagatctgctgtactacgccgtgacccaggatgccatgctgatcttcgccaacctgagccggggcttcggccggcagggcaagcggaccttcatggccgagagacagtacacacggatggaggactggctgaccgccaagctggcctacgagggcctgagcaagacctacctgtccaagacactggcccagtacacctccaagacatgcagcaactgtgggtttaccatcaccagcgccgactacgacagggtgctggagaagctgaagaagacagcaacaggctggatgaccacaattaacggcaaggagctgaaggtggagggccagattacctactacaacagatacaagagacagaacgtagtcaaggacctgtccgtcgagctggatagactgagcgaagaatctgtgaacaacgacatctcctcctggacaaagggcagaagcggagaagctctgagcctcctgaagaaaagattctcccatagacccgtgcaggagaagttcgtgtgcctgaactgcggcttcgagacacacgcagccgagcaagccgccctgaacatcgccagatcctggctgttcctgcggagccaggagtacaagaaataccagacaaacaagacaaccggcaacaccgataagagagccttcgtcgagacctggcagtccttttaccggaagaagcttaaggaggtgtggaaacctgccgtgcggtctggcggatctggcggaggctccaccagccccaagaaaaagagaaaagtctaagctgccttctgcggggcttgccttctggccatgcccttcttctctcccttgcacctgtacctcttggtctttgaataaagcctgagtaggaaggctagcaaaaaaaaaaaaaaaaaaaaaaaaaaaaaaaaaaaaaaaaaaaaaaaaaaaaaaaaaaaaaaaaaaaaaaaaaaaaaaaagcccagccggctccccaacctctaccgaggagggcacctctgagtccgccacccccgagagcggccctggcacctccaccgagcccagcgagggcagcgcacccggcagccctgccggcagccccacctccacagaggagggaaccagcaccgagcccagcgaaggcagcgccccaggcaccagcaccgagcctagtgagcaggagattaaacggatcaacaagatcagaagaagacttgtgaaagacagcaacaccaagaaggccggcaagacaggccccatgaaaaccctgctggttagagtgatgacacccgatctgagagagcggctggaaaacctgagaaagaagcctgaaaatatcccccagcccatcagcaatacatctagagccaacctgaataagctgctgaccgattacaccgaaatgaagaaggcgatcctgcatgtgtactgggaagagttccagaaggaccctgtgggcctgatgagccgggtggcccagcctgccagcaagaagatcgatcagaacaagctgaaacctgagatggacgagaagggcaacctgaccaccgccggctttgcctgctctcagtgtggccagcccctgttcgtgtacaagctggagcaggtgtctgagaagggcaaggcttacaccaactacttcggacggtgcaatgtggccgagcacgaaaagctgatcctgctggcccagctgaagcccgagaaggatagcgacgaagccgtgacatatagcctgggaaagtttgggcagagggccctggatttctacagcattcatgtgaccaaggagtccacccaccccgtgaagcccctggcccagatcgccggaaacagatacgcctccggacctgtgggaaaggccctgagcgacgcatgtatgggcacaatcgcctccttcctgtctaagtaccaggacatcatcatcgaacaccagaaggtggtgaagggcaaccagaagagactggagagcctgcgggagctggccggcaaggaaaacctggaataccctagcgtgaccctgccacctcagcctcacaccaaggagggcgttgatgcctacaacgaagtgatcgcccgggtgcgaatgtgggtgaacctgaacctgtggcagaagctgaagctaagcagagatgatgccaagcctctgctgagactgaagggattcccttcctttcctctggtcgagagacaggccaacgaagtggactggtgggacatggtgtgtaacgtgaagaagctgatcaacgagaaaaaggaggatggcaaggtgttttggcagaatctggctggctacaagagacaggaagccctgagaccatacctgagcagcgaggaagatcggaagaagggaaagaaattcgctcggtaccagctgggcgacctgctgctgcacctggaaaagaagcacggcgaggactggggaaaggtgtacgacgaggcctgggagcggattgacaagaaagtggaaggcctgagcaagcacatcaagctggaagaggaacggagaagcgaggacgcccagagcaaggccgccctgaccgactggctgcgggctaaggccagcttcgtgatcgagggcctgaaggaggccgacaaggacgagttctgcagatgcgagctgaagctgcagaagtggtacggggacctgcggggaaagcccttcgccatcgaagccgagaacagcatcctggacatcagcggcttcagcaagcagtacaactgtgccttcatctggcagaaggacggcgtgaagaagctgaacctgtacctgatcatcaactacttcaagggcggcaagctgcggttcaagaagatcaaacctgaagccttcgaagccaacagattctacaccgtgatcaacaaaaagagcggcgagatcgtgcccatggaggtgaacttcaacttcgacgaccccaacctgatcatcctgcctctggcctttggcaagagacagggcagagaattcatctggaacgacctgctgtccctggaaaccggcagcctgaagctggccaacggaagagtgatcgagaagacactgtacaacagaagaacccggcaggatgagcctgccctgttcgtggccctgaccttcgagcggcgggaggtcctggactcctccaatatcaaaccaatgaacctgatcggcgtggcaagaggcgaaaacatccccgccgtgatcgccctgaccgaccccgagggctgcccactgagccggtttaaggatagcctgggaaacccaacccacatcctgagaatcggcgagagctataaggagaagcagcggaccatccaggccaagaaggaggtggagcagcggagagccggcggctacagccggaagtacgccagcaaagccaagaatctggcagacgatatggtgagaaacaccgctagagatctgctgtactacgccgtgacccaggatgccatgctgatcttcgccaacctgagccggggcttcggccggcagggcaagcggaccttcatggccgagagacagtacacacggatggaggactggctgaccgccaagctggcctacgagggcctgagcaagacctacctgtccaagacactggcccagtacacctccaagacatgcagcaactgtgggtttaccatcaccagcgccgactacgacagggtgctggagaagctgaagaagacagcaacaggctggatgaccacaattaacggcaaggagctgaaggtggagggccagattacctactacaacagatacaagagacagaacgtagtcaaggacctgtccgtcgagctggatagactgagcgaagaatctgtgaacaacgacatctcctcctggacaaagggcagaagcggagaagctctgagcctcctgaagaaaagattctcccatagacccgtgcaggagaagttcgtgtgcctgaactgcggcttcgagacacacgcagccgagcaagccgccctgaacatcgccagatcctggctgttcctgcggagccaggagtacaagaaataccagacaaacaagacaaccggcaacaccgataagagagccttcgtcgagacctggcagtccttttaccggaagaagcttaaggaggtgtggaaacctgccgtgcggtctggcggatctggcggaggctccaccagccccaagaaaaagagaaaagtctaagctgccttctgcggggcttgccttctggccatgcccttcttctctcccttgcacctgtacctcttggtctttgaataaagcctgagtaggaaggctagcaaaaaaaaaaaaaaaaaaaaaaaaaaaaaaaaaaaaaaaaaaaaaaaaaaaaaaaaaaaaaaaaaaaaaaaaaaaaaaaa

SEQ ID NO: 9714 - RNA, 8787 nt, synthetic construct
  source 1..8787: mol_type = other RNA
aggaaataagagagaaaagaagagtaagaagaaatataagagccaccatggcccctaagaagaagcgtaaagtgagccggatgaaccacgaccaggagttcgacccccctaaggtgtaccctcccgtccccgccgagaagagaaagcccatccgggtcctgagcctgttcgatggcatcgccaccggtctgctggtgctgaaggacctgggcatccaggtggataggtacattgcctccgaggtgtgcgaggactccatcaccgtgggaatggtgcgtcatcagggcaagatcatgtacgtgggcgacgtgcggagcgtgacacagaagcatatccaggagtggggccctttcgacctggtgatcggcggcagcccttgcaatgacctgagcatcgtgaacccagcccggaagggcctgtacgagggaaccggcagactgttcttcgagttttacagactgctgcacgacgcccggcctaaggaaggcgacgaccggcccttcttttggctgttcgagaatgtggtggccatgggagtcagcgacaagcgggatattagccggttcctggagagcaaccccgtgatgatcgatgccaaggaagtgagcgccgcccaccgggccagatacttctggggcaatctgcctggcatgaacagacccctggccagcaccgtgaacgacaagctggagctgcaggagtgcctggagcacggccggatcgccaagttcagcaaggtgagaaccatcaccacccgaagcaacagcatcaaacaaggcaaggaccagcactttcctgtgttcatgaacgagaaggaggacatcctgtggtgtaccgagatggagagagtgttcgggttcccagtccactacacagatgtcagcaacatgtctagactggccagacagagactgctgggaagaagctggtccgtccctgtgatcagacacctgttcgcccctctgaaggagtacttcgcctgcgtgagcagcggcaacagcaacgccaacagccggggccccagcttctctagcggcctggtgccactgtccctgagagggagccacatgggccccatggagatctacaaaaccgtgagcgcctggaagcggcagcctgtgcgcgtgctgagcctgtttcggaatatcgataaagtcctgaaaagcctgggattcctggagagcggctctggctccggcggtggcaccctgaagtacgtggaggatgtgacaaacgtggtcagacgggatgtggagaagtggggccccttcgatctggtgtacggcagcacccaacccctgggcagctcttgtgaccggtgccctggctggtacatgtttcagttccaccggatcctgcagtacgccctgccgagacaggagtcccagcggccattcttttggattttcatggacaacttgctgctgaccgaggatgaccaggaaactaccactcggttcctgcagaccgaagccgtgaccctgcaggacgtgagaggccgggactaccagaacgccatgcgggtgtggtccaacatccctggactgaaaagcaagcacgcacctctgacccctaaagaagaggagtacctgcaggcccaggtgcggagcagaagcaagctggacgcccctaaggtggatctgctggtgaagaattgcctcctgcccctgagagagtacttcaagtatttcagccagaatagtctgcccctgggaggcagcggcggcggcctgctgaccttcgaggacgtggccctgagcttcaccgaggaggagtggcagctgctggaccccacccagaagatcctgtacaacgacgtgatgcaggagaactacgagaccgtgatcagcctgggcctgaagctgaagaacgacaccggcaacgaccagcccatcagcctgagcaccctggagatccagggcagcggctgcaaggtgctgaggaaggccagggtgaaggtggcccagaagaccggcggcccaagcagcggcgcccctcctcccagcggcggcaggcggcccaagcagcggcgcccctcctcccagcggcggcagcccagccggctccccaacctctaccgaggagggcacctctgagtccgccacccccgagagcggccctggcacctccaccgagcccagcgagggcagcgcacccggcagccctgccggcagccccacctccacagaggagggaaccagcaccgagcccagcgaaggcagcgccccaggcaccagcaccgagcctagtgagcaggagattaaacggatcaacaagatcagaagaagacttgtgaaagacagcaacaccaagaaggccggcaagacaggccccatgaaaaccctgctggttagagtgatgacacccgatctgagagagcggctggaaaacctgagaaagaagcctgaaaatatcccccagcccatcagcaatacatctagagccaacctgaataagctgctgaccgattacaccgaaatgaagaaggcgatcctgcatgtgtactgggaagagttccagaaggaccctgtgggcctgatgagccgggtggcccagcctgccagcaagaagatcgatcagaacaagctgaaacctgagatggacgagaagggcaacctgaccaccgccggctttgcctgctctcagtgtggccagcccctgttcgtgtacaagctggagcaggtgtctgagaagggcaaggcttacaccaactacttcggacggtgcaatgtggccgagcacgaaaagctgatcctgctggcccagctgaagcccgagaaggatagcgacgaagccgtgacatatagcctgggaaagtttgggcagagggccctggatttctacagcattcatgtgaccaaggagtccacccaccccgtgaagcccctggcccagatcgccggaaacagatacgcctccggacctgtgggaaaggccctgagcgacgcatgtatgggcacaatcgcctccttcctgtctaagtaccaggacatcatcatcgaacaccagaaggtggtgaagggcaaccagaagagactggagagcctgcgggagctggccggcaaggaaaacctggaataccctagcgtgaccctgccacctcagcctcacaccaaggagggcgttgatgcctacaacgaagtgatcgcccgggtgcgaatgtgggtgaacctgaacctgtggcagaagctgaagctaagcagagatgatgccaagcctctgctgagactgaagggattcccttcctttcctctggtcgagagacaggccaacgaagtggactggtgggacatggtgtgtaacgtgaagaagctgatcaacgagaaaaaggaggatggcaaggtgttttggcagaatctggctggctacaagagacaggaagccctgagaccatacctgagcagcgaggaagatcggaagaagggaaagaaattcgctcggtaccagctgggcgacctgctgctgcacctggaaaagaagcacggcgaggactggggaaaggtgtacgacgaggcctgggagcggattgacaagaaagtggaaggcctgagcaagcacatcaagctggaagaggaacggagaagcgaggacgcccagagcaaggccgccctgaccgactggctgcgggctaaggccagcttcgtgatcgagggcctgaaggaggccgacaaggacgagttctgcagatgcgagctgaagctgcagaagtggtacggggacctgcggggaaagcccttcgccatcgaagccgagaacagcatcctggacatcagcggcttcagcaagcagtacaactgtgccttcatctggcagaaggacggcgtgaagaagctgaacctgtacctgatcatcaactacttcaagggcggcaagctgcggttcaagaagatcaaacctgaagccttcgaagccaacagattctacaccgtgatcaacaaaaagagcggcgagatcgtgcccatggaggtgaacttcaacttcgacgaccccaacctgatcatcctgcctctggcctttggcaagagacagggcagagaattcatctggaacgacctgctgtccctggaaaccggcagcctgaagctggccaacggaagagtgatcgagaagacactgtacaacagaagaacccggcaggatgagcctgccctgttcgtggccctgaccttcgagcggcgggaggtcctggactcctccaatatcaaaccaatgaacctgatcggcgtggcaagaggcgaaaacatccccgccgtgatcgccctgaccgaccccgagggctgcccactgagccggtttaaggatagcctgggaaacccaacccacatcctgagaatcggcgagagctataaggagaagcagcggaccatccaggccaagaaggaggtggagcagcggagagccggcggctacagccggaagtacgccagcaaagccaagaatctggcagacgatatggtgagaaacaccgctagagatctgctgtactacgccgtgacccaggatgccatgctgatcttcgccaacctgagccggggcttcggccggcagggcaagcggaccttcatggccgagagacagtacacacggatggaggactggctgaccgccaagctggcctacgagggcctgagcaagacctacctgtccaagacactggcccagtacacctccaagacatgcagcaactgtgggtttaccatcaccagcgccgactacgacagggtgctggagaagctgaagaagacagcaacaggctggatgaccacaattaacggcaaggagctgaaggtggagggccagattacctactacaacagatacaagagacagaacgtagtcaaggacctgtccgtcgagctggatagactgagcgaagaatctgtgaacaacgacatctcctcctggacaaagggcagaagcggagaagctctgagcctcctgaagaaaagattctcccatagacccgtgcaggagaagttcgtgtgcctgaactgcggcttcgagacacacgcagccgagcaagccgccctgaacatcgccagatcctggctgttcctgcggagccaggagtacaagaaataccagacaaacaagacaaccggcaacaccgataagagagccttcgtcgagacctggcagtccttttaccggaagaagcttaaggaggtgtggaaacctgccgtgcggtctggcggatctggcggaggctccaccagccccaagaaaaagagaaaagtctaagctgccttctgcggggcttgccttctggccatgcccttcttctctcccttgcacctgtacctcttggtctttgaataaagcctgagtaggaaggctagcaaaaaaaaaaaaaaaaaaaaaaaaaaaaaaaaaaaaaaaaaaaaaaaaaaaaaaaaaaaaaaaaaaaaaaaaaaaaaaaagcccagccggctccccaacctctaccgaggagggcacctctgagtccgccacccccgagagcggccctggcacctccaccgagcccagcgagggcagcgcacccggcagccctgccggcagccccacctccacagaggagggaaccagcaccgagcccagcgaaggcagcgccccaggcaccagcaccgagcctagtgagcaggagattaaacggatcaacaagatcagaagaagacttgtgaaagacagcaacaccaagaaggccggcaagacaggccccatgaaaaccctgctggttagagtgatgacacccgatctgagagagcggctggaaaacctgagaaagaagcctgaaaatatcccccagcccatcagcaatacatctagagccaacctgaataagctgctgaccgattacaccgaaatgaagaaggcgatcctgcatgtgtactgggaagagttccagaaggaccctgtgggcctgatgagccgggtggcccagcctgccagcaagaagatcgatcagaacaagctgaaacctgagatggacgagaagggcaacctgaccaccgccggctttgcctgctctcagtgtggccagcccctgttcgtgtacaagctggagcaggtgtctgagaagggcaaggcttacaccaactacttcggacggtgcaatgtggccgagcacgaaaagctgatcctgctggcccagctgaagcccgagaaggatagcgacgaagccgtgacatatagcctgggaaagtttgggcagagggccctggatttctacagcattcatgtgaccaaggagtccacccaccccgtgaagcccctggcccagatcgccggaaacagatacgcctccggacctgtgggaaaggccctgagcgacgcatgtatgggcacaatcgcctccttcctgtctaagtaccaggacatcatcatcgaacaccagaaggtggtgaagggcaaccagaagagactggagagcctgcgggagctggccggcaaggaaaacctggaataccctagcgtgaccctgccacctcagcctcacaccaaggagggcgttgatgcctacaacgaagtgatcgcccgggtgcgaatgtgggtgaacctgaacctgtggcagaagctgaagctaagcagagatgatgccaagcctctgctgagactgaagggattcccttcctttcctctggtcgagagacaggccaacgaagtggactggtgggacatggtgtgtaacgtgaagaagctgatcaacgagaaaaaggaggatggcaaggtgttttggcagaatctggctggctacaagagacaggaagccctgagaccatacctgagcagcgaggaagatcggaagaagggaaagaaattcgctcggtaccagctgggcgacctgctgctgcacctggaaaagaagcacggcgaggactggggaaaggtgtacgacgaggcctgggagcggattgacaagaaagtggaaggcctgagcaagcacatcaagctggaagaggaacggagaagcgaggacgcccagagcaaggccgccctgaccgactggctgcgggctaaggccagcttcgtgatcgagggcctgaaggaggccgacaaggacgagttctgcagatgcgagctgaagctgcagaagtggtacggggacctgcggggaaagcccttcgccatcgaagccgagaacagcatcctggacatcagcggcttcagcaagcagtacaactgtgccttcatctggcagaaggacggcgtgaagaagctgaacctgtacctgatcatcaactacttcaagggcggcaagctgcggttcaagaagatcaaacctgaagccttcgaagccaacagattctacaccgtgatcaacaaaaagagcggcgagatcgtgcccatggaggtgaacttcaacttcgacgaccccaacctgatcatcctgcctctggcctttggcaagagacagggcagagaattcatctggaacgacctgctgtccctggaaaccggcagcctgaagctggccaacggaagagtgatcgagaagacactgtacaacagaagaacccggcaggatgagcctgccctgttcgtggccctgaccttcgagcggcgggaggtcctggactcctccaatatcaaaccaatgaacctgatcggcgtggcaagaggcgaaaacatccccgccgtgatcgccctgaccgaccccgagggctgcccactgagccggtttaaggatagcctgggaaacccaacccacatcctgagaatcggcgagagctataaggagaagcagcggaccatccaggccaagaaggaggtggagcagcggagagccggcggctacagccggaagtacgccagcaaagccaagaatctggcagacgatatggtgagaaacaccgctagagatctgctgtactacgccgtgacccaggatgccatgctgatcttcgccaacctgagccggggcttcggccggcagggcaagcggaccttcatggccgagagacagtacacacggatggaggactggctgaccgccaagctggcctacgagggcctgagcaagacctacctgtccaagacactggcccagtacacctccaagacatgcagcaactgtgggtttaccatcaccagcgccgactacgacagggtgctggagaagctgaagaagacagcaacaggctggatgaccacaattaacggcaaggagctgaaggtggagggccagattacctactacaacagatacaagagacagaacgtagtcaaggacctgtccgtcgagctggatagactgagcgaagaatctgtgaacaacgacatctcctcctggacaaagggcagaagcggagaagctctgagcctcctgaagaaaagattctcccatagacccgtgcaggagaagttcgtgtgcctgaactgcggcttcgagacacacgcagccgagcaagccgccctgaacatcgccagatcctggctgttcctgcggagccaggagtacaagaaataccagacaaacaagacaaccggcaacaccgataagagagccttcgtcgagacctggcagtccttttaccggaagaagcttaaggaggtgtggaaacctgccgtgcggtctggcggatctggcggaggctccaccagccccaagaaaaagagaaaagtctaagctgccttctgcggggcttgccttctggccatgcccttcttctctcccttgcacctgtacctcttggtctttgaataaagcctgagtaggaaggctagcaaaaaaaaaaaaaaaaaaaaaaaaaaaaaaaaaaaaaaaaaaaaaaaaaaaaaaaaaaaaaaaaaaaaaaaaaaaaaaaa

SEQ ID NO: 9715 - RNA, 8787 nt, synthetic construct
  source 1..8787: mol_type = other RNA
aggaaataagagagaaaagaagagtaagaagaaatataagagccaccatggcccctaagaagaagcgtaaagtgagccggatgaaccacgaccaggagttcgacccccctaaggtgtaccctcccgtccccgccgagaagagaaagcccatccgggtcctgagcctgttcgatggcatcgccaccggtctgctggtgctgaaggacctgggcatccaggtggataggtacattgcctccgaggtgtgcgaggactccatcaccgtgggaatggtgcgtcatcagggcaagatcatgtacgtgggcgacgtgcggagcgtgacacagaagcatatccaggagtggggccctttcgacctggtgatcggcggcagcccttgcaatgacctgagcatcgtgaacccagcccggaagggcctgtacgagggaaccggcagactgttcttcgagttttacagactgctgcacgacgcccggcctaaggaaggcgacgaccggcccttcttttggctgttcgagaatgtggtggccatgggagtcagcgacaagcgggatattagccggttcctggagagcaaccccgtgatgatcgatgccaaggaagtgagcgccgcccaccgggccagatacttctggggcaatctgcctggcatgaacagacccctggccagcaccgtgaacgacaagctggagctgcaggagtgcctggagcacggccggatcgccaagttcagcaaggtgagaaccatcaccacccgaagcaacagcatcaaacaaggcaaggaccagcactttcctgtgttcatgaacgagaaggaggacatcctgtggtgtaccgagatggagagagtgttcgggttcccagtccactacacagatgtcagcaacatgtctagactggccagacagagactgctgggaagaagctggtccgtccctgtgatcagacacctgttcgcccctctgaaggagtacttcgcctgcgtgagcagcggcaacagcaacgccaacagccggggccccagcttctctagcggcctggtgccactgtccctgagagggagccacatgggccccatggagatctacaaaaccgtgagcgcctggaagcggcagcctgtgcgcgtgctgagcctgtttcggaatatcgataaagtcctgaaaagcctgggattcctggagagcggctctggctccggcggtggcaccctgaagtacgtggaggatgtgacaaacgtggtcagacgggatgtggagaagtggggccccttcgatctggtgtacggcagcacccaacccctgggcagctcttgtgaccggtgccctggctggtacatgtttcagttccaccggatcctgcagtacgccctgccgagacaggagtcccagcggccattcttttggattttcatggacaacttgctgctgaccgaggatgaccaggaaactaccactcggttcctgcagaccgaagccgtgaccctgcaggacgtgagaggccgggactaccagaacgccatgcgggtgtggtccaacatccctggactgaaaagcaagcacgcacctctgacccctaaagaagaggagtacctgcaggcccaggtgcggagcagaagcaagctggacgcccctaaggtggatctgctggtgaagaattgcctcctgcccctgagagagtacttcaagtatttcagccagaatagtctgcccctgggaggcagcggcggcggcagggccgaggaggccgtgaccttcaaggacgtggccgtggtgttcaccgaggaggagctgcagctgctggacctggcccagaggaagctgtacagggacgtgatgctggagaacttcaggaacctgctgagcgtgggccaccagcccttccacggcgacaccttccacttcctgagggaggagaagttctgggtgatggagaccaccagccagagggagggcaacagcggcggcaagatccagggcggcccaagcagcggcgcccctcctcccagcggcggcaggcggcccaagcagcggcgcccctcctcccagcggcggcagcccagccggctccccaacctctaccgaggagggcacctctgagtccgccacccccgagagcggccctggcacctccaccgagcccagcgagggcagcgcacccggcagccctgccggcagccccacctccacagaggagggaaccagcaccgagcccagcgaaggcagcgccccaggcaccagcaccgagcctagtgagcaggagattaaacggatcaacaagatcagaagaagacttgtgaaagacagcaacaccaagaaggccggcaagacaggccccatgaaaaccctgctggttagagtgatgacacccgatctgagagagcggctggaaaacctgagaaagaagcctgaaaatatcccccagcccatcagcaatacatctagagccaacctgaataagctgctgaccgattacaccgaaatgaagaaggcgatcctgcatgtgtactgggaagagttccagaaggaccctgtgggcctgatgagccgggtggcccagcctgccagcaagaagatcgatcagaacaagctgaaacctgagatggacgagaagggcaacctgaccaccgccggctttgcctgctctcagtgtggccagcccctgttcgtgtacaagctggagcaggtgtctgagaagggcaaggcttacaccaactacttcggacggtgcaatgtggccgagcacgaaaagctgatcctgctggcccagctgaagcccgagaaggatagcgacgaagccgtgacatatagcctgggaaagtttgggcagagggccctggatttctacagcattcatgtgaccaaggagtccacccaccccgtgaagcccctggcccagatcgccggaaacagatacgcctccggacctgtgggaaaggccctgagcgacgcatgtatgggcacaatcgcctccttcctgtctaagtaccaggacatcatcatcgaacaccagaaggtggtgaagggcaaccagaagagactggagagcctgcgggagctggccggcaaggaaaacctggaataccctagcgtgaccctgccacctcagcctcacaccaaggagggcgttgatgcctacaacgaagtgatcgcccgggtgcgaatgtgggtgaacctgaacctgtggcagaagctgaagctaagcagagatgatgccaagcctctgctgagactgaagggattcccttcctttcctctggtcgagagacaggccaacgaagtggactggtgggacatggtgtgtaacgtgaagaagctgatcaacgagaaaaaggaggatggcaaggtgttttggcagaatctggctggctacaagagacaggaagccctgagaccatacctgagcagcgaggaagatcggaagaagggaaagaaattcgctcggtaccagctgggcgacctgctgctgcacctggaaaagaagcacggcgaggactggggaaaggtgtacgacgaggcctgggagcggattgacaagaaagtggaaggcctgagcaagcacatcaagctggaagaggaacggagaagcgaggacgcccagagcaaggccgccctgaccgactggctgcgggctaaggccagcttcgtgatcgagggcctgaaggaggccgacaaggacgagttctgcagatgcgagctgaagctgcagaagtggtacggggacctgcggggaaagcccttcgccatcgaagccgagaacagcatcctggacatcagcggcttcagcaagcagtacaactgtgccttcatctggcagaaggacggcgtgaagaagctgaacctgtacctgatcatcaactacttcaagggcggcaagctgcggttcaagaagatcaaacctgaagccttcgaagccaacagattctacaccgtgatcaacaaaaagagcggcgagatcgtgcccatggaggtgaacttcaacttcgacgaccccaacctgatcatcctgcctctggcctttggcaagagacagggcagagaattcatctggaacgacctgctgtccctggaaaccggcagcctgaagctggccaacggaagagtgatcgagaagacactgtacaacagaagaacccggcaggatgagcctgccctgttcgtggccctgaccttcgagcggcgggaggtcctggactcctccaatatcaaaccaatgaacctgatcggcgtggcaagaggcgaaaacatccccgccgtgatcgccctgaccgaccccgagggctgcccactgagccggtttaaggatagcctgggaaacccaacccacatcctgagaatcggcgagagctataaggagaagcagcggaccatccaggccaagaaggaggtggagcagcggagagccggcggctacagccggaagtacgccagcaaagccaagaatctggcagacgatatggtgagaaacaccgctagagatctgctgtactacgccgtgacccaggatgccatgctgatcttcgccaacctgagccggggcttcggccggcagggcaagcggaccttcatggccgagagacagtacacacggatggaggactggctgaccgccaagctggcctacgagggcctgagcaagacctacctgtccaagacactggcccagtacacctccaagacatgcagcaactgtgggtttaccatcaccagcgccgactacgacagggtgctggagaagctgaagaagacagcaacaggctggatgaccacaattaacggcaaggagctgaaggtggagggccagattacctactacaacagatacaagagacagaacgtagtcaaggacctgtccgtcgagctggatagactgagcgaagaatctgtgaacaacgacatctcctcctggacaaagggcagaagcggagaagctctgagcctcctgaagaaaagattctcccatagacccgtgcaggagaagttcgtgtgcctgaactgcggcttcgagacacacgcagccgagcaagccgccctgaacatcgccagatcctggctgttcctgcggagccaggagtacaagaaataccagacaaacaagacaaccggcaacaccgataagagagccttcgtcgagacctggcagtccttttaccggaagaagcttaaggaggtgtggaaacctgccgtgcggtctggcggatctggcggaggctccaccagccccaagaaaaagagaaaagtctaagctgccttctgcggggcttgccttctggccatgcccttcttctctcccttgcacctgtacctcttggtctttgaataaagcctgagtaggaaggctagcaaaaaaaaaaaaaaaaaaaaaaaaaaaaaaaaaaaaaaaaaaaaaaaaaaaaaaaaaaaaaaaaaaaaaaaaaaaaaaaagcccagccggctccccaacctctaccgaggagggcacctctgagtccgccacccccgagagcggccctggcacctccaccgagcccagcgagggcagcgcacccggcagccctgccggcagccccacctccacagaggagggaaccagcaccgagcccagcgaaggcagcgccccaggcaccagcaccgagcctagtgagcaggagattaaacggatcaacaagatcagaagaagacttgtgaaagacagcaacaccaagaaggccggcaagacaggccccatgaaaaccctgctggttagagtgatgacacccgatctgagagagcggctggaaaacctgagaaagaagcctgaaaatatcccccagcccatcagcaatacatctagagccaacctgaataagctgctgaccgattacaccgaaatgaagaaggcgatcctgcatgtgtactgggaagagttccagaaggaccctgtgggcctgatgagccgggtggcccagcctgccagcaagaagatcgatcagaacaagctgaaacctgagatggacgagaagggcaacctgaccaccgccggctttgcctgctctcagtgtggccagcccctgttcgtgtacaagctggagcaggtgtctgagaagggcaaggcttacaccaactacttcggacggtgcaatgtggccgagcacgaaaagctgatcctgctggcccagctgaagcccgagaaggatagcgacgaagccgtgacatatagcctgggaaagtttgggcagagggccctggatttctacagcattcatgtgaccaaggagtccacccaccccgtgaagcccctggcccagatcgccggaaacagatacgcctccggacctgtgggaaaggccctgagcgacgcatgtatgggcacaatcgcctccttcctgtctaagtaccaggacatcatcatcgaacaccagaaggtggtgaagggcaaccagaagagactggagagcctgcgggagctggccggcaaggaaaacctggaataccctagcgtgaccctgccacctcagcctcacaccaaggagggcgttgatgcctacaacgaagtgatcgcccgggtgcgaatgtgggtgaacctgaacctgtggcagaagctgaagctaagcagagatgatgccaagcctctgctgagactgaagggattcccttcctttcctctggtcgagagacaggccaacgaagtggactggtgggacatggtgtgtaacgtgaagaagctgatcaacgagaaaaaggaggatggcaaggtgttttggcagaatctggctggctacaagagacaggaagccctgagaccatacctgagcagcgaggaagatcggaagaagggaaagaaattcgctcggtaccagctgggcgacctgctgctgcacctggaaaagaagcacggcgaggactggggaaaggtgtacgacgaggcctgggagcggattgacaagaaagtggaaggcctgagcaagcacatcaagctggaagaggaacggagaagcgaggacgcccagagcaaggccgccctgaccgactggctgcgggctaaggccagcttcgtgatcgagggcctgaaggaggccgacaaggacgagttctgcagatgcgagctgaagctgcagaagtggtacggggacctgcggggaaagcccttcgccatcgaagccgagaacagcatcctggacatcagcggcttcagcaagcagtacaactgtgccttcatctggcagaaggacggcgtgaagaagctgaacctgtacctgatcatcaactacttcaagggcggcaagctgcggttcaagaagatcaaacctgaagccttcgaagccaacagattctacaccgtgatcaacaaaaagagcggcgagatcgtgcccatggaggtgaacttcaacttcgacgaccccaacctgatcatcctgcctctggcctttggcaagagacagggcagagaattcatctggaacgacctgctgtccctggaaaccggcagcctgaagctggccaacggaagagtgatcgagaagacactgtacaacagaagaacccggcaggatgagcctgccctgttcgtggccctgaccttcgagcggcgggaggtcctggactcctccaatatcaaaccaatgaacctgatcggcgtggcaagaggcgaaaacatccccgccgtgatcgccctgaccgaccccgagggctgcccactgagccggtttaaggatagcctgggaaacccaacccacatcctgagaatcggcgagagctataaggagaagcagcggaccatccaggccaagaaggaggtggagcagcggagagccggcggctacagccggaagtacgccagcaaagccaagaatctggcagacgatatggtgagaaacaccgctagagatctgctgtactacgccgtgacccaggatgccatgctgatcttcgccaacctgagccggggcttcggccggcagggcaagcggaccttcatggccgagagacagtacacacggatggaggactggctgaccgccaagctggcctacgagggcctgagcaagacctacctgtccaagacactggcccagtacacctccaagacatgcagcaactgtgggtttaccatcaccagcgccgactacgacagggtgctggagaagctgaagaagacagcaacaggctggatgaccacaattaacggcaaggagctgaaggtggagggccagattacctactacaacagatacaagagacagaacgtagtcaaggacctgtccgtcgagctggatagactgagcgaagaatctgtgaacaacgacatctcctcctggacaaagggcagaagcggagaagctctgagcctcctgaagaaaagattctcccatagacccgtgcaggagaagttcgtgtgcctgaactgcggcttcgagacacacgcagccgagcaagccgccctgaacatcgccagatcctggctgttcctgcggagccaggagtacaagaaataccagacaaacaagacaaccggcaacaccgataagagagccttcgtcgagacctggcagtccttttaccggaagaagcttaaggaggtgtggaaacctgccgtgcggtctggcggatctggcggaggctccaccagccccaagaaaaagagaaaagtctaagctgccttctgcggggcttgccttctggccatgcccttcttctctcccttgcacctgtacctcttggtctttgaataaagcctgagtaggaaggctagcaaaaaaaaaaaaaaaaaaaaaaaaaaaaaaaaaaaaaaaaaaaaaaaaaaaaaaaaaaaaaaaaaaaaaaaaaaaaaaaa

SEQ ID NO: 9716 - RNA, 8787 nt, synthetic construct
  source 1..8787: mol_type = other RNA
aggaaataagagagaaaagaagagtaagaagaaatataagagccaccatggcccctaagaagaagcgtaaagtgagccggatgaaccacgaccaggagttcgacccccctaaggtgtaccctcccgtccccgccgagaagagaaagcccatccgggtcctgagcctgttcgatggcatcgccaccggtctgctggtgctgaaggacctgggcatccaggtggataggtacattgcctccgaggtgtgcgaggactccatcaccgtgggaatggtgcgtcatcagggcaagatcatgtacgtgggcgacgtgcggagcgtgacacagaagcatatccaggagtggggccctttcgacctggtgatcggcggcagcccttgcaatgacctgagcatcgtgaacccagcccggaagggcctgtacgagggaaccggcagactgttcttcgagttttacagactgctgcacgacgcccggcctaaggaaggcgacgaccggcccttcttttggctgttcgagaatgtggtggccatgggagtcagcgacaagcgggatattagccggttcctggagagcaaccccgtgatgatcgatgccaaggaagtgagcgccgcccaccgggccagatacttctggggcaatctgcctggcatgaacagacccctggccagcaccgtgaacgacaagctggagctgcaggagtgcctggagcacggccggatcgccaagttcagcaaggtgagaaccatcaccacccgaagcaacagcatcaaacaaggcaaggaccagcactttcctgtgttcatgaacgagaaggaggacatcctgtggtgtaccgagatggagagagtgttcgggttcccagtccactacacagatgtcagcaacatgtctagactggccagacagagactgctgggaagaagctggtccgtccctgtgatcagacacctgttcgcccctctgaaggagtacttcgcctgcgtgagcagcggcaacagcaacgccaacagccggggccccagcttctctagcggcctggtgccactgtccctgagagggagccacatgggccccatggagatctacaaaaccgtgagcgcctggaagcggcagcctgtgcgcgtgctgagcctgtttcggaatatcgataaagtcctgaaaagcctgggattcctggagagcggctctggctccggcggtggcaccctgaagtacgtggaggatgtgacaaacgtggtcagacgggatgtggagaagtggggccccttcgatctggtgtacggcagcacccaacccctgggcagctcttgtgaccggtgccctggctggtacatgtttcagttccaccggatcctgcagtacgccctgccgagacaggagtcccagcggccattcttttggattttcatggacaacttgctgctgaccgaggatgaccaggaaactaccactcggttcctgcagaccgaagccgtgaccctgcaggacgtgagaggccgggactaccagaacgccatgcgggtgtggtccaacatccctggactgaaaagcaagcacgcacctctgacccctaaagaagaggagtacctgcaggcccaggtgcggagcagaagcaagctggacgcccctaaggtggatctgctggtgaagaattgcctcctgcccctgagagagtacttcaagtatttcagccagaatagtctgcccctgggaggcagcggcggcggcatgttcccccccgccaggggcaaggagctgctgagcttcgaggacgtggccatgtacttcaccagggaggagtggggccacctgagctggggccagaaggacctgtacagggacgtgatgctggagaactacaggaacatggtgctgctgggcttccagttccccaagcccgaggtgatctgccagctggagaactgggacgagcagtggatcctggacctgcccagggccggcaacaggaagggcggcccaagcagcggcgcccctcctcccagcggcggcaggcggcccaagcagcggcgcccctcctcccagcggcggcagcccagccggctccccaacctctaccgaggagggcacctctgagtccgccacccccgagagcggccctggcacctccaccgagcccagcgagggcagcgcacccggcagccctgccggcagccccacctccacagaggagggaaccagcaccgagcccagcgaaggcagcgccccaggcaccagcaccgagcctagtgagcaggagattaaacggatcaacaagatcagaagaagacttgtgaaagacagcaacaccaagaaggccggcaagacaggccccatgaaaaccctgctggttagagtgatgacacccgatctgagagagcggctggaaaacctgagaaagaagcctgaaaatatcccccagcccatcagcaatacatctagagccaacctgaataagctgctgaccgattacaccgaaatgaagaaggcgatcctgcatgtgtactgggaagagttccagaaggaccctgtgggcctgatgagccgggtggcccagcctgccagcaagaagatcgatcagaacaagctgaaacctgagatggacgagaagggcaacctgaccaccgccggctttgcctgctctcagtgtggccagcccctgttcgtgtacaagctggagcaggtgtctgagaagggcaaggcttacaccaactacttcggacggtgcaatgtggccgagcacgaaaagctgatcctgctggcccagctgaagcccgagaaggatagcgacgaagccgtgacatatagcctgggaaagtttgggcagagggccctggatttctacagcattcatgtgaccaaggagtccacccaccccgtgaagcccctggcccagatcgccggaaacagatacgcctccggacctgtgggaaaggccctgagcgacgcatgtatgggcacaatcgcctccttcctgtctaagtaccaggacatcatcatcgaacaccagaaggtggtgaagggcaaccagaagagactggagagcctgcgggagctggccggcaaggaaaacctggaataccctagcgtgaccctgccacctcagcctcacaccaaggagggcgttgatgcctacaacgaagtgatcgcccgggtgcgaatgtgggtgaacctgaacctgtggcagaagctgaagctaagcagagatgatgccaagcctctgctgagactgaagggattcccttcctttcctctggtcgagagacaggccaacgaagtggactggtgggacatggtgtgtaacgtgaagaagctgatcaacgagaaaaaggaggatggcaaggtgttttggcagaatctggctggctacaagagacaggaagccctgagaccatacctgagcagcgaggaagatcggaagaagggaaagaaattcgctcggtaccagctgggcgacctgctgctgcacctggaaaagaagcacggcgaggactggggaaaggtgtacgacgaggcctgggagcggattgacaagaaagtggaaggcctgagcaagcacatcaagctggaagaggaacggagaagcgaggacgcccagagcaaggccgccctgaccgactggctgcgggctaaggccagcttcgtgatcgagggcctgaaggaggccgacaaggacgagttctgcagatgcgagctgaagctgcagaagtggtacggggacctgcggggaaagcccttcgccatcgaagccgagaacagcatcctggacatcagcggcttcagcaagcagtacaactgtgccttcatctggcagaaggacggcgtgaagaagctgaacctgtacctgatcatcaactacttcaagggcggcaagctgcggttcaagaagatcaaacctgaagccttcgaagccaacagattctacaccgtgatcaacaaaaagagcggcgagatcgtgcccatggaggtgaacttcaacttcgacgaccccaacctgatcatcctgcctctggcctttggcaagagacagggcagagaattcatctggaacgacctgctgtccctggaaaccggcagcctgaagctggccaacggaagagtgatcgagaagacactgtacaacagaagaacccggcaggatgagcctgccctgttcgtggccctgaccttcgagcggcgggaggtcctggactcctccaatatcaaaccaatgaacctgatcggcgtggcaagaggcgaaaacatccccgccgtgatcgccctgaccgaccccgagggctgcccactgagccggtttaaggatagcctgggaaacccaacccacatcctgagaatcggcgagagctataaggagaagcagcggaccatccaggccaagaaggaggtggagcagcggagagccggcggctacagccggaagtacgccagcaaagccaagaatctggcagacgatatggtgagaaacaccgctagagatctgctgtactacgccgtgacccaggatgccatgctgatcttcgccaacctgagccggggcttcggccggcagggcaagcggaccttcatggccgagagacagtacacacggatggaggactggctgaccgccaagctggcctacgagggcctgagcaagacctacctgtccaagacactggcccagtacacctccaagacatgcagcaactgtgggtttaccatcaccagcgccgactacgacagggtgctggagaagctgaagaagacagcaacaggctggatgaccacaattaacggcaaggagctgaaggtggagggccagattacctactacaacagatacaagagacagaacgtagtcaaggacctgtccgtcgagctggatagactgagcgaagaatctgtgaacaacgacatctcctcctggacaaagggcagaagcggagaagctctgagcctcctgaagaaaagattctcccatagacccgtgcaggagaagttcgtgtgcctgaactgcggcttcgagacacacgcagccgagcaagccgccctgaacatcgccagatcctggctgttcctgcggagccaggagtacaagaaataccagacaaacaagacaaccggcaacaccgataagagagccttcgtcgagacctggcagtccttttaccggaagaagcttaaggaggtgtggaaacctgccgtgcggtctggcggatctggcggaggctccaccagccccaagaaaaagagaaaagtctaagctgccttctgcggggcttgccttctggccatgcccttcttctctcccttgcacctgtacctcttggtctttgaataaagcctgagtaggaaggctagcaaaaaaaaaaaaaaaaaaaaaaaaaaaaaaaaaaaaaaaaaaaaaaaaaaaaaaaaaaaaaaaaaaaaaaaaaaaaaaaagcccagccggctccccaacctctaccgaggagggcacctctgagtccgccacccccgagagcggccctggcacctccaccgagcccagcgagggcagcgcacccggcagccctgccggcagccccacctccacagaggagggaaccagcaccgagcccagcgaaggcagcgccccaggcaccagcaccgagcctagtgagcaggagattaaacggatcaacaagatcagaagaagacttgtgaaagacagcaacaccaagaaggccggcaagacaggccccatgaaaaccctgctggttagagtgatgacacccgatctgagagagcggctggaaaacctgagaaagaagcctgaaaatatcccccagcccatcagcaatacatctagagccaacctgaataagctgctgaccgattacaccgaaatgaagaaggcgatcctgcatgtgtactgggaagagttccagaaggaccctgtgggcctgatgagccgggtggcccagcctgccagcaagaagatcgatcagaacaagctgaaacctgagatggacgagaagggcaacctgaccaccgccggctttgcctgctctcagtgtggccagcccctgttcgtgtacaagctggagcaggtgtctgagaagggcaaggcttacaccaactacttcggacggtgcaatgtggccgagcacgaaaagctgatcctgctggcccagctgaagcccgagaaggatagcgacgaagccgtgacatatagcctgggaaagtttgggcagagggccctggatttctacagcattcatgtgaccaaggagtccacccaccccgtgaagcccctggcccagatcgccggaaacagatacgcctccggacctgtgggaaaggccctgagcgacgcatgtatgggcacaatcgcctccttcctgtctaagtaccaggacatcatcatcgaacaccagaaggtggtgaagggcaaccagaagagactggagagcctgcgggagctggccggcaaggaaaacctggaataccctagcgtgaccctgccacctcagcctcacaccaaggagggcgttgatgcctacaacgaagtgatcgcccgggtgcgaatgtgggtgaacctgaacctgtggcagaagctgaagctaagcagagatgatgccaagcctctgctgagactgaagggattcccttcctttcctctggtcgagagacaggccaacgaagtggactggtgggacatggtgtgtaacgtgaagaagctgatcaacgagaaaaaggaggatggcaaggtgttttggcagaatctggctggctacaagagacaggaagccctgagaccatacctgagcagcgaggaagatcggaagaagggaaagaaattcgctcggtaccagctgggcgacctgctgctgcacctggaaaagaagcacggcgaggactggggaaaggtgtacgacgaggcctgggagcggattgacaagaaagtggaaggcctgagcaagcacatcaagctggaagaggaacggagaagcgaggacgcccagagcaaggccgccctgaccgactggctgcgggctaaggccagcttcgtgatcgagggcctgaaggaggccgacaaggacgagttctgcagatgcgagctgaagctgcagaagtggtacggggacctgcggggaaagcccttcgccatcgaagccgagaacagcatcctggacatcagcggcttcagcaagcagtacaactgtgccttcatctggcagaaggacggcgtgaagaagctgaacctgtacctgatcatcaactacttcaagggcggcaagctgcggttcaagaagatcaaacctgaagccttcgaagccaacagattctacaccgtgatcaacaaaaagagcggcgagatcgtgcccatggaggtgaacttcaacttcgacgaccccaacctgatcatcctgcctctggcctttggcaagagacagggcagagaattcatctggaacgacctgctgtccctggaaaccggcagcctgaagctggccaacggaagagtgatcgagaagacactgtacaacagaagaacccggcaggatgagcctgccctgttcgtggccctgaccttcgagcggcgggaggtcctggactcctccaatatcaaaccaatgaacctgatcggcgtggcaagaggcgaaaacatccccgccgtgatcgccctgaccgaccccgagggctgcccactgagccggtttaaggatagcctgggaaacccaacccacatcctgagaatcggcgagagctataaggagaagcagcggaccatccaggccaagaaggaggtggagcagcggagagccggcggctacagccggaagtacgccagcaaagccaagaatctggcagacgatatggtgagaaacaccgctagagatctgctgtactacgccgtgacccaggatgccatgctgatcttcgccaacctgagccggggcttcggccggcagggcaagcggaccttcatggccgagagacagtacacacggatggaggactggctgaccgccaagctggcctacgagggcctgagcaagacctacctgtccaagacactggcccagtacacctccaagacatgcagcaactgtgggtttaccatcaccagcgccgactacgacagggtgctggagaagctgaagaagacagcaacaggctggatgaccacaattaacggcaaggagctgaaggtggagggccagattacctactacaacagatacaagagacagaacgtagtcaaggacctgtccgtcgagctggatagactgagcgaagaatctgtgaacaacgacatctcctcctggacaaagggcagaagcggagaagctctgagcctcctgaagaaaagattctcccatagacccgtgcaggagaagttcgtgtgcctgaactgcggcttcgagacacacgcagccgagcaagccgccctgaacatcgccagatcctggctgttcctgcggagccaggagtacaagaaataccagacaaacaagacaaccggcaacaccgataagagagccttcgtcgagacctggcagtccttttaccggaagaagcttaaggaggtgtggaaacctgccgtgcggtctggcggatctggcggaggctccaccagccccaagaaaaagagaaaagtctaagctgccttctgcggggcttgccttctggccatgcccttcttctctcccttgcacctgtacctcttggtctttgaataaagcctgagtaggaaggctagcaaaaaaaaaaaaaaaaaaaaaaaaaaaaaaaaaaaaaaaaaaaaaaaaaaaaaaaaaaaaaaaaaaaaaaaaaaaaaaaa

SEQ ID NO: 9717 - RNA, 8787 nt, synthetic construct
  source 1..8787: mol_type = other RNA
aggaaataagagagaaaagaagagtaagaagaaatataagagccaccatggcccctaagaagaagcgtaaagtgagccggatgaaccacgaccaggagttcgacccccctaaggtgtaccctcccgtccccgccgagaagagaaagcccatccgggtcctgagcctgttcgatggcatcgccaccggtctgctggtgctgaaggacctgggcatccaggtggataggtacattgcctccgaggtgtgcgaggactccatcaccgtgggaatggtgcgtcatcagggcaagatcatgtacgtgggcgacgtgcggagcgtgacacagaagcatatccaggagtggggccctttcgacctggtgatcggcggcagcccttgcaatgacctgagcatcgtgaacccagcccggaagggcctgtacgagggaaccggcagactgttcttcgagttttacagactgctgcacgacgcccggcctaaggaaggcgacgaccggcccttcttttggctgttcgagaatgtggtggccatgggagtcagcgacaagcgggatattagccggttcctggagagcaaccccgtgatgatcgatgccaaggaagtgagcgccgcccaccgggccagatacttctggggcaatctgcctggcatgaacagacccctggccagcaccgtgaacgacaagctggagctgcaggagtgcctggagcacggccggatcgccaagttcagcaaggtgagaaccatcaccacccgaagcaacagcatcaaacaaggcaaggaccagcactttcctgtgttcatgaacgagaaggaggacatcctgtggtgtaccgagatggagagagtgttcgggttcccagtccactacacagatgtcagcaacatgtctagactggccagacagagactgctgggaagaagctggtccgtccctgtgatcagacacctgttcgcccctctgaaggagtacttcgcctgcgtgagcagcggcaacagcaacgccaacagccggggccccagcttctctagcggcctggtgccactgtccctgagagggagccacatgggccccatggagatctacaaaaccgtgagcgcctggaagcggcagcctgtgcgcgtgctgagcctgtttcggaatatcgataaagtcctgaaaagcctgggattcctggagagcggctctggctccggcggtggcaccctgaagtacgtggaggatgtgacaaacgtggtcagacgggatgtggagaagtggggccccttcgatctggtgtacggcagcacccaacccctgggcagctcttgtgaccggtgccctggctggtacatgtttcagttccaccggatcctgcagtacgccctgccgagacaggagtcccagcggccattcttttggattttcatggacaacttgctgctgaccgaggatgaccaggaaactaccactcggttcctgcagaccgaagccgtgaccctgcaggacgtgagaggccgggactaccagaacgccatgcgggtgtggtccaacatccctggactgaaaagcaagcacgcacctctgacccctaaagaagaggagtacctgcaggcccaggtgcggagcagaagcaagctggacgcccctaaggtggatctgctggtgaagaattgcctcctgcccctgagagagtacttcaagtatttcagccagaatagtctgcccctgggaggcagcggcggcggcatgaacgtggaggtggtgaaggtgatgccccaggacctggtgaccttcaaggacgtggccatcgacttcagccaggaggagtggcagtggatgaaccccgcccagaagcacctgtacaggagcatgatgctggagaactaccagagcctggtgagcctgggcctgtgcatcagcaagccctgcgtgatcagcctgctggagcagggcagggagccctgggagatgaccagcgagatgaccaggggcggcccaagcagcggcgcccctcctcccagcggcggcaggcggcccaagcagcggcgcccctcctcccagcggcggcagcccagccggctccccaacctctaccgaggagggcacctctgagtccgccacccccgagagcggccctggcacctccaccgagcccagcgagggcagcgcacccggcagccctgccggcagccccacctccacagaggagggaaccagcaccgagcccagcgaaggcagcgccccaggcaccagcaccgagcctagtgagcaggagattaaacggatcaacaagatcagaagaagacttgtgaaagacagcaacaccaagaaggccggcaagacaggccccatgaaaaccctgctggttagagtgatgacacccgatctgagagagcggctggaaaacctgagaaagaagcctgaaaatatcccccagcccatcagcaatacatctagagccaacctgaataagctgctgaccgattacaccgaaatgaagaaggcgatcctgcatgtgtactgggaagagttccagaaggaccctgtgggcctgatgagccgggtggcccagcctgccagcaagaagatcgatcagaacaagctgaaacctgagatggacgagaagggcaacctgaccaccgccggctttgcctgctctcagtgtggccagcccctgttcgtgtacaagctggagcaggtgtctgagaagggcaaggcttacaccaactacttcggacggtgcaatgtggccgagcacgaaaagctgatcctgctggcccagctgaagcccgagaaggatagcgacgaagccgtgacatatagcctgggaaagtttgggcagagggccctggatttctacagcattcatgtgaccaaggagtccacccaccccgtgaagcccctggcccagatcgccggaaacagatacgcctccggacctgtgggaaaggccctgagcgacgcatgtatgggcacaatcgcctccttcctgtctaagtaccaggacatcatcatcgaacaccagaaggtggtgaagggcaaccagaagagactggagagcctgcgggagctggccggcaaggaaaacctggaataccctagcgtgaccctgccacctcagcctcacaccaaggagggcgttgatgcctacaacgaagtgatcgcccgggtgcgaatgtgggtgaacctgaacctgtggcagaagctgaagctaagcagagatgatgccaagcctctgctgagactgaagggattcccttcctttcctctggtcgagagacaggccaacgaagtggactggtgggacatggtgtgtaacgtgaagaagctgatcaacgagaaaaaggaggatggcaaggtgttttggcagaatctggctggctacaagagacaggaagccctgagaccatacctgagcagcgaggaagatcggaagaagggaaagaaattcgctcggtaccagctgggcgacctgctgctgcacctggaaaagaagcacggcgaggactggggaaaggtgtacgacgaggcctgggagcggattgacaagaaagtggaaggcctgagcaagcacatcaagctggaagaggaacggagaagcgaggacgcccagagcaaggccgccctgaccgactggctgcgggctaaggccagcttcgtgatcgagggcctgaaggaggccgacaaggacgagttctgcagatgcgagctgaagctgcagaagtggtacggggacctgcggggaaagcccttcgccatcgaagccgagaacagcatcctggacatcagcggcttcagcaagcagtacaactgtgccttcatctggcagaaggacggcgtgaagaagctgaacctgtacctgatcatcaactacttcaagggcggcaagctgcggttcaagaagatcaaacctgaagccttcgaagccaacagattctacaccgtgatcaacaaaaagagcggcgagatcgtgcccatggaggtgaacttcaacttcgacgaccccaacctgatcatcctgcctctggcctttggcaagagacagggcagagaattcatctggaacgacctgctgtccctggaaaccggcagcctgaagctggccaacggaagagtgatcgagaagacactgtacaacagaagaacccggcaggatgagcctgccctgttcgtggccctgaccttcgagcggcgggaggtcctggactcctccaatatcaaaccaatgaacctgatcggcgtggcaagaggcgaaaacatccccgccgtgatcgccctgaccgaccccgagggctgcccactgagccggtttaaggatagcctgggaaacccaacccacatcctgagaatcggcgagagctataaggagaagcagcggaccatccaggccaagaaggaggtggagcagcggagagccggcggctacagccggaagtacgccagcaaagccaagaatctggcagacgatatggtgagaaacaccgctagagatctgctgtactacgccgtgacccaggatgccatgctgatcttcgccaacctgagccggggcttcggccggcagggcaagcggaccttcatggccgagagacagtacacacggatggaggactggctgaccgccaagctggcctacgagggcctgagcaagacctacctgtccaagacactggcccagtacacctccaagacatgcagcaactgtgggtttaccatcaccagcgccgactacgacagggtgctggagaagctgaagaagacagcaacaggctggatgaccacaattaacggcaaggagctgaaggtggagggccagattacctactacaacagatacaagagacagaacgtagtcaaggacctgtccgtcgagctggatagactgagcgaagaatctgtgaacaacgacatctcctcctggacaaagggcagaagcggagaagctctgagcctcctgaagaaaagattctcccatagacccgtgcaggagaagttcgtgtgcctgaactgcggcttcgagacacacgcagccgagcaagccgccctgaacatcgccagatcctggctgttcctgcggagccaggagtacaagaaataccagacaaacaagacaaccggcaacaccgataagagagccttcgtcgagacctggcagtccttttaccggaagaagcttaaggaggtgtggaaacctgccgtgcggtctggcggatctggcggaggctccaccagccccaagaaaaagagaaaagtctaagctgccttctgcggggcttgccttctggccatgcccttcttctctcccttgcacctgtacctcttggtctttgaataaagcctgagtaggaaggctagcaaaaaaaaaaaaaaaaaaaaaaaaaaaaaaaaaaaaaaaaaaaaaaaaaaaaaaaaaaaaaaaaaaaaaaaaaaaaaaaagcccagccggctccccaacctctaccgaggagggcacctctgagtccgccacccccgagagcggccctggcacctccaccgagcccagcgagggcagcgcacccggcagccctgccggcagccccacctccacagaggagggaaccagcaccgagcccagcgaaggcagcgccccaggcaccagcaccgagcctagtgagcaggagattaaacggatcaacaagatcagaagaagacttgtgaaagacagcaacaccaagaaggccggcaagacaggccccatgaaaaccctgctggttagagtgatgacacccgatctgagagagcggctggaaaacctgagaaagaagcctgaaaatatcccccagcccatcagcaatacatctagagccaacctgaataagctgctgaccgattacaccgaaatgaagaaggcgatcctgcatgtgtactgggaagagttccagaaggaccctgtgggcctgatgagccgggtggcccagcctgccagcaagaagatcgatcagaacaagctgaaacctgagatggacgagaagggcaacctgaccaccgccggctttgcctgctctcagtgtggccagcccctgttcgtgtacaagctggagcaggtgtctgagaagggcaaggcttacaccaactacttcggacggtgcaatgtggccgagcacgaaaagctgatcctgctggcccagctgaagcccgagaaggatagcgacgaagccgtgacatatagcctgggaaagtttgggcagagggccctggatttctacagcattcatgtgaccaaggagtccacccaccccgtgaagcccctggcccagatcgccggaaacagatacgcctccggacctgtgggaaaggccctgagcgacgcatgtatgggcacaatcgcctccttcctgtctaagtaccaggacatcatcatcgaacaccagaaggtggtgaagggcaaccagaagagactggagagcctgcgggagctggccggcaaggaaaacctggaataccctagcgtgaccctgccacctcagcctcacaccaaggagggcgttgatgcctacaacgaagtgatcgcccgggtgcgaatgtgggtgaacctgaacctgtggcagaagctgaagctaagcagagatgatgccaagcctctgctgagactgaagggattcccttcctttcctctggtcgagagacaggccaacgaagtggactggtgggacatggtgtgtaacgtgaagaagctgatcaacgagaaaaaggaggatggcaaggtgttttggcagaatctggctggctacaagagacaggaagccctgagaccatacctgagcagcgaggaagatcggaagaagggaaagaaattcgctcggtaccagctgggcgacctgctgctgcacctggaaaagaagcacggcgaggactggggaaaggtgtacgacgaggcctgggagcggattgacaagaaagtggaaggcctgagcaagcacatcaagctggaagaggaacggagaagcgaggacgcccagagcaaggccgccctgaccgactggctgcgggctaaggccagcttcgtgatcgagggcctgaaggaggccgacaaggacgagttctgcagatgcgagctgaagctgcagaagtggtacggggacctgcggggaaagcccttcgccatcgaagccgagaacagcatcctggacatcagcggcttcagcaagcagtacaactgtgccttcatctggcagaaggacggcgtgaagaagctgaacctgtacctgatcatcaactacttcaagggcggcaagctgcggttcaagaagatcaaacctgaagccttcgaagccaacagattctacaccgtgatcaacaaaaagagcggcgagatcgtgcccatggaggtgaacttcaacttcgacgaccccaacctgatcatcctgcctctggcctttggcaagagacagggcagagaattcatctggaacgacctgctgtccctggaaaccggcagcctgaagctggccaacggaagagtgatcgagaagacactgtacaacagaagaacccggcaggatgagcctgccctgttcgtggccctgaccttcgagcggcgggaggtcctggactcctccaatatcaaaccaatgaacctgatcggcgtggcaagaggcgaaaacatccccgccgtgatcgccctgaccgaccccgagggctgcccactgagccggtttaaggatagcctgggaaacccaacccacatcctgagaatcggcgagagctataaggagaagcagcggaccatccaggccaagaaggaggtggagcagcggagagccggcggctacagccggaagtacgccagcaaagccaagaatctggcagacgatatggtgagaaacaccgctagagatctgctgtactacgccgtgacccaggatgccatgctgatcttcgccaacctgagccggggcttcggccggcagggcaagcggaccttcatggccgagagacagtacacacggatggaggactggctgaccgccaagctggcctacgagggcctgagcaagacctacctgtccaagacactggcccagtacacctccaagacatgcagcaactgtgggtttaccatcaccagcgccgactacgacagggtgctggagaagctgaagaagacagcaacaggctggatgaccacaattaacggcaaggagctgaaggtggagggccagattacctactacaacagatacaagagacagaacgtagtcaaggacctgtccgtcgagctggatagactgagcgaagaatctgtgaacaacgacatctcctcctggacaaagggcagaagcggagaagctctgagcctcctgaagaaaagattctcccatagacccgtgcaggagaagttcgtgtgcctgaactgcggcttcgagacacacgcagccgagcaagccgccctgaacatcgccagatcctggctgttcctgcggagccaggagtacaagaaataccagacaaacaagacaaccggcaacaccgataagagagccttcgtcgagacctggcagtccttttaccggaagaagcttaaggaggtgtggaaacctgccgtgcggtctggcggatctggcggaggctccaccagccccaagaaaaagagaaaagtctaagctgccttctgcggggcttgccttctggccatgcccttcttctctcccttgcacctgtacctcttggtctttgaataaagcctgagtaggaaggctagcaaaaaaaaaaaaaaaaaaaaaaaaaaaaaaaaaaaaaaaaaaaaaaaaaaaaaaaaaaaaaaaaaaaaaaaaaaaaaaaa

SEQ ID NO: 9718 - RNA, 8787 nt, synthetic construct
  source 1..8787: mol_type = other RNA
aggaaataagagagaaaagaagagtaagaagaaatataagagccaccatggcccctaagaagaagcgtaaagtgagccggatgaaccacgaccaggagttcgacccccctaaggtgtaccctcccgtccccgccgagaagagaaagcccatccgggtcctgagcctgttcgatggcatcgccaccggtctgctggtgctgaaggacctgggcatccaggtggataggtacattgcctccgaggtgtgcgaggactccatcaccgtgggaatggtgcgtcatcagggcaagatcatgtacgtgggcgacgtgcggagcgtgacacagaagcatatccaggagtggggccctttcgacctggtgatcggcggcagcccttgcaatgacctgagcatcgtgaacccagcccggaagggcctgtacgagggaaccggcagactgttcttcgagttttacagactgctgcacgacgcccggcctaaggaaggcgacgaccggcccttcttttggctgttcgagaatgtggtggccatgggagtcagcgacaagcgggatattagccggttcctggagagcaaccccgtgatgatcgatgccaaggaagtgagcgccgcccaccgggccagatacttctggggcaatctgcctggcatgaacagacccctggccagcaccgtgaacgacaagctggagctgcaggagtgcctggagcacggccggatcgccaagttcagcaaggtgagaaccatcaccacccgaagcaacagcatcaaacaaggcaaggaccagcactttcctgtgttcatgaacgagaaggaggacatcctgtggtgtaccgagatggagagagtgttcgggttcccagtccactacacagatgtcagcaacatgtctagactggccagacagagactgctgggaagaagctggtccgtccctgtgatcagacacctgttcgcccctctgaaggagtacttcgcctgcgtgagcagcggcaacagcaacgccaacagccggggccccagcttctctagcggcctggtgccactgtccctgagagggagccacatgggccccatggagatctacaaaaccgtgagcgcctggaagcggcagcctgtgcgcgtgctgagcctgtttcggaatatcgataaagtcctgaaaagcctgggattcctggagagcggctctggctccggcggtggcaccctgaagtacgtggaggatgtgacaaacgtggtcagacgggatgtggagaagtggggccccttcgatctggtgtacggcagcacccaacccctgggcagctcttgtgaccggtgccctggctggtacatgtttcagttccaccggatcctgcagtacgccctgccgagacaggagtcccagcggccattcttttggattttcatggacaacttgctgctgaccgaggatgaccaggaaactaccactcggttcctgcagaccgaagccgtgaccctgcaggacgtgagaggccgggactaccagaacgccatgcgggtgtggtccaacatccctggactgaaaagcaagcacgcacctctgacccctaaagaagaggagtacctgcaggcccaggtgcggagcagaagcaagctggacgcccctaaggtggatctgctggtgaagaattgcctcctgcccctgagagagtacttcaagtatttcagccagaatagtctgcccctgggaggcagcggcggcggcaagcccgccgccgtgaggttcgccgacgtggccgtgtacttcagccccgaggagtggggctgcctgaggcccgcccagaggaccctgtacagggacgtgatgagggagacctacggccacctgggcgccctgggcttccccggccccaagcccgccctgatcagctggatggagcaggagagcgaggtgtggagccccgccgcccaggaccccgaggagggcgagagcctgggcggcgccaggggcggcccaagcagcggcgcccctcctcccagcggcggcaggcggcccaagcagcggcgcccctcctcccagcggcggcagcccagccggctccccaacctctaccgaggagggcacctctgagtccgccacccccgagagcggccctggcacctccaccgagcccagcgagggcagcgcacccggcagccctgccggcagccccacctccacagaggagggaaccagcaccgagcccagcgaaggcagcgccccaggcaccagcaccgagcctagtgagcaggagattaaacggatcaacaagatcagaagaagacttgtgaaagacagcaacaccaagaaggccggcaagacaggccccatgaaaaccctgctggttagagtgatgacacccgatctgagagagcggctggaaaacctgagaaagaagcctgaaaatatcccccagcccatcagcaatacatctagagccaacctgaataagctgctgaccgattacaccgaaatgaagaaggcgatcctgcatgtgtactgggaagagttccagaaggaccctgtgggcctgatgagccgggtggcccagcctgccagcaagaagatcgatcagaacaagctgaaacctgagatggacgagaagggcaacctgaccaccgccggctttgcctgctctcagtgtggccagcccctgttcgtgtacaagctggagcaggtgtctgagaagggcaaggcttacaccaactacttcggacggtgcaatgtggccgagcacgaaaagctgatcctgctggcccagctgaagcccgagaaggatagcgacgaagccgtgacatatagcctgggaaagtttgggcagagggccctggatttctacagcattcatgtgaccaaggagtccacccaccccgtgaagcccctggcccagatcgccggaaacagatacgcctccggacctgtgggaaaggccctgagcgacgcatgtatgggcacaatcgcctccttcctgtctaagtaccaggacatcatcatcgaacaccagaaggtggtgaagggcaaccagaagagactggagagcctgcgggagctggccggcaaggaaaacctggaataccctagcgtgaccctgccacctcagcctcacaccaaggagggcgttgatgcctacaacgaagtgatcgcccgggtgcgaatgtgggtgaacctgaacctgtggcagaagctgaagctaagcagagatgatgccaagcctctgctgagactgaagggattcccttcctttcctctggtcgagagacaggccaacgaagtggactggtgggacatggtgtgtaacgtgaagaagctgatcaacgagaaaaaggaggatggcaaggtgttttggcagaatctggctggctacaagagacaggaagccctgagaccatacctgagcagcgaggaagatcggaagaagggaaagaaattcgctcggtaccagctgggcgacctgctgctgcacctggaaaagaagcacggcgaggactggggaaaggtgtacgacgaggcctgggagcggattgacaagaaagtggaaggcctgagcaagcacatcaagctggaagaggaacggagaagcgaggacgcccagagcaaggccgccctgaccgactggctgcgggctaaggccagcttcgtgatcgagggcctgaaggaggccgacaaggacgagttctgcagatgcgagctgaagctgcagaagtggtacggggacctgcggggaaagcccttcgccatcgaagccgagaacagcatcctggacatcagcggcttcagcaagcagtacaactgtgccttcatctggcagaaggacggcgtgaagaagctgaacctgtacctgatcatcaactacttcaagggcggcaagctgcggttcaagaagatcaaacctgaagccttcgaagccaacagattctacaccgtgatcaacaaaaagagcggcgagatcgtgcccatggaggtgaacttcaacttcgacgaccccaacctgatcatcctgcctctggcctttggcaagagacagggcagagaattcatctggaacgacctgctgtccctggaaaccggcagcctgaagctggccaacggaagagtgatcgagaagacactgtacaacagaagaacccggcaggatgagcctgccctgttcgtggccctgaccttcgagcggcgggaggtcctggactcctccaatatcaaaccaatgaacctgatcggcgtggcaagaggcgaaaacatccccgccgtgatcgccctgaccgaccccgagggctgcccactgagccggtttaaggatagcctgggaaacccaacccacatcctgagaatcggcgagagctataaggagaagcagcggaccatccaggccaagaaggaggtggagcagcggagagccggcggctacagccggaagtacgccagcaaagccaagaatctggcagacgatatggtgagaaacaccgctagagatctgctgtactacgccgtgacccaggatgccatgctgatcttcgccaacctgagccggggcttcggccggcagggcaagcggaccttcatggccgagagacagtacacacggatggaggactggctgaccgccaagctggcctacgagggcctgagcaagacctacctgtccaagacactggcccagtacacctccaagacatgcagcaactgtgggtttaccatcaccagcgccgactacgacagggtgctggagaagctgaagaagacagcaacaggctggatgaccacaattaacggcaaggagctgaaggtggagggccagattacctactacaacagatacaagagacagaacgtagtcaaggacctgtccgtcgagctggatagactgagcgaagaatctgtgaacaacgacatctcctcctggacaaagggcagaagcggagaagctctgagcctcctgaagaaaagattctcccatagacccgtgcaggagaagttcgtgtgcctgaactgcggcttcgagacacacgcagccgagcaagccgccctgaacatcgccagatcctggctgttcctgcggagccaggagtacaagaaataccagacaaacaagacaaccggcaacaccgataagagagccttcgtcgagacctggcagtccttttaccggaagaagcttaaggaggtgtggaaacctgccgtgcggtctggcggatctggcggaggctccaccagccccaagaaaaagagaaaagtctaagctgccttctgcggggcttgccttctggccatgcccttcttctctcccttgcacctgtacctcttggtctttgaataaagcctgagtaggaaggctagcaaaaaaaaaaaaaaaaaaaaaaaaaaaaaaaaaaaaaaaaaaaaaaaaaaaaaaaaaaaaaaaaaaaaaaaaaaaaaaaagcccagccggctccccaacctctaccgaggagggcacctctgagtccgccacccccgagagcggccctggcacctccaccgagcccagcgagggcagcgcacccggcagccctgccggcagccccacctccacagaggagggaaccagcaccgagcccagcgaaggcagcgccccaggcaccagcaccgagcctagtgagcaggagattaaacggatcaacaagatcagaagaagacttgtgaaagacagcaacaccaagaaggccggcaagacaggccccatgaaaaccctgctggttagagtgatgacacccgatctgagagagcggctggaaaacctgagaaagaagcctgaaaatatcccccagcccatcagcaatacatctagagccaacctgaataagctgctgaccgattacaccgaaatgaagaaggcgatcctgcatgtgtactgggaagagttccagaaggaccctgtgggcctgatgagccgggtggcccagcctgccagcaagaagatcgatcagaacaagctgaaacctgagatggacgagaagggcaacctgaccaccgccggctttgcctgctctcagtgtggccagcccctgttcgtgtacaagctggagcaggtgtctgagaagggcaaggcttacaccaactacttcggacggtgcaatgtggccgagcacgaaaagctgatcctgctggcccagctgaagcccgagaaggatagcgacgaagccgtgacatatagcctgggaaagtttgggcagagggccctggatttctacagcattcatgtgaccaaggagtccacccaccccgtgaagcccctggcccagatcgccggaaacagatacgcctccggacctgtgggaaaggccctgagcgacgcatgtatgggcacaatcgcctccttcctgtctaagtaccaggacatcatcatcgaacaccagaaggtggtgaagggcaaccagaagagactggagagcctgcgggagctggccggcaaggaaaacctggaataccctagcgtgaccctgccacctcagcctcacaccaaggagggcgttgatgcctacaacgaagtgatcgcccgggtgcgaatgtgggtgaacctgaacctgtggcagaagctgaagctaagcagagatgatgccaagcctctgctgagactgaagggattcccttcctttcctctggtcgagagacaggccaacgaagtggactggtgggacatggtgtgtaacgtgaagaagctgatcaacgagaaaaaggaggatggcaaggtgttttggcagaatctggctggctacaagagacaggaagccctgagaccatacctgagcagcgaggaagatcggaagaagggaaagaaattcgctcggtaccagctgggcgacctgctgctgcacctggaaaagaagcacggcgaggactggggaaaggtgtacgacgaggcctgggagcggattgacaagaaagtggaaggcctgagcaagcacatcaagctggaagaggaacggagaagcgaggacgcccagagcaaggccgccctgaccgactggctgcgggctaaggccagcttcgtgatcgagggcctgaaggaggccgacaaggacgagttctgcagatgcgagctgaagctgcagaagtggtacggggacctgcggggaaagcccttcgccatcgaagccgagaacagcatcctggacatcagcggcttcagcaagcagtacaactgtgccttcatctggcagaaggacggcgtgaagaagctgaacctgtacctgatcatcaactacttcaagggcggcaagctgcggttcaagaagatcaaacctgaagccttcgaagccaacagattctacaccgtgatcaacaaaaagagcggcgagatcgtgcccatggaggtgaacttcaacttcgacgaccccaacctgatcatcctgcctctggcctttggcaagagacagggcagagaattcatctggaacgacctgctgtccctggaaaccggcagcctgaagctggccaacggaagagtgatcgagaagacactgtacaacagaagaacccggcaggatgagcctgccctgttcgtggccctgaccttcgagcggcgggaggtcctggactcctccaatatcaaaccaatgaacctgatcggcgtggcaagaggcgaaaacatccccgccgtgatcgccctgaccgaccccgagggctgcccactgagccggtttaaggatagcctgggaaacccaacccacatcctgagaatcggcgagagctataaggagaagcagcggaccatccaggccaagaaggaggtggagcagcggagagccggcggctacagccggaagtacgccagcaaagccaagaatctggcagacgatatggtgagaaacaccgctagagatctgctgtactacgccgtgacccaggatgccatgctgatcttcgccaacctgagccggggcttcggccggcagggcaagcggaccttcatggccgagagacagtacacacggatggaggactggctgaccgccaagctggcctacgagggcctgagcaagacctacctgtccaagacactggcccagtacacctccaagacatgcagcaactgtgggtttaccatcaccagcgccgactacgacagggtgctggagaagctgaagaagacagcaacaggctggatgaccacaattaacggcaaggagctgaaggtggagggccagattacctactacaacagatacaagagacagaacgtagtcaaggacctgtccgtcgagctggatagactgagcgaagaatctgtgaacaacgacatctcctcctggacaaagggcagaagcggagaagctctgagcctcctgaagaaaagattctcccatagacccgtgcaggagaagttcgtgtgcctgaactgcggcttcgagacacacgcagccgagcaagccgccctgaacatcgccagatcctggctgttcctgcggagccaggagtacaagaaataccagacaaacaagacaaccggcaacaccgataagagagccttcgtcgagacctggcagtccttttaccggaagaagcttaaggaggtgtggaaacctgccgtgcggtctggcggatctggcggaggctccaccagccccaagaaaaagagaaaagtctaagctgccttctgcggggcttgccttctggccatgcccttcttctctcccttgcacctgtacctcttggtctttgaataaagcctgagtaggaaggctagcaaaaaaaaaaaaaaaaaaaaaaaaaaaaaaaaaaaaaaaaaaaaaaaaaaaaaaaaaaaaaaaaaaaaaaaaaaaaaaaa

SEQ ID NO: 9719 - RNA, 8787 nt, synthetic construct
  source 1..8787: mol_type = other RNA
aggaaataagagagaaaagaagagtaagaagaaatataagagccaccatggcccctaagaagaagcgtaaagtgagccggatgaaccacgaccaggagttcgacccccctaaggtgtaccctcccgtccccgccgagaagagaaagcccatccgggtcctgagcctgttcgatggcatcgccaccggtctgctggtgctgaaggacctgggcatccaggtggataggtacattgcctccgaggtgtgcgaggactccatcaccgtgggaatggtgcgtcatcagggcaagatcatgtacgtgggcgacgtgcggagcgtgacacagaagcatatccaggagtggggccctttcgacctggtgatcggcggcagcccttgcaatgacctgagcatcgtgaacccagcccggaagggcctgtacgagggaaccggcagactgttcttcgagttttacagactgctgcacgacgcccggcctaaggaaggcgacgaccggcccttcttttggctgttcgagaatgtggtggccatgggagtcagcgacaagcgggatattagccggttcctggagagcaaccccgtgatgatcgatgccaaggaagtgagcgccgcccaccgggccagatacttctggggcaatctgcctggcatgaacagacccctggccagcaccgtgaacgacaagctggagctgcaggagtgcctggagcacggccggatcgccaagttcagcaaggtgagaaccatcaccacccgaagcaacagcatcaaacaaggcaaggaccagcactttcctgtgttcatgaacgagaaggaggacatcctgtggtgtaccgagatggagagagtgttcgggttcccagtccactacacagatgtcagcaacatgtctagactggccagacagagactgctgggaagaagctggtccgtccctgtgatcagacacctgttcgcccctctgaaggagtacttcgcctgcgtgagcagcggcaacagcaacgccaacagccggggccccagcttctctagcggcctggtgccactgtccctgagagggagccacatgggccccatggagatctacaaaaccgtgagcgcctggaagcggcagcctgtgcgcgtgctgagcctgtttcggaatatcgataaagtcctgaaaagcctgggattcctggagagcggctctggctccggcggtggcaccctgaagtacgtggaggatgtgacaaacgtggtcagacgggatgtggagaagtggggccccttcgatctggtgtacggcagcacccaacccctgggcagctcttgtgaccggtgccctggctggtacatgtttcagttccaccggatcctgcagtacgccctgccgagacaggagtcccagcggccattcttttggattttcatggacaacttgctgctgaccgaggatgaccaggaaactaccactcggttcctgcagaccgaagccgtgaccctgcaggacgtgagaggccgggactaccagaacgccatgcgggtgtggtccaacatccctggactgaaaagcaagcacgcacctctgacccctaaagaagaggagtacctgcaggcccaggtgcggagcagaagcaagctggacgcccctaaggtggatctgctggtgaagaattgcctcctgcccctgagagagtacttcaagtatttcagccagaatagtctgcccctgggaggcagcggcggcggcatgggcctggtgagcttcaaggacgtggccgtggacttcacccaggaggagtggcagcagctggaccccagccagaggaccctgtacagggacgtgatgctggagaactacagccacctggtgagcatgggctaccccgtgagcaagcccgacgtgatcagcaagctggagcagggcgaggagccctggatcatcaagggcgacatcagcaactggatctaccccgacgagtaccaggccgacggcggcccaagcagcggcgcccctcctcccagcggcggcaggcggcccaagcagcggcgcccctcctcccagcggcggcagcccagccggctccccaacctctaccgaggagggcacctctgagtccgccacccccgagagcggccctggcacctccaccgagcccagcgagggcagcgcacccggcagccctgccggcagccccacctccacagaggagggaaccagcaccgagcccagcgaaggcagcgccccaggcaccagcaccgagcctagtgagcaggagattaaacggatcaacaagatcagaagaagacttgtgaaagacagcaacaccaagaaggccggcaagacaggccccatgaaaaccctgctggttagagtgatgacacccgatctgagagagcggctggaaaacctgagaaagaagcctgaaaatatcccccagcccatcagcaatacatctagagccaacctgaataagctgctgaccgattacaccgaaatgaagaaggcgatcctgcatgtgtactgggaagagttccagaaggaccctgtgggcctgatgagccgggtggcccagcctgccagcaagaagatcgatcagaacaagctgaaacctgagatggacgagaagggcaacctgaccaccgccggctttgcctgctctcagtgtggccagcccctgttcgtgtacaagctggagcaggtgtctgagaagggcaaggcttacaccaactacttcggacggtgcaatgtggccgagcacgaaaagctgatcctgctggcccagctgaagcccgagaaggatagcgacgaagccgtgacatatagcctgggaaagtttgggcagagggccctggatttctacagcattcatgtgaccaaggagtccacccaccccgtgaagcccctggcccagatcgccggaaacagatacgcctccggacctgtgggaaaggccctgagcgacgcatgtatgggcacaatcgcctccttcctgtctaagtaccaggacatcatcatcgaacaccagaaggtggtgaagggcaaccagaagagactggagagcctgcgggagctggccggcaaggaaaacctggaataccctagcgtgaccctgccacctcagcctcacaccaaggagggcgttgatgcctacaacgaagtgatcgcccgggtgcgaatgtgggtgaacctgaacctgtggcagaagctgaagctaagcagagatgatgccaagcctctgctgagactgaagggattcccttcctttcctctggtcgagagacaggccaacgaagtggactggtgggacatggtgtgtaacgtgaagaagctgatcaacgagaaaaaggaggatggcaaggtgttttggcagaatctggctggctacaagagacaggaagccctgagaccatacctgagcagcgaggaagatcggaagaagggaaagaaattcgctcggtaccagctgggcgacctgctgctgcacctggaaaagaagcacggcgaggactggggaaaggtgtacgacgaggcctgggagcggattgacaagaaagtggaaggcctgagcaagcacatcaagctggaagaggaacggagaagcgaggacgcccagagcaaggccgccctgaccgactggctgcgggctaaggccagcttcgtgatcgagggcctgaaggaggccgacaaggacgagttctgcagatgcgagctgaagctgcagaagtggtacggggacctgcggggaaagcccttcgccatcgaagccgagaacagcatcctggacatcagcggcttcagcaagcagtacaactgtgccttcatctggcagaaggacggcgtgaagaagctgaacctgtacctgatcatcaactacttcaagggcggcaagctgcggttcaagaagatcaaacctgaagccttcgaagccaacagattctacaccgtgatcaacaaaaagagcggcgagatcgtgcccatggaggtgaacttcaacttcgacgaccccaacctgatcatcctgcctctggcctttggcaagagacagggcagagaattcatctggaacgacctgctgtccctggaaaccggcagcctgaagctggccaacggaagagtgatcgagaagacactgtacaacagaagaacccggcaggatgagcctgccctgttcgtggccctgaccttcgagcggcgggaggtcctggactcctccaatatcaaaccaatgaacctgatcggcgtggcaagaggcgaaaacatccccgccgtgatcgccctgaccgaccccgagggctgcccactgagccggtttaaggatagcctgggaaacccaacccacatcctgagaatcggcgagagctataaggagaagcagcggaccatccaggccaagaaggaggtggagcagcggagagccggcggctacagccggaagtacgccagcaaagccaagaatctggcagacgatatggtgagaaacaccgctagagatctgctgtactacgccgtgacccaggatgccatgctgatcttcgccaacctgagccggggcttcggccggcagggcaagcggaccttcatggccgagagacagtacacacggatggaggactggctgaccgccaagctggcctacgagggcctgagcaagacctacctgtccaagacactggcccagtacacctccaagacatgcagcaactgtgggtttaccatcaccagcgccgactacgacagggtgctggagaagctgaagaagacagcaacaggctggatgaccacaattaacggcaaggagctgaaggtggagggccagattacctactacaacagatacaagagacagaacgtagtcaaggacctgtccgtcgagctggatagactgagcgaagaatctgtgaacaacgacatctcctcctggacaaagggcagaagcggagaagctctgagcctcctgaagaaaagattctcccatagacccgtgcaggagaagttcgtgtgcctgaactgcggcttcgagacacacgcagccgagcaagccgccctgaacatcgccagatcctggctgttcctgcggagccaggagtacaagaaataccagacaaacaagacaaccggcaacaccgataagagagccttcgtcgagacctggcagtccttttaccggaagaagcttaaggaggtgtggaaacctgccgtgcggtctggcggatctggcggaggctccaccagccccaagaaaaagagaaaagtctaagctgccttctgcggggcttgccttctggccatgcccttcttctctcccttgcacctgtacctcttggtctttgaataaagcctgagtaggaaggctagcaaaaaaaaaaaaaaaaaaaaaaaaaaaaaaaaaaaaaaaaaaaaaaaaaaaaaaaaaaaaaaaaaaaaaaaaaaaaaaaagcccagccggctccccaacctctaccgaggagggcacctctgagtccgccacccccgagagcggccctggcacctccaccgagcccagcgagggcagcgcacccggcagccctgccggcagccccacctccacagaggagggaaccagcaccgagcccagcgaaggcagcgccccaggcaccagcaccgagcctagtgagcaggagattaaacggatcaacaagatcagaagaagacttgtgaaagacagcaacaccaagaaggccggcaagacaggccccatgaaaaccctgctggttagagtgatgacacccgatctgagagagcggctggaaaacctgagaaagaagcctgaaaatatcccccagcccatcagcaatacatctagagccaacctgaataagctgctgaccgattacaccgaaatgaagaaggcgatcctgcatgtgtactgggaagagttccagaaggaccctgtgggcctgatgagccgggtggcccagcctgccagcaagaagatcgatcagaacaagctgaaacctgagatggacgagaagggcaacctgaccaccgccggctttgcctgctctcagtgtggccagcccctgttcgtgtacaagctggagcaggtgtctgagaagggcaaggcttacaccaactacttcggacggtgcaatgtggccgagcacgaaaagctgatcctgctggcccagctgaagcccgagaaggatagcgacgaagccgtgacatatagcctgggaaagtttgggcagagggccctggatttctacagcattcatgtgaccaaggagtccacccaccccgtgaagcccctggcccagatcgccggaaacagatacgcctccggacctgtgggaaaggccctgagcgacgcatgtatgggcacaatcgcctccttcctgtctaagtaccaggacatcatcatcgaacaccagaaggtggtgaagggcaaccagaagagactggagagcctgcgggagctggccggcaaggaaaacctggaataccctagcgtgaccctgccacctcagcctcacaccaaggagggcgttgatgcctacaacgaagtgatcgcccgggtgcgaatgtgggtgaacctgaacctgtggcagaagctgaagctaagcagagatgatgccaagcctctgctgagactgaagggattcccttcctttcctctggtcgagagacaggccaacgaagtggactggtgggacatggtgtgtaacgtgaagaagctgatcaacgagaaaaaggaggatggcaaggtgttttggcagaatctggctggctacaagagacaggaagccctgagaccatacctgagcagcgaggaagatcggaagaagggaaagaaattcgctcggtaccagctgggcgacctgctgctgcacctggaaaagaagcacggcgaggactggggaaaggtgtacgacgaggcctgggagcggattgacaagaaagtggaaggcctgagcaagcacatcaagctggaagaggaacggagaagcgaggacgcccagagcaaggccgccctgaccgactggctgcgggctaaggccagcttcgtgatcgagggcctgaaggaggccgacaaggacgagttctgcagatgcgagctgaagctgcagaagtggtacggggacctgcggggaaagcccttcgccatcgaagccgagaacagcatcctggacatcagcggcttcagcaagcagtacaactgtgccttcatctggcagaaggacggcgtgaagaagctgaacctgtacctgatcatcaactacttcaagggcggcaagctgcggttcaagaagatcaaacctgaagccttcgaagccaacagattctacaccgtgatcaacaaaaagagcggcgagatcgtgcccatggaggtgaacttcaacttcgacgaccccaacctgatcatcctgcctctggcctttggcaagagacagggcagagaattcatctggaacgacctgctgtccctggaaaccggcagcctgaagctggccaacggaagagtgatcgagaagacactgtacaacagaagaacccggcaggatgagcctgccctgttcgtggccctgaccttcgagcggcgggaggtcctggactcctccaatatcaaaccaatgaacctgatcggcgtggcaagaggcgaaaacatccccgccgtgatcgccctgaccgaccccgagggctgcccactgagccggtttaaggatagcctgggaaacccaacccacatcctgagaatcggcgagagctataaggagaagcagcggaccatccaggccaagaaggaggtggagcagcggagagccggcggctacagccggaagtacgccagcaaagccaagaatctggcagacgatatggtgagaaacaccgctagagatctgctgtactacgccgtgacccaggatgccatgctgatcttcgccaacctgagccggggcttcggccggcagggcaagcggaccttcatggccgagagacagtacacacggatggaggactggctgaccgccaagctggcctacgagggcctgagcaagacctacctgtccaagacactggcccagtacacctccaagacatgcagcaactgtgggtttaccatcaccagcgccgactacgacagggtgctggagaagctgaagaagacagcaacaggctggatgaccacaattaacggcaaggagctgaaggtggagggccagattacctactacaacagatacaagagacagaacgtagtcaaggacctgtccgtcgagctggatagactgagcgaagaatctgtgaacaacgacatctcctcctggacaaagggcagaagcggagaagctctgagcctcctgaagaaaagattctcccatagacccgtgcaggagaagttcgtgtgcctgaactgcggcttcgagacacacgcagccgagcaagccgccctgaacatcgccagatcctggctgttcctgcggagccaggagtacaagaaataccagacaaacaagacaaccggcaacaccgataagagagccttcgtcgagacctggcagtccttttaccggaagaagcttaaggaggtgtggaaacctgccgtgcggtctggcggatctggcggaggctccaccagccccaagaaaaagagaaaagtctaagctgccttctgcggggcttgccttctggccatgcccttcttctctcccttgcacctgtacctcttggtctttgaataaagcctgagtaggaaggctagcaaaaaaaaaaaaaaaaaaaaaaaaaaaaaaaaaaaaaaaaaaaaaaaaaaaaaaaaaaaaaaaaaaaaaaaaaaaaaaaa

SEQ ID NO: 9720 - RNA, 8787 nt, synthetic construct
  source 1..8787: mol_type = other RNA
aggaaataagagagaaaagaagagtaagaagaaatataagagccaccatggcccctaagaagaagcgtaaagtgagccggatgaaccacgaccaggagttcgacccccctaaggtgtaccctcccgtccccgccgagaagagaaagcccatccgggtcctgagcctgttcgatggcatcgccaccggtctgctggtgctgaaggacctgggcatccaggtggataggtacattgcctccgaggtgtgcgaggactccatcaccgtgggaatggtgcgtcatcagggcaagatcatgtacgtgggcgacgtgcggagcgtgacacagaagcatatccaggagtggggccctttcgacctggtgatcggcggcagcccttgcaatgacctgagcatcgtgaacccagcccggaagggcctgtacgagggaaccggcagactgttcttcgagttttacagactgctgcacgacgcccggcctaaggaaggcgacgaccggcccttcttttggctgttcgagaatgtggtggccatgggagtcagcgacaagcgggatattagccggttcctggagagcaaccccgtgatgatcgatgccaaggaagtgagcgccgcccaccgggccagatacttctggggcaatctgcctggcatgaacagacccctggccagcaccgtgaacgacaagctggagctgcaggagtgcctggagcacggccggatcgccaagttcagcaaggtgagaaccatcaccacccgaagcaacagcatcaaacaaggcaaggaccagcactttcctgtgttcatgaacgagaaggaggacatcctgtggtgtaccgagatggagagagtgttcgggttcccagtccactacacagatgtcagcaacatgtctagactggccagacagagactgctgggaagaagctggtccgtccctgtgatcagacacctgttcgcccctctgaaggagtacttcgcctgcgtgagcagcggcaacagcaacgccaacagccggggccccagcttctctagcggcctggtgccactgtccctgagagggagccacatgggccccatggagatctacaaaaccgtgagcgcctggaagcggcagcctgtgcgcgtgctgagcctgtttcggaatatcgataaagtcctgaaaagcctgggattcctggagagcggctctggctccggcggtggcaccctgaagtacgtggaggatgtgacaaacgtggtcagacgggatgtggagaagtggggccccttcgatctggtgtacggcagcacccaacccctgggcagctcttgtgaccggtgccctggctggtacatgtttcagttccaccggatcctgcagtacgccctgccgagacaggagtcccagcggccattcttttggattttcatggacaacttgctgctgaccgaggatgaccaggaaactaccactcggttcctgcagaccgaagccgtgaccctgcaggacgtgagaggccgggactaccagaacgccatgcgggtgtggtccaacatccctggactgaaaagcaagcacgcacctctgacccctaaagaagaggagtacctgcaggcccaggtgcggagcagaagcaagctggacgcccctaaggtggatctgctggtgaagaattgcctcctgcccctgagagagtacttcaagtatttcagccagaatagtctgcccctgggaggcagcggcggcggcctgcaggagcccgtgagcttcgccgaggtggccgtgtgcttcagcagggaggagtgggccctgctggaccccgcccagagggtgctgtacagggacgtgatgctggagacctaccagtgcgtggccagcctggccagcctgctgacccccaagcccgtgctgatcagcctgctggagggcggcgaggagccctggatccccgacgtgaggagccccgaggccacccccggcgacctgagccccggcggcccaagcagcggcgcccctcctcccagcggcggcaggcggcccaagcagcggcgcccctcctcccagcggcggcagcccagccggctccccaacctctaccgaggagggcacctctgagtccgccacccccgagagcggccctggcacctccaccgagcccagcgagggcagcgcacccggcagccctgccggcagccccacctccacagaggagggaaccagcaccgagcccagcgaaggcagcgccccaggcaccagcaccgagcctagtgagcaggagattaaacggatcaacaagatcagaagaagacttgtgaaagacagcaacaccaagaaggccggcaagacaggccccatgaaaaccctgctggttagagtgatgacacccgatctgagagagcggctggaaaacctgagaaagaagcctgaaaatatcccccagcccatcagcaatacatctagagccaacctgaataagctgctgaccgattacaccgaaatgaagaaggcgatcctgcatgtgtactgggaagagttccagaaggaccctgtgggcctgatgagccgggtggcccagcctgccagcaagaagatcgatcagaacaagctgaaacctgagatggacgagaagggcaacctgaccaccgccggctttgcctgctctcagtgtggccagcccctgttcgtgtacaagctggagcaggtgtctgagaagggcaaggcttacaccaactacttcggacggtgcaatgtggccgagcacgaaaagctgatcctgctggcccagctgaagcccgagaaggatagcgacgaagccgtgacatatagcctgggaaagtttgggcagagggccctggatttctacagcattcatgtgaccaaggagtccacccaccccgtgaagcccctggcccagatcgccggaaacagatacgcctccggacctgtgggaaaggccctgagcgacgcatgtatgggcacaatcgcctccttcctgtctaagtaccaggacatcatcatcgaacaccagaaggtggtgaagggcaaccagaagagactggagagcctgcgggagctggccggcaaggaaaacctggaataccctagcgtgaccctgccacctcagcctcacaccaaggagggcgttgatgcctacaacgaagtgatcgcccgggtgcgaatgtgggtgaacctgaacctgtggcagaagctgaagctaagcagagatgatgccaagcctctgctgagactgaagggattcccttcctttcctctggtcgagagacaggccaacgaagtggactggtgggacatggtgtgtaacgtgaagaagctgatcaacgagaaaaaggaggatggcaaggtgttttggcagaatctggctggctacaagagacaggaagccctgagaccatacctgagcagcgaggaagatcggaagaagggaaagaaattcgctcggtaccagctgggcgacctgctgctgcacctggaaaagaagcacggcgaggactggggaaaggtgtacgacgaggcctgggagcggattgacaagaaagtggaaggcctgagcaagcacatcaagctggaagaggaacggagaagcgaggacgcccagagcaaggccgccctgaccgactggctgcgggctaaggccagcttcgtgatcgagggcctgaaggaggccgacaaggacgagttctgcagatgcgagctgaagctgcagaagtggtacggggacctgcggggaaagcccttcgccatcgaagccgagaacagcatcctggacatcagcggcttcagcaagcagtacaactgtgccttcatctggcagaaggacggcgtgaagaagctgaacctgtacctgatcatcaactacttcaagggcggcaagctgcggttcaagaagatcaaacctgaagccttcgaagccaacagattctacaccgtgatcaacaaaaagagcggcgagatcgtgcccatggaggtgaacttcaacttcgacgaccccaacctgatcatcctgcctctggcctttggcaagagacagggcagagaattcatctggaacgacctgctgtccctggaaaccggcagcctgaagctggccaacggaagagtgatcgagaagacactgtacaacagaagaacccggcaggatgagcctgccctgttcgtggccctgaccttcgagcggcgggaggtcctggactcctccaatatcaaaccaatgaacctgatcggcgtggcaagaggcgaaaacatccccgccgtgatcgccctgaccgaccccgagggctgcccactgagccggtttaaggatagcctgggaaacccaacccacatcctgagaatcggcgagagctataaggagaagcagcggaccatccaggccaagaaggaggtggagcagcggagagccggcggctacagccggaagtacgccagcaaagccaagaatctggcagacgatatggtgagaaacaccgctagagatctgctgtactacgccgtgacccaggatgccatgctgatcttcgccaacctgagccggggcttcggccggcagggcaagcggaccttcatggccgagagacagtacacacggatggaggactggctgaccgccaagctggcctacgagggcctgagcaagacctacctgtccaagacactggcccagtacacctccaagacatgcagcaactgtgggtttaccatcaccagcgccgactacgacagggtgctggagaagctgaagaagacagcaacaggctggatgaccacaattaacggcaaggagctgaaggtggagggccagattacctactacaacagatacaagagacagaacgtagtcaaggacctgtccgtcgagctggatagactgagcgaagaatctgtgaacaacgacatctcctcctggacaaagggcagaagcggagaagctctgagcctcctgaagaaaagattctcccatagacccgtgcaggagaagttcgtgtgcctgaactgcggcttcgagacacacgcagccgagcaagccgccctgaacatcgccagatcctggctgttcctgcggagccaggagtacaagaaataccagacaaacaagacaaccggcaacaccgataagagagccttcgtcgagacctggcagtccttttaccggaagaagcttaaggaggtgtggaaacctgccgtgcggtctggcggatctggcggaggctccaccagccccaagaaaaagagaaaagtctaagctgccttctgcggggcttgccttctggccatgcccttcttctctcccttgcacctgtacctcttggtctttgaataaagcctgagtaggaaggctagcaaaaaaaaaaaaaaaaaaaaaaaaaaaaaaaaaaaaaaaaaaaaaaaaaaaaaaaaaaaaaaaaaaaaaaaaaaaaaaaagcccagccggctccccaacctctaccgaggagggcacctctgagtccgccacccccgagagcggccctggcacctccaccgagcccagcgagggcagcgcacccggcagccctgccggcagccccacctccacagaggagggaaccagcaccgagcccagcgaaggcagcgccccaggcaccagcaccgagcctagtgagcaggagattaaacggatcaacaagatcagaagaagacttgtgaaagacagcaacaccaagaaggccggcaagacaggccccatgaaaaccctgctggttagagtgatgacacccgatctgagagagcggctggaaaacctgagaaagaagcctgaaaatatcccccagcccatcagcaatacatctagagccaacctgaataagctgctgaccgattacaccgaaatgaagaaggcgatcctgcatgtgtactgggaagagttccagaaggaccctgtgggcctgatgagccgggtggcccagcctgccagcaagaagatcgatcagaacaagctgaaacctgagatggacgagaagggcaacctgaccaccgccggctttgcctgctctcagtgtggccagcccctgttcgtgtacaagctggagcaggtgtctgagaagggcaaggcttacaccaactacttcggacggtgcaatgtggccgagcacgaaaagctgatcctgctggcccagctgaagcccgagaaggatagcgacgaagccgtgacatatagcctgggaaagtttgggcagagggccctggatttctacagcattcatgtgaccaaggagtccacccaccccgtgaagcccctggcccagatcgccggaaacagatacgcctccggacctgtgggaaaggccctgagcgacgcatgtatgggcacaatcgcctccttcctgtctaagtaccaggacatcatcatcgaacaccagaaggtggtgaagggcaaccagaagagactggagagcctgcgggagctggccggcaaggaaaacctggaataccctagcgtgaccctgccacctcagcctcacaccaaggagggcgttgatgcctacaacgaagtgatcgcccgggtgcgaatgtgggtgaacctgaacctgtggcagaagctgaagctaagcagagatgatgccaagcctctgctgagactgaagggattcccttcctttcctctggtcgagagacaggccaacgaagtggactggtgggacatggtgtgtaacgtgaagaagctgatcaacgagaaaaaggaggatggcaaggtgttttggcagaatctggctggctacaagagacaggaagccctgagaccatacctgagcagcgaggaagatcggaagaagggaaagaaattcgctcggtaccagctgggcgacctgctgctgcacctggaaaagaagcacggcgaggactggggaaaggtgtacgacgaggcctgggagcggattgacaagaaagtggaaggcctgagcaagcacatcaagctggaagaggaacggagaagcgaggacgcccagagcaaggccgccctgaccgactggctgcgggctaaggccagcttcgtgatcgagggcctgaaggaggccgacaaggacgagttctgcagatgcgagctgaagctgcagaagtggtacggggacctgcggggaaagcccttcgccatcgaagccgagaacagcatcctggacatcagcggcttcagcaagcagtacaactgtgccttcatctggcagaaggacggcgtgaagaagctgaacctgtacctgatcatcaactacttcaagggcggcaagctgcggttcaagaagatcaaacctgaagccttcgaagccaacagattctacaccgtgatcaacaaaaagagcggcgagatcgtgcccatggaggtgaacttcaacttcgacgaccccaacctgatcatcctgcctctggcctttggcaagagacagggcagagaattcatctggaacgacctgctgtccctggaaaccggcagcctgaagctggccaacggaagagtgatcgagaagacactgtacaacagaagaacccggcaggatgagcctgccctgttcgtggccctgaccttcgagcggcgggaggtcctggactcctccaatatcaaaccaatgaacctgatcggcgtggcaagaggcgaaaacatccccgccgtgatcgccctgaccgaccccgagggctgcccactgagccggtttaaggatagcctgggaaacccaacccacatcctgagaatcggcgagagctataaggagaagcagcggaccatccaggccaagaaggaggtggagcagcggagagccggcggctacagccggaagtacgccagcaaagccaagaatctggcagacgatatggtgagaaacaccgctagagatctgctgtactacgccgtgacccaggatgccatgctgatcttcgccaacctgagccggggcttcggccggcagggcaagcggaccttcatggccgagagacagtacacacggatggaggactggctgaccgccaagctggcctacgagggcctgagcaagacctacctgtccaagacactggcccagtacacctccaagacatgcagcaactgtgggtttaccatcaccagcgccgactacgacagggtgctggagaagctgaagaagacagcaacaggctggatgaccacaattaacggcaaggagctgaaggtggagggccagattacctactacaacagatacaagagacagaacgtagtcaaggacctgtccgtcgagctggatagactgagcgaagaatctgtgaacaacgacatctcctcctggacaaagggcagaagcggagaagctctgagcctcctgaagaaaagattctcccatagacccgtgcaggagaagttcgtgtgcctgaactgcggcttcgagacacacgcagccgagcaagccgccctgaacatcgccagatcctggctgttcctgcggagccaggagtacaagaaataccagacaaacaagacaaccggcaacaccgataagagagccttcgtcgagacctggcagtccttttaccggaagaagcttaaggaggtgtggaaacctgccgtgcggtctggcggatctggcggaggctccaccagccccaagaaaaagagaaaagtctaagctgccttctgcggggcttgccttctggccatgcccttcttctctcccttgcacctgtacctcttggtctttgaataaagcctgagtaggaaggctagcaaaaaaaaaaaaaaaaaaaaaaaaaaaaaaaaaaaaaaaaaaaaaaaaaaaaaaaaaaaaaaaaaaaaaaaaaaaaaaaa

SEQ ID NO: 9721 - RNA, 8784 nt, synthetic construct
  source 1..8784: mol_type = other RNA
aggaaataagagagaaaagaagagtaagaagaaatataagagccaccatggcccctaagaagaagcgtaaagtgagccggatgaaccacgaccaggagttcgacccccctaaggtgtaccctcccgtccccgccgagaagagaaagcccatccgggtcctgagcctgttcgatggcatcgccaccggtctgctggtgctgaaggacctgggcatccaggtggataggtacattgcctccgaggtgtgcgaggactccatcaccgtgggaatggtgcgtcatcagggcaagatcatgtacgtgggcgacgtgcggagcgtgacacagaagcatatccaggagtggggccctttcgacctggtgatcggcggcagcccttgcaatgacctgagcatcgtgaacccagcccggaagggcctgtacgagggaaccggcagactgttcttcgagttttacagactgctgcacgacgcccggcctaaggaaggcgacgaccggcccttcttttggctgttcgagaatgtggtggccatgggagtcagcgacaagcgggatattagccggttcctggagagcaaccccgtgatgatcgatgccaaggaagtgagcgccgcccaccgggccagatacttctggggcaatctgcctggcatgaacagacccctggccagcaccgtgaacgacaagctggagctgcaggagtgcctggagcacggccggatcgccaagttcagcaaggtgagaaccatcaccacccgaagcaacagcatcaaacaaggcaaggaccagcactttcctgtgttcatgaacgagaaggaggacatcctgtggtgtaccgagatggagagagtgttcgggttcccagtccactacacagatgtcagcaacatgtctagactggccagacagagactgctgggaagaagctggtccgtccctgtgatcagacacctgttcgcccctctgaaggagtacttcgcctgcgtgagcagcggcaacagcaacgccaacagccggggccccagcttctctagcggcctggtgccactgtccctgagagggagccacatgggccccatggagatctacaaaaccgtgagcgcctggaagcggcagcctgtgcgcgtgctgagcctgtttcggaatatcgataaagtcctgaaaagcctgggattcctggagagcggctctggctccggcggtggcaccctgaagtacgtggaggatgtgacaaacgtggtcagacgggatgtggagaagtggggccccttcgatctggtgtacggcagcacccaacccctgggcagctcttgtgaccggtgccctggctggtacatgtttcagttccaccggatcctgcagtacgccctgccgagacaggagtcccagcggccattcttttggattttcatggacaacttgctgctgaccgaggatgaccaggaaactaccactcggttcctgcagaccgaagccgtgaccctgcaggacgtgagaggccgggactaccagaacgccatgcgggtgtggtccaacatccctggactgaaaagcaagcacgcacctctgacccctaaagaagaggagtacctgcaggcccaggtgcggagcagaagcaagctggacgcccctaaggtggatctgctggtgaagaattgcctcctgcccctgagagagtacttcaagtatttcagccagaatagtctgcccctgggaggcagcggcggcggcgccctgagaagcgtgatgttcagcgacgtgagcatcgacttcagccccgaggagtgggagtacctggacctggagcagaaggacctgtacagagacgtgatgctggagaactacagcaacctggtgagcctgggctgcttcatcagcaagcccgacgtgatcagcagcctggagcagggcaaggagccctggaaggtggtgagaaagggcagaagacagtaccccgacctggagaccaagggcggcccaagcagcggcgcccctcctcccagcggcggcaggcggcccaagcagcggcgcccctcctcccagcggcggcagcccagccggctccccaacctctaccgaggagggcacctctgagtccgccacccccgagagcggccctggcacctccaccgagcccagcgagggcagcgcacccggcagccctgccggcagccccacctccacagaggagggaaccagcaccgagcccagcgaaggcagcgccccaggcaccagcaccgagcctagtgagcaggagattaaacggatcaacaagatcagaagaagacttgtgaaagacagcaacaccaagaaggccggcaagacaggccccatgaaaaccctgctggttagagtgatgacacccgatctgagagagcggctggaaaacctgagaaagaagcctgaaaatatcccccagcccatcagcaatacatctagagccaacctgaataagctgctgaccgattacaccgaaatgaagaaggcgatcctgcatgtgtactgggaagagttccagaaggaccctgtgggcctgatgagccgggtggcccagcctgccagcaagaagatcgatcagaacaagctgaaacctgagatggacgagaagggcaacctgaccaccgccggctttgcctgctctcagtgtggccagcccctgttcgtgtacaagctggagcaggtgtctgagaagggcaaggcttacaccaactacttcggacggtgcaatgtggccgagcacgaaaagctgatcctgctggcccagctgaagcccgagaaggatagcgacgaagccgtgacatatagcctgggaaagtttgggcagagggccctggatttctacagcattcatgtgaccaaggagtccacccaccccgtgaagcccctggcccagatcgccggaaacagatacgcctccggacctgtgggaaaggccctgagcgacgcatgtatgggcacaatcgcctccttcctgtctaagtaccaggacatcatcatcgaacaccagaaggtggtgaagggcaaccagaagagactggagagcctgcgggagctggccggcaaggaaaacctggaataccctagcgtgaccctgccacctcagcctcacaccaaggagggcgttgatgcctacaacgaagtgatcgcccgggtgcgaatgtgggtgaacctgaacctgtggcagaagctgaagctaagcagagatgatgccaagcctctgctgagactgaagggattcccttcctttcctctggtcgagagacaggccaacgaagtggactggtgggacatggtgtgtaacgtgaagaagctgatcaacgagaaaaaggaggatggcaaggtgttttggcagaatctggctggctacaagagacaggaagccctgagaccatacctgagcagcgaggaagatcggaagaagggaaagaaattcgctcggtaccagctgggcgacctgctgctgcacctggaaaagaagcacggcgaggactggggaaaggtgtacgacgaggcctgggagcggattgacaagaaagtggaaggcctgagcaagcacatcaagctggaagaggaacggagaagcgaggacgcccagagcaaggccgccctgaccgactggctgcgggctaaggccagcttcgtgatcgagggcctgaaggaggccgacaaggacgagttctgcagatgcgagctgaagctgcagaagtggtacggggacctgcggggaaagcccttcgccatcgaagccgagaacagcatcctggacatcagcggcttcagcaagcagtacaactgtgccttcatctggcagaaggacggcgtgaagaagctgaacctgtacctgatcatcaactacttcaagggcggcaagctgcggttcaagaagatcaaacctgaagccttcgaagccaacagattctacaccgtgatcaacaaaaagagcggcgagatcgtgcccatggaggtgaacttcaacttcgacgaccccaacctgatcatcctgcctctggcctttggcaagagacagggcagagaattcatctggaacgacctgctgtccctggaaaccggcagcctgaagctggccaacggaagagtgatcgagaagacactgtacaacagaagaacccggcaggatgagcctgccctgttcgtggccctgaccttcgagcggcgggaggtcctggactcctccaatatcaaaccaatgaacctgatcggcgtggcaagaggcgaaaacatccccgccgtgatcgccctgaccgaccccgagggctgcccactgagccggtttaaggatagcctgggaaacccaacccacatcctgagaatcggcgagagctataaggagaagcagcggaccatccaggccaagaaggaggtggagcagcggagagccggcggctacagccggaagtacgccagcaaagccaagaatctggcagacgatatggtgagaaacaccgctagagatctgctgtactacgccgtgacccaggatgccatgctgatcttcgccaacctgagccggggcttcggccggcagggcaagcggaccttcatggccgagagacagtacacacggatggaggactggctgaccgccaagctggcctacgagggcctgagcaagacctacctgtccaagacactggcccagtacacctccaagacatgcagcaactgtgggtttaccatcaccagcgccgactacgacagggtgctggagaagctgaagaagacagcaacaggctggatgaccacaattaacggcaaggagctgaaggtggagggccagattacctactacaacagatacaagagacagaacgtagtcaaggacctgtccgtcgagctggatagactgagcgaagaatctgtgaacaacgacatctcctcctggacaaagggcagaagcggagaagctctgagcctcctgaagaaaagattctcccatagacccgtgcaggagaagttcgtgtgcctgaactgcggcttcgagacacacgcagccgagcaagccgccctgaacatcgccagatcctggctgttcctgcggagccaggagtacaagaaataccagacaaacaagacaaccggcaacaccgataagagagccttcgtcgagacctggcagtccttttaccggaagaagcttaaggaggtgtggaaacctgccgtgcggtctggcggatctggcggaggctccaccagccccaagaaaaagagaaaagtctaagctgccttctgcggggcttgccttctggccatgcccttcttctctcccttgcacctgtacctcttggtctttgaataaagcctgagtaggaaggctagcaaaaaaaaaaaaaaaaaaaaaaaaaaaaaaaaaaaaaaaaaaaaaaaaaaaaaaaaaaaaaaaaaaaaaaaaaaaaaaaagcccagccggctccccaacctctaccgaggagggcacctctgagtccgccacccccgagagcggccctggcacctccaccgagcccagcgagggcagcgcacccggcagccctgccggcagccccacctccacagaggagggaaccagcaccgagcccagcgaaggcagcgccccaggcaccagcaccgagcctagtgagcaggagattaaacggatcaacaagatcagaagaagacttgtgaaagacagcaacaccaagaaggccggcaagacaggccccatgaaaaccctgctggttagagtgatgacacccgatctgagagagcggctggaaaacctgagaaagaagcctgaaaatatcccccagcccatcagcaatacatctagagccaacctgaataagctgctgaccgattacaccgaaatgaagaaggcgatcctgcatgtgtactgggaagagttccagaaggaccctgtgggcctgatgagccgggtggcccagcctgccagcaagaagatcgatcagaacaagctgaaacctgagatggacgagaagggcaacctgaccaccgccggctttgcctgctctcagtgtggccagcccctgttcgtgtacaagctggagcaggtgtctgagaagggcaaggcttacaccaactacttcggacggtgcaatgtggccgagcacgaaaagctgatcctgctggcccagctgaagcccgagaaggatagcgacgaagccgtgacatatagcctgggaaagtttgggcagagggccctggatttctacagcattcatgtgaccaaggagtccacccaccccgtgaagcccctggcccagatcgccggaaacagatacgcctccggacctgtgggaaaggccctgagcgacgcatgtatgggcacaatcgcctccttcctgtctaagtaccaggacatcatcatcgaacaccagaaggtggtgaagggcaaccagaagagactggagagcctgcgggagctggccggcaaggaaaacctggaataccctagcgtgaccctgccacctcagcctcacaccaaggagggcgttgatgcctacaacgaagtgatcgcccgggtgcgaatgtgggtgaacctgaacctgtggcagaagctgaagctaagcagagatgatgccaagcctctgctgagactgaagggattcccttcctttcctctggtcgagagacaggccaacgaagtggactggtgggacatggtgtgtaacgtgaagaagctgatcaacgagaaaaaggaggatggcaaggtgttttggcagaatctggctggctacaagagacaggaagccctgagaccatacctgagcagcgaggaagatcggaagaagggaaagaaattcgctcggtaccagctgggcgacctgctgctgcacctggaaaagaagcacggcgaggactggggaaaggtgtacgacgaggcctgggagcggattgacaagaaagtggaaggcctgagcaagcacatcaagctggaagaggaacggagaagcgaggacgcccagagcaaggccgccctgaccgactggctgcgggctaaggccagcttcgtgatcgagggcctgaaggaggccgacaaggacgagttctgcagatgcgagctgaagctgcagaagtggtacggggacctgcggggaaagcccttcgccatcgaagccgagaacagcatcctggacatcagcggcttcagcaagcagtacaactgtgccttcatctggcagaaggacggcgtgaagaagctgaacctgtacctgatcatcaactacttcaagggcggcaagctgcggttcaagaagatcaaacctgaagccttcgaagccaacagattctacaccgtgatcaacaaaaagagcggcgagatcgtgcccatggaggtgaacttcaacttcgacgaccccaacctgatcatcctgcctctggcctttggcaagagacagggcagagaattcatctggaacgacctgctgtccctggaaaccggcagcctgaagctggccaacggaagagtgatcgagaagacactgtacaacagaagaacccggcaggatgagcctgccctgttcgtggccctgaccttcgagcggcgggaggtcctggactcctccaatatcaaaccaatgaacctgatcggcgtggcaagaggcgaaaacatccccgccgtgatcgccctgaccgaccccgagggctgcccactgagccggtttaaggatagcctgggaaacccaacccacatcctgagaatcggcgagagctataaggagaagcagcggaccatccaggccaagaaggaggtggagcagcggagagccggcggctacagccggaagtacgccagcaaagccaagaatctggcagacgatatggtgagaaacaccgctagagatctgctgtactacgccgtgacccaggatgccatgctgatcttcgccaacctgagccggggcttcggccggcagggcaagcggaccttcatggccgagagacagtacacacggatggaggactggctgaccgccaagctggcctacgagggcctgagcaagacctacctgtccaagacactggcccagtacacctccaagacatgcagcaactgtgggtttaccatcaccagcgccgactacgacagggtgctggagaagctgaagaagacagcaacaggctggatgaccacaattaacggcaaggagctgaaggtggagggccagattacctactacaacagatacaagagacagaacgtagtcaaggacctgtccgtcgagctggatagactgagcgaagaatctgtgaacaacgacatctcctcctggacaaagggcagaagcggagaagctctgagcctcctgaagaaaagattctcccatagacccgtgcaggagaagttcgtgtgcctgaactgcggcttcgagacacacgcagccgagcaagccgccctgaacatcgccagatcctggctgttcctgcggagccaggagtacaagaaataccagacaaacaagacaaccggcaacaccgataagagagccttcgtcgagacctggcagtccttttaccggaagaagcttaaggaggtgtggaaacctgccgtgcggtctggcggatctggcggaggctccaccagccccaagaaaaagagaaaagtctaagctgccttctgcggggcttgccttctggccatgcccttcttctctcccttgcacctgtacctcttggtctttgaataaagcctgagtaggaaggctagcaaaaaaaaaaaaaaaaaaaaaaaaaaaaaaaaaaaaaaaaaaaaaaaaaaaaaaaaaaaaaaaaaaaaaaaaaaaaaaaa

SEQ ID NO: 9722 - RNA, 8787 nt, synthetic construct
  source 1..8787: mol_type = other RNA
aggaaataagagagaaaagaagagtaagaagaaatataagagccaccatggcccctaagaagaagcgtaaagtgagccggatgaaccacgaccaggagttcgacccccctaaggtgtaccctcccgtccccgccgagaagagaaagcccatccgggtcctgagcctgttcgatggcatcgccaccggtctgctggtgctgaaggacctgggcatccaggtggataggtacattgcctccgaggtgtgcgaggactccatcaccgtgggaatggtgcgtcatcagggcaagatcatgtacgtgggcgacgtgcggagcgtgacacagaagcatatccaggagtggggccctttcgacctggtgatcggcggcagcccttgcaatgacctgagcatcgtgaacccagcccggaagggcctgtacgagggaaccggcagactgttcttcgagttttacagactgctgcacgacgcccggcctaaggaaggcgacgaccggcccttcttttggctgttcgagaatgtggtggccatgggagtcagcgacaagcgggatattagccggttcctggagagcaaccccgtgatgatcgatgccaaggaagtgagcgccgcccaccgggccagatacttctggggcaatctgcctggcatgaacagacccctggccagcaccgtgaacgacaagctggagctgcaggagtgcctggagcacggccggatcgccaagttcagcaaggtgagaaccatcaccacccgaagcaacagcatcaaacaaggcaaggaccagcactttcctgtgttcatgaacgagaaggaggacatcctgtggtgtaccgagatggagagagtgttcgggttcccagtccactacacagatgtcagcaacatgtctagactggccagacagagactgctgggaagaagctggtccgtccctgtgatcagacacctgttcgcccctctgaaggagtacttcgcctgcgtgagcagcggcaacagcaacgccaacagccggggccccagcttctctagcggcctggtgccactgtccctgagagggagccacatgggccccatggagatctacaaaaccgtgagcgcctggaagcggcagcctgtgcgcgtgctgagcctgtttcggaatatcgataaagtcctgaaaagcctgggattcctggagagcggctctggctccggcggtggcaccctgaagtacgtggaggatgtgacaaacgtggtcagacgggatgtggagaagtggggccccttcgatctggtgtacggcagcacccaacccctgggcagctcttgtgaccggtgccctggctggtacatgtttcagttccaccggatcctgcagtacgccctgccgagacaggagtcccagcggccattcttttggattttcatggacaacttgctgctgaccgaggatgaccaggaaactaccactcggttcctgcagaccgaagccgtgaccctgcaggacgtgagaggccgggactaccagaacgccatgcgggtgtggtccaacatccctggactgaaaagcaagcacgcacctctgacccctaaagaagaggagtacctgcaggcccaggtgcggagcagaagcaagctggacgcccctaaggtggatctgctggtgaagaattgcctcctgcccctgagagagtacttcaagtatttcagccagaatagtctgcccctgggaggcagcggcggcggccagctgaccttcgaggacgtggccctgagcttcagcaaggaggagtggcagatcatggaccccaaccagaagaccctgtacatcgacgtgatgcaggagatctacgagaccgtgaccagcctgggcctgaagctgaagaacgacaccggcaacgaccagcccgtgagcctgagcaccagcgagatccagcccagcggctgcaaggtgctgaggaaggccaggatgaaggtggcccagaccaccggcggcccaagcagcggcgcccctcctcccagcggcggcaggcggcccaagcagcggcgcccctcctcccagcggcggcagcccagccggctccccaacctctaccgaggagggcacctctgagtccgccacccccgagagcggccctggcacctccaccgagcccagcgagggcagcgcacccggcagccctgccggcagccccacctccacagaggagggaaccagcaccgagcccagcgaaggcagcgccccaggcaccagcaccgagcctagtgagcaggagattaaacggatcaacaagatcagaagaagacttgtgaaagacagcaacaccaagaaggccggcaagacaggccccatgaaaaccctgctggttagagtgatgacacccgatctgagagagcggctggaaaacctgagaaagaagcctgaaaatatcccccagcccatcagcaatacatctagagccaacctgaataagctgctgaccgattacaccgaaatgaagaaggcgatcctgcatgtgtactgggaagagttccagaaggaccctgtgggcctgatgagccgggtggcccagcctgccagcaagaagatcgatcagaacaagctgaaacctgagatggacgagaagggcaacctgaccaccgccggctttgcctgctctcagtgtggccagcccctgttcgtgtacaagctggagcaggtgtctgagaagggcaaggcttacaccaactacttcggacggtgcaatgtggccgagcacgaaaagctgatcctgctggcccagctgaagcccgagaaggatagcgacgaagccgtgacatatagcctgggaaagtttgggcagagggccctggatttctacagcattcatgtgaccaaggagtccacccaccccgtgaagcccctggcccagatcgccggaaacagatacgcctccggacctgtgggaaaggccctgagcgacgcatgtatgggcacaatcgcctccttcctgtctaagtaccaggacatcatcatcgaacaccagaaggtggtgaagggcaaccagaagagactggagagcctgcgggagctggccggcaaggaaaacctggaataccctagcgtgaccctgccacctcagcctcacaccaaggagggcgttgatgcctacaacgaagtgatcgcccgggtgcgaatgtgggtgaacctgaacctgtggcagaagctgaagctaagcagagatgatgccaagcctctgctgagactgaagggattcccttcctttcctctggtcgagagacaggccaacgaagtggactggtgggacatggtgtgtaacgtgaagaagctgatcaacgagaaaaaggaggatggcaaggtgttttggcagaatctggctggctacaagagacaggaagccctgagaccatacctgagcagcgaggaagatcggaagaagggaaagaaattcgctcggtaccagctgggcgacctgctgctgcacctggaaaagaagcacggcgaggactggggaaaggtgtacgacgaggcctgggagcggattgacaagaaagtggaaggcctgagcaagcacatcaagctggaagaggaacggagaagcgaggacgcccagagcaaggccgccctgaccgactggctgcgggctaaggccagcttcgtgatcgagggcctgaaggaggccgacaaggacgagttctgcagatgcgagctgaagctgcagaagtggtacggggacctgcggggaaagcccttcgccatcgaagccgagaacagcatcctggacatcagcggcttcagcaagcagtacaactgtgccttcatctggcagaaggacggcgtgaagaagctgaacctgtacctgatcatcaactacttcaagggcggcaagctgcggttcaagaagatcaaacctgaagccttcgaagccaacagattctacaccgtgatcaacaaaaagagcggcgagatcgtgcccatggaggtgaacttcaacttcgacgaccccaacctgatcatcctgcctctggcctttggcaagagacagggcagagaattcatctggaacgacctgctgtccctggaaaccggcagcctgaagctggccaacggaagagtgatcgagaagacactgtacaacagaagaacccggcaggatgagcctgccctgttcgtggccctgaccttcgagcggcgggaggtcctggactcctccaatatcaaaccaatgaacctgatcggcgtggcaagaggcgaaaacatccccgccgtgatcgccctgaccgaccccgagggctgcccactgagccggtttaaggatagcctgggaaacccaacccacatcctgagaatcggcgagagctataaggagaagcagcggaccatccaggccaagaaggaggtggagcagcggagagccggcggctacagccggaagtacgccagcaaagccaagaatctggcagacgatatggtgagaaacaccgctagagatctgctgtactacgccgtgacccaggatgccatgctgatcttcgccaacctgagccggggcttcggccggcagggcaagcggaccttcatggccgagagacagtacacacggatggaggactggctgaccgccaagctggcctacgagggcctgagcaagacctacctgtccaagacactggcccagtacacctccaagacatgcagcaactgtgggtttaccatcaccagcgccgactacgacagggtgctggagaagctgaagaagacagcaacaggctggatgaccacaattaacggcaaggagctgaaggtggagggccagattacctactacaacagatacaagagacagaacgtagtcaaggacctgtccgtcgagctggatagactgagcgaagaatctgtgaacaacgacatctcctcctggacaaagggcagaagcggagaagctctgagcctcctgaagaaaagattctcccatagacccgtgcaggagaagttcgtgtgcctgaactgcggcttcgagacacacgcagccgagcaagccgccctgaacatcgccagatcctggctgttcctgcggagccaggagtacaagaaataccagacaaacaagacaaccggcaacaccgataagagagccttcgtcgagacctggcagtccttttaccggaagaagcttaaggaggtgtggaaacctgccgtgcggtctggcggatctggcggaggctccaccagccccaagaaaaagagaaaagtctaagctgccttctgcggggcttgccttctggccatgcccttcttctctcccttgcacctgtacctcttggtctttgaataaagcctgagtaggaaggctagcaaaaaaaaaaaaaaaaaaaaaaaaaaaaaaaaaaaaaaaaaaaaaaaaaaaaaaaaaaaaaaaaaaaaaaaaaaaaaaaagcccagccggctccccaacctctaccgaggagggcacctctgagtccgccacccccgagagcggccctggcacctccaccgagcccagcgagggcagcgcacccggcagccctgccggcagccccacctccacagaggagggaaccagcaccgagcccagcgaaggcagcgccccaggcaccagcaccgagcctagtgagcaggagattaaacggatcaacaagatcagaagaagacttgtgaaagacagcaacaccaagaaggccggcaagacaggccccatgaaaaccctgctggttagagtgatgacacccgatctgagagagcggctggaaaacctgagaaagaagcctgaaaatatcccccagcccatcagcaatacatctagagccaacctgaataagctgctgaccgattacaccgaaatgaagaaggcgatcctgcatgtgtactgggaagagttccagaaggaccctgtgggcctgatgagccgggtggcccagcctgccagcaagaagatcgatcagaacaagctgaaacctgagatggacgagaagggcaacctgaccaccgccggctttgcctgctctcagtgtggccagcccctgttcgtgtacaagctggagcaggtgtctgagaagggcaaggcttacaccaactacttcggacggtgcaatgtggccgagcacgaaaagctgatcctgctggcccagctgaagcccgagaaggatagcgacgaagccgtgacatatagcctgggaaagtttgggcagagggccctggatttctacagcattcatgtgaccaaggagtccacccaccccgtgaagcccctggcccagatcgccggaaacagatacgcctccggacctgtgggaaaggccctgagcgacgcatgtatgggcacaatcgcctccttcctgtctaagtaccaggacatcatcatcgaacaccagaaggtggtgaagggcaaccagaagagactggagagcctgcgggagctggccggcaaggaaaacctggaataccctagcgtgaccctgccacctcagcctcacaccaaggagggcgttgatgcctacaacgaagtgatcgcccgggtgcgaatgtgggtgaacctgaacctgtggcagaagctgaagctaagcagagatgatgccaagcctctgctgagactgaagggattcccttcctttcctctggtcgagagacaggccaacgaagtggactggtgggacatggtgtgtaacgtgaagaagctgatcaacgagaaaaaggaggatggcaaggtgttttggcagaatctggctggctacaagagacaggaagccctgagaccatacctgagcagcgaggaagatcggaagaagggaaagaaattcgctcggtaccagctgggcgacctgctgctgcacctggaaaagaagcacggcgaggactggggaaaggtgtacgacgaggcctgggagcggattgacaagaaagtggaaggcctgagcaagcacatcaagctggaagaggaacggagaagcgaggacgcccagagcaaggccgccctgaccgactggctgcgggctaaggccagcttcgtgatcgagggcctgaaggaggccgacaaggacgagttctgcagatgcgagctgaagctgcagaagtggtacggggacctgcggggaaagcccttcgccatcgaagccgagaacagcatcctggacatcagcggcttcagcaagcagtacaactgtgccttcatctggcagaaggacggcgtgaagaagctgaacctgtacctgatcatcaactacttcaagggcggcaagctgcggttcaagaagatcaaacctgaagccttcgaagccaacagattctacaccgtgatcaacaaaaagagcggcgagatcgtgcccatggaggtgaacttcaacttcgacgaccccaacctgatcatcctgcctctggcctttggcaagagacagggcagagaattcatctggaacgacctgctgtccctggaaaccggcagcctgaagctggccaacggaagagtgatcgagaagacactgtacaacagaagaacccggcaggatgagcctgccctgttcgtggccctgaccttcgagcggcgggaggtcctggactcctccaatatcaaaccaatgaacctgatcggcgtggcaagaggcgaaaacatccccgccgtgatcgccctgaccgaccccgagggctgcccactgagccggtttaaggatagcctgggaaacccaacccacatcctgagaatcggcgagagctataaggagaagcagcggaccatccaggccaagaaggaggtggagcagcggagagccggcggctacagccggaagtacgccagcaaagccaagaatctggcagacgatatggtgagaaacaccgctagagatctgctgtactacgccgtgacccaggatgccatgctgatcttcgccaacctgagccggggcttcggccggcagggcaagcggaccttcatggccgagagacagtacacacggatggaggactggctgaccgccaagctggcctacgagggcctgagcaagacctacctgtccaagacactggcccagtacacctccaagacatgcagcaactgtgggtttaccatcaccagcgccgactacgacagggtgctggagaagctgaagaagacagcaacaggctggatgaccacaattaacggcaaggagctgaaggtggagggccagattacctactacaacagatacaagagacagaacgtagtcaaggacctgtccgtcgagctggatagactgagcgaagaatctgtgaacaacgacatctcctcctggacaaagggcagaagcggagaagctctgagcctcctgaagaaaagattctcccatagacccgtgcaggagaagttcgtgtgcctgaactgcggcttcgagacacacgcagccgagcaagccgccctgaacatcgccagatcctggctgttcctgcggagccaggagtacaagaaataccagacaaacaagacaaccggcaacaccgataagagagccttcgtcgagacctggcagtccttttaccggaagaagcttaaggaggtgtggaaacctgccgtgcggtctggcggatctggcggaggctccaccagccccaagaaaaagagaaaagtctaagctgccttctgcggggcttgccttctggccatgcccttcttctctcccttgcacctgtacctcttggtctttgaataaagcctgagtaggaaggctagcaaaaaaaaaaaaaaaaaaaaaaaaaaaaaaaaaaaaaaaaaaaaaaaaaaaaaaaaaaaaaaaaaaaaaaaaaaaaaaaa

SEQ ID NO: 9723 - RNA, 8787 nt, synthetic construct
  source 1..8787: mol_type = other RNA
aggaaataagagagaaaagaagagtaagaagaaatataagagccaccatggcccctaagaagaagcgtaaagtgagccggatgaaccacgaccaggagttcgacccccctaaggtgtaccctcccgtccccgccgagaagagaaagcccatccgggtcctgagcctgttcgatggcatcgccaccggtctgctggtgctgaaggacctgggcatccaggtggataggtacattgcctccgaggtgtgcgaggactccatcaccgtgggaatggtgcgtcatcagggcaagatcatgtacgtgggcgacgtgcggagcgtgacacagaagcatatccaggagtggggccctttcgacctggtgatcggcggcagcccttgcaatgacctgagcatcgtgaacccagcccggaagggcctgtacgagggaaccggcagactgttcttcgagttttacagactgctgcacgacgcccggcctaaggaaggcgacgaccggcccttcttttggctgttcgagaatgtggtggccatgggagtcagcgacaagcgggatattagccggttcctggagagcaaccccgtgatgatcgatgccaaggaagtgagcgccgcccaccgggccagatacttctggggcaatctgcctggcatgaacagacccctggccagcaccgtgaacgacaagctggagctgcaggagtgcctggagcacggccggatcgccaagttcagcaaggtgagaaccatcaccacccgaagcaacagcatcaaacaaggcaaggaccagcactttcctgtgttcatgaacgagaaggaggacatcctgtggtgtaccgagatggagagagtgttcgggttcccagtccactacacagatgtcagcaacatgtctagactggccagacagagactgctgggaagaagctggtccgtccctgtgatcagacacctgttcgcccctctgaaggagtacttcgcctgcgtgagcagcggcaacagcaacgccaacagccggggccccagcttctctagcggcctggtgccactgtccctgagagggagccacatgggccccatggagatctacaaaaccgtgagcgcctggaagcggcagcctgtgcgcgtgctgagcctgtttcggaatatcgataaagtcctgaaaagcctgggattcctggagagcggctctggctccggcggtggcaccctgaagtacgtggaggatgtgacaaacgtggtcagacgggatgtggagaagtggggccccttcgatctggtgtacggcagcacccaacccctgggcagctcttgtgaccggtgccctggctggtacatgtttcagttccaccggatcctgcagtacgccctgccgagacaggagtcccagcggccattcttttggattttcatggacaacttgctgctgaccgaggatgaccaggaaactaccactcggttcctgcagaccgaagccgtgaccctgcaggacgtgagaggccgggactaccagaacgccatgcgggtgtggtccaacatccctggactgaaaagcaagcacgcacctctgacccctaaagaagaggagtacctgcaggcccaggtgcggagcagaagcaagctggacgcccctaaggtggatctgctggtgaagaattgcctcctgcccctgagagagtacttcaagtatttcagccagaatagtctgcccctgggaggcagcggcggcggccagctgcaggagaccatgaccttcaaggacgtggaggtgaccttcagccaggacgagtggggctggctggacagcgcccagaggaacctgtacagggacgtgatgctggagaactacaggaacatggccagcctggtgggccccttcaccaagcccgccctgatcagctggctggaggccagggagccctggggcctgaacatgcaggccgcccagcccaagggcaaccccgtggccgcccccggcggcccaagcagcggcgcccctcctcccagcggcggcaggcggcccaagcagcggcgcccctcctcccagcggcggcagcccagccggctccccaacctctaccgaggagggcacctctgagtccgccacccccgagagcggccctggcacctccaccgagcccagcgagggcagcgcacccggcagccctgccggcagccccacctccacagaggagggaaccagcaccgagcccagcgaaggcagcgccccaggcaccagcaccgagcctagtgagcaggagattaaacggatcaacaagatcagaagaagacttgtgaaagacagcaacaccaagaaggccggcaagacaggccccatgaaaaccctgctggttagagtgatgacacccgatctgagagagcggctggaaaacctgagaaagaagcctgaaaatatcccccagcccatcagcaatacatctagagccaacctgaataagctgctgaccgattacaccgaaatgaagaaggcgatcctgcatgtgtactgggaagagttccagaaggaccctgtgggcctgatgagccgggtggcccagcctgccagcaagaagatcgatcagaacaagctgaaacctgagatggacgagaagggcaacctgaccaccgccggctttgcctgctctcagtgtggccagcccctgttcgtgtacaagctggagcaggtgtctgagaagggcaaggcttacaccaactacttcggacggtgcaatgtggccgagcacgaaaagctgatcctgctggcccagctgaagcccgagaaggatagcgacgaagccgtgacatatagcctgggaaagtttgggcagagggccctggatttctacagcattcatgtgaccaaggagtccacccaccccgtgaagcccctggcccagatcgccggaaacagatacgcctccggacctgtgggaaaggccctgagcgacgcatgtatgggcacaatcgcctccttcctgtctaagtaccaggacatcatcatcgaacaccagaaggtggtgaagggcaaccagaagagactggagagcctgcgggagctggccggcaaggaaaacctggaataccctagcgtgaccctgccacctcagcctcacaccaaggagggcgttgatgcctacaacgaagtgatcgcccgggtgcgaatgtgggtgaacctgaacctgtggcagaagctgaagctaagcagagatgatgccaagcctctgctgagactgaagggattcccttcctttcctctggtcgagagacaggccaacgaagtggactggtgggacatggtgtgtaacgtgaagaagctgatcaacgagaaaaaggaggatggcaaggtgttttggcagaatctggctggctacaagagacaggaagccctgagaccatacctgagcagcgaggaagatcggaagaagggaaagaaattcgctcggtaccagctgggcgacctgctgctgcacctggaaaagaagcacggcgaggactggggaaaggtgtacgacgaggcctgggagcggattgacaagaaagtggaaggcctgagcaagcacatcaagctggaagaggaacggagaagcgaggacgcccagagcaaggccgccctgaccgactggctgcgggctaaggccagcttcgtgatcgagggcctgaaggaggccgacaaggacgagttctgcagatgcgagctgaagctgcagaagtggtacggggacctgcggggaaagcccttcgccatcgaagccgagaacagcatcctggacatcagcggcttcagcaagcagtacaactgtgccttcatctggcagaaggacggcgtgaagaagctgaacctgtacctgatcatcaactacttcaagggcggcaagctgcggttcaagaagatcaaacctgaagccttcgaagccaacagattctacaccgtgatcaacaaaaagagcggcgagatcgtgcccatggaggtgaacttcaacttcgacgaccccaacctgatcatcctgcctctggcctttggcaagagacagggcagagaattcatctggaacgacctgctgtccctggaaaccggcagcctgaagctggccaacggaagagtgatcgagaagacactgtacaacagaagaacccggcaggatgagcctgccctgttcgtggccctgaccttcgagcggcgggaggtcctggactcctccaatatcaaaccaatgaacctgatcggcgtggcaagaggcgaaaacatccccgccgtgatcgccctgaccgaccccgagggctgcccactgagccggtttaaggatagcctgggaaacccaacccacatcctgagaatcggcgagagctataaggagaagcagcggaccatccaggccaagaaggaggtggagcagcggagagccggcggctacagccggaagtacgccagcaaagccaagaatctggcagacgatatggtgagaaacaccgctagagatctgctgtactacgccgtgacccaggatgccatgctgatcttcgccaacctgagccggggcttcggccggcagggcaagcggaccttcatggccgagagacagtacacacggatggaggactggctgaccgccaagctggcctacgagggcctgagcaagacctacctgtccaagacactggcccagtacacctccaagacatgcagcaactgtgggtttaccatcaccagcgccgactacgacagggtgctggagaagctgaagaagacagcaacaggctggatgaccacaattaacggcaaggagctgaaggtggagggccagattacctactacaacagatacaagagacagaacgtagtcaaggacctgtccgtcgagctggatagactgagcgaagaatctgtgaacaacgacatctcctcctggacaaagggcagaagcggagaagctctgagcctcctgaagaaaagattctcccatagacccgtgcaggagaagttcgtgtgcctgaactgcggcttcgagacacacgcagccgagcaagccgccctgaacatcgccagatcctggctgttcctgcggagccaggagtacaagaaataccagacaaacaagacaaccggcaacaccgataagagagccttcgtcgagacctggcagtccttttaccggaagaagcttaaggaggtgtggaaacctgccgtgcggtctggcggatctggcggaggctccaccagccccaagaaaaagagaaaagtctaagctgccttctgcggggcttgccttctggccatgcccttcttctctcccttgcacctgtacctcttggtctttgaataaagcctgagtaggaaggctagcaaaaaaaaaaaaaaaaaaaaaaaaaaaaaaaaaaaaaaaaaaaaaaaaaaaaaaaaaaaaaaaaaaaaaaaaaaaaaaaagcccagccggctccccaacctctaccgaggagggcacctctgagtccgccacccccgagagcggccctggcacctccaccgagcccagcgagggcagcgcacccggcagccctgccggcagccccacctccacagaggagggaaccagcaccgagcccagcgaaggcagcgccccaggcaccagcaccgagcctagtgagcaggagattaaacggatcaacaagatcagaagaagacttgtgaaagacagcaacaccaagaaggccggcaagacaggccccatgaaaaccctgctggttagagtgatgacacccgatctgagagagcggctggaaaacctgagaaagaagcctgaaaatatcccccagcccatcagcaatacatctagagccaacctgaataagctgctgaccgattacaccgaaatgaagaaggcgatcctgcatgtgtactgggaagagttccagaaggaccctgtgggcctgatgagccgggtggcccagcctgccagcaagaagatcgatcagaacaagctgaaacctgagatggacgagaagggcaacctgaccaccgccggctttgcctgctctcagtgtggccagcccctgttcgtgtacaagctggagcaggtgtctgagaagggcaaggcttacaccaactacttcggacggtgcaatgtggccgagcacgaaaagctgatcctgctggcccagctgaagcccgagaaggatagcgacgaagccgtgacatatagcctgggaaagtttgggcagagggccctggatttctacagcattcatgtgaccaaggagtccacccaccccgtgaagcccctggcccagatcgccggaaacagatacgcctccggacctgtgggaaaggccctgagcgacgcatgtatgggcacaatcgcctccttcctgtctaagtaccaggacatcatcatcgaacaccagaaggtggtgaagggcaaccagaagagactggagagcctgcgggagctggccggcaaggaaaacctggaataccctagcgtgaccctgccacctcagcctcacaccaaggagggcgttgatgcctacaacgaagtgatcgcccgggtgcgaatgtgggtgaacctgaacctgtggcagaagctgaagctaagcagagatgatgccaagcctctgctgagactgaagggattcccttcctttcctctggtcgagagacaggccaacgaagtggactggtgggacatggtgtgtaacgtgaagaagctgatcaacgagaaaaaggaggatggcaaggtgttttggcagaatctggctggctacaagagacaggaagccctgagaccatacctgagcagcgaggaagatcggaagaagggaaagaaattcgctcggtaccagctgggcgacctgctgctgcacctggaaaagaagcacggcgaggactggggaaaggtgtacgacgaggcctgggagcggattgacaagaaagtggaaggcctgagcaagcacatcaagctggaagaggaacggagaagcgaggacgcccagagcaaggccgccctgaccgactggctgcgggctaaggccagcttcgtgatcgagggcctgaaggaggccgacaaggacgagttctgcagatgcgagctgaagctgcagaagtggtacggggacctgcggggaaagcccttcgccatcgaagccgagaacagcatcctggacatcagcggcttcagcaagcagtacaactgtgccttcatctggcagaaggacggcgtgaagaagctgaacctgtacctgatcatcaactacttcaagggcggcaagctgcggttcaagaagatcaaacctgaagccttcgaagccaacagattctacaccgtgatcaacaaaaagagcggcgagatcgtgcccatggaggtgaacttcaacttcgacgaccccaacctgatcatcctgcctctggcctttggcaagagacagggcagagaattcatctggaacgacctgctgtccctggaaaccggcagcctgaagctggccaacggaagagtgatcgagaagacactgtacaacagaagaacccggcaggatgagcctgccctgttcgtggccctgaccttcgagcggcgggaggtcctggactcctccaatatcaaaccaatgaacctgatcggcgtggcaagaggcgaaaacatccccgccgtgatcgccctgaccgaccccgagggctgcccactgagccggtttaaggatagcctgggaaacccaacccacatcctgagaatcggcgagagctataaggagaagcagcggaccatccaggccaagaaggaggtggagcagcggagagccggcggctacagccggaagtacgccagcaaagccaagaatctggcagacgatatggtgagaaacaccgctagagatctgctgtactacgccgtgacccaggatgccatgctgatcttcgccaacctgagccggggcttcggccggcagggcaagcggaccttcatggccgagagacagtacacacggatggaggactggctgaccgccaagctggcctacgagggcctgagcaagacctacctgtccaagacactggcccagtacacctccaagacatgcagcaactgtgggtttaccatcaccagcgccgactacgacagggtgctggagaagctgaagaagacagcaacaggctggatgaccacaattaacggcaaggagctgaaggtggagggccagattacctactacaacagatacaagagacagaacgtagtcaaggacctgtccgtcgagctggatagactgagcgaagaatctgtgaacaacgacatctcctcctggacaaagggcagaagcggagaagctctgagcctcctgaagaaaagattctcccatagacccgtgcaggagaagttcgtgtgcctgaactgcggcttcgagacacacgcagccgagcaagccgccctgaacatcgccagatcctggctgttcctgcggagccaggagtacaagaaataccagacaaacaagacaaccggcaacaccgataagagagccttcgtcgagacctggcagtccttttaccggaagaagcttaaggaggtgtggaaacctgccgtgcggtctggcggatctggcggaggctccaccagccccaagaaaaagagaaaagtctaagctgccttctgcggggcttgccttctggccatgcccttcttctctcccttgcacctgtacctcttggtctttgaataaagcctgagtaggaaggctagcaaaaaaaaaaaaaaaaaaaaaaaaaaaaaaaaaaaaaaaaaaaaaaaaaaaaaaaaaaaaaaaaaaaaaaaaaaaaaaaa

SEQ ID NO: 9724 - RNA, 8787 nt, synthetic construct
  source 1..8787: mol_type = other RNA
aggaaataagagagaaaagaagagtaagaagaaatataagagccaccatggcccctaagaagaagcgtaaagtgagccggatgaaccacgaccaggagttcgacccccctaaggtgtaccctcccgtccccgccgagaagagaaagcccatccgggtcctgagcctgttcgatggcatcgccaccggtctgctggtgctgaaggacctgggcatccaggtggataggtacattgcctccgaggtgtgcgaggactccatcaccgtgggaatggtgcgtcatcagggcaagatcatgtacgtgggcgacgtgcggagcgtgacacagaagcatatccaggagtggggccctttcgacctggtgatcggcggcagcccttgcaatgacctgagcatcgtgaacccagcccggaagggcctgtacgagggaaccggcagactgttcttcgagttttacagactgctgcacgacgcccggcctaaggaaggcgacgaccggcccttcttttggctgttcgagaatgtggtggccatgggagtcagcgacaagcgggatattagccggttcctggagagcaaccccgtgatgatcgatgccaaggaagtgagcgccgcccaccgggccagatacttctggggcaatctgcctggcatgaacagacccctggccagcaccgtgaacgacaagctggagctgcaggagtgcctggagcacggccggatcgccaagttcagcaaggtgagaaccatcaccacccgaagcaacagcatcaaacaaggcaaggaccagcactttcctgtgttcatgaacgagaaggaggacatcctgtggtgtaccgagatggagagagtgttcgggttcccagtccactacacagatgtcagcaacatgtctagactggccagacagagactgctgggaagaagctggtccgtccctgtgatcagacacctgttcgcccctctgaaggagtacttcgcctgcgtgagcagcggcaacagcaacgccaacagccggggccccagcttctctagcggcctggtgccactgtccctgagagggagccacatgggccccatggagatctacaaaaccgtgagcgcctggaagcggcagcctgtgcgcgtgctgagcctgtttcggaatatcgataaagtcctgaaaagcctgggattcctggagagcggctctggctccggcggtggcaccctgaagtacgtggaggatgtgacaaacgtggtcagacgggatgtggagaagtggggccccttcgatctggtgtacggcagcacccaacccctgggcagctcttgtgaccggtgccctggctggtacatgtttcagttccaccggatcctgcagtacgccctgccgagacaggagtcccagcggccattcttttggattttcatggacaacttgctgctgaccgaggatgaccaggaaactaccactcggttcctgcagaccgaagccgtgaccctgcaggacgtgagaggccgggactaccagaacgccatgcgggtgtggtccaacatccctggactgaaaagcaagcacgcacctctgacccctaaagaagaggagtacctgcaggcccaggtgcggagcagaagcaagctggacgcccctaaggtggatctgctggtgaagaattgcctcctgcccctgagagagtacttcaagtatttcagccagaatagtctgcccctgggaggcagcggcggcggcttccagggcagcgtgagcttcaaggacgtgaccgtgggcttcaccctggaggagtggcagcacctggacagcacccagaggagcctgtacagggacgtgatgctggagaactacagcaacctggtgagcctgggctactgcgtgaccaagcccgaggtgatcttcaggctggagcagggcgaggagccctggatcctggaggaggagttccccagccagagcttccccgagagctgggagaccggcggcccaagcagcggcgcccctcctcccagcggcggcaggcggcccaagcagcggcgcccctcctcccagcggcggcagcccagccggctccccaacctctaccgaggagggcacctctgagtccgccacccccgagagcggccctggcacctccaccgagcccagcgagggcagcgcacccggcagccctgccggcagccccacctccacagaggagggaaccagcaccgagcccagcgaaggcagcgccccaggcaccagcaccgagcctagtgagcaggagattaaacggatcaacaagatcagaagaagacttgtgaaagacagcaacaccaagaaggccggcaagacaggccccatgaaaaccctgctggttagagtgatgacacccgatctgagagagcggctggaaaacctgagaaagaagcctgaaaatatcccccagcccatcagcaatacatctagagccaacctgaataagctgctgaccgattacaccgaaatgaagaaggcgatcctgcatgtgtactgggaagagttccagaaggaccctgtgggcctgatgagccgggtggcccagcctgccagcaagaagatcgatcagaacaagctgaaacctgagatggacgagaagggcaacctgaccaccgccggctttgcctgctctcagtgtggccagcccctgttcgtgtacaagctggagcaggtgtctgagaagggcaaggcttacaccaactacttcggacggtgcaatgtggccgagcacgaaaagctgatcctgctggcccagctgaagcccgagaaggatagcgacgaagccgtgacatatagcctgggaaagtttgggcagagggccctggatttctacagcattcatgtgaccaaggagtccacccaccccgtgaagcccctggcccagatcgccggaaacagatacgcctccggacctgtgggaaaggccctgagcgacgcatgtatgggcacaatcgcctccttcctgtctaagtaccaggacatcatcatcgaacaccagaaggtggtgaagggcaaccagaagagactggagagcctgcgggagctggccggcaaggaaaacctggaataccctagcgtgaccctgccacctcagcctcacaccaaggagggcgttgatgcctacaacgaagtgatcgcccgggtgcgaatgtgggtgaacctgaacctgtggcagaagctgaagctaagcagagatgatgccaagcctctgctgagactgaagggattcccttcctttcctctggtcgagagacaggccaacgaagtggactggtgggacatggtgtgtaacgtgaagaagctgatcaacgagaaaaaggaggatggcaaggtgttttggcagaatctggctggctacaagagacaggaagccctgagaccatacctgagcagcgaggaagatcggaagaagggaaagaaattcgctcggtaccagctgggcgacctgctgctgcacctggaaaagaagcacggcgaggactggggaaaggtgtacgacgaggcctgggagcggattgacaagaaagtggaaggcctgagcaagcacatcaagctggaagaggaacggagaagcgaggacgcccagagcaaggccgccctgaccgactggctgcgggctaaggccagcttcgtgatcgagggcctgaaggaggccgacaaggacgagttctgcagatgcgagctgaagctgcagaagtggtacggggacctgcggggaaagcccttcgccatcgaagccgagaacagcatcctggacatcagcggcttcagcaagcagtacaactgtgccttcatctggcagaaggacggcgtgaagaagctgaacctgtacctgatcatcaactacttcaagggcggcaagctgcggttcaagaagatcaaacctgaagccttcgaagccaacagattctacaccgtgatcaacaaaaagagcggcgagatcgtgcccatggaggtgaacttcaacttcgacgaccccaacctgatcatcctgcctctggcctttggcaagagacagggcagagaattcatctggaacgacctgctgtccctggaaaccggcagcctgaagctggccaacggaagagtgatcgagaagacactgtacaacagaagaacccggcaggatgagcctgccctgttcgtggccctgaccttcgagcggcgggaggtcctggactcctccaatatcaaaccaatgaacctgatcggcgtggcaagaggcgaaaacatccccgccgtgatcgccctgaccgaccccgagggctgcccactgagccggtttaaggatagcctgggaaacccaacccacatcctgagaatcggcgagagctataaggagaagcagcggaccatccaggccaagaaggaggtggagcagcggagagccggcggctacagccggaagtacgccagcaaagccaagaatctggcagacgatatggtgagaaacaccgctagagatctgctgtactacgccgtgacccaggatgccatgctgatcttcgccaacctgagccggggcttcggccggcagggcaagcggaccttcatggccgagagacagtacacacggatggaggactggctgaccgccaagctggcctacgagggcctgagcaagacctacctgtccaagacactggcccagtacacctccaagacatgcagcaactgtgggtttaccatcaccagcgccgactacgacagggtgctggagaagctgaagaagacagcaacaggctggatgaccacaattaacggcaaggagctgaaggtggagggccagattacctactacaacagatacaagagacagaacgtagtcaaggacctgtccgtcgagctggatagactgagcgaagaatctgtgaacaacgacatctcctcctggacaaagggcagaagcggagaagctctgagcctcctgaagaaaagattctcccatagacccgtgcaggagaagttcgtgtgcctgaactgcggcttcgagacacacgcagccgagcaagccgccctgaacatcgccagatcctggctgttcctgcggagccaggagtacaagaaataccagacaaacaagacaaccggcaacaccgataagagagccttcgtcgagacctggcagtccttttaccggaagaagcttaaggaggtgtggaaacctgccgtgcggtctggcggatctggcggaggctccaccagccccaagaaaaagagaaaagtctaagctgccttctgcggggcttgccttctggccatgcccttcttctctcccttgcacctgtacctcttggtctttgaataaagcctgagtaggaaggctagcaaaaaaaaaaaaaaaaaaaaaaaaaaaaaaaaaaaaaaaaaaaaaaaaaaaaaaaaaaaaaaaaaaaaaaaaaaaaaaaagcccagccggctccccaacctctaccgaggagggcacctctgagtccgccacccccgagagcggccctggcacctccaccgagcccagcgagggcagcgcacccggcagccctgccggcagccccacctccacagaggagggaaccagcaccgagcccagcgaaggcagcgccccaggcaccagcaccgagcctagtgagcaggagattaaacggatcaacaagatcagaagaagacttgtgaaagacagcaacaccaagaaggccggcaagacaggccccatgaaaaccctgctggttagagtgatgacacccgatctgagagagcggctggaaaacctgagaaagaagcctgaaaatatcccccagcccatcagcaatacatctagagccaacctgaataagctgctgaccgattacaccgaaatgaagaaggcgatcctgcatgtgtactgggaagagttccagaaggaccctgtgggcctgatgagccgggtggcccagcctgccagcaagaagatcgatcagaacaagctgaaacctgagatggacgagaagggcaacctgaccaccgccggctttgcctgctctcagtgtggccagcccctgttcgtgtacaagctggagcaggtgtctgagaagggcaaggcttacaccaactacttcggacggtgcaatgtggccgagcacgaaaagctgatcctgctggcccagctgaagcccgagaaggatagcgacgaagccgtgacatatagcctgggaaagtttgggcagagggccctggatttctacagcattcatgtgaccaaggagtccacccaccccgtgaagcccctggcccagatcgccggaaacagatacgcctccggacctgtgggaaaggccctgagcgacgcatgtatgggcacaatcgcctccttcctgtctaagtaccaggacatcatcatcgaacaccagaaggtggtgaagggcaaccagaagagactggagagcctgcgggagctggccggcaaggaaaacctggaataccctagcgtgaccctgccacctcagcctcacaccaaggagggcgttgatgcctacaacgaagtgatcgcccgggtgcgaatgtgggtgaacctgaacctgtggcagaagctgaagctaagcagagatgatgccaagcctctgctgagactgaagggattcccttcctttcctctggtcgagagacaggccaacgaagtggactggtgggacatggtgtgtaacgtgaagaagctgatcaacgagaaaaaggaggatggcaaggtgttttggcagaatctggctggctacaagagacaggaagccctgagaccatacctgagcagcgaggaagatcggaagaagggaaagaaattcgctcggtaccagctgggcgacctgctgctgcacctggaaaagaagcacggcgaggactggggaaaggtgtacgacgaggcctgggagcggattgacaagaaagtggaaggcctgagcaagcacatcaagctggaagaggaacggagaagcgaggacgcccagagcaaggccgccctgaccgactggctgcgggctaaggccagcttcgtgatcgagggcctgaaggaggccgacaaggacgagttctgcagatgcgagctgaagctgcagaagtggtacggggacctgcggggaaagcccttcgccatcgaagccgagaacagcatcctggacatcagcggcttcagcaagcagtacaactgtgccttcatctggcagaaggacggcgtgaagaagctgaacctgtacctgatcatcaactacttcaagggcggcaagctgcggttcaagaagatcaaacctgaagccttcgaagccaacagattctacaccgtgatcaacaaaaagagcggcgagatcgtgcccatggaggtgaacttcaacttcgacgaccccaacctgatcatcctgcctctggcctttggcaagagacagggcagagaattcatctggaacgacctgctgtccctggaaaccggcagcctgaagctggccaacggaagagtgatcgagaagacactgtacaacagaagaacccggcaggatgagcctgccctgttcgtggccctgaccttcgagcggcgggaggtcctggactcctccaatatcaaaccaatgaacctgatcggcgtggcaagaggcgaaaacatccccgccgtgatcgccctgaccgaccccgagggctgcccactgagccggtttaaggatagcctgggaaacccaacccacatcctgagaatcggcgagagctataaggagaagcagcggaccatccaggccaagaaggaggtggagcagcggagagccggcggctacagccggaagtacgccagcaaagccaagaatctggcagacgatatggtgagaaacaccgctagagatctgctgtactacgccgtgacccaggatgccatgctgatcttcgccaacctgagccggggcttcggccggcagggcaagcggaccttcatggccgagagacagtacacacggatggaggactggctgaccgccaagctggcctacgagggcctgagcaagacctacctgtccaagacactggcccagtacacctccaagacatgcagcaactgtgggtttaccatcaccagcgccgactacgacagggtgctggagaagctgaagaagacagcaacaggctggatgaccacaattaacggcaaggagctgaaggtggagggccagattacctactacaacagatacaagagacagaacgtagtcaaggacctgtccgtcgagctggatagactgagcgaagaatctgtgaacaacgacatctcctcctggacaaagggcagaagcggagaagctctgagcctcctgaagaaaagattctcccatagacccgtgcaggagaagttcgtgtgcctgaactgcggcttcgagacacacgcagccgagcaagccgccctgaacatcgccagatcctggctgttcctgcggagccaggagtacaagaaataccagacaaacaagacaaccggcaacaccgataagagagccttcgtcgagacctggcagtccttttaccggaagaagcttaaggaggtgtggaaacctgccgtgcggtctggcggatctggcggaggctccaccagccccaagaaaaagagaaaagtctaagctgccttctgcggggcttgccttctggccatgcccttcttctctcccttgcacctgtacctcttggtctttgaataaagcctgagtaggaaggctagcaaaaaaaaaaaaaaaaaaaaaaaaaaaaaaaaaaaaaaaaaaaaaaaaaaaaaaaaaaaaaaaaaaaaaaaaaaaaaaaa

SEQ ID NO: 9725 - RNA, 8787 nt, synthetic construct
  source 1..8787: mol_type = other RNA
aggaaataagagagaaaagaagagtaagaagaaatataagagccaccatggcccctaagaagaagcgtaaagtgagccggatgaaccacgaccaggagttcgacccccctaaggtgtaccctcccgtccccgccgagaagagaaagcccatccgggtcctgagcctgttcgatggcatcgccaccggtctgctggtgctgaaggacctgggcatccaggtggataggtacattgcctccgaggtgtgcgaggactccatcaccgtgggaatggtgcgtcatcagggcaagatcatgtacgtgggcgacgtgcggagcgtgacacagaagcatatccaggagtggggccctttcgacctggtgatcggcggcagcccttgcaatgacctgagcatcgtgaacccagcccggaagggcctgtacgagggaaccggcagactgttcttcgagttttacagactgctgcacgacgcccggcctaaggaaggcgacgaccggcccttcttttggctgttcgagaatgtggtggccatgggagtcagcgacaagcgggatattagccggttcctggagagcaaccccgtgatgatcgatgccaaggaagtgagcgccgcccaccgggccagatacttctggggcaatctgcctggcatgaacagacccctggccagcaccgtgaacgacaagctggagctgcaggagtgcctggagcacggccggatcgccaagttcagcaaggtgagaaccatcaccacccgaagcaacagcatcaaacaaggcaaggaccagcactttcctgtgttcatgaacgagaaggaggacatcctgtggtgtaccgagatggagagagtgttcgggttcccagtccactacacagatgtcagcaacatgtctagactggccagacagagactgctgggaagaagctggtccgtccctgtgatcagacacctgttcgcccctctgaaggagtacttcgcctgcgtgagcagcggcaacagcaacgccaacagccggggccccagcttctctagcggcctggtgccactgtccctgagagggagccacatgggccccatggagatctacaaaaccgtgagcgcctggaagcggcagcctgtgcgcgtgctgagcctgtttcggaatatcgataaagtcctgaaaagcctgggattcctggagagcggctctggctccggcggtggcaccctgaagtacgtggaggatgtgacaaacgtggtcagacgggatgtggagaagtggggccccttcgatctggtgtacggcagcacccaacccctgggcagctcttgtgaccggtgccctggctggtacatgtttcagttccaccggatcctgcagtacgccctgccgagacaggagtcccagcggccattcttttggattttcatggacaacttgctgctgaccgaggatgaccaggaaactaccactcggttcctgcagaccgaagccgtgaccctgcaggacgtgagaggccgggactaccagaacgccatgcgggtgtggtccaacatccctggactgaaaagcaagcacgcacctctgacccctaaagaagaggagtacctgcaggcccaggtgcggagcagaagcaagctggacgcccctaaggtggatctgctggtgaagaattgcctcctgcccctgagagagtacttcaagtatttcagccagaatagtctgcccctgggaggcagcggcggcggcatggcccacgacctggtgatgttcagggacgtggccgtggacttcagccaggaggagtgggagtgcctgaacagctaccagaggaacctgtacaaggacgtgatcctggagaactacagcaacctggtgagcctgggctgcagcatcagcaagcccgacgtgatcaccctgctggagcagggcaaggagccctggctggtggtgagggacgagaagaggaggtggagcctggcccccaccttcggcggcccaagcagcggcgcccctcctcccagcggcggcaggcggcccaagcagcggcgcccctcctcccagcggcggcagcccagccggctccccaacctctaccgaggagggcacctctgagtccgccacccccgagagcggccctggcacctccaccgagcccagcgagggcagcgcacccggcagccctgccggcagccccacctccacagaggagggaaccagcaccgagcccagcgaaggcagcgccccaggcaccagcaccgagcctagtgagcaggagattaaacggatcaacaagatcagaagaagacttgtgaaagacagcaacaccaagaaggccggcaagacaggccccatgaaaaccctgctggttagagtgatgacacccgatctgagagagcggctggaaaacctgagaaagaagcctgaaaatatcccccagcccatcagcaatacatctagagccaacctgaataagctgctgaccgattacaccgaaatgaagaaggcgatcctgcatgtgtactgggaagagttccagaaggaccctgtgggcctgatgagccgggtggcccagcctgccagcaagaagatcgatcagaacaagctgaaacctgagatggacgagaagggcaacctgaccaccgccggctttgcctgctctcagtgtggccagcccctgttcgtgtacaagctggagcaggtgtctgagaagggcaaggcttacaccaactacttcggacggtgcaatgtggccgagcacgaaaagctgatcctgctggcccagctgaagcccgagaaggatagcgacgaagccgtgacatatagcctgggaaagtttgggcagagggccctggatttctacagcattcatgtgaccaaggagtccacccaccccgtgaagcccctggcccagatcgccggaaacagatacgcctccggacctgtgggaaaggccctgagcgacgcatgtatgggcacaatcgcctccttcctgtctaagtaccaggacatcatcatcgaacaccagaaggtggtgaagggcaaccagaagagactggagagcctgcgggagctggccggcaaggaaaacctggaataccctagcgtgaccctgccacctcagcctcacaccaaggagggcgttgatgcctacaacgaagtgatcgcccgggtgcgaatgtgggtgaacctgaacctgtggcagaagctgaagctaagcagagatgatgccaagcctctgctgagactgaagggattcccttcctttcctctggtcgagagacaggccaacgaagtggactggtgggacatggtgtgtaacgtgaagaagctgatcaacgagaaaaaggaggatggcaaggtgttttggcagaatctggctggctacaagagacaggaagccctgagaccatacctgagcagcgaggaagatcggaagaagggaaagaaattcgctcggtaccagctgggcgacctgctgctgcacctggaaaagaagcacggcgaggactggggaaaggtgtacgacgaggcctgggagcggattgacaagaaagtggaaggcctgagcaagcacatcaagctggaagaggaacggagaagcgaggacgcccagagcaaggccgccctgaccgactggctgcgggctaaggccagcttcgtgatcgagggcctgaaggaggccgacaaggacgagttctgcagatgcgagctgaagctgcagaagtggtacggggacctgcggggaaagcccttcgccatcgaagccgagaacagcatcctggacatcagcggcttcagcaagcagtacaactgtgccttcatctggcagaaggacggcgtgaagaagctgaacctgtacctgatcatcaactacttcaagggcggcaagctgcggttcaagaagatcaaacctgaagccttcgaagccaacagattctacaccgtgatcaacaaaaagagcggcgagatcgtgcccatggaggtgaacttcaacttcgacgaccccaacctgatcatcctgcctctggcctttggcaagagacagggcagagaattcatctggaacgacctgctgtccctggaaaccggcagcctgaagctggccaacggaagagtgatcgagaagacactgtacaacagaagaacccggcaggatgagcctgccctgttcgtggccctgaccttcgagcggcgggaggtcctggactcctccaatatcaaaccaatgaacctgatcggcgtggcaagaggcgaaaacatccccgccgtgatcgccctgaccgaccccgagggctgcccactgagccggtttaaggatagcctgggaaacccaacccacatcctgagaatcggcgagagctataaggagaagcagcggaccatccaggccaagaaggaggtggagcagcggagagccggcggctacagccggaagtacgccagcaaagccaagaatctggcagacgatatggtgagaaacaccgctagagatctgctgtactacgccgtgacccaggatgccatgctgatcttcgccaacctgagccggggcttcggccggcagggcaagcggaccttcatggccgagagacagtacacacggatggaggactggctgaccgccaagctggcctacgagggcctgagcaagacctacctgtccaagacactggcccagtacacctccaagacatgcagcaactgtgggtttaccatcaccagcgccgactacgacagggtgctggagaagctgaagaagacagcaacaggctggatgaccacaattaacggcaaggagctgaaggtggagggccagattacctactacaacagatacaagagacagaacgtagtcaaggacctgtccgtcgagctggatagactgagcgaagaatctgtgaacaacgacatctcctcctggacaaagggcagaagcggagaagctctgagcctcctgaagaaaagattctcccatagacccgtgcaggagaagttcgtgtgcctgaactgcggcttcgagacacacgcagccgagcaagccgccctgaacatcgccagatcctggctgttcctgcggagccaggagtacaagaaataccagacaaacaagacaaccggcaacaccgataagagagccttcgtcgagacctggcagtccttttaccggaagaagcttaaggaggtgtggaaacctgccgtgcggtctggcggatctggcggaggctccaccagccccaagaaaaagagaaaagtctaagctgccttctgcggggcttgccttctggccatgcccttcttctctcccttgcacctgtacctcttggtctttgaataaagcctgagtaggaaggctagcaaaaaaaaaaaaaaaaaaaaaaaaaaaaaaaaaaaaaaaaaaaaaaaaaaaaaaaaaaaaaaaaaaaaaaaaaaaaaaaagcccagccggctccccaacctctaccgaggagggcacctctgagtccgccacccccgagagcggccctggcacctccaccgagcccagcgagggcagcgcacccggcagccctgccggcagccccacctccacagaggagggaaccagcaccgagcccagcgaaggcagcgccccaggcaccagcaccgagcctagtgagcaggagattaaacggatcaacaagatcagaagaagacttgtgaaagacagcaacaccaagaaggccggcaagacaggccccatgaaaaccctgctggttagagtgatgacacccgatctgagagagcggctggaaaacctgagaaagaagcctgaaaatatcccccagcccatcagcaatacatctagagccaacctgaataagctgctgaccgattacaccgaaatgaagaaggcgatcctgcatgtgtactgggaagagttccagaaggaccctgtgggcctgatgagccgggtggcccagcctgccagcaagaagatcgatcagaacaagctgaaacctgagatggacgagaagggcaacctgaccaccgccggctttgcctgctctcagtgtggccagcccctgttcgtgtacaagctggagcaggtgtctgagaagggcaaggcttacaccaactacttcggacggtgcaatgtggccgagcacgaaaagctgatcctgctggcccagctgaagcccgagaaggatagcgacgaagccgtgacatatagcctgggaaagtttgggcagagggccctggatttctacagcattcatgtgaccaaggagtccacccaccccgtgaagcccctggcccagatcgccggaaacagatacgcctccggacctgtgggaaaggccctgagcgacgcatgtatgggcacaatcgcctccttcctgtctaagtaccaggacatcatcatcgaacaccagaaggtggtgaagggcaaccagaagagactggagagcctgcgggagctggccggcaaggaaaacctggaataccctagcgtgaccctgccacctcagcctcacaccaaggagggcgttgatgcctacaacgaagtgatcgcccgggtgcgaatgtgggtgaacctgaacctgtggcagaagctgaagctaagcagagatgatgccaagcctctgctgagactgaagggattcccttcctttcctctggtcgagagacaggccaacgaagtggactggtgggacatggtgtgtaacgtgaagaagctgatcaacgagaaaaaggaggatggcaaggtgttttggcagaatctggctggctacaagagacaggaagccctgagaccatacctgagcagcgaggaagatcggaagaagggaaagaaattcgctcggtaccagctgggcgacctgctgctgcacctggaaaagaagcacggcgaggactggggaaaggtgtacgacgaggcctgggagcggattgacaagaaagtggaaggcctgagcaagcacatcaagctggaagaggaacggagaagcgaggacgcccagagcaaggccgccctgaccgactggctgcgggctaaggccagcttcgtgatcgagggcctgaaggaggccgacaaggacgagttctgcagatgcgagctgaagctgcagaagtggtacggggacctgcggggaaagcccttcgccatcgaagccgagaacagcatcctggacatcagcggcttcagcaagcagtacaactgtgccttcatctggcagaaggacggcgtgaagaagctgaacctgtacctgatcatcaactacttcaagggcggcaagctgcggttcaagaagatcaaacctgaagccttcgaagccaacagattctacaccgtgatcaacaaaaagagcggcgagatcgtgcccatggaggtgaacttcaacttcgacgaccccaacctgatcatcctgcctctggcctttggcaagagacagggcagagaattcatctggaacgacctgctgtccctggaaaccggcagcctgaagctggccaacggaagagtgatcgagaagacactgtacaacagaagaacccggcaggatgagcctgccctgttcgtggccctgaccttcgagcggcgggaggtcctggactcctccaatatcaaaccaatgaacctgatcggcgtggcaagaggcgaaaacatccccgccgtgatcgccctgaccgaccccgagggctgcccactgagccggtttaaggatagcctgggaaacccaacccacatcctgagaatcggcgagagctataaggagaagcagcggaccatccaggccaagaaggaggtggagcagcggagagccggcggctacagccggaagtacgccagcaaagccaagaatctggcagacgatatggtgagaaacaccgctagagatctgctgtactacgccgtgacccaggatgccatgctgatcttcgccaacctgagccggggcttcggccggcagggcaagcggaccttcatggccgagagacagtacacacggatggaggactggctgaccgccaagctggcctacgagggcctgagcaagacctacctgtccaagacactggcccagtacacctccaagacatgcagcaactgtgggtttaccatcaccagcgccgactacgacagggtgctggagaagctgaagaagacagcaacaggctggatgaccacaattaacggcaaggagctgaaggtggagggccagattacctactacaacagatacaagagacagaacgtagtcaaggacctgtccgtcgagctggatagactgagcgaagaatctgtgaacaacgacatctcctcctggacaaagggcagaagcggagaagctctgagcctcctgaagaaaagattctcccatagacccgtgcaggagaagttcgtgtgcctgaactgcggcttcgagacacacgcagccgagcaagccgccctgaacatcgccagatcctggctgttcctgcggagccaggagtacaagaaataccagacaaacaagacaaccggcaacaccgataagagagccttcgtcgagacctggcagtccttttaccggaagaagcttaaggaggtgtggaaacctgccgtgcggtctggcggatctggcggaggctccaccagccccaagaaaaagagaaaagtctaagctgccttctgcggggcttgccttctggccatgcccttcttctctcccttgcacctgtacctcttggtctttgaataaagcctgagtaggaaggctagcaaaaaaaaaaaaaaaaaaaaaaaaaaaaaaaaaaaaaaaaaaaaaaaaaaaaaaaaaaaaaaaaaaaaaaaaaaaaaaaa

SEQ ID NO: 9726 - RNA, 8787 nt, synthetic construct
  source 1..8787: mol_type = other RNA
aggaaataagagagaaaagaagagtaagaagaaatataagagccaccatggcccctaagaagaagcgtaaagtgagccggatgaaccacgaccaggagttcgacccccctaaggtgtaccctcccgtccccgccgagaagagaaagcccatccgggtcctgagcctgttcgatggcatcgccaccggtctgctggtgctgaaggacctgggcatccaggtggataggtacattgcctccgaggtgtgcgaggactccatcaccgtgggaatggtgcgtcatcagggcaagatcatgtacgtgggcgacgtgcggagcgtgacacagaagcatatccaggagtggggccctttcgacctggtgatcggcggcagcccttgcaatgacctgagcatcgtgaacccagcccggaagggcctgtacgagggaaccggcagactgttcttcgagttttacagactgctgcacgacgcccggcctaaggaaggcgacgaccggcccttcttttggctgttcgagaatgtggtggccatgggagtcagcgacaagcgggatattagccggttcctggagagcaaccccgtgatgatcgatgccaaggaagtgagcgccgcccaccgggccagatacttctggggcaatctgcctggcatgaacagacccctggccagcaccgtgaacgacaagctggagctgcaggagtgcctggagcacggccggatcgccaagttcagcaaggtgagaaccatcaccacccgaagcaacagcatcaaacaaggcaaggaccagcactttcctgtgttcatgaacgagaaggaggacatcctgtggtgtaccgagatggagagagtgttcgggttcccagtccactacacagatgtcagcaacatgtctagactggccagacagagactgctgggaagaagctggtccgtccctgtgatcagacacctgttcgcccctctgaaggagtacttcgcctgcgtgagcagcggcaacagcaacgccaacagccggggccccagcttctctagcggcctggtgccactgtccctgagagggagccacatgggccccatggagatctacaaaaccgtgagcgcctggaagcggcagcctgtgcgcgtgctgagcctgtttcggaatatcgataaagtcctgaaaagcctgggattcctggagagcggctctggctccggcggtggcaccctgaagtacgtggaggatgtgacaaacgtggtcagacgggatgtggagaagtggggccccttcgatctggtgtacggcagcacccaacccctgggcagctcttgtgaccggtgccctggctggtacatgtttcagttccaccggatcctgcagtacgccctgccgagacaggagtcccagcggccattcttttggattttcatggacaacttgctgctgaccgaggatgaccaggaaactaccactcggttcctgcagaccgaagccgtgaccctgcaggacgtgagaggccgggactaccagaacgccatgcgggtgtggtccaacatccctggactgaaaagcaagcacgcacctctgacccctaaagaagaggagtacctgcaggcccaggtgcggagcagaagcaagctggacgcccctaaggtggatctgctggtgaagaattgcctcctgcccctgagagagtacttcaagtatttcagccagaatagtctgcccctgggaggcagcggcggcggcgcccaggagctggtgaccttcaaggacatcgccatcgacttcacccaggaggagtgggccctgctggacaccagccagaggcagctgtacagggacgtgatgctggagaacatcagccacctggtgagcgtgggctaccacctgtgcaagagcgacgtgatcagccagctggagcagggcgtggagctgtggagggacggcagggagttcctgcagggcctgaaccccgacaggaagagcggcggcggcccaagcagcggcgcccctcctcccagcggcggcaggcggcccaagcagcggcgcccctcctcccagcggcggcagcccagccggctccccaacctctaccgaggagggcacctctgagtccgccacccccgagagcggccctggcacctccaccgagcccagcgagggcagcgcacccggcagccctgccggcagccccacctccacagaggagggaaccagcaccgagcccagcgaaggcagcgccccaggcaccagcaccgagcctagtgagcaggagattaaacggatcaacaagatcagaagaagacttgtgaaagacagcaacaccaagaaggccggcaagacaggccccatgaaaaccctgctggttagagtgatgacacccgatctgagagagcggctggaaaacctgagaaagaagcctgaaaatatcccccagcccatcagcaatacatctagagccaacctgaataagctgctgaccgattacaccgaaatgaagaaggcgatcctgcatgtgtactgggaagagttccagaaggaccctgtgggcctgatgagccgggtggcccagcctgccagcaagaagatcgatcagaacaagctgaaacctgagatggacgagaagggcaacctgaccaccgccggctttgcctgctctcagtgtggccagcccctgttcgtgtacaagctggagcaggtgtctgagaagggcaaggcttacaccaactacttcggacggtgcaatgtggccgagcacgaaaagctgatcctgctggcccagctgaagcccgagaaggatagcgacgaagccgtgacatatagcctgggaaagtttgggcagagggccctggatttctacagcattcatgtgaccaaggagtccacccaccccgtgaagcccctggcccagatcgccggaaacagatacgcctccggacctgtgggaaaggccctgagcgacgcatgtatgggcacaatcgcctccttcctgtctaagtaccaggacatcatcatcgaacaccagaaggtggtgaagggcaaccagaagagactggagagcctgcgggagctggccggcaaggaaaacctggaataccctagcgtgaccctgccacctcagcctcacaccaaggagggcgttgatgcctacaacgaagtgatcgcccgggtgcgaatgtgggtgaacctgaacctgtggcagaagctgaagctaagcagagatgatgccaagcctctgctgagactgaagggattcccttcctttcctctggtcgagagacaggccaacgaagtggactggtgggacatggtgtgtaacgtgaagaagctgatcaacgagaaaaaggaggatggcaaggtgttttggcagaatctggctggctacaagagacaggaagccctgagaccatacctgagcagcgaggaagatcggaagaagggaaagaaattcgctcggtaccagctgggcgacctgctgctgcacctggaaaagaagcacggcgaggactggggaaaggtgtacgacgaggcctgggagcggattgacaagaaagtggaaggcctgagcaagcacatcaagctggaagaggaacggagaagcgaggacgcccagagcaaggccgccctgaccgactggctgcgggctaaggccagcttcgtgatcgagggcctgaaggaggccgacaaggacgagttctgcagatgcgagctgaagctgcagaagtggtacggggacctgcggggaaagcccttcgccatcgaagccgagaacagcatcctggacatcagcggcttcagcaagcagtacaactgtgccttcatctggcagaaggacggcgtgaagaagctgaacctgtacctgatcatcaactacttcaagggcggcaagctgcggttcaagaagatcaaacctgaagccttcgaagccaacagattctacaccgtgatcaacaaaaagagcggcgagatcgtgcccatggaggtgaacttcaacttcgacgaccccaacctgatcatcctgcctctggcctttggcaagagacagggcagagaattcatctggaacgacctgctgtccctggaaaccggcagcctgaagctggccaacggaagagtgatcgagaagacactgtacaacagaagaacccggcaggatgagcctgccctgttcgtggccctgaccttcgagcggcgggaggtcctggactcctccaatatcaaaccaatgaacctgatcggcgtggcaagaggcgaaaacatccccgccgtgatcgccctgaccgaccccgagggctgcccactgagccggtttaaggatagcctgggaaacccaacccacatcctgagaatcggcgagagctataaggagaagcagcggaccatccaggccaagaaggaggtggagcagcggagagccggcggctacagccggaagtacgccagcaaagccaagaatctggcagacgatatggtgagaaacaccgctagagatctgctgtactacgccgtgacccaggatgccatgctgatcttcgccaacctgagccggggcttcggccggcagggcaagcggaccttcatggccgagagacagtacacacggatggaggactggctgaccgccaagctggcctacgagggcctgagcaagacctacctgtccaagacactggcccagtacacctccaagacatgcagcaactgtgggtttaccatcaccagcgccgactacgacagggtgctggagaagctgaagaagacagcaacaggctggatgaccacaattaacggcaaggagctgaaggtggagggccagattacctactacaacagatacaagagacagaacgtagtcaaggacctgtccgtcgagctggatagactgagcgaagaatctgtgaacaacgacatctcctcctggacaaagggcagaagcggagaagctctgagcctcctgaagaaaagattctcccatagacccgtgcaggagaagttcgtgtgcctgaactgcggcttcgagacacacgcagccgagcaagccgccctgaacatcgccagatcctggctgttcctgcggagccaggagtacaagaaataccagacaaacaagacaaccggcaacaccgataagagagccttcgtcgagacctggcagtccttttaccggaagaagcttaaggaggtgtggaaacctgccgtgcggtctggcggatctggcggaggctccaccagccccaagaaaaagagaaaagtctaagctgccttctgcggggcttgccttctggccatgcccttcttctctcccttgcacctgtacctcttggtctttgaataaagcctgagtaggaaggctagcaaaaaaaaaaaaaaaaaaaaaaaaaaaaaaaaaaaaaaaaaaaaaaaaaaaaaaaaaaaaaaaaaaaaaaaaaaaaaaaagcccagccggctccccaacctctaccgaggagggcacctctgagtccgccacccccgagagcggccctggcacctccaccgagcccagcgagggcagcgcacccggcagccctgccggcagccccacctccacagaggagggaaccagcaccgagcccagcgaaggcagcgccccaggcaccagcaccgagcctagtgagcaggagattaaacggatcaacaagatcagaagaagacttgtgaaagacagcaacaccaagaaggccggcaagacaggccccatgaaaaccctgctggttagagtgatgacacccgatctgagagagcggctggaaaacctgagaaagaagcctgaaaatatcccccagcccatcagcaatacatctagagccaacctgaataagctgctgaccgattacaccgaaatgaagaaggcgatcctgcatgtgtactgggaagagttccagaaggaccctgtgggcctgatgagccgggtggcccagcctgccagcaagaagatcgatcagaacaagctgaaacctgagatggacgagaagggcaacctgaccaccgccggctttgcctgctctcagtgtggccagcccctgttcgtgtacaagctggagcaggtgtctgagaagggcaaggcttacaccaactacttcggacggtgcaatgtggccgagcacgaaaagctgatcctgctggcccagctgaagcccgagaaggatagcgacgaagccgtgacatatagcctgggaaagtttgggcagagggccctggatttctacagcattcatgtgaccaaggagtccacccaccccgtgaagcccctggcccagatcgccggaaacagatacgcctccggacctgtgggaaaggccctgagcgacgcatgtatgggcacaatcgcctccttcctgtctaagtaccaggacatcatcatcgaacaccagaaggtggtgaagggcaaccagaagagactggagagcctgcgggagctggccggcaaggaaaacctggaataccctagcgtgaccctgccacctcagcctcacaccaaggagggcgttgatgcctacaacgaagtgatcgcccgggtgcgaatgtgggtgaacctgaacctgtggcagaagctgaagctaagcagagatgatgccaagcctctgctgagactgaagggattcccttcctttcctctggtcgagagacaggccaacgaagtggactggtgggacatggtgtgtaacgtgaagaagctgatcaacgagaaaaaggaggatggcaaggtgttttggcagaatctggctggctacaagagacaggaagccctgagaccatacctgagcagcgaggaagatcggaagaagggaaagaaattcgctcggtaccagctgggcgacctgctgctgcacctggaaaagaagcacggcgaggactggggaaaggtgtacgacgaggcctgggagcggattgacaagaaagtggaaggcctgagcaagcacatcaagctggaagaggaacggagaagcgaggacgcccagagcaaggccgccctgaccgactggctgcgggctaaggccagcttcgtgatcgagggcctgaaggaggccgacaaggacgagttctgcagatgcgagctgaagctgcagaagtggtacggggacctgcggggaaagcccttcgccatcgaagccgagaacagcatcctggacatcagcggcttcagcaagcagtacaactgtgccttcatctggcagaaggacggcgtgaagaagctgaacctgtacctgatcatcaactacttcaagggcggcaagctgcggttcaagaagatcaaacctgaagccttcgaagccaacagattctacaccgtgatcaacaaaaagagcggcgagatcgtgcccatggaggtgaacttcaacttcgacgaccccaacctgatcatcctgcctctggcctttggcaagagacagggcagagaattcatctggaacgacctgctgtccctggaaaccggcagcctgaagctggccaacggaagagtgatcgagaagacactgtacaacagaagaacccggcaggatgagcctgccctgttcgtggccctgaccttcgagcggcgggaggtcctggactcctccaatatcaaaccaatgaacctgatcggcgtggcaagaggcgaaaacatccccgccgtgatcgccctgaccgaccccgagggctgcccactgagccggtttaaggatagcctgggaaacccaacccacatcctgagaatcggcgagagctataaggagaagcagcggaccatccaggccaagaaggaggtggagcagcggagagccggcggctacagccggaagtacgccagcaaagccaagaatctggcagacgatatggtgagaaacaccgctagagatctgctgtactacgccgtgacccaggatgccatgctgatcttcgccaacctgagccggggcttcggccggcagggcaagcggaccttcatggccgagagacagtacacacggatggaggactggctgaccgccaagctggcctacgagggcctgagcaagacctacctgtccaagacactggcccagtacacctccaagacatgcagcaactgtgggtttaccatcaccagcgccgactacgacagggtgctggagaagctgaagaagacagcaacaggctggatgaccacaattaacggcaaggagctgaaggtggagggccagattacctactacaacagatacaagagacagaacgtagtcaaggacctgtccgtcgagctggatagactgagcgaagaatctgtgaacaacgacatctcctcctggacaaagggcagaagcggagaagctctgagcctcctgaagaaaagattctcccatagacccgtgcaggagaagttcgtgtgcctgaactgcggcttcgagacacacgcagccgagcaagccgccctgaacatcgccagatcctggctgttcctgcggagccaggagtacaagaaataccagacaaacaagacaaccggcaacaccgataagagagccttcgtcgagacctggcagtccttttaccggaagaagcttaaggaggtgtggaaacctgccgtgcggtctggcggatctggcggaggctccaccagccccaagaaaaagagaaaagtctaagctgccttctgcggggcttgccttctggccatgcccttcttctctcccttgcacctgtacctcttggtctttgaataaagcctgagtaggaaggctagcaaaaaaaaaaaaaaaaaaaaaaaaaaaaaaaaaaaaaaaaaaaaaaaaaaaaaaaaaaaaaaaaaaaaaaaaaaaaaaaa

SEQ ID NO: 9727 - RNA, 8787 nt, synthetic construct
  source 1..8787: mol_type = other RNA
aggaaataagagagaaaagaagagtaagaagaaatataagagccaccatggcccctaagaagaagcgtaaagtgagccggatgaaccacgaccaggagttcgacccccctaaggtgtaccctcccgtccccgccgagaagagaaagcccatccgggtcctgagcctgttcgatggcatcgccaccggtctgctggtgctgaaggacctgggcatccaggtggataggtacattgcctccgaggtgtgcgaggactccatcaccgtgggaatggtgcgtcatcagggcaagatcatgtacgtgggcgacgtgcggagcgtgacacagaagcatatccaggagtggggccctttcgacctggtgatcggcggcagcccttgcaatgacctgagcatcgtgaacccagcccggaagggcctgtacgagggaaccggcagactgttcttcgagttttacagactgctgcacgacgcccggcctaaggaaggcgacgaccggcccttcttttggctgttcgagaatgtggtggccatgggagtcagcgacaagcgggatattagccggttcctggagagcaaccccgtgatgatcgatgccaaggaagtgagcgccgcccaccgggccagatacttctggggcaatctgcctggcatgaacagacccctggccagcaccgtgaacgacaagctggagctgcaggagtgcctggagcacggccggatcgccaagttcagcaaggtgagaaccatcaccacccgaagcaacagcatcaaacaaggcaaggaccagcactttcctgtgttcatgaacgagaaggaggacatcctgtggtgtaccgagatggagagagtgttcgggttcccagtccactacacagatgtcagcaacatgtctagactggccagacagagactgctgggaagaagctggtccgtccctgtgatcagacacctgttcgcccctctgaaggagtacttcgcctgcgtgagcagcggcaacagcaacgccaacagccggggccccagcttctctagcggcctggtgccactgtccctgagagggagccacatgggccccatggagatctacaaaaccgtgagcgcctggaagcggcagcctgtgcgcgtgctgagcctgtttcggaatatcgataaagtcctgaaaagcctgggattcctggagagcggctctggctccggcggtggcaccctgaagtacgtggaggatgtgacaaacgtggtcagacgggatgtggagaagtggggccccttcgatctggtgtacggcagcacccaacccctgggcagctcttgtgaccggtgccctggctggtacatgtttcagttccaccggatcctgcagtacgccctgccgagacaggagtcccagcggccattcttttggattttcatggacaacttgctgctgaccgaggatgaccaggaaactaccactcggttcctgcagaccgaagccgtgaccctgcaggacgtgagaggccgggactaccagaacgccatgcgggtgtggtccaacatccctggactgaaaagcaagcacgcacctctgacccctaaagaagaggagtacctgcaggcccaggtgcggagcagaagcaagctggacgcccctaaggtggatctgctggtgaagaattgcctcctgcccctgagagagtacttcaagtatttcagccagaatagtctgcccctgggaggcagcggcggcggcaggcccgagagcgtgaccttcgaggacgtggccgtgtacttcagcgagaacgagtggatcggcctgggccccgcccagagggccctgtacagggacgtgatgctggagaactacggcgccgtggccagcctggccttccccttccccaagcccgccctgatcagccagctggagaggggcgaggccccctggtgcagcgtgccctggggcgccctggacggcgaggaccccaggagcatcagcggcggcccaagcagcggcgcccctcctcccagcggcggcaggcggcccaagcagcggcgcccctcctcccagcggcggcagcccagccggctccccaacctctaccgaggagggcacctctgagtccgccacccccgagagcggccctggcacctccaccgagcccagcgagggcagcgcacccggcagccctgccggcagccccacctccacagaggagggaaccagcaccgagcccagcgaaggcagcgccccaggcaccagcaccgagcctagtgagcaggagattaaacggatcaacaagatcagaagaagacttgtgaaagacagcaacaccaagaaggccggcaagacaggccccatgaaaaccctgctggttagagtgatgacacccgatctgagagagcggctggaaaacctgagaaagaagcctgaaaatatcccccagcccatcagcaatacatctagagccaacctgaataagctgctgaccgattacaccgaaatgaagaaggcgatcctgcatgtgtactgggaagagttccagaaggaccctgtgggcctgatgagccgggtggcccagcctgccagcaagaagatcgatcagaacaagctgaaacctgagatggacgagaagggcaacctgaccaccgccggctttgcctgctctcagtgtggccagcccctgttcgtgtacaagctggagcaggtgtctgagaagggcaaggcttacaccaactacttcggacggtgcaatgtggccgagcacgaaaagctgatcctgctggcccagctgaagcccgagaaggatagcgacgaagccgtgacatatagcctgggaaagtttgggcagagggccctggatttctacagcattcatgtgaccaaggagtccacccaccccgtgaagcccctggcccagatcgccggaaacagatacgcctccggacctgtgggaaaggccctgagcgacgcatgtatgggcacaatcgcctccttcctgtctaagtaccaggacatcatcatcgaacaccagaaggtggtgaagggcaaccagaagagactggagagcctgcgggagctggccggcaaggaaaacctggaataccctagcgtgaccctgccacctcagcctcacaccaaggagggcgttgatgcctacaacgaagtgatcgcccgggtgcgaatgtgggtgaacctgaacctgtggcagaagctgaagctaagcagagatgatgccaagcctctgctgagactgaagggattcccttcctttcctctggtcgagagacaggccaacgaagtggactggtgggacatggtgtgtaacgtgaagaagctgatcaacgagaaaaaggaggatggcaaggtgttttggcagaatctggctggctacaagagacaggaagccctgagaccatacctgagcagcgaggaagatcggaagaagggaaagaaattcgctcggtaccagctgggcgacctgctgctgcacctggaaaagaagcacggcgaggactggggaaaggtgtacgacgaggcctgggagcggattgacaagaaagtggaaggcctgagcaagcacatcaagctggaagaggaacggagaagcgaggacgcccagagcaaggccgccctgaccgactggctgcgggctaaggccagcttcgtgatcgagggcctgaaggaggccgacaaggacgagttctgcagatgcgagctgaagctgcagaagtggtacggggacctgcggggaaagcccttcgccatcgaagccgagaacagcatcctggacatcagcggcttcagcaagcagtacaactgtgccttcatctggcagaaggacggcgtgaagaagctgaacctgtacctgatcatcaactacttcaagggcggcaagctgcggttcaagaagatcaaacctgaagccttcgaagccaacagattctacaccgtgatcaacaaaaagagcggcgagatcgtgcccatggaggtgaacttcaacttcgacgaccccaacctgatcatcctgcctctggcctttggcaagagacagggcagagaattcatctggaacgacctgctgtccctggaaaccggcagcctgaagctggccaacggaagagtgatcgagaagacactgtacaacagaagaacccggcaggatgagcctgccctgttcgtggccctgaccttcgagcggcgggaggtcctggactcctccaatatcaaaccaatgaacctgatcggcgtggcaagaggcgaaaacatccccgccgtgatcgccctgaccgaccccgagggctgcccactgagccggtttaaggatagcctgggaaacccaacccacatcctgagaatcggcgagagctataaggagaagcagcggaccatccaggccaagaaggaggtggagcagcggagagccggcggctacagccggaagtacgccagcaaagccaagaatctggcagacgatatggtgagaaacaccgctagagatctgctgtactacgccgtgacccaggatgccatgctgatcttcgccaacctgagccggggcttcggccggcagggcaagcggaccttcatggccgagagacagtacacacggatggaggactggctgaccgccaagctggcctacgagggcctgagcaagacctacctgtccaagacactggcccagtacacctccaagacatgcagcaactgtgggtttaccatcaccagcgccgactacgacagggtgctggagaagctgaagaagacagcaacaggctggatgaccacaattaacggcaaggagctgaaggtggagggccagattacctactacaacagatacaagagacagaacgtagtcaaggacctgtccgtcgagctggatagactgagcgaagaatctgtgaacaacgacatctcctcctggacaaagggcagaagcggagaagctctgagcctcctgaagaaaagattctcccatagacccgtgcaggagaagttcgtgtgcctgaactgcggcttcgagacacacgcagccgagcaagccgccctgaacatcgccagatcctggctgttcctgcggagccaggagtacaagaaataccagacaaacaagacaaccggcaacaccgataagagagccttcgtcgagacctggcagtccttttaccggaagaagcttaaggaggtgtggaaacctgccgtgcggtctggcggatctggcggaggctccaccagccccaagaaaaagagaaaagtctaagctgccttctgcggggcttgccttctggccatgcccttcttctctcccttgcacctgtacctcttggtctttgaataaagcctgagtaggaaggctagcaaaaaaaaaaaaaaaaaaaaaaaaaaaaaaaaaaaaaaaaaaaaaaaaaaaaaaaaaaaaaaaaaaaaaaaaaaaaaaaagcccagccggctccccaacctctaccgaggagggcacctctgagtccgccacccccgagagcggccctggcacctccaccgagcccagcgagggcagcgcacccggcagccctgccggcagccccacctccacagaggagggaaccagcaccgagcccagcgaaggcagcgccccaggcaccagcaccgagcctagtgagcaggagattaaacggatcaacaagatcagaagaagacttgtgaaagacagcaacaccaagaaggccggcaagacaggccccatgaaaaccctgctggttagagtgatgacacccgatctgagagagcggctggaaaacctgagaaagaagcctgaaaatatcccccagcccatcagcaatacatctagagccaacctgaataagctgctgaccgattacaccgaaatgaagaaggcgatcctgcatgtgtactgggaagagttccagaaggaccctgtgggcctgatgagccgggtggcccagcctgccagcaagaagatcgatcagaacaagctgaaacctgagatggacgagaagggcaacctgaccaccgccggctttgcctgctctcagtgtggccagcccctgttcgtgtacaagctggagcaggtgtctgagaagggcaaggcttacaccaactacttcggacggtgcaatgtggccgagcacgaaaagctgatcctgctggcccagctgaagcccgagaaggatagcgacgaagccgtgacatatagcctgggaaagtttgggcagagggccctggatttctacagcattcatgtgaccaaggagtccacccaccccgtgaagcccctggcccagatcgccggaaacagatacgcctccggacctgtgggaaaggccctgagcgacgcatgtatgggcacaatcgcctccttcctgtctaagtaccaggacatcatcatcgaacaccagaaggtggtgaagggcaaccagaagagactggagagcctgcgggagctggccggcaaggaaaacctggaataccctagcgtgaccctgccacctcagcctcacaccaaggagggcgttgatgcctacaacgaagtgatcgcccgggtgcgaatgtgggtgaacctgaacctgtggcagaagctgaagctaagcagagatgatgccaagcctctgctgagactgaagggattcccttcctttcctctggtcgagagacaggccaacgaagtggactggtgggacatggtgtgtaacgtgaagaagctgatcaacgagaaaaaggaggatggcaaggtgttttggcagaatctggctggctacaagagacaggaagccctgagaccatacctgagcagcgaggaagatcggaagaagggaaagaaattcgctcggtaccagctgggcgacctgctgctgcacctggaaaagaagcacggcgaggactggggaaaggtgtacgacgaggcctgggagcggattgacaagaaagtggaaggcctgagcaagcacatcaagctggaagaggaacggagaagcgaggacgcccagagcaaggccgccctgaccgactggctgcgggctaaggccagcttcgtgatcgagggcctgaaggaggccgacaaggacgagttctgcagatgcgagctgaagctgcagaagtggtacggggacctgcggggaaagcccttcgccatcgaagccgagaacagcatcctggacatcagcggcttcagcaagcagtacaactgtgccttcatctggcagaaggacggcgtgaagaagctgaacctgtacctgatcatcaactacttcaagggcggcaagctgcggttcaagaagatcaaacctgaagccttcgaagccaacagattctacaccgtgatcaacaaaaagagcggcgagatcgtgcccatggaggtgaacttcaacttcgacgaccccaacctgatcatcctgcctctggcctttggcaagagacagggcagagaattcatctggaacgacctgctgtccctggaaaccggcagcctgaagctggccaacggaagagtgatcgagaagacactgtacaacagaagaacccggcaggatgagcctgccctgttcgtggccctgaccttcgagcggcgggaggtcctggactcctccaatatcaaaccaatgaacctgatcggcgtggcaagaggcgaaaacatccccgccgtgatcgccctgaccgaccccgagggctgcccactgagccggtttaaggatagcctgggaaacccaacccacatcctgagaatcggcgagagctataaggagaagcagcggaccatccaggccaagaaggaggtggagcagcggagagccggcggctacagccggaagtacgccagcaaagccaagaatctggcagacgatatggtgagaaacaccgctagagatctgctgtactacgccgtgacccaggatgccatgctgatcttcgccaacctgagccggggcttcggccggcagggcaagcggaccttcatggccgagagacagtacacacggatggaggactggctgaccgccaagctggcctacgagggcctgagcaagacctacctgtccaagacactggcccagtacacctccaagacatgcagcaactgtgggtttaccatcaccagcgccgactacgacagggtgctggagaagctgaagaagacagcaacaggctggatgaccacaattaacggcaaggagctgaaggtggagggccagattacctactacaacagatacaagagacagaacgtagtcaaggacctgtccgtcgagctggatagactgagcgaagaatctgtgaacaacgacatctcctcctggacaaagggcagaagcggagaagctctgagcctcctgaagaaaagattctcccatagacccgtgcaggagaagttcgtgtgcctgaactgcggcttcgagacacacgcagccgagcaagccgccctgaacatcgccagatcctggctgttcctgcggagccaggagtacaagaaataccagacaaacaagacaaccggcaacaccgataagagagccttcgtcgagacctggcagtccttttaccggaagaagcttaaggaggtgtggaaacctgccgtgcggtctggcggatctggcggaggctccaccagccccaagaaaaagagaaaagtctaagctgccttctgcggggcttgccttctggccatgcccttcttctctcccttgcacctgtacctcttggtctttgaataaagcctgagtaggaaggctagcaaaaaaaaaaaaaaaaaaaaaaaaaaaaaaaaaaaaaaaaaaaaaaaaaaaaaaaaaaaaaaaaaaaaaaaaaaaaaaaa

SEQ ID NO: 9728 - RNA, 8787 nt, synthetic construct
  source 1..8787: mol_type = other RNA
aggaaataagagagaaaagaagagtaagaagaaatataagagccaccatggcccctaagaagaagcgtaaagtgagccggatgaaccacgaccaggagttcgacccccctaaggtgtaccctcccgtccccgccgagaagagaaagcccatccgggtcctgagcctgttcgatggcatcgccaccggtctgctggtgctgaaggacctgggcatccaggtggataggtacattgcctccgaggtgtgcgaggactccatcaccgtgggaatggtgcgtcatcagggcaagatcatgtacgtgggcgacgtgcggagcgtgacacagaagcatatccaggagtggggccctttcgacctggtgatcggcggcagcccttgcaatgacctgagcatcgtgaacccagcccggaagggcctgtacgagggaaccggcagactgttcttcgagttttacagactgctgcacgacgcccggcctaaggaaggcgacgaccggcccttcttttggctgttcgagaatgtggtggccatgggagtcagcgacaagcgggatattagccggttcctggagagcaaccccgtgatgatcgatgccaaggaagtgagcgccgcccaccgggccagatacttctggggcaatctgcctggcatgaacagacccctggccagcaccgtgaacgacaagctggagctgcaggagtgcctggagcacggccggatcgccaagttcagcaaggtgagaaccatcaccacccgaagcaacagcatcaaacaaggcaaggaccagcactttcctgtgttcatgaacgagaaggaggacatcctgtggtgtaccgagatggagagagtgttcgggttcccagtccactacacagatgtcagcaacatgtctagactggccagacagagactgctgggaagaagctggtccgtccctgtgatcagacacctgttcgcccctctgaaggagtacttcgcctgcgtgagcagcggcaacagcaacgccaacagccggggccccagcttctctagcggcctggtgccactgtccctgagagggagccacatgggccccatggagatctacaaaaccgtgagcgcctggaagcggcagcctgtgcgcgtgctgagcctgtttcggaatatcgataaagtcctgaaaagcctgggattcctggagagcggctctggctccggcggtggcaccctgaagtacgtggaggatgtgacaaacgtggtcagacgggatgtggagaagtggggccccttcgatctggtgtacggcagcacccaacccctgggcagctcttgtgaccggtgccctggctggtacatgtttcagttccaccggatcctgcagtacgccctgccgagacaggagtcccagcggccattcttttggattttcatggacaacttgctgctgaccgaggatgaccaggaaactaccactcggttcctgcagaccgaagccgtgaccctgcaggacgtgagaggccgggactaccagaacgccatgcgggtgtggtccaacatccctggactgaaaagcaagcacgcacctctgacccctaaagaagaggagtacctgcaggcccaggtgcggagcagaagcaagctggacgcccctaaggtggatctgctggtgaagaattgcctcctgcccctgagagagtacttcaagtatttcagccagaatagtctgcccctgggaggcagcggcggcggcgcccagggcagcgtgatgttcagcgacgtgagcatcgacttcagccaggaggagtgggagtgcctgaacgacgaccagagggacctgtacagggacgtgatgctggagaactacagcaacctggtgagcatgggccactgcatcagcaagcccgacgtgatcagcttcctggagcagggcaaggagccctggctggtggacagggagcccaccaggtaccagtggcccgtgctggagagcaggggcggcccaagcagcggcgcccctcctcccagcggcggcaggcggcccaagcagcggcgcccctcctcccagcggcggcagcccagccggctccccaacctctaccgaggagggcacctctgagtccgccacccccgagagcggccctggcacctccaccgagcccagcgagggcagcgcacccggcagccctgccggcagccccacctccacagaggagggaaccagcaccgagcccagcgaaggcagcgccccaggcaccagcaccgagcctagtgagcaggagattaaacggatcaacaagatcagaagaagacttgtgaaagacagcaacaccaagaaggccggcaagacaggccccatgaaaaccctgctggttagagtgatgacacccgatctgagagagcggctggaaaacctgagaaagaagcctgaaaatatcccccagcccatcagcaatacatctagagccaacctgaataagctgctgaccgattacaccgaaatgaagaaggcgatcctgcatgtgtactgggaagagttccagaaggaccctgtgggcctgatgagccgggtggcccagcctgccagcaagaagatcgatcagaacaagctgaaacctgagatggacgagaagggcaacctgaccaccgccggctttgcctgctctcagtgtggccagcccctgttcgtgtacaagctggagcaggtgtctgagaagggcaaggcttacaccaactacttcggacggtgcaatgtggccgagcacgaaaagctgatcctgctggcccagctgaagcccgagaaggatagcgacgaagccgtgacatatagcctgggaaagtttgggcagagggccctggatttctacagcattcatgtgaccaaggagtccacccaccccgtgaagcccctggcccagatcgccggaaacagatacgcctccggacctgtgggaaaggccctgagcgacgcatgtatgggcacaatcgcctccttcctgtctaagtaccaggacatcatcatcgaacaccagaaggtggtgaagggcaaccagaagagactggagagcctgcgggagctggccggcaaggaaaacctggaataccctagcgtgaccctgccacctcagcctcacaccaaggagggcgttgatgcctacaacgaagtgatcgcccgggtgcgaatgtgggtgaacctgaacctgtggcagaagctgaagctaagcagagatgatgccaagcctctgctgagactgaagggattcccttcctttcctctggtcgagagacaggccaacgaagtggactggtgggacatggtgtgtaacgtgaagaagctgatcaacgagaaaaaggaggatggcaaggtgttttggcagaatctggctggctacaagagacaggaagccctgagaccatacctgagcagcgaggaagatcggaagaagggaaagaaattcgctcggtaccagctgggcgacctgctgctgcacctggaaaagaagcacggcgaggactggggaaaggtgtacgacgaggcctgggagcggattgacaagaaagtggaaggcctgagcaagcacatcaagctggaagaggaacggagaagcgaggacgcccagagcaaggccgccctgaccgactggctgcgggctaaggccagcttcgtgatcgagggcctgaaggaggccgacaaggacgagttctgcagatgcgagctgaagctgcagaagtggtacggggacctgcggggaaagcccttcgccatcgaagccgagaacagcatcctggacatcagcggcttcagcaagcagtacaactgtgccttcatctggcagaaggacggcgtgaagaagctgaacctgtacctgatcatcaactacttcaagggcggcaagctgcggttcaagaagatcaaacctgaagccttcgaagccaacagattctacaccgtgatcaacaaaaagagcggcgagatcgtgcccatggaggtgaacttcaacttcgacgaccccaacctgatcatcctgcctctggcctttggcaagagacagggcagagaattcatctggaacgacctgctgtccctggaaaccggcagcctgaagctggccaacggaagagtgatcgagaagacactgtacaacagaagaacccggcaggatgagcctgccctgttcgtggccctgaccttcgagcggcgggaggtcctggactcctccaatatcaaaccaatgaacctgatcggcgtggcaagaggcgaaaacatccccgccgtgatcgccctgaccgaccccgagggctgcccactgagccggtttaaggatagcctgggaaacccaacccacatcctgagaatcggcgagagctataaggagaagcagcggaccatccaggccaagaaggaggtggagcagcggagagccggcggctacagccggaagtacgccagcaaagccaagaatctggcagacgatatggtgagaaacaccgctagagatctgctgtactacgccgtgacccaggatgccatgctgatcttcgccaacctgagccggggcttcggccggcagggcaagcggaccttcatggccgagagacagtacacacggatggaggactggctgaccgccaagctggcctacgagggcctgagcaagacctacctgtccaagacactggcccagtacacctccaagacatgcagcaactgtgggtttaccatcaccagcgccgactacgacagggtgctggagaagctgaagaagacagcaacaggctggatgaccacaattaacggcaaggagctgaaggtggagggccagattacctactacaacagatacaagagacagaacgtagtcaaggacctgtccgtcgagctggatagactgagcgaagaatctgtgaacaacgacatctcctcctggacaaagggcagaagcggagaagctctgagcctcctgaagaaaagattctcccatagacccgtgcaggagaagttcgtgtgcctgaactgcggcttcgagacacacgcagccgagcaagccgccctgaacatcgccagatcctggctgttcctgcggagccaggagtacaagaaataccagacaaacaagacaaccggcaacaccgataagagagccttcgtcgagacctggcagtccttttaccggaagaagcttaaggaggtgtggaaacctgccgtgcggtctggcggatctggcggaggctccaccagccccaagaaaaagagaaaagtctaagctgccttctgcggggcttgccttctggccatgcccttcttctctcccttgcacctgtacctcttggtctttgaataaagcctgagtaggaaggctagcaaaaaaaaaaaaaaaaaaaaaaaaaaaaaaaaaaaaaaaaaaaaaaaaaaaaaaaaaaaaaaaaaaaaaaaaaaaaaaaagcccagccggctccccaacctctaccgaggagggcacctctgagtccgccacccccgagagcggccctggcacctccaccgagcccagcgagggcagcgcacccggcagccctgccggcagccccacctccacagaggagggaaccagcaccgagcccagcgaaggcagcgccccaggcaccagcaccgagcctagtgagcaggagattaaacggatcaacaagatcagaagaagacttgtgaaagacagcaacaccaagaaggccggcaagacaggccccatgaaaaccctgctggttagagtgatgacacccgatctgagagagcggctggaaaacctgagaaagaagcctgaaaatatcccccagcccatcagcaatacatctagagccaacctgaataagctgctgaccgattacaccgaaatgaagaaggcgatcctgcatgtgtactgggaagagttccagaaggaccctgtgggcctgatgagccgggtggcccagcctgccagcaagaagatcgatcagaacaagctgaaacctgagatggacgagaagggcaacctgaccaccgccggctttgcctgctctcagtgtggccagcccctgttcgtgtacaagctggagcaggtgtctgagaagggcaaggcttacaccaactacttcggacggtgcaatgtggccgagcacgaaaagctgatcctgctggcccagctgaagcccgagaaggatagcgacgaagccgtgacatatagcctgggaaagtttgggcagagggccctggatttctacagcattcatgtgaccaaggagtccacccaccccgtgaagcccctggcccagatcgccggaaacagatacgcctccggacctgtgggaaaggccctgagcgacgcatgtatgggcacaatcgcctccttcctgtctaagtaccaggacatcatcatcgaacaccagaaggtggtgaagggcaaccagaagagactggagagcctgcgggagctggccggcaaggaaaacctggaataccctagcgtgaccctgccacctcagcctcacaccaaggagggcgttgatgcctacaacgaagtgatcgcccgggtgcgaatgtgggtgaacctgaacctgtggcagaagctgaagctaagcagagatgatgccaagcctctgctgagactgaagggattcccttcctttcctctggtcgagagacaggccaacgaagtggactggtgggacatggtgtgtaacgtgaagaagctgatcaacgagaaaaaggaggatggcaaggtgttttggcagaatctggctggctacaagagacaggaagccctgagaccatacctgagcagcgaggaagatcggaagaagggaaagaaattcgctcggtaccagctgggcgacctgctgctgcacctggaaaagaagcacggcgaggactggggaaaggtgtacgacgaggcctgggagcggattgacaagaaagtggaaggcctgagcaagcacatcaagctggaagaggaacggagaagcgaggacgcccagagcaaggccgccctgaccgactggctgcgggctaaggccagcttcgtgatcgagggcctgaaggaggccgacaaggacgagttctgcagatgcgagctgaagctgcagaagtggtacggggacctgcggggaaagcccttcgccatcgaagccgagaacagcatcctggacatcagcggcttcagcaagcagtacaactgtgccttcatctggcagaaggacggcgtgaagaagctgaacctgtacctgatcatcaactacttcaagggcggcaagctgcggttcaagaagatcaaacctgaagccttcgaagccaacagattctacaccgtgatcaacaaaaagagcggcgagatcgtgcccatggaggtgaacttcaacttcgacgaccccaacctgatcatcctgcctctggcctttggcaagagacagggcagagaattcatctggaacgacctgctgtccctggaaaccggcagcctgaagctggccaacggaagagtgatcgagaagacactgtacaacagaagaacccggcaggatgagcctgccctgttcgtggccctgaccttcgagcggcgggaggtcctggactcctccaatatcaaaccaatgaacctgatcggcgtggcaagaggcgaaaacatccccgccgtgatcgccctgaccgaccccgagggctgcccactgagccggtttaaggatagcctgggaaacccaacccacatcctgagaatcggcgagagctataaggagaagcagcggaccatccaggccaagaaggaggtggagcagcggagagccggcggctacagccggaagtacgccagcaaagccaagaatctggcagacgatatggtgagaaacaccgctagagatctgctgtactacgccgtgacccaggatgccatgctgatcttcgccaacctgagccggggcttcggccggcagggcaagcggaccttcatggccgagagacagtacacacggatggaggactggctgaccgccaagctggcctacgagggcctgagcaagacctacctgtccaagacactggcccagtacacctccaagacatgcagcaactgtgggtttaccatcaccagcgccgactacgacagggtgctggagaagctgaagaagacagcaacaggctggatgaccacaattaacggcaaggagctgaaggtggagggccagattacctactacaacagatacaagagacagaacgtagtcaaggacctgtccgtcgagctggatagactgagcgaagaatctgtgaacaacgacatctcctcctggacaaagggcagaagcggagaagctctgagcctcctgaagaaaagattctcccatagacccgtgcaggagaagttcgtgtgcctgaactgcggcttcgagacacacgcagccgagcaagccgccctgaacatcgccagatcctggctgttcctgcggagccaggagtacaagaaataccagacaaacaagacaaccggcaacaccgataagagagccttcgtcgagacctggcagtccttttaccggaagaagcttaaggaggtgtggaaacctgccgtgcggtctggcggatctggcggaggctccaccagccccaagaaaaagagaaaagtctaagctgccttctgcggggcttgccttctggccatgcccttcttctctcccttgcacctgtacctcttggtctttgaataaagcctgagtaggaaggctagcaaaaaaaaaaaaaaaaaaaaaaaaaaaaaaaaaaaaaaaaaaaaaaaaaaaaaaaaaaaaaaaaaaaaaaaaaaaaaaaa

SEQ ID NO: 9729 - RNA, 8787 nt, synthetic construct
  source 1..8787: mol_type = other RNA
aggaaataagagagaaaagaagagtaagaagaaatataagagccaccatggcccctaagaagaagcgtaaagtgagccggatgaaccacgaccaggagttcgacccccctaaggtgtaccctcccgtccccgccgagaagagaaagcccatccgggtcctgagcctgttcgatggcatcgccaccggtctgctggtgctgaaggacctgggcatccaggtggataggtacattgcctccgaggtgtgcgaggactccatcaccgtgggaatggtgcgtcatcagggcaagatcatgtacgtgggcgacgtgcggagcgtgacacagaagcatatccaggagtggggccctttcgacctggtgatcggcggcagcccttgcaatgacctgagcatcgtgaacccagcccggaagggcctgtacgagggaaccggcagactgttcttcgagttttacagactgctgcacgacgcccggcctaaggaaggcgacgaccggcccttcttttggctgttcgagaatgtggtggccatgggagtcagcgacaagcgggatattagccggttcctggagagcaaccccgtgatgatcgatgccaaggaagtgagcgccgcccaccgggccagatacttctggggcaatctgcctggcatgaacagacccctggccagcaccgtgaacgacaagctggagctgcaggagtgcctggagcacggccggatcgccaagttcagcaaggtgagaaccatcaccacccgaagcaacagcatcaaacaaggcaaggaccagcactttcctgtgttcatgaacgagaaggaggacatcctgtggtgtaccgagatggagagagtgttcgggttcccagtccactacacagatgtcagcaacatgtctagactggccagacagagactgctgggaagaagctggtccgtccctgtgatcagacacctgttcgcccctctgaaggagtacttcgcctgcgtgagcagcggcaacagcaacgccaacagccggggccccagcttctctagcggcctggtgccactgtccctgagagggagccacatgggccccatggagatctacaaaaccgtgagcgcctggaagcggcagcctgtgcgcgtgctgagcctgtttcggaatatcgataaagtcctgaaaagcctgggattcctggagagcggctctggctccggcggtggcaccctgaagtacgtggaggatgtgacaaacgtggtcagacgggatgtggagaagtggggccccttcgatctggtgtacggcagcacccaacccctgggcagctcttgtgaccggtgccctggctggtacatgtttcagttccaccggatcctgcagtacgccctgccgagacaggagtcccagcggccattcttttggattttcatggacaacttgctgctgaccgaggatgaccaggaaactaccactcggttcctgcagaccgaagccgtgaccctgcaggacgtgagaggccgggactaccagaacgccatgcgggtgtggtccaacatccctggactgaaaagcaagcacgcacctctgacccctaaagaagaggagtacctgcaggcccaggtgcggagcagaagcaagctggacgcccctaaggtggatctgctggtgaagaattgcctcctgcccctgagagagtacttcaagtatttcagccagaatagtctgcccctgggaggcagcggcggcggcccccaggagcccgtgaccttcgaggacgtggccgtgtacttcacccagaaccagtgggccagcctggaccccacccagagggccctgtacagggaggtgatgctggagaactacgccagcgtggccagcctggtggccttccccttccccaagcccgacctggtgagccagctggagaggggcgaggccccctggagccccgacccctgggaggccgaggtgctgaagggcacctgccccggcggcggcccaagcagcggcgcccctcctcccagcggcggcaggcggcccaagcagcggcgcccctcctcccagcggcggcagcccagccggctccccaacctctaccgaggagggcacctctgagtccgccacccccgagagcggccctggcacctccaccgagcccagcgagggcagcgcacccggcagccctgccggcagccccacctccacagaggagggaaccagcaccgagcccagcgaaggcagcgccccaggcaccagcaccgagcctagtgagcaggagattaaacggatcaacaagatcagaagaagacttgtgaaagacagcaacaccaagaaggccggcaagacaggccccatgaaaaccctgctggttagagtgatgacacccgatctgagagagcggctggaaaacctgagaaagaagcctgaaaatatcccccagcccatcagcaatacatctagagccaacctgaataagctgctgaccgattacaccgaaatgaagaaggcgatcctgcatgtgtactgggaagagttccagaaggaccctgtgggcctgatgagccgggtggcccagcctgccagcaagaagatcgatcagaacaagctgaaacctgagatggacgagaagggcaacctgaccaccgccggctttgcctgctctcagtgtggccagcccctgttcgtgtacaagctggagcaggtgtctgagaagggcaaggcttacaccaactacttcggacggtgcaatgtggccgagcacgaaaagctgatcctgctggcccagctgaagcccgagaaggatagcgacgaagccgtgacatatagcctgggaaagtttgggcagagggccctggatttctacagcattcatgtgaccaaggagtccacccaccccgtgaagcccctggcccagatcgccggaaacagatacgcctccggacctgtgggaaaggccctgagcgacgcatgtatgggcacaatcgcctccttcctgtctaagtaccaggacatcatcatcgaacaccagaaggtggtgaagggcaaccagaagagactggagagcctgcgggagctggccggcaaggaaaacctggaataccctagcgtgaccctgccacctcagcctcacaccaaggagggcgttgatgcctacaacgaagtgatcgcccgggtgcgaatgtgggtgaacctgaacctgtggcagaagctgaagctaagcagagatgatgccaagcctctgctgagactgaagggattcccttcctttcctctggtcgagagacaggccaacgaagtggactggtgggacatggtgtgtaacgtgaagaagctgatcaacgagaaaaaggaggatggcaaggtgttttggcagaatctggctggctacaagagacaggaagccctgagaccatacctgagcagcgaggaagatcggaagaagggaaagaaattcgctcggtaccagctgggcgacctgctgctgcacctggaaaagaagcacggcgaggactggggaaaggtgtacgacgaggcctgggagcggattgacaagaaagtggaaggcctgagcaagcacatcaagctggaagaggaacggagaagcgaggacgcccagagcaaggccgccctgaccgactggctgcgggctaaggccagcttcgtgatcgagggcctgaaggaggccgacaaggacgagttctgcagatgcgagctgaagctgcagaagtggtacggggacctgcggggaaagcccttcgccatcgaagccgagaacagcatcctggacatcagcggcttcagcaagcagtacaactgtgccttcatctggcagaaggacggcgtgaagaagctgaacctgtacctgatcatcaactacttcaagggcggcaagctgcggttcaagaagatcaaacctgaagccttcgaagccaacagattctacaccgtgatcaacaaaaagagcggcgagatcgtgcccatggaggtgaacttcaacttcgacgaccccaacctgatcatcctgcctctggcctttggcaagagacagggcagagaattcatctggaacgacctgctgtccctggaaaccggcagcctgaagctggccaacggaagagtgatcgagaagacactgtacaacagaagaacccggcaggatgagcctgccctgttcgtggccctgaccttcgagcggcgggaggtcctggactcctccaatatcaaaccaatgaacctgatcggcgtggcaagaggcgaaaacatccccgccgtgatcgccctgaccgaccccgagggctgcccactgagccggtttaaggatagcctgggaaacccaacccacatcctgagaatcggcgagagctataaggagaagcagcggaccatccaggccaagaaggaggtggagcagcggagagccggcggctacagccggaagtacgccagcaaagccaagaatctggcagacgatatggtgagaaacaccgctagagatctgctgtactacgccgtgacccaggatgccatgctgatcttcgccaacctgagccggggcttcggccggcagggcaagcggaccttcatggccgagagacagtacacacggatggaggactggctgaccgccaagctggcctacgagggcctgagcaagacctacctgtccaagacactggcccagtacacctccaagacatgcagcaactgtgggtttaccatcaccagcgccgactacgacagggtgctggagaagctgaagaagacagcaacaggctggatgaccacaattaacggcaaggagctgaaggtggagggccagattacctactacaacagatacaagagacagaacgtagtcaaggacctgtccgtcgagctggatagactgagcgaagaatctgtgaacaacgacatctcctcctggacaaagggcagaagcggagaagctctgagcctcctgaagaaaagattctcccatagacccgtgcaggagaagttcgtgtgcctgaactgcggcttcgagacacacgcagccgagcaagccgccctgaacatcgccagatcctggctgttcctgcggagccaggagtacaagaaataccagacaaacaagacaaccggcaacaccgataagagagccttcgtcgagacctggcagtccttttaccggaagaagcttaaggaggtgtggaaacctgccgtgcggtctggcggatctggcggaggctccaccagccccaagaaaaagagaaaagtctaagctgccttctgcggggcttgccttctggccatgcccttcttctctcccttgcacctgtacctcttggtctttgaataaagcctgagtaggaaggctagcaaaaaaaaaaaaaaaaaaaaaaaaaaaaaaaaaaaaaaaaaaaaaaaaaaaaaaaaaaaaaaaaaaaaaaaaaaaaaaaagcccagccggctccccaacctctaccgaggagggcacctctgagtccgccacccccgagagcggccctggcacctccaccgagcccagcgagggcagcgcacccggcagccctgccggcagccccacctccacagaggagggaaccagcaccgagcccagcgaaggcagcgccccaggcaccagcaccgagcctagtgagcaggagattaaacggatcaacaagatcagaagaagacttgtgaaagacagcaacaccaagaaggccggcaagacaggccccatgaaaaccctgctggttagagtgatgacacccgatctgagagagcggctggaaaacctgagaaagaagcctgaaaatatcccccagcccatcagcaatacatctagagccaacctgaataagctgctgaccgattacaccgaaatgaagaaggcgatcctgcatgtgtactgggaagagttccagaaggaccctgtgggcctgatgagccgggtggcccagcctgccagcaagaagatcgatcagaacaagctgaaacctgagatggacgagaagggcaacctgaccaccgccggctttgcctgctctcagtgtggccagcccctgttcgtgtacaagctggagcaggtgtctgagaagggcaaggcttacaccaactacttcggacggtgcaatgtggccgagcacgaaaagctgatcctgctggcccagctgaagcccgagaaggatagcgacgaagccgtgacatatagcctgggaaagtttgggcagagggccctggatttctacagcattcatgtgaccaaggagtccacccaccccgtgaagcccctggcccagatcgccggaaacagatacgcctccggacctgtgggaaaggccctgagcgacgcatgtatgggcacaatcgcctccttcctgtctaagtaccaggacatcatcatcgaacaccagaaggtggtgaagggcaaccagaagagactggagagcctgcgggagctggccggcaaggaaaacctggaataccctagcgtgaccctgccacctcagcctcacaccaaggagggcgttgatgcctacaacgaagtgatcgcccgggtgcgaatgtgggtgaacctgaacctgtggcagaagctgaagctaagcagagatgatgccaagcctctgctgagactgaagggattcccttcctttcctctggtcgagagacaggccaacgaagtggactggtgggacatggtgtgtaacgtgaagaagctgatcaacgagaaaaaggaggatggcaaggtgttttggcagaatctggctggctacaagagacaggaagccctgagaccatacctgagcagcgaggaagatcggaagaagggaaagaaattcgctcggtaccagctgggcgacctgctgctgcacctggaaaagaagcacggcgaggactggggaaaggtgtacgacgaggcctgggagcggattgacaagaaagtggaaggcctgagcaagcacatcaagctggaagaggaacggagaagcgaggacgcccagagcaaggccgccctgaccgactggctgcgggctaaggccagcttcgtgatcgagggcctgaaggaggccgacaaggacgagttctgcagatgcgagctgaagctgcagaagtggtacggggacctgcggggaaagcccttcgccatcgaagccgagaacagcatcctggacatcagcggcttcagcaagcagtacaactgtgccttcatctggcagaaggacggcgtgaagaagctgaacctgtacctgatcatcaactacttcaagggcggcaagctgcggttcaagaagatcaaacctgaagccttcgaagccaacagattctacaccgtgatcaacaaaaagagcggcgagatcgtgcccatggaggtgaacttcaacttcgacgaccccaacctgatcatcctgcctctggcctttggcaagagacagggcagagaattcatctggaacgacctgctgtccctggaaaccggcagcctgaagctggccaacggaagagtgatcgagaagacactgtacaacagaagaacccggcaggatgagcctgccctgttcgtggccctgaccttcgagcggcgggaggtcctggactcctccaatatcaaaccaatgaacctgatcggcgtggcaagaggcgaaaacatccccgccgtgatcgccctgaccgaccccgagggctgcccactgagccggtttaaggatagcctgggaaacccaacccacatcctgagaatcggcgagagctataaggagaagcagcggaccatccaggccaagaaggaggtggagcagcggagagccggcggctacagccggaagtacgccagcaaagccaagaatctggcagacgatatggtgagaaacaccgctagagatctgctgtactacgccgtgacccaggatgccatgctgatcttcgccaacctgagccggggcttcggccggcagggcaagcggaccttcatggccgagagacagtacacacggatggaggactggctgaccgccaagctggcctacgagggcctgagcaagacctacctgtccaagacactggcccagtacacctccaagacatgcagcaactgtgggtttaccatcaccagcgccgactacgacagggtgctggagaagctgaagaagacagcaacaggctggatgaccacaattaacggcaaggagctgaaggtggagggccagattacctactacaacagatacaagagacagaacgtagtcaaggacctgtccgtcgagctggatagactgagcgaagaatctgtgaacaacgacatctcctcctggacaaagggcagaagcggagaagctctgagcctcctgaagaaaagattctcccatagacccgtgcaggagaagttcgtgtgcctgaactgcggcttcgagacacacgcagccgagcaagccgccctgaacatcgccagatcctggctgttcctgcggagccaggagtacaagaaataccagacaaacaagacaaccggcaacaccgataagagagccttcgtcgagacctggcagtccttttaccggaagaagcttaaggaggtgtggaaacctgccgtgcggtctggcggatctggcggaggctccaccagccccaagaaaaagagaaaagtctaagctgccttctgcggggcttgccttctggccatgcccttcttctctcccttgcacctgtacctcttggtctttgaataaagcctgagtaggaaggctagcaaaaaaaaaaaaaaaaaaaaaaaaaaaaaaaaaaaaaaaaaaaaaaaaaaaaaaaaaaaaaaaaaaaaaaaaaaaaaaaa

SEQ ID NO: 9730 - RNA, 8787 nt, synthetic construct
  source 1..8787: mol_type = other RNA
aggaaataagagagaaaagaagagtaagaagaaatataagagccaccatggcccctaagaagaagcgtaaagtgagccggatgaaccacgaccaggagttcgacccccctaaggtgtaccctcccgtccccgccgagaagagaaagcccatccgggtcctgagcctgttcgatggcatcgccaccggtctgctggtgctgaaggacctgggcatccaggtggataggtacattgcctccgaggtgtgcgaggactccatcaccgtgggaatggtgcgtcatcagggcaagatcatgtacgtgggcgacgtgcggagcgtgacacagaagcatatccaggagtggggccctttcgacctggtgatcggcggcagcccttgcaatgacctgagcatcgtgaacccagcccggaagggcctgtacgagggaaccggcagactgttcttcgagttttacagactgctgcacgacgcccggcctaaggaaggcgacgaccggcccttcttttggctgttcgagaatgtggtggccatgggagtcagcgacaagcgggatattagccggttcctggagagcaaccccgtgatgatcgatgccaaggaagtgagcgccgcccaccgggccagatacttctggggcaatctgcctggcatgaacagacccctggccagcaccgtgaacgacaagctggagctgcaggagtgcctggagcacggccggatcgccaagttcagcaaggtgagaaccatcaccacccgaagcaacagcatcaaacaaggcaaggaccagcactttcctgtgttcatgaacgagaaggaggacatcctgtggtgtaccgagatggagagagtgttcgggttcccagtccactacacagatgtcagcaacatgtctagactggccagacagagactgctgggaagaagctggtccgtccctgtgatcagacacctgttcgcccctctgaaggagtacttcgcctgcgtgagcagcggcaacagcaacgccaacagccggggccccagcttctctagcggcctggtgccactgtccctgagagggagccacatgggccccatggagatctacaaaaccgtgagcgcctggaagcggcagcctgtgcgcgtgctgagcctgtttcggaatatcgataaagtcctgaaaagcctgggattcctggagagcggctctggctccggcggtggcaccctgaagtacgtggaggatgtgacaaacgtggtcagacgggatgtggagaagtggggccccttcgatctggtgtacggcagcacccaacccctgggcagctcttgtgaccggtgccctggctggtacatgtttcagttccaccggatcctgcagtacgccctgccgagacaggagtcccagcggccattcttttggattttcatggacaacttgctgctgaccgaggatgaccaggaaactaccactcggttcctgcagaccgaagccgtgaccctgcaggacgtgagaggccgggactaccagaacgccatgcgggtgtggtccaacatccctggactgaaaagcaagcacgcacctctgacccctaaagaagaggagtacctgcaggcccaggtgcggagcagaagcaagctggacgcccctaaggtggatctgctggtgaagaattgcctcctgcccctgagagagtacttcaagtatttcagccagaatagtctgcccctgggaggcagcggcggcggcatgggcctggtgagcttcgaggacatcgccgtgtacttcaacctggaggagtggcaggacctggacaccgcccagaggaccctgtacagggacgtgatgctggagacctacagcagcctggtgttcctggacccctgcatcgccaagcccaagctgatcttcaacctggagaggggcttcggcccctggagcctggccgaggccagcagcaggagcctgcccggcgtgcacaacgtgagcaccggcggcccaagcagcggcgcccctcctcccagcggcggcaggcggcccaagcagcggcgcccctcctcccagcggcggcagcccagccggctccccaacctctaccgaggagggcacctctgagtccgccacccccgagagcggccctggcacctccaccgagcccagcgagggcagcgcacccggcagccctgccggcagccccacctccacagaggagggaaccagcaccgagcccagcgaaggcagcgccccaggcaccagcaccgagcctagtgagcaggagattaaacggatcaacaagatcagaagaagacttgtgaaagacagcaacaccaagaaggccggcaagacaggccccatgaaaaccctgctggttagagtgatgacacccgatctgagagagcggctggaaaacctgagaaagaagcctgaaaatatcccccagcccatcagcaatacatctagagccaacctgaataagctgctgaccgattacaccgaaatgaagaaggcgatcctgcatgtgtactgggaagagttccagaaggaccctgtgggcctgatgagccgggtggcccagcctgccagcaagaagatcgatcagaacaagctgaaacctgagatggacgagaagggcaacctgaccaccgccggctttgcctgctctcagtgtggccagcccctgttcgtgtacaagctggagcaggtgtctgagaagggcaaggcttacaccaactacttcggacggtgcaatgtggccgagcacgaaaagctgatcctgctggcccagctgaagcccgagaaggatagcgacgaagccgtgacatatagcctgggaaagtttgggcagagggccctggatttctacagcattcatgtgaccaaggagtccacccaccccgtgaagcccctggcccagatcgccggaaacagatacgcctccggacctgtgggaaaggccctgagcgacgcatgtatgggcacaatcgcctccttcctgtctaagtaccaggacatcatcatcgaacaccagaaggtggtgaagggcaaccagaagagactggagagcctgcgggagctggccggcaaggaaaacctggaataccctagcgtgaccctgccacctcagcctcacaccaaggagggcgttgatgcctacaacgaagtgatcgcccgggtgcgaatgtgggtgaacctgaacctgtggcagaagctgaagctaagcagagatgatgccaagcctctgctgagactgaagggattcccttcctttcctctggtcgagagacaggccaacgaagtggactggtgggacatggtgtgtaacgtgaagaagctgatcaacgagaaaaaggaggatggcaaggtgttttggcagaatctggctggctacaagagacaggaagccctgagaccatacctgagcagcgaggaagatcggaagaagggaaagaaattcgctcggtaccagctgggcgacctgctgctgcacctggaaaagaagcacggcgaggactggggaaaggtgtacgacgaggcctgggagcggattgacaagaaagtggaaggcctgagcaagcacatcaagctggaagaggaacggagaagcgaggacgcccagagcaaggccgccctgaccgactggctgcgggctaaggccagcttcgtgatcgagggcctgaaggaggccgacaaggacgagttctgcagatgcgagctgaagctgcagaagtggtacggggacctgcggggaaagcccttcgccatcgaagccgagaacagcatcctggacatcagcggcttcagcaagcagtacaactgtgccttcatctggcagaaggacggcgtgaagaagctgaacctgtacctgatcatcaactacttcaagggcggcaagctgcggttcaagaagatcaaacctgaagccttcgaagccaacagattctacaccgtgatcaacaaaaagagcggcgagatcgtgcccatggaggtgaacttcaacttcgacgaccccaacctgatcatcctgcctctggcctttggcaagagacagggcagagaattcatctggaacgacctgctgtccctggaaaccggcagcctgaagctggccaacggaagagtgatcgagaagacactgtacaacagaagaacccggcaggatgagcctgccctgttcgtggccctgaccttcgagcggcgggaggtcctggactcctccaatatcaaaccaatgaacctgatcggcgtggcaagaggcgaaaacatccccgccgtgatcgccctgaccgaccccgagggctgcccactgagccggtttaaggatagcctgggaaacccaacccacatcctgagaatcggcgagagctataaggagaagcagcggaccatccaggccaagaaggaggtggagcagcggagagccggcggctacagccggaagtacgccagcaaagccaagaatctggcagacgatatggtgagaaacaccgctagagatctgctgtactacgccgtgacccaggatgccatgctgatcttcgccaacctgagccggggcttcggccggcagggcaagcggaccttcatggccgagagacagtacacacggatggaggactggctgaccgccaagctggcctacgagggcctgagcaagacctacctgtccaagacactggcccagtacacctccaagacatgcagcaactgtgggtttaccatcaccagcgccgactacgacagggtgctggagaagctgaagaagacagcaacaggctggatgaccacaattaacggcaaggagctgaaggtggagggccagattacctactacaacagatacaagagacagaacgtagtcaaggacctgtccgtcgagctggatagactgagcgaagaatctgtgaacaacgacatctcctcctggacaaagggcagaagcggagaagctctgagcctcctgaagaaaagattctcccatagacccgtgcaggagaagttcgtgtgcctgaactgcggcttcgagacacacgcagccgagcaagccgccctgaacatcgccagatcctggctgttcctgcggagccaggagtacaagaaataccagacaaacaagacaaccggcaacaccgataagagagccttcgtcgagacctggcagtccttttaccggaagaagcttaaggaggtgtggaaacctgccgtgcggtctggcggatctggcggaggctccaccagccccaagaaaaagagaaaagtctaagctgccttctgcggggcttgccttctggccatgcccttcttctctcccttgcacctgtacctcttggtctttgaataaagcctgagtaggaaggctagcaaaaaaaaaaaaaaaaaaaaaaaaaaaaaaaaaaaaaaaaaaaaaaaaaaaaaaaaaaaaaaaaaaaaaaaaaaaaaaaagcccagccggctccccaacctctaccgaggagggcacctctgagtccgccacccccgagagcggccctggcacctccaccgagcccagcgagggcagcgcacccggcagccctgccggcagccccacctccacagaggagggaaccagcaccgagcccagcgaaggcagcgccccaggcaccagcaccgagcctagtgagcaggagattaaacggatcaacaagatcagaagaagacttgtgaaagacagcaacaccaagaaggccggcaagacaggccccatgaaaaccctgctggttagagtgatgacacccgatctgagagagcggctggaaaacctgagaaagaagcctgaaaatatcccccagcccatcagcaatacatctagagccaacctgaataagctgctgaccgattacaccgaaatgaagaaggcgatcctgcatgtgtactgggaagagttccagaaggaccctgtgggcctgatgagccgggtggcccagcctgccagcaagaagatcgatcagaacaagctgaaacctgagatggacgagaagggcaacctgaccaccgccggctttgcctgctctcagtgtggccagcccctgttcgtgtacaagctggagcaggtgtctgagaagggcaaggcttacaccaactacttcggacggtgcaatgtggccgagcacgaaaagctgatcctgctggcccagctgaagcccgagaaggatagcgacgaagccgtgacatatagcctgggaaagtttgggcagagggccctggatttctacagcattcatgtgaccaaggagtccacccaccccgtgaagcccctggcccagatcgccggaaacagatacgcctccggacctgtgggaaaggccctgagcgacgcatgtatgggcacaatcgcctccttcctgtctaagtaccaggacatcatcatcgaacaccagaaggtggtgaagggcaaccagaagagactggagagcctgcgggagctggccggcaaggaaaacctggaataccctagcgtgaccctgccacctcagcctcacaccaaggagggcgttgatgcctacaacgaagtgatcgcccgggtgcgaatgtgggtgaacctgaacctgtggcagaagctgaagctaagcagagatgatgccaagcctctgctgagactgaagggattcccttcctttcctctggtcgagagacaggccaacgaagtggactggtgggacatggtgtgtaacgtgaagaagctgatcaacgagaaaaaggaggatggcaaggtgttttggcagaatctggctggctacaagagacaggaagccctgagaccatacctgagcagcgaggaagatcggaagaagggaaagaaattcgctcggtaccagctgggcgacctgctgctgcacctggaaaagaagcacggcgaggactggggaaaggtgtacgacgaggcctgggagcggattgacaagaaagtggaaggcctgagcaagcacatcaagctggaagaggaacggagaagcgaggacgcccagagcaaggccgccctgaccgactggctgcgggctaaggccagcttcgtgatcgagggcctgaaggaggccgacaaggacgagttctgcagatgcgagctgaagctgcagaagtggtacggggacctgcggggaaagcccttcgccatcgaagccgagaacagcatcctggacatcagcggcttcagcaagcagtacaactgtgccttcatctggcagaaggacggcgtgaagaagctgaacctgtacctgatcatcaactacttcaagggcggcaagctgcggttcaagaagatcaaacctgaagccttcgaagccaacagattctacaccgtgatcaacaaaaagagcggcgagatcgtgcccatggaggtgaacttcaacttcgacgaccccaacctgatcatcctgcctctggcctttggcaagagacagggcagagaattcatctggaacgacctgctgtccctggaaaccggcagcctgaagctggccaacggaagagtgatcgagaagacactgtacaacagaagaacccggcaggatgagcctgccctgttcgtggccctgaccttcgagcggcgggaggtcctggactcctccaatatcaaaccaatgaacctgatcggcgtggcaagaggcgaaaacatccccgccgtgatcgccctgaccgaccccgagggctgcccactgagccggtttaaggatagcctgggaaacccaacccacatcctgagaatcggcgagagctataaggagaagcagcggaccatccaggccaagaaggaggtggagcagcggagagccggcggctacagccggaagtacgccagcaaagccaagaatctggcagacgatatggtgagaaacaccgctagagatctgctgtactacgccgtgacccaggatgccatgctgatcttcgccaacctgagccggggcttcggccggcagggcaagcggaccttcatggccgagagacagtacacacggatggaggactggctgaccgccaagctggcctacgagggcctgagcaagacctacctgtccaagacactggcccagtacacctccaagacatgcagcaactgtgggtttaccatcaccagcgccgactacgacagggtgctggagaagctgaagaagacagcaacaggctggatgaccacaattaacggcaaggagctgaaggtggagggccagattacctactacaacagatacaagagacagaacgtagtcaaggacctgtccgtcgagctggatagactgagcgaagaatctgtgaacaacgacatctcctcctggacaaagggcagaagcggagaagctctgagcctcctgaagaaaagattctcccatagacccgtgcaggagaagttcgtgtgcctgaactgcggcttcgagacacacgcagccgagcaagccgccctgaacatcgccagatcctggctgttcctgcggagccaggagtacaagaaataccagacaaacaagacaaccggcaacaccgataagagagccttcgtcgagacctggcagtccttttaccggaagaagcttaaggaggtgtggaaacctgccgtgcggtctggcggatctggcggaggctccaccagccccaagaaaaagagaaaagtctaagctgccttctgcggggcttgccttctggccatgcccttcttctctcccttgcacctgtacctcttggtctttgaataaagcctgagtaggaaggctagcaaaaaaaaaaaaaaaaaaaaaaaaaaaaaaaaaaaaaaaaaaaaaaaaaaaaaaaaaaaaaaaaaaaaaaaaaaaaaaaa

SEQ ID NO: 9731 - RNA, 8787 nt, synthetic construct
  source 1..8787: mol_type = other RNA
aggaaataagagagaaaagaagagtaagaagaaatataagagccaccatggcccctaagaagaagcgtaaagtgagccggatgaaccacgaccaggagttcgacccccctaaggtgtaccctcccgtccccgccgagaagagaaagcccatccgggtcctgagcctgttcgatggcatcgccaccggtctgctggtgctgaaggacctgggcatccaggtggataggtacattgcctccgaggtgtgcgaggactccatcaccgtgggaatggtgcgtcatcagggcaagatcatgtacgtgggcgacgtgcggagcgtgacacagaagcatatccaggagtggggccctttcgacctggtgatcggcggcagcccttgcaatgacctgagcatcgtgaacccagcccggaagggcctgtacgagggaaccggcagactgttcttcgagttttacagactgctgcacgacgcccggcctaaggaaggcgacgaccggcccttcttttggctgttcgagaatgtggtggccatgggagtcagcgacaagcgggatattagccggttcctggagagcaaccccgtgatgatcgatgccaaggaagtgagcgccgcccaccgggccagatacttctggggcaatctgcctggcatgaacagacccctggccagcaccgtgaacgacaagctggagctgcaggagtgcctggagcacggccggatcgccaagttcagcaaggtgagaaccatcaccacccgaagcaacagcatcaaacaaggcaaggaccagcactttcctgtgttcatgaacgagaaggaggacatcctgtggtgtaccgagatggagagagtgttcgggttcccagtccactacacagatgtcagcaacatgtctagactggccagacagagactgctgggaagaagctggtccgtccctgtgatcagacacctgttcgcccctctgaaggagtacttcgcctgcgtgagcagcggcaacagcaacgccaacagccggggccccagcttctctagcggcctggtgccactgtccctgagagggagccacatgggccccatggagatctacaaaaccgtgagcgcctggaagcggcagcctgtgcgcgtgctgagcctgtttcggaatatcgataaagtcctgaaaagcctgggattcctggagagcggctctggctccggcggtggcaccctgaagtacgtggaggatgtgacaaacgtggtcagacgggatgtggagaagtggggccccttcgatctggtgtacggcagcacccaacccctgggcagctcttgtgaccggtgccctggctggtacatgtttcagttccaccggatcctgcagtacgccctgccgagacaggagtcccagcggccattcttttggattttcatggacaacttgctgctgaccgaggatgaccaggaaactaccactcggttcctgcagaccgaagccgtgaccctgcaggacgtgagaggccgggactaccagaacgccatgcgggtgtggtccaacatccctggactgaaaagcaagcacgcacctctgacccctaaagaagaggagtacctgcaggcccaggtgcggagcagaagcaagctggacgcccctaaggtggatctgctggtgaagaattgcctcctgcccctgagagagtacttcaagtatttcagccagaatagtctgcccctgggaggcagcggcggcggcatggagagcctgaccctggaggacgtggccgtggacttcacctgggaggagtggcagttcctgagccccgcccagaaggacctgtacagggacgtgatgctggagaactacagcaacctggtggccgtgggctaccaggccaggaagcccgacgccctgagcaagctggagaggggcgaggagccctgcaccaccgaggacgagatctacgccaggatctgcagcgacagcggcggcgccagcggcggcccaagcagcggcgcccctcctcccagcggcggcaggcggcccaagcagcggcgcccctcctcccagcggcggcagcccagccggctccccaacctctaccgaggagggcacctctgagtccgccacccccgagagcggccctggcacctccaccgagcccagcgagggcagcgcacccggcagccctgccggcagccccacctccacagaggagggaaccagcaccgagcccagcgaaggcagcgccccaggcaccagcaccgagcctagtgagcaggagattaaacggatcaacaagatcagaagaagacttgtgaaagacagcaacaccaagaaggccggcaagacaggccccatgaaaaccctgctggttagagtgatgacacccgatctgagagagcggctggaaaacctgagaaagaagcctgaaaatatcccccagcccatcagcaatacatctagagccaacctgaataagctgctgaccgattacaccgaaatgaagaaggcgatcctgcatgtgtactgggaagagttccagaaggaccctgtgggcctgatgagccgggtggcccagcctgccagcaagaagatcgatcagaacaagctgaaacctgagatggacgagaagggcaacctgaccaccgccggctttgcctgctctcagtgtggccagcccctgttcgtgtacaagctggagcaggtgtctgagaagggcaaggcttacaccaactacttcggacggtgcaatgtggccgagcacgaaaagctgatcctgctggcccagctgaagcccgagaaggatagcgacgaagccgtgacatatagcctgggaaagtttgggcagagggccctggatttctacagcattcatgtgaccaaggagtccacccaccccgtgaagcccctggcccagatcgccggaaacagatacgcctccggacctgtgggaaaggccctgagcgacgcatgtatgggcacaatcgcctccttcctgtctaagtaccaggacatcatcatcgaacaccagaaggtggtgaagggcaaccagaagagactggagagcctgcgggagctggccggcaaggaaaacctggaataccctagcgtgaccctgccacctcagcctcacaccaaggagggcgttgatgcctacaacgaagtgatcgcccgggtgcgaatgtgggtgaacctgaacctgtggcagaagctgaagctaagcagagatgatgccaagcctctgctgagactgaagggattcccttcctttcctctggtcgagagacaggccaacgaagtggactggtgggacatggtgtgtaacgtgaagaagctgatcaacgagaaaaaggaggatggcaaggtgttttggcagaatctggctggctacaagagacaggaagccctgagaccatacctgagcagcgaggaagatcggaagaagggaaagaaattcgctcggtaccagctgggcgacctgctgctgcacctggaaaagaagcacggcgaggactggggaaaggtgtacgacgaggcctgggagcggattgacaagaaagtggaaggcctgagcaagcacatcaagctggaagaggaacggagaagcgaggacgcccagagcaaggccgccctgaccgactggctgcgggctaaggccagcttcgtgatcgagggcctgaaggaggccgacaaggacgagttctgcagatgcgagctgaagctgcagaagtggtacggggacctgcggggaaagcccttcgccatcgaagccgagaacagcatcctggacatcagcggcttcagcaagcagtacaactgtgccttcatctggcagaaggacggcgtgaagaagctgaacctgtacctgatcatcaactacttcaagggcggcaagctgcggttcaagaagatcaaacctgaagccttcgaagccaacagattctacaccgtgatcaacaaaaagagcggcgagatcgtgcccatggaggtgaacttcaacttcgacgaccccaacctgatcatcctgcctctggcctttggcaagagacagggcagagaattcatctggaacgacctgctgtccctggaaaccggcagcctgaagctggccaacggaagagtgatcgagaagacactgtacaacagaagaacccggcaggatgagcctgccctgttcgtggccctgaccttcgagcggcgggaggtcctggactcctccaatatcaaaccaatgaacctgatcggcgtggcaagaggcgaaaacatccccgccgtgatcgccctgaccgaccccgagggctgcccactgagccggtttaaggatagcctgggaaacccaacccacatcctgagaatcggcgagagctataaggagaagcagcggaccatccaggccaagaaggaggtggagcagcggagagccggcggctacagccggaagtacgccagcaaagccaagaatctggcagacgatatggtgagaaacaccgctagagatctgctgtactacgccgtgacccaggatgccatgctgatcttcgccaacctgagccggggcttcggccggcagggcaagcggaccttcatggccgagagacagtacacacggatggaggactggctgaccgccaagctggcctacgagggcctgagcaagacctacctgtccaagacactggcccagtacacctccaagacatgcagcaactgtgggtttaccatcaccagcgccgactacgacagggtgctggagaagctgaagaagacagcaacaggctggatgaccacaattaacggcaaggagctgaaggtggagggccagattacctactacaacagatacaagagacagaacgtagtcaaggacctgtccgtcgagctggatagactgagcgaagaatctgtgaacaacgacatctcctcctggacaaagggcagaagcggagaagctctgagcctcctgaagaaaagattctcccatagacccgtgcaggagaagttcgtgtgcctgaactgcggcttcgagacacacgcagccgagcaagccgccctgaacatcgccagatcctggctgttcctgcggagccaggagtacaagaaataccagacaaacaagacaaccggcaacaccgataagagagccttcgtcgagacctggcagtccttttaccggaagaagcttaaggaggtgtggaaacctgccgtgcggtctggcggatctggcggaggctccaccagccccaagaaaaagagaaaagtctaagctgccttctgcggggcttgccttctggccatgcccttcttctctcccttgcacctgtacctcttggtctttgaataaagcctgagtaggaaggctagcaaaaaaaaaaaaaaaaaaaaaaaaaaaaaaaaaaaaaaaaaaaaaaaaaaaaaaaaaaaaaaaaaaaaaaaaaaaaaaaagcccagccggctccccaacctctaccgaggagggcacctctgagtccgccacccccgagagcggccctggcacctccaccgagcccagcgagggcagcgcacccggcagccctgccggcagccccacctccacagaggagggaaccagcaccgagcccagcgaaggcagcgccccaggcaccagcaccgagcctagtgagcaggagattaaacggatcaacaagatcagaagaagacttgtgaaagacagcaacaccaagaaggccggcaagacaggccccatgaaaaccctgctggttagagtgatgacacccgatctgagagagcggctggaaaacctgagaaagaagcctgaaaatatcccccagcccatcagcaatacatctagagccaacctgaataagctgctgaccgattacaccgaaatgaagaaggcgatcctgcatgtgtactgggaagagttccagaaggaccctgtgggcctgatgagccgggtggcccagcctgccagcaagaagatcgatcagaacaagctgaaacctgagatggacgagaagggcaacctgaccaccgccggctttgcctgctctcagtgtggccagcccctgttcgtgtacaagctggagcaggtgtctgagaagggcaaggcttacaccaactacttcggacggtgcaatgtggccgagcacgaaaagctgatcctgctggcccagctgaagcccgagaaggatagcgacgaagccgtgacatatagcctgggaaagtttgggcagagggccctggatttctacagcattcatgtgaccaaggagtccacccaccccgtgaagcccctggcccagatcgccggaaacagatacgcctccggacctgtgggaaaggccctgagcgacgcatgtatgggcacaatcgcctccttcctgtctaagtaccaggacatcatcatcgaacaccagaaggtggtgaagggcaaccagaagagactggagagcctgcgggagctggccggcaaggaaaacctggaataccctagcgtgaccctgccacctcagcctcacaccaaggagggcgttgatgcctacaacgaagtgatcgcccgggtgcgaatgtgggtgaacctgaacctgtggcagaagctgaagctaagcagagatgatgccaagcctctgctgagactgaagggattcccttcctttcctctggtcgagagacaggccaacgaagtggactggtgggacatggtgtgtaacgtgaagaagctgatcaacgagaaaaaggaggatggcaaggtgttttggcagaatctggctggctacaagagacaggaagccctgagaccatacctgagcagcgaggaagatcggaagaagggaaagaaattcgctcggtaccagctgggcgacctgctgctgcacctggaaaagaagcacggcgaggactggggaaaggtgtacgacgaggcctgggagcggattgacaagaaagtggaaggcctgagcaagcacatcaagctggaagaggaacggagaagcgaggacgcccagagcaaggccgccctgaccgactggctgcgggctaaggccagcttcgtgatcgagggcctgaaggaggccgacaaggacgagttctgcagatgcgagctgaagctgcagaagtggtacggggacctgcggggaaagcccttcgccatcgaagccgagaacagcatcctggacatcagcggcttcagcaagcagtacaactgtgccttcatctggcagaaggacggcgtgaagaagctgaacctgtacctgatcatcaactacttcaagggcggcaagctgcggttcaagaagatcaaacctgaagccttcgaagccaacagattctacaccgtgatcaacaaaaagagcggcgagatcgtgcccatggaggtgaacttcaacttcgacgaccccaacctgatcatcctgcctctggcctttggcaagagacagggcagagaattcatctggaacgacctgctgtccctggaaaccggcagcctgaagctggccaacggaagagtgatcgagaagacactgtacaacagaagaacccggcaggatgagcctgccctgttcgtggccctgaccttcgagcggcgggaggtcctggactcctccaatatcaaaccaatgaacctgatcggcgtggcaagaggcgaaaacatccccgccgtgatcgccctgaccgaccccgagggctgcccactgagccggtttaaggatagcctgggaaacccaacccacatcctgagaatcggcgagagctataaggagaagcagcggaccatccaggccaagaaggaggtggagcagcggagagccggcggctacagccggaagtacgccagcaaagccaagaatctggcagacgatatggtgagaaacaccgctagagatctgctgtactacgccgtgacccaggatgccatgctgatcttcgccaacctgagccggggcttcggccggcagggcaagcggaccttcatggccgagagacagtacacacggatggaggactggctgaccgccaagctggcctacgagggcctgagcaagacctacctgtccaagacactggcccagtacacctccaagacatgcagcaactgtgggtttaccatcaccagcgccgactacgacagggtgctggagaagctgaagaagacagcaacaggctggatgaccacaattaacggcaaggagctgaaggtggagggccagattacctactacaacagatacaagagacagaacgtagtcaaggacctgtccgtcgagctggatagactgagcgaagaatctgtgaacaacgacatctcctcctggacaaagggcagaagcggagaagctctgagcctcctgaagaaaagattctcccatagacccgtgcaggagaagttcgtgtgcctgaactgcggcttcgagacacacgcagccgagcaagccgccctgaacatcgccagatcctggctgttcctgcggagccaggagtacaagaaataccagacaaacaagacaaccggcaacaccgataagagagccttcgtcgagacctggcagtccttttaccggaagaagcttaaggaggtgtggaaacctgccgtgcggtctggcggatctggcggaggctccaccagccccaagaaaaagagaaaagtctaagctgccttctgcggggcttgccttctggccatgcccttcttctctcccttgcacctgtacctcttggtctttgaataaagcctgagtaggaaggctagcaaaaaaaaaaaaaaaaaaaaaaaaaaaaaaaaaaaaaaaaaaaaaaaaaaaaaaaaaaaaaaaaaaaaaaaaaaaaaaaa

SEQ ID NO: 9732 - RNA, 8787 nt, synthetic construct
  source 1..8787: mol_type = other RNA
aggaaataagagagaaaagaagagtaagaagaaatataagagccaccatggcccctaagaagaagcgtaaagtgagccggatgaaccacgaccaggagttcgacccccctaaggtgtaccctcccgtccccgccgagaagagaaagcccatccgggtcctgagcctgttcgatggcatcgccaccggtctgctggtgctgaaggacctgggcatccaggtggataggtacattgcctccgaggtgtgcgaggactccatcaccgtgggaatggtgcgtcatcagggcaagatcatgtacgtgggcgacgtgcggagcgtgacacagaagcatatccaggagtggggccctttcgacctggtgatcggcggcagcccttgcaatgacctgagcatcgtgaacccagcccggaagggcctgtacgagggaaccggcagactgttcttcgagttttacagactgctgcacgacgcccggcctaaggaaggcgacgaccggcccttcttttggctgttcgagaatgtggtggccatgggagtcagcgacaagcgggatattagccggttcctggagagcaaccccgtgatgatcgatgccaaggaagtgagcgccgcccaccgggccagatacttctggggcaatctgcctggcatgaacagacccctggccagcaccgtgaacgacaagctggagctgcaggagtgcctggagcacggccggatcgccaagttcagcaaggtgagaaccatcaccacccgaagcaacagcatcaaacaaggcaaggaccagcactttcctgtgttcatgaacgagaaggaggacatcctgtggtgtaccgagatggagagagtgttcgggttcccagtccactacacagatgtcagcaacatgtctagactggccagacagagactgctgggaagaagctggtccgtccctgtgatcagacacctgttcgcccctctgaaggagtacttcgcctgcgtgagcagcggcaacagcaacgccaacagccggggccccagcttctctagcggcctggtgccactgtccctgagagggagccacatgggccccatggagatctacaaaaccgtgagcgcctggaagcggcagcctgtgcgcgtgctgagcctgtttcggaatatcgataaagtcctgaaaagcctgggattcctggagagcggctctggctccggcggtggcaccctgaagtacgtggaggatgtgacaaacgtggtcagacgggatgtggagaagtggggccccttcgatctggtgtacggcagcacccaacccctgggcagctcttgtgaccggtgccctggctggtacatgtttcagttccaccggatcctgcagtacgccctgccgagacaggagtcccagcggccattcttttggattttcatggacaacttgctgctgaccgaggatgaccaggaaactaccactcggttcctgcagaccgaagccgtgaccctgcaggacgtgagaggccgggactaccagaacgccatgcgggtgtggtccaacatccctggactgaaaagcaagcacgcacctctgacccctaaagaagaggagtacctgcaggcccaggtgcggagcagaagcaagctggacgcccctaaggtggatctgctggtgaagaattgcctcctgcccctgagagagtacttcaagtatttcagccagaatagtctgcccctgggaggcagcggcggcggccaggccggcagcgacctgttcagggacgtggccatcgtgttcagccaggaggagtgggagcagctggcccccacccagagggacctgtacagggacgtgatgctggagacctacagcaacctggtgagcctgggcctggccgtgagcaagcccgacgtgatcgccttcctggagcagggcagggagccctggaccgtggagggcgtggccaccggcggcctgtgccccgtgctgaagagcaggggcggcccaagcagcggcgcccctcctcccagcggcggcaggcggcccaagcagcggcgcccctcctcccagcggcggcagcccagccggctccccaacctctaccgaggagggcacctctgagtccgccacccccgagagcggccctggcacctccaccgagcccagcgagggcagcgcacccggcagccctgccggcagccccacctccacagaggagggaaccagcaccgagcccagcgaaggcagcgccccaggcaccagcaccgagcctagtgagcaggagattaaacggatcaacaagatcagaagaagacttgtgaaagacagcaacaccaagaaggccggcaagacaggccccatgaaaaccctgctggttagagtgatgacacccgatctgagagagcggctggaaaacctgagaaagaagcctgaaaatatcccccagcccatcagcaatacatctagagccaacctgaataagctgctgaccgattacaccgaaatgaagaaggcgatcctgcatgtgtactgggaagagttccagaaggaccctgtgggcctgatgagccgggtggcccagcctgccagcaagaagatcgatcagaacaagctgaaacctgagatggacgagaagggcaacctgaccaccgccggctttgcctgctctcagtgtggccagcccctgttcgtgtacaagctggagcaggtgtctgagaagggcaaggcttacaccaactacttcggacggtgcaatgtggccgagcacgaaaagctgatcctgctggcccagctgaagcccgagaaggatagcgacgaagccgtgacatatagcctgggaaagtttgggcagagggccctggatttctacagcattcatgtgaccaaggagtccacccaccccgtgaagcccctggcccagatcgccggaaacagatacgcctccggacctgtgggaaaggccctgagcgacgcatgtatgggcacaatcgcctccttcctgtctaagtaccaggacatcatcatcgaacaccagaaggtggtgaagggcaaccagaagagactggagagcctgcgggagctggccggcaaggaaaacctggaataccctagcgtgaccctgccacctcagcctcacaccaaggagggcgttgatgcctacaacgaagtgatcgcccgggtgcgaatgtgggtgaacctgaacctgtggcagaagctgaagctaagcagagatgatgccaagcctctgctgagactgaagggattcccttcctttcctctggtcgagagacaggccaacgaagtggactggtgggacatggtgtgtaacgtgaagaagctgatcaacgagaaaaaggaggatggcaaggtgttttggcagaatctggctggctacaagagacaggaagccctgagaccatacctgagcagcgaggaagatcggaagaagggaaagaaattcgctcggtaccagctgggcgacctgctgctgcacctggaaaagaagcacggcgaggactggggaaaggtgtacgacgaggcctgggagcggattgacaagaaagtggaaggcctgagcaagcacatcaagctggaagaggaacggagaagcgaggacgcccagagcaaggccgccctgaccgactggctgcgggctaaggccagcttcgtgatcgagggcctgaaggaggccgacaaggacgagttctgcagatgcgagctgaagctgcagaagtggtacggggacctgcggggaaagcccttcgccatcgaagccgagaacagcatcctggacatcagcggcttcagcaagcagtacaactgtgccttcatctggcagaaggacggcgtgaagaagctgaacctgtacctgatcatcaactacttcaagggcggcaagctgcggttcaagaagatcaaacctgaagccttcgaagccaacagattctacaccgtgatcaacaaaaagagcggcgagatcgtgcccatggaggtgaacttcaacttcgacgaccccaacctgatcatcctgcctctggcctttggcaagagacagggcagagaattcatctggaacgacctgctgtccctggaaaccggcagcctgaagctggccaacggaagagtgatcgagaagacactgtacaacagaagaacccggcaggatgagcctgccctgttcgtggccctgaccttcgagcggcgggaggtcctggactcctccaatatcaaaccaatgaacctgatcggcgtggcaagaggcgaaaacatccccgccgtgatcgccctgaccgaccccgagggctgcccactgagccggtttaaggatagcctgggaaacccaacccacatcctgagaatcggcgagagctataaggagaagcagcggaccatccaggccaagaaggaggtggagcagcggagagccggcggctacagccggaagtacgccagcaaagccaagaatctggcagacgatatggtgagaaacaccgctagagatctgctgtactacgccgtgacccaggatgccatgctgatcttcgccaacctgagccggggcttcggccggcagggcaagcggaccttcatggccgagagacagtacacacggatggaggactggctgaccgccaagctggcctacgagggcctgagcaagacctacctgtccaagacactggcccagtacacctccaagacatgcagcaactgtgggtttaccatcaccagcgccgactacgacagggtgctggagaagctgaagaagacagcaacaggctggatgaccacaattaacggcaaggagctgaaggtggagggccagattacctactacaacagatacaagagacagaacgtagtcaaggacctgtccgtcgagctggatagactgagcgaagaatctgtgaacaacgacatctcctcctggacaaagggcagaagcggagaagctctgagcctcctgaagaaaagattctcccatagacccgtgcaggagaagttcgtgtgcctgaactgcggcttcgagacacacgcagccgagcaagccgccctgaacatcgccagatcctggctgttcctgcggagccaggagtacaagaaataccagacaaacaagacaaccggcaacaccgataagagagccttcgtcgagacctggcagtccttttaccggaagaagcttaaggaggtgtggaaacctgccgtgcggtctggcggatctggcggaggctccaccagccccaagaaaaagagaaaagtctaagctgccttctgcggggcttgccttctggccatgcccttcttctctcccttgcacctgtacctcttggtctttgaataaagcctgagtaggaaggctagcaaaaaaaaaaaaaaaaaaaaaaaaaaaaaaaaaaaaaaaaaaaaaaaaaaaaaaaaaaaaaaaaaaaaaaaaaaaaaaaagcccagccggctccccaacctctaccgaggagggcacctctgagtccgccacccccgagagcggccctggcacctccaccgagcccagcgagggcagcgcacccggcagccctgccggcagccccacctccacagaggagggaaccagcaccgagcccagcgaaggcagcgccccaggcaccagcaccgagcctagtgagcaggagattaaacggatcaacaagatcagaagaagacttgtgaaagacagcaacaccaagaaggccggcaagacaggccccatgaaaaccctgctggttagagtgatgacacccgatctgagagagcggctggaaaacctgagaaagaagcctgaaaatatcccccagcccatcagcaatacatctagagccaacctgaataagctgctgaccgattacaccgaaatgaagaaggcgatcctgcatgtgtactgggaagagttccagaaggaccctgtgggcctgatgagccgggtggcccagcctgccagcaagaagatcgatcagaacaagctgaaacctgagatggacgagaagggcaacctgaccaccgccggctttgcctgctctcagtgtggccagcccctgttcgtgtacaagctggagcaggtgtctgagaagggcaaggcttacaccaactacttcggacggtgcaatgtggccgagcacgaaaagctgatcctgctggcccagctgaagcccgagaaggatagcgacgaagccgtgacatatagcctgggaaagtttgggcagagggccctggatttctacagcattcatgtgaccaaggagtccacccaccccgtgaagcccctggcccagatcgccggaaacagatacgcctccggacctgtgggaaaggccctgagcgacgcatgtatgggcacaatcgcctccttcctgtctaagtaccaggacatcatcatcgaacaccagaaggtggtgaagggcaaccagaagagactggagagcctgcgggagctggccggcaaggaaaacctggaataccctagcgtgaccctgccacctcagcctcacaccaaggagggcgttgatgcctacaacgaagtgatcgcccgggtgcgaatgtgggtgaacctgaacctgtggcagaagctgaagctaagcagagatgatgccaagcctctgctgagactgaagggattcccttcctttcctctggtcgagagacaggccaacgaagtggactggtgggacatggtgtgtaacgtgaagaagctgatcaacgagaaaaaggaggatggcaaggtgttttggcagaatctggctggctacaagagacaggaagccctgagaccatacctgagcagcgaggaagatcggaagaagggaaagaaattcgctcggtaccagctgggcgacctgctgctgcacctggaaaagaagcacggcgaggactggggaaaggtgtacgacgaggcctgggagcggattgacaagaaagtggaaggcctgagcaagcacatcaagctggaagaggaacggagaagcgaggacgcccagagcaaggccgccctgaccgactggctgcgggctaaggccagcttcgtgatcgagggcctgaaggaggccgacaaggacgagttctgcagatgcgagctgaagctgcagaagtggtacggggacctgcggggaaagcccttcgccatcgaagccgagaacagcatcctggacatcagcggcttcagcaagcagtacaactgtgccttcatctggcagaaggacggcgtgaagaagctgaacctgtacctgatcatcaactacttcaagggcggcaagctgcggttcaagaagatcaaacctgaagccttcgaagccaacagattctacaccgtgatcaacaaaaagagcggcgagatcgtgcccatggaggtgaacttcaacttcgacgaccccaacctgatcatcctgcctctggcctttggcaagagacagggcagagaattcatctggaacgacctgctgtccctggaaaccggcagcctgaagctggccaacggaagagtgatcgagaagacactgtacaacagaagaacccggcaggatgagcctgccctgttcgtggccctgaccttcgagcggcgggaggtcctggactcctccaatatcaaaccaatgaacctgatcggcgtggcaagaggcgaaaacatccccgccgtgatcgccctgaccgaccccgagggctgcccactgagccggtttaaggatagcctgggaaacccaacccacatcctgagaatcggcgagagctataaggagaagcagcggaccatccaggccaagaaggaggtggagcagcggagagccggcggctacagccggaagtacgccagcaaagccaagaatctggcagacgatatggtgagaaacaccgctagagatctgctgtactacgccgtgacccaggatgccatgctgatcttcgccaacctgagccggggcttcggccggcagggcaagcggaccttcatggccgagagacagtacacacggatggaggactggctgaccgccaagctggcctacgagggcctgagcaagacctacctgtccaagacactggcccagtacacctccaagacatgcagcaactgtgggtttaccatcaccagcgccgactacgacagggtgctggagaagctgaagaagacagcaacaggctggatgaccacaattaacggcaaggagctgaaggtggagggccagattacctactacaacagatacaagagacagaacgtagtcaaggacctgtccgtcgagctggatagactgagcgaagaatctgtgaacaacgacatctcctcctggacaaagggcagaagcggagaagctctgagcctcctgaagaaaagattctcccatagacccgtgcaggagaagttcgtgtgcctgaactgcggcttcgagacacacgcagccgagcaagccgccctgaacatcgccagatcctggctgttcctgcggagccaggagtacaagaaataccagacaaacaagacaaccggcaacaccgataagagagccttcgtcgagacctggcagtccttttaccggaagaagcttaaggaggtgtggaaacctgccgtgcggtctggcggatctggcggaggctccaccagccccaagaaaaagagaaaagtctaagctgccttctgcggggcttgccttctggccatgcccttcttctctcccttgcacctgtacctcttggtctttgaataaagcctgagtaggaaggctagcaaaaaaaaaaaaaaaaaaaaaaaaaaaaaaaaaaaaaaaaaaaaaaaaaaaaaaaaaaaaaaaaaaaaaaaaaaaaaaaa

SEQ ID NO: 9733 - RNA, 8787 nt, synthetic construct
  source 1..8787: mol_type = other RNA
aggaaataagagagaaaagaagagtaagaagaaatataagagccaccatggcccctaagaagaagcgtaaagtgagccggatgaaccacgaccaggagttcgacccccctaaggtgtaccctcccgtccccgccgagaagagaaagcccatccgggtcctgagcctgttcgatggcatcgccaccggtctgctggtgctgaaggacctgggcatccaggtggataggtacattgcctccgaggtgtgcgaggactccatcaccgtgggaatggtgcgtcatcagggcaagatcatgtacgtgggcgacgtgcggagcgtgacacagaagcatatccaggagtggggccctttcgacctggtgatcggcggcagcccttgcaatgacctgagcatcgtgaacccagcccggaagggcctgtacgagggaaccggcagactgttcttcgagttttacagactgctgcacgacgcccggcctaaggaaggcgacgaccggcccttcttttggctgttcgagaatgtggtggccatgggagtcagcgacaagcgggatattagccggttcctggagagcaaccccgtgatgatcgatgccaaggaagtgagcgccgcccaccgggccagatacttctggggcaatctgcctggcatgaacagacccctggccagcaccgtgaacgacaagctggagctgcaggagtgcctggagcacggccggatcgccaagttcagcaaggtgagaaccatcaccacccgaagcaacagcatcaaacaaggcaaggaccagcactttcctgtgttcatgaacgagaaggaggacatcctgtggtgtaccgagatggagagagtgttcgggttcccagtccactacacagatgtcagcaacatgtctagactggccagacagagactgctgggaagaagctggtccgtccctgtgatcagacacctgttcgcccctctgaaggagtacttcgcctgcgtgagcagcggcaacagcaacgccaacagccggggccccagcttctctagcggcctggtgccactgtccctgagagggagccacatgggccccatggagatctacaaaaccgtgagcgcctggaagcggcagcctgtgcgcgtgctgagcctgtttcggaatatcgataaagtcctgaaaagcctgggattcctggagagcggctctggctccggcggtggcaccctgaagtacgtggaggatgtgacaaacgtggtcagacgggatgtggagaagtggggccccttcgatctggtgtacggcagcacccaacccctgggcagctcttgtgaccggtgccctggctggtacatgtttcagttccaccggatcctgcagtacgccctgccgagacaggagtcccagcggccattcttttggattttcatggacaacttgctgctgaccgaggatgaccaggaaactaccactcggttcctgcagaccgaagccgtgaccctgcaggacgtgagaggccgggactaccagaacgccatgcgggtgtggtccaacatccctggactgaaaagcaagcacgcacctctgacccctaaagaagaggagtacctgcaggcccaggtgcggagcagaagcaagctggacgcccctaaggtggatctgctggtgaagaattgcctcctgcccctgagagagtacttcaagtatttcagccagaatagtctgcccctgggaggcagcggcggcggcatggacagcgtggccttcgaggacgtggccgtgaacttcacccacgaggagtgggccctgctgagccccagccagaagaacctgtacagggacgtgatgagggagaccatcaggaacctgaactgcatcggcatgaagtgggagaaccagaacatcgacgaccagtaccagaacctgaggaggaaccccaggtgcgacgtggtggagaggttcggcaagagcaaggacggcagccagtgcggcggcggcccaagcagcggcgcccctcctcccagcggcggcaggcggcccaagcagcggcgcccctcctcccagcggcggcagcccagccggctccccaacctctaccgaggagggcacctctgagtccgccacccccgagagcggccctggcacctccaccgagcccagcgagggcagcgcacccggcagccctgccggcagccccacctccacagaggagggaaccagcaccgagcccagcgaaggcagcgccccaggcaccagcaccgagcctagtgagcaggagattaaacggatcaacaagatcagaagaagacttgtgaaagacagcaacaccaagaaggccggcaagacaggccccatgaaaaccctgctggttagagtgatgacacccgatctgagagagcggctggaaaacctgagaaagaagcctgaaaatatcccccagcccatcagcaatacatctagagccaacctgaataagctgctgaccgattacaccgaaatgaagaaggcgatcctgcatgtgtactgggaagagttccagaaggaccctgtgggcctgatgagccgggtggcccagcctgccagcaagaagatcgatcagaacaagctgaaacctgagatggacgagaagggcaacctgaccaccgccggctttgcctgctctcagtgtggccagcccctgttcgtgtacaagctggagcaggtgtctgagaagggcaaggcttacaccaactacttcggacggtgcaatgtggccgagcacgaaaagctgatcctgctggcccagctgaagcccgagaaggatagcgacgaagccgtgacatatagcctgggaaagtttgggcagagggccctggatttctacagcattcatgtgaccaaggagtccacccaccccgtgaagcccctggcccagatcgccggaaacagatacgcctccggacctgtgggaaaggccctgagcgacgcatgtatgggcacaatcgcctccttcctgtctaagtaccaggacatcatcatcgaacaccagaaggtggtgaagggcaaccagaagagactggagagcctgcgggagctggccggcaaggaaaacctggaataccctagcgtgaccctgccacctcagcctcacaccaaggagggcgttgatgcctacaacgaagtgatcgcccgggtgcgaatgtgggtgaacctgaacctgtggcagaagctgaagctaagcagagatgatgccaagcctctgctgagactgaagggattcccttcctttcctctggtcgagagacaggccaacgaagtggactggtgggacatggtgtgtaacgtgaagaagctgatcaacgagaaaaaggaggatggcaaggtgttttggcagaatctggctggctacaagagacaggaagccctgagaccatacctgagcagcgaggaagatcggaagaagggaaagaaattcgctcggtaccagctgggcgacctgctgctgcacctggaaaagaagcacggcgaggactggggaaaggtgtacgacgaggcctgggagcggattgacaagaaagtggaaggcctgagcaagcacatcaagctggaagaggaacggagaagcgaggacgcccagagcaaggccgccctgaccgactggctgcgggctaaggccagcttcgtgatcgagggcctgaaggaggccgacaaggacgagttctgcagatgcgagctgaagctgcagaagtggtacggggacctgcggggaaagcccttcgccatcgaagccgagaacagcatcctggacatcagcggcttcagcaagcagtacaactgtgccttcatctggcagaaggacggcgtgaagaagctgaacctgtacctgatcatcaactacttcaagggcggcaagctgcggttcaagaagatcaaacctgaagccttcgaagccaacagattctacaccgtgatcaacaaaaagagcggcgagatcgtgcccatggaggtgaacttcaacttcgacgaccccaacctgatcatcctgcctctggcctttggcaagagacagggcagagaattcatctggaacgacctgctgtccctggaaaccggcagcctgaagctggccaacggaagagtgatcgagaagacactgtacaacagaagaacccggcaggatgagcctgccctgttcgtggccctgaccttcgagcggcgggaggtcctggactcctccaatatcaaaccaatgaacctgatcggcgtggcaagaggcgaaaacatccccgccgtgatcgccctgaccgaccccgagggctgcccactgagccggtttaaggatagcctgggaaacccaacccacatcctgagaatcggcgagagctataaggagaagcagcggaccatccaggccaagaaggaggtggagcagcggagagccggcggctacagccggaagtacgccagcaaagccaagaatctggcagacgatatggtgagaaacaccgctagagatctgctgtactacgccgtgacccaggatgccatgctgatcttcgccaacctgagccggggcttcggccggcagggcaagcggaccttcatggccgagagacagtacacacggatggaggactggctgaccgccaagctggcctacgagggcctgagcaagacctacctgtccaagacactggcccagtacacctccaagacatgcagcaactgtgggtttaccatcaccagcgccgactacgacagggtgctggagaagctgaagaagacagcaacaggctggatgaccacaattaacggcaaggagctgaaggtggagggccagattacctactacaacagatacaagagacagaacgtagtcaaggacctgtccgtcgagctggatagactgagcgaagaatctgtgaacaacgacatctcctcctggacaaagggcagaagcggagaagctctgagcctcctgaagaaaagattctcccatagacccgtgcaggagaagttcgtgtgcctgaactgcggcttcgagacacacgcagccgagcaagccgccctgaacatcgccagatcctggctgttcctgcggagccaggagtacaagaaataccagacaaacaagacaaccggcaacaccgataagagagccttcgtcgagacctggcagtccttttaccggaagaagcttaaggaggtgtggaaacctgccgtgcggtctggcggatctggcggaggctccaccagccccaagaaaaagagaaaagtctaagctgccttctgcggggcttgccttctggccatgcccttcttctctcccttgcacctgtacctcttggtctttgaataaagcctgagtaggaaggctagcaaaaaaaaaaaaaaaaaaaaaaaaaaaaaaaaaaaaaaaaaaaaaaaaaaaaaaaaaaaaaaaaaaaaaaaaaaaaaaaagcccagccggctccccaacctctaccgaggagggcacctctgagtccgccacccccgagagcggccctggcacctccaccgagcccagcgagggcagcgcacccggcagccctgccggcagccccacctccacagaggagggaaccagcaccgagcccagcgaaggcagcgccccaggcaccagcaccgagcctagtgagcaggagattaaacggatcaacaagatcagaagaagacttgtgaaagacagcaacaccaagaaggccggcaagacaggccccatgaaaaccctgctggttagagtgatgacacccgatctgagagagcggctggaaaacctgagaaagaagcctgaaaatatcccccagcccatcagcaatacatctagagccaacctgaataagctgctgaccgattacaccgaaatgaagaaggcgatcctgcatgtgtactgggaagagttccagaaggaccctgtgggcctgatgagccgggtggcccagcctgccagcaagaagatcgatcagaacaagctgaaacctgagatggacgagaagggcaacctgaccaccgccggctttgcctgctctcagtgtggccagcccctgttcgtgtacaagctggagcaggtgtctgagaagggcaaggcttacaccaactacttcggacggtgcaatgtggccgagcacgaaaagctgatcctgctggcccagctgaagcccgagaaggatagcgacgaagccgtgacatatagcctgggaaagtttgggcagagggccctggatttctacagcattcatgtgaccaaggagtccacccaccccgtgaagcccctggcccagatcgccggaaacagatacgcctccggacctgtgggaaaggccctgagcgacgcatgtatgggcacaatcgcctccttcctgtctaagtaccaggacatcatcatcgaacaccagaaggtggtgaagggcaaccagaagagactggagagcctgcgggagctggccggcaaggaaaacctggaataccctagcgtgaccctgccacctcagcctcacaccaaggagggcgttgatgcctacaacgaagtgatcgcccgggtgcgaatgtgggtgaacctgaacctgtggcagaagctgaagctaagcagagatgatgccaagcctctgctgagactgaagggattcccttcctttcctctggtcgagagacaggccaacgaagtggactggtgggacatggtgtgtaacgtgaagaagctgatcaacgagaaaaaggaggatggcaaggtgttttggcagaatctggctggctacaagagacaggaagccctgagaccatacctgagcagcgaggaagatcggaagaagggaaagaaattcgctcggtaccagctgggcgacctgctgctgcacctggaaaagaagcacggcgaggactggggaaaggtgtacgacgaggcctgggagcggattgacaagaaagtggaaggcctgagcaagcacatcaagctggaagaggaacggagaagcgaggacgcccagagcaaggccgccctgaccgactggctgcgggctaaggccagcttcgtgatcgagggcctgaaggaggccgacaaggacgagttctgcagatgcgagctgaagctgcagaagtggtacggggacctgcggggaaagcccttcgccatcgaagccgagaacagcatcctggacatcagcggcttcagcaagcagtacaactgtgccttcatctggcagaaggacggcgtgaagaagctgaacctgtacctgatcatcaactacttcaagggcggcaagctgcggttcaagaagatcaaacctgaagccttcgaagccaacagattctacaccgtgatcaacaaaaagagcggcgagatcgtgcccatggaggtgaacttcaacttcgacgaccccaacctgatcatcctgcctctggcctttggcaagagacagggcagagaattcatctggaacgacctgctgtccctggaaaccggcagcctgaagctggccaacggaagagtgatcgagaagacactgtacaacagaagaacccggcaggatgagcctgccctgttcgtggccctgaccttcgagcggcgggaggtcctggactcctccaatatcaaaccaatgaacctgatcggcgtggcaagaggcgaaaacatccccgccgtgatcgccctgaccgaccccgagggctgcccactgagccggtttaaggatagcctgggaaacccaacccacatcctgagaatcggcgagagctataaggagaagcagcggaccatccaggccaagaaggaggtggagcagcggagagccggcggctacagccggaagtacgccagcaaagccaagaatctggcagacgatatggtgagaaacaccgctagagatctgctgtactacgccgtgacccaggatgccatgctgatcttcgccaacctgagccggggcttcggccggcagggcaagcggaccttcatggccgagagacagtacacacggatggaggactggctgaccgccaagctggcctacgagggcctgagcaagacctacctgtccaagacactggcccagtacacctccaagacatgcagcaactgtgggtttaccatcaccagcgccgactacgacagggtgctggagaagctgaagaagacagcaacaggctggatgaccacaattaacggcaaggagctgaaggtggagggccagattacctactacaacagatacaagagacagaacgtagtcaaggacctgtccgtcgagctggatagactgagcgaagaatctgtgaacaacgacatctcctcctggacaaagggcagaagcggagaagctctgagcctcctgaagaaaagattctcccatagacccgtgcaggagaagttcgtgtgcctgaactgcggcttcgagacacacgcagccgagcaagccgccctgaacatcgccagatcctggctgttcctgcggagccaggagtacaagaaataccagacaaacaagacaaccggcaacaccgataagagagccttcgtcgagacctggcagtccttttaccggaagaagcttaaggaggtgtggaaacctgccgtgcggtctggcggatctggcggaggctccaccagccccaagaaaaagagaaaagtctaagctgccttctgcggggcttgccttctggccatgcccttcttctctcccttgcacctgtacctcttggtctttgaataaagcctgagtaggaaggctagcaaaaaaaaaaaaaaaaaaaaaaaaaaaaaaaaaaaaaaaaaaaaaaaaaaaaaaaaaaaaaaaaaaaaaaaaaaaaaaaa

SEQ ID NO: 9734 - RNA, 8787 nt, synthetic construct
  source 1..8787: mol_type = other RNA
aggaaataagagagaaaagaagagtaagaagaaatataagagccaccatggcccctaagaagaagcgtaaagtgagccggatgaaccacgaccaggagttcgacccccctaaggtgtaccctcccgtccccgccgagaagagaaagcccatccgggtcctgagcctgttcgatggcatcgccaccggtctgctggtgctgaaggacctgggcatccaggtggataggtacattgcctccgaggtgtgcgaggactccatcaccgtgggaatggtgcgtcatcagggcaagatcatgtacgtgggcgacgtgcggagcgtgacacagaagcatatccaggagtggggccctttcgacctggtgatcggcggcagcccttgcaatgacctgagcatcgtgaacccagcccggaagggcctgtacgagggaaccggcagactgttcttcgagttttacagactgctgcacgacgcccggcctaaggaaggcgacgaccggcccttcttttggctgttcgagaatgtggtggccatgggagtcagcgacaagcgggatattagccggttcctggagagcaaccccgtgatgatcgatgccaaggaagtgagcgccgcccaccgggccagatacttctggggcaatctgcctggcatgaacagacccctggccagcaccgtgaacgacaagctggagctgcaggagtgcctggagcacggccggatcgccaagttcagcaaggtgagaaccatcaccacccgaagcaacagcatcaaacaaggcaaggaccagcactttcctgtgttcatgaacgagaaggaggacatcctgtggtgtaccgagatggagagagtgttcgggttcccagtccactacacagatgtcagcaacatgtctagactggccagacagagactgctgggaagaagctggtccgtccctgtgatcagacacctgttcgcccctctgaaggagtacttcgcctgcgtgagcagcggcaacagcaacgccaacagccggggccccagcttctctagcggcctggtgccactgtccctgagagggagccacatgggccccatggagatctacaaaaccgtgagcgcctggaagcggcagcctgtgcgcgtgctgagcctgtttcggaatatcgataaagtcctgaaaagcctgggattcctggagagcggctctggctccggcggtggcaccctgaagtacgtggaggatgtgacaaacgtggtcagacgggatgtggagaagtggggccccttcgatctggtgtacggcagcacccaacccctgggcagctcttgtgaccggtgccctggctggtacatgtttcagttccaccggatcctgcagtacgccctgccgagacaggagtcccagcggccattcttttggattttcatggacaacttgctgctgaccgaggatgaccaggaaactaccactcggttcctgcagaccgaagccgtgaccctgcaggacgtgagaggccgggactaccagaacgccatgcgggtgtggtccaacatccctggactgaaaagcaagcacgcacctctgacccctaaagaagaggagtacctgcaggcccaggtgcggagcagaagcaagctggacgcccctaaggtggatctgctggtgaagaattgcctcctgcccctgagagagtacttcaagtatttcagccagaatagtctgcccctgggaggcagcggcggcggcttccagggcagcgtgaccttcgaggacgtggccatcgccttcagccagcaggagtgggagagcctggacagcagccagaggggcctgtacagggacgtgatgctggagaactacaggaacctggtgagcatgggccacagcctgagcaagccccacgtgatcgccctgctggagaggtggaaggagcccaaggtgaccgacaggaaggacggcaggaggtggtgcaccgacctgcagctggagggcggcccaagcagcggcgcccctcctcccagcggcggcaggcggcccaagcagcggcgcccctcctcccagcggcggcagcccagccggctccccaacctctaccgaggagggcacctctgagtccgccacccccgagagcggccctggcacctccaccgagcccagcgagggcagcgcacccggcagccctgccggcagccccacctccacagaggagggaaccagcaccgagcccagcgaaggcagcgccccaggcaccagcaccgagcctagtgagcaggagattaaacggatcaacaagatcagaagaagacttgtgaaagacagcaacaccaagaaggccggcaagacaggccccatgaaaaccctgctggttagagtgatgacacccgatctgagagagcggctggaaaacctgagaaagaagcctgaaaatatcccccagcccatcagcaatacatctagagccaacctgaataagctgctgaccgattacaccgaaatgaagaaggcgatcctgcatgtgtactgggaagagttccagaaggaccctgtgggcctgatgagccgggtggcccagcctgccagcaagaagatcgatcagaacaagctgaaacctgagatggacgagaagggcaacctgaccaccgccggctttgcctgctctcagtgtggccagcccctgttcgtgtacaagctggagcaggtgtctgagaagggcaaggcttacaccaactacttcggacggtgcaatgtggccgagcacgaaaagctgatcctgctggcccagctgaagcccgagaaggatagcgacgaagccgtgacatatagcctgggaaagtttgggcagagggccctggatttctacagcattcatgtgaccaaggagtccacccaccccgtgaagcccctggcccagatcgccggaaacagatacgcctccggacctgtgggaaaggccctgagcgacgcatgtatgggcacaatcgcctccttcctgtctaagtaccaggacatcatcatcgaacaccagaaggtggtgaagggcaaccagaagagactggagagcctgcgggagctggccggcaaggaaaacctggaataccctagcgtgaccctgccacctcagcctcacaccaaggagggcgttgatgcctacaacgaagtgatcgcccgggtgcgaatgtgggtgaacctgaacctgtggcagaagctgaagctaagcagagatgatgccaagcctctgctgagactgaagggattcccttcctttcctctggtcgagagacaggccaacgaagtggactggtgggacatggtgtgtaacgtgaagaagctgatcaacgagaaaaaggaggatggcaaggtgttttggcagaatctggctggctacaagagacaggaagccctgagaccatacctgagcagcgaggaagatcggaagaagggaaagaaattcgctcggtaccagctgggcgacctgctgctgcacctggaaaagaagcacggcgaggactggggaaaggtgtacgacgaggcctgggagcggattgacaagaaagtggaaggcctgagcaagcacatcaagctggaagaggaacggagaagcgaggacgcccagagcaaggccgccctgaccgactggctgcgggctaaggccagcttcgtgatcgagggcctgaaggaggccgacaaggacgagttctgcagatgcgagctgaagctgcagaagtggtacggggacctgcggggaaagcccttcgccatcgaagccgagaacagcatcctggacatcagcggcttcagcaagcagtacaactgtgccttcatctggcagaaggacggcgtgaagaagctgaacctgtacctgatcatcaactacttcaagggcggcaagctgcggttcaagaagatcaaacctgaagccttcgaagccaacagattctacaccgtgatcaacaaaaagagcggcgagatcgtgcccatggaggtgaacttcaacttcgacgaccccaacctgatcatcctgcctctggcctttggcaagagacagggcagagaattcatctggaacgacctgctgtccctggaaaccggcagcctgaagctggccaacggaagagtgatcgagaagacactgtacaacagaagaacccggcaggatgagcctgccctgttcgtggccctgaccttcgagcggcgggaggtcctggactcctccaatatcaaaccaatgaacctgatcggcgtggcaagaggcgaaaacatccccgccgtgatcgccctgaccgaccccgagggctgcccactgagccggtttaaggatagcctgggaaacccaacccacatcctgagaatcggcgagagctataaggagaagcagcggaccatccaggccaagaaggaggtggagcagcggagagccggcggctacagccggaagtacgccagcaaagccaagaatctggcagacgatatggtgagaaacaccgctagagatctgctgtactacgccgtgacccaggatgccatgctgatcttcgccaacctgagccggggcttcggccggcagggcaagcggaccttcatggccgagagacagtacacacggatggaggactggctgaccgccaagctggcctacgagggcctgagcaagacctacctgtccaagacactggcccagtacacctccaagacatgcagcaactgtgggtttaccatcaccagcgccgactacgacagggtgctggagaagctgaagaagacagcaacaggctggatgaccacaattaacggcaaggagctgaaggtggagggccagattacctactacaacagatacaagagacagaacgtagtcaaggacctgtccgtcgagctggatagactgagcgaagaatctgtgaacaacgacatctcctcctggacaaagggcagaagcggagaagctctgagcctcctgaagaaaagattctcccatagacccgtgcaggagaagttcgtgtgcctgaactgcggcttcgagacacacgcagccgagcaagccgccctgaacatcgccagatcctggctgttcctgcggagccaggagtacaagaaataccagacaaacaagacaaccggcaacaccgataagagagccttcgtcgagacctggcagtccttttaccggaagaagcttaaggaggtgtggaaacctgccgtgcggtctggcggatctggcggaggctccaccagccccaagaaaaagagaaaagtctaagctgccttctgcggggcttgccttctggccatgcccttcttctctcccttgcacctgtacctcttggtctttgaataaagcctgagtaggaaggctagcaaaaaaaaaaaaaaaaaaaaaaaaaaaaaaaaaaaaaaaaaaaaaaaaaaaaaaaaaaaaaaaaaaaaaaaaaaaaaaaagcccagccggctccccaacctctaccgaggagggcacctctgagtccgccacccccgagagcggccctggcacctccaccgagcccagcgagggcagcgcacccggcagccctgccggcagccccacctccacagaggagggaaccagcaccgagcccagcgaaggcagcgccccaggcaccagcaccgagcctagtgagcaggagattaaacggatcaacaagatcagaagaagacttgtgaaagacagcaacaccaagaaggccggcaagacaggccccatgaaaaccctgctggttagagtgatgacacccgatctgagagagcggctggaaaacctgagaaagaagcctgaaaatatcccccagcccatcagcaatacatctagagccaacctgaataagctgctgaccgattacaccgaaatgaagaaggcgatcctgcatgtgtactgggaagagttccagaaggaccctgtgggcctgatgagccgggtggcccagcctgccagcaagaagatcgatcagaacaagctgaaacctgagatggacgagaagggcaacctgaccaccgccggctttgcctgctctcagtgtggccagcccctgttcgtgtacaagctggagcaggtgtctgagaagggcaaggcttacaccaactacttcggacggtgcaatgtggccgagcacgaaaagctgatcctgctggcccagctgaagcccgagaaggatagcgacgaagccgtgacatatagcctgggaaagtttgggcagagggccctggatttctacagcattcatgtgaccaaggagtccacccaccccgtgaagcccctggcccagatcgccggaaacagatacgcctccggacctgtgggaaaggccctgagcgacgcatgtatgggcacaatcgcctccttcctgtctaagtaccaggacatcatcatcgaacaccagaaggtggtgaagggcaaccagaagagactggagagcctgcgggagctggccggcaaggaaaacctggaataccctagcgtgaccctgccacctcagcctcacaccaaggagggcgttgatgcctacaacgaagtgatcgcccgggtgcgaatgtgggtgaacctgaacctgtggcagaagctgaagctaagcagagatgatgccaagcctctgctgagactgaagggattcccttcctttcctctggtcgagagacaggccaacgaagtggactggtgggacatggtgtgtaacgtgaagaagctgatcaacgagaaaaaggaggatggcaaggtgttttggcagaatctggctggctacaagagacaggaagccctgagaccatacctgagcagcgaggaagatcggaagaagggaaagaaattcgctcggtaccagctgggcgacctgctgctgcacctggaaaagaagcacggcgaggactggggaaaggtgtacgacgaggcctgggagcggattgacaagaaagtggaaggcctgagcaagcacatcaagctggaagaggaacggagaagcgaggacgcccagagcaaggccgccctgaccgactggctgcgggctaaggccagcttcgtgatcgagggcctgaaggaggccgacaaggacgagttctgcagatgcgagctgaagctgcagaagtggtacggggacctgcggggaaagcccttcgccatcgaagccgagaacagcatcctggacatcagcggcttcagcaagcagtacaactgtgccttcatctggcagaaggacggcgtgaagaagctgaacctgtacctgatcatcaactacttcaagggcggcaagctgcggttcaagaagatcaaacctgaagccttcgaagccaacagattctacaccgtgatcaacaaaaagagcggcgagatcgtgcccatggaggtgaacttcaacttcgacgaccccaacctgatcatcctgcctctggcctttggcaagagacagggcagagaattcatctggaacgacctgctgtccctggaaaccggcagcctgaagctggccaacggaagagtgatcgagaagacactgtacaacagaagaacccggcaggatgagcctgccctgttcgtggccctgaccttcgagcggcgggaggtcctggactcctccaatatcaaaccaatgaacctgatcggcgtggcaagaggcgaaaacatccccgccgtgatcgccctgaccgaccccgagggctgcccactgagccggtttaaggatagcctgggaaacccaacccacatcctgagaatcggcgagagctataaggagaagcagcggaccatccaggccaagaaggaggtggagcagcggagagccggcggctacagccggaagtacgccagcaaagccaagaatctggcagacgatatggtgagaaacaccgctagagatctgctgtactacgccgtgacccaggatgccatgctgatcttcgccaacctgagccggggcttcggccggcagggcaagcggaccttcatggccgagagacagtacacacggatggaggactggctgaccgccaagctggcctacgagggcctgagcaagacctacctgtccaagacactggcccagtacacctccaagacatgcagcaactgtgggtttaccatcaccagcgccgactacgacagggtgctggagaagctgaagaagacagcaacaggctggatgaccacaattaacggcaaggagctgaaggtggagggccagattacctactacaacagatacaagagacagaacgtagtcaaggacctgtccgtcgagctggatagactgagcgaagaatctgtgaacaacgacatctcctcctggacaaagggcagaagcggagaagctctgagcctcctgaagaaaagattctcccatagacccgtgcaggagaagttcgtgtgcctgaactgcggcttcgagacacacgcagccgagcaagccgccctgaacatcgccagatcctggctgttcctgcggagccaggagtacaagaaataccagacaaacaagacaaccggcaacaccgataagagagccttcgtcgagacctggcagtccttttaccggaagaagcttaaggaggtgtggaaacctgccgtgcggtctggcggatctggcggaggctccaccagccccaagaaaaagagaaaagtctaagctgccttctgcggggcttgccttctggccatgcccttcttctctcccttgcacctgtacctcttggtctttgaataaagcctgagtaggaaggctagcaaaaaaaaaaaaaaaaaaaaaaaaaaaaaaaaaaaaaaaaaaaaaaaaaaaaaaaaaaaaaaaaaaaaaaaaaaaaaaaa

SEQ ID NO: 9735 - RNA, 8787 nt, synthetic construct
  source 1..8787: mol_type = other RNA
aggaaataagagagaaaagaagagtaagaagaaatataagagccaccatggcccctaagaagaagcgtaaagtgagccggatgaaccacgaccaggagttcgacccccctaaggtgtaccctcccgtccccgccgagaagagaaagcccatccgggtcctgagcctgttcgatggcatcgccaccggtctgctggtgctgaaggacctgggcatccaggtggataggtacattgcctccgaggtgtgcgaggactccatcaccgtgggaatggtgcgtcatcagggcaagatcatgtacgtgggcgacgtgcggagcgtgacacagaagcatatccaggagtggggccctttcgacctggtgatcggcggcagcccttgcaatgacctgagcatcgtgaacccagcccggaagggcctgtacgagggaaccggcagactgttcttcgagttttacagactgctgcacgacgcccggcctaaggaaggcgacgaccggcccttcttttggctgttcgagaatgtggtggccatgggagtcagcgacaagcgggatattagccggttcctggagagcaaccccgtgatgatcgatgccaaggaagtgagcgccgcccaccgggccagatacttctggggcaatctgcctggcatgaacagacccctggccagcaccgtgaacgacaagctggagctgcaggagtgcctggagcacggccggatcgccaagttcagcaaggtgagaaccatcaccacccgaagcaacagcatcaaacaaggcaaggaccagcactttcctgtgttcatgaacgagaaggaggacatcctgtggtgtaccgagatggagagagtgttcgggttcccagtccactacacagatgtcagcaacatgtctagactggccagacagagactgctgggaagaagctggtccgtccctgtgatcagacacctgttcgcccctctgaaggagtacttcgcctgcgtgagcagcggcaacagcaacgccaacagccggggccccagcttctctagcggcctggtgccactgtccctgagagggagccacatgggccccatggagatctacaaaaccgtgagcgcctggaagcggcagcctgtgcgcgtgctgagcctgtttcggaatatcgataaagtcctgaaaagcctgggattcctggagagcggctctggctccggcggtggcaccctgaagtacgtggaggatgtgacaaacgtggtcagacgggatgtggagaagtggggccccttcgatctggtgtacggcagcacccaacccctgggcagctcttgtgaccggtgccctggctggtacatgtttcagttccaccggatcctgcagtacgccctgccgagacaggagtcccagcggccattcttttggattttcatggacaacttgctgctgaccgaggatgaccaggaaactaccactcggttcctgcagaccgaagccgtgaccctgcaggacgtgagaggccgggactaccagaacgccatgcgggtgtggtccaacatccctggactgaaaagcaagcacgcacctctgacccctaaagaagaggagtacctgcaggcccaggtgcggagcagaagcaagctggacgcccctaaggtggatctgctggtgaagaattgcctcctgcccctgagagagtacttcaagtatttcagccagaatagtctgcccctgggaggcagcggcggcggcatgaacgtggaggtgctgaaggtgatcagccaggacctggtgaccttcaaggacgtggccatcgacttcagccaggaggagtggcagtggatgaaccccgcccagaagaggctgtacaggagcatgatgctggagaactaccagagcctggtgagcctgggcctgtgcgtgagcaagccctacgtgatcagcctgctggagcagggcagggagccctgggagatgaccagcgagatgaccaggggcggcccaagcagcggcgcccctcctcccagcggcggcaggcggcccaagcagcggcgcccctcctcccagcggcggcagcccagccggctccccaacctctaccgaggagggcacctctgagtccgccacccccgagagcggccctggcacctccaccgagcccagcgagggcagcgcacccggcagccctgccggcagccccacctccacagaggagggaaccagcaccgagcccagcgaaggcagcgccccaggcaccagcaccgagcctagtgagcaggagattaaacggatcaacaagatcagaagaagacttgtgaaagacagcaacaccaagaaggccggcaagacaggccccatgaaaaccctgctggttagagtgatgacacccgatctgagagagcggctggaaaacctgagaaagaagcctgaaaatatcccccagcccatcagcaatacatctagagccaacctgaataagctgctgaccgattacaccgaaatgaagaaggcgatcctgcatgtgtactgggaagagttccagaaggaccctgtgggcctgatgagccgggtggcccagcctgccagcaagaagatcgatcagaacaagctgaaacctgagatggacgagaagggcaacctgaccaccgccggctttgcctgctctcagtgtggccagcccctgttcgtgtacaagctggagcaggtgtctgagaagggcaaggcttacaccaactacttcggacggtgcaatgtggccgagcacgaaaagctgatcctgctggcccagctgaagcccgagaaggatagcgacgaagccgtgacatatagcctgggaaagtttgggcagagggccctggatttctacagcattcatgtgaccaaggagtccacccaccccgtgaagcccctggcccagatcgccggaaacagatacgcctccggacctgtgggaaaggccctgagcgacgcatgtatgggcacaatcgcctccttcctgtctaagtaccaggacatcatcatcgaacaccagaaggtggtgaagggcaaccagaagagactggagagcctgcgggagctggccggcaaggaaaacctggaataccctagcgtgaccctgccacctcagcctcacaccaaggagggcgttgatgcctacaacgaagtgatcgcccgggtgcgaatgtgggtgaacctgaacctgtggcagaagctgaagctaagcagagatgatgccaagcctctgctgagactgaagggattcccttcctttcctctggtcgagagacaggccaacgaagtggactggtgggacatggtgtgtaacgtgaagaagctgatcaacgagaaaaaggaggatggcaaggtgttttggcagaatctggctggctacaagagacaggaagccctgagaccatacctgagcagcgaggaagatcggaagaagggaaagaaattcgctcggtaccagctgggcgacctgctgctgcacctggaaaagaagcacggcgaggactggggaaaggtgtacgacgaggcctgggagcggattgacaagaaagtggaaggcctgagcaagcacatcaagctggaagaggaacggagaagcgaggacgcccagagcaaggccgccctgaccgactggctgcgggctaaggccagcttcgtgatcgagggcctgaaggaggccgacaaggacgagttctgcagatgcgagctgaagctgcagaagtggtacggggacctgcggggaaagcccttcgccatcgaagccgagaacagcatcctggacatcagcggcttcagcaagcagtacaactgtgccttcatctggcagaaggacggcgtgaagaagctgaacctgtacctgatcatcaactacttcaagggcggcaagctgcggttcaagaagatcaaacctgaagccttcgaagccaacagattctacaccgtgatcaacaaaaagagcggcgagatcgtgcccatggaggtgaacttcaacttcgacgaccccaacctgatcatcctgcctctggcctttggcaagagacagggcagagaattcatctggaacgacctgctgtccctggaaaccggcagcctgaagctggccaacggaagagtgatcgagaagacactgtacaacagaagaacccggcaggatgagcctgccctgttcgtggccctgaccttcgagcggcgggaggtcctggactcctccaatatcaaaccaatgaacctgatcggcgtggcaagaggcgaaaacatccccgccgtgatcgccctgaccgaccccgagggctgcccactgagccggtttaaggatagcctgggaaacccaacccacatcctgagaatcggcgagagctataaggagaagcagcggaccatccaggccaagaaggaggtggagcagcggagagccggcggctacagccggaagtacgccagcaaagccaagaatctggcagacgatatggtgagaaacaccgctagagatctgctgtactacgccgtgacccaggatgccatgctgatcttcgccaacctgagccggggcttcggccggcagggcaagcggaccttcatggccgagagacagtacacacggatggaggactggctgaccgccaagctggcctacgagggcctgagcaagacctacctgtccaagacactggcccagtacacctccaagacatgcagcaactgtgggtttaccatcaccagcgccgactacgacagggtgctggagaagctgaagaagacagcaacaggctggatgaccacaattaacggcaaggagctgaaggtggagggccagattacctactacaacagatacaagagacagaacgtagtcaaggacctgtccgtcgagctggatagactgagcgaagaatctgtgaacaacgacatctcctcctggacaaagggcagaagcggagaagctctgagcctcctgaagaaaagattctcccatagacccgtgcaggagaagttcgtgtgcctgaactgcggcttcgagacacacgcagccgagcaagccgccctgaacatcgccagatcctggctgttcctgcggagccaggagtacaagaaataccagacaaacaagacaaccggcaacaccgataagagagccttcgtcgagacctggcagtccttttaccggaagaagcttaaggaggtgtggaaacctgccgtgcggtctggcggatctggcggaggctccaccagccccaagaaaaagagaaaagtctaagctgccttctgcggggcttgccttctggccatgcccttcttctctcccttgcacctgtacctcttggtctttgaataaagcctgagtaggaaggctagcaaaaaaaaaaaaaaaaaaaaaaaaaaaaaaaaaaaaaaaaaaaaaaaaaaaaaaaaaaaaaaaaaaaaaaaaaaaaaaaagcccagccggctccccaacctctaccgaggagggcacctctgagtccgccacccccgagagcggccctggcacctccaccgagcccagcgagggcagcgcacccggcagccctgccggcagccccacctccacagaggagggaaccagcaccgagcccagcgaaggcagcgccccaggcaccagcaccgagcctagtgagcaggagattaaacggatcaacaagatcagaagaagacttgtgaaagacagcaacaccaagaaggccggcaagacaggccccatgaaaaccctgctggttagagtgatgacacccgatctgagagagcggctggaaaacctgagaaagaagcctgaaaatatcccccagcccatcagcaatacatctagagccaacctgaataagctgctgaccgattacaccgaaatgaagaaggcgatcctgcatgtgtactgggaagagttccagaaggaccctgtgggcctgatgagccgggtggcccagcctgccagcaagaagatcgatcagaacaagctgaaacctgagatggacgagaagggcaacctgaccaccgccggctttgcctgctctcagtgtggccagcccctgttcgtgtacaagctggagcaggtgtctgagaagggcaaggcttacaccaactacttcggacggtgcaatgtggccgagcacgaaaagctgatcctgctggcccagctgaagcccgagaaggatagcgacgaagccgtgacatatagcctgggaaagtttgggcagagggccctggatttctacagcattcatgtgaccaaggagtccacccaccccgtgaagcccctggcccagatcgccggaaacagatacgcctccggacctgtgggaaaggccctgagcgacgcatgtatgggcacaatcgcctccttcctgtctaagtaccaggacatcatcatcgaacaccagaaggtggtgaagggcaaccagaagagactggagagcctgcgggagctggccggcaaggaaaacctggaataccctagcgtgaccctgccacctcagcctcacaccaaggagggcgttgatgcctacaacgaagtgatcgcccgggtgcgaatgtgggtgaacctgaacctgtggcagaagctgaagctaagcagagatgatgccaagcctctgctgagactgaagggattcccttcctttcctctggtcgagagacaggccaacgaagtggactggtgggacatggtgtgtaacgtgaagaagctgatcaacgagaaaaaggaggatggcaaggtgttttggcagaatctggctggctacaagagacaggaagccctgagaccatacctgagcagcgaggaagatcggaagaagggaaagaaattcgctcggtaccagctgggcgacctgctgctgcacctggaaaagaagcacggcgaggactggggaaaggtgtacgacgaggcctgggagcggattgacaagaaagtggaaggcctgagcaagcacatcaagctggaagaggaacggagaagcgaggacgcccagagcaaggccgccctgaccgactggctgcgggctaaggccagcttcgtgatcgagggcctgaaggaggccgacaaggacgagttctgcagatgcgagctgaagctgcagaagtggtacggggacctgcggggaaagcccttcgccatcgaagccgagaacagcatcctggacatcagcggcttcagcaagcagtacaactgtgccttcatctggcagaaggacggcgtgaagaagctgaacctgtacctgatcatcaactacttcaagggcggcaagctgcggttcaagaagatcaaacctgaagccttcgaagccaacagattctacaccgtgatcaacaaaaagagcggcgagatcgtgcccatggaggtgaacttcaacttcgacgaccccaacctgatcatcctgcctctggcctttggcaagagacagggcagagaattcatctggaacgacctgctgtccctggaaaccggcagcctgaagctggccaacggaagagtgatcgagaagacactgtacaacagaagaacccggcaggatgagcctgccctgttcgtggccctgaccttcgagcggcgggaggtcctggactcctccaatatcaaaccaatgaacctgatcggcgtggcaagaggcgaaaacatccccgccgtgatcgccctgaccgaccccgagggctgcccactgagccggtttaaggatagcctgggaaacccaacccacatcctgagaatcggcgagagctataaggagaagcagcggaccatccaggccaagaaggaggtggagcagcggagagccggcggctacagccggaagtacgccagcaaagccaagaatctggcagacgatatggtgagaaacaccgctagagatctgctgtactacgccgtgacccaggatgccatgctgatcttcgccaacctgagccggggcttcggccggcagggcaagcggaccttcatggccgagagacagtacacacggatggaggactggctgaccgccaagctggcctacgagggcctgagcaagacctacctgtccaagacactggcccagtacacctccaagacatgcagcaactgtgggtttaccatcaccagcgccgactacgacagggtgctggagaagctgaagaagacagcaacaggctggatgaccacaattaacggcaaggagctgaaggtggagggccagattacctactacaacagatacaagagacagaacgtagtcaaggacctgtccgtcgagctggatagactgagcgaagaatctgtgaacaacgacatctcctcctggacaaagggcagaagcggagaagctctgagcctcctgaagaaaagattctcccatagacccgtgcaggagaagttcgtgtgcctgaactgcggcttcgagacacacgcagccgagcaagccgccctgaacatcgccagatcctggctgttcctgcggagccaggagtacaagaaataccagacaaacaagacaaccggcaacaccgataagagagccttcgtcgagacctggcagtccttttaccggaagaagcttaaggaggtgtggaaacctgccgtgcggtctggcggatctggcggaggctccaccagccccaagaaaaagagaaaagtctaagctgccttctgcggggcttgccttctggccatgcccttcttctctcccttgcacctgtacctcttggtctttgaataaagcctgagtaggaaggctagcaaaaaaaaaaaaaaaaaaaaaaaaaaaaaaaaaaaaaaaaaaaaaaaaaaaaaaaaaaaaaaaaaaaaaaaaaaaaaaaa

SEQ ID NO: 9736 - RNA, 8787 nt, synthetic construct
  source 1..8787: mol_type = other RNA
aggaaataagagagaaaagaagagtaagaagaaatataagagccaccatggcccctaagaagaagcgtaaagtgagccggatgaaccacgaccaggagttcgacccccctaaggtgtaccctcccgtccccgccgagaagagaaagcccatccgggtcctgagcctgttcgatggcatcgccaccggtctgctggtgctgaaggacctgggcatccaggtggataggtacattgcctccgaggtgtgcgaggactccatcaccgtgggaatggtgcgtcatcagggcaagatcatgtacgtgggcgacgtgcggagcgtgacacagaagcatatccaggagtggggccctttcgacctggtgatcggcggcagcccttgcaatgacctgagcatcgtgaacccagcccggaagggcctgtacgagggaaccggcagactgttcttcgagttttacagactgctgcacgacgcccggcctaaggaaggcgacgaccggcccttcttttggctgttcgagaatgtggtggccatgggagtcagcgacaagcgggatattagccggttcctggagagcaaccccgtgatgatcgatgccaaggaagtgagcgccgcccaccgggccagatacttctggggcaatctgcctggcatgaacagacccctggccagcaccgtgaacgacaagctggagctgcaggagtgcctggagcacggccggatcgccaagttcagcaaggtgagaaccatcaccacccgaagcaacagcatcaaacaaggcaaggaccagcactttcctgtgttcatgaacgagaaggaggacatcctgtggtgtaccgagatggagagagtgttcgggttcccagtccactacacagatgtcagcaacatgtctagactggccagacagagactgctgggaagaagctggtccgtccctgtgatcagacacctgttcgcccctctgaaggagtacttcgcctgcgtgagcagcggcaacagcaacgccaacagccggggccccagcttctctagcggcctggtgccactgtccctgagagggagccacatgggccccatggagatctacaaaaccgtgagcgcctggaagcggcagcctgtgcgcgtgctgagcctgtttcggaatatcgataaagtcctgaaaagcctgggattcctggagagcggctctggctccggcggtggcaccctgaagtacgtggaggatgtgacaaacgtggtcagacgggatgtggagaagtggggccccttcgatctggtgtacggcagcacccaacccctgggcagctcttgtgaccggtgccctggctggtacatgtttcagttccaccggatcctgcagtacgccctgccgagacaggagtcccagcggccattcttttggattttcatggacaacttgctgctgaccgaggatgaccaggaaactaccactcggttcctgcagaccgaagccgtgaccctgcaggacgtgagaggccgggactaccagaacgccatgcgggtgtggtccaacatccctggactgaaaagcaagcacgcacctctgacccctaaagaagaggagtacctgcaggcccaggtgcggagcagaagcaagctggacgcccctaaggtggatctgctggtgaagaattgcctcctgcccctgagagagtacttcaagtatttcagccagaatagtctgcccctgggaggcagcggcggcggcgcccaggagagcctgaccctggaggacgtggccgtggacttcagcagggaggagtggaggctgctggcccccgcccagaaggacctgtacagggacgtgatgctggagaacttcaggaacctggtgagcgtgggccaccaggccagcaagcccgacgtgctggccaagctggagaggggcgaggagccctgggccatcgaggaggaggtgaggagcggcaccagccccgagaccggcaaggtgggcggcccaagcagcggcgcccctcctcccagcggcggcaggcggcccaagcagcggcgcccctcctcccagcggcggcagcccagccggctccccaacctctaccgaggagggcacctctgagtccgccacccccgagagcggccctggcacctccaccgagcccagcgagggcagcgcacccggcagccctgccggcagccccacctccacagaggagggaaccagcaccgagcccagcgaaggcagcgccccaggcaccagcaccgagcctagtgagcaggagattaaacggatcaacaagatcagaagaagacttgtgaaagacagcaacaccaagaaggccggcaagacaggccccatgaaaaccctgctggttagagtgatgacacccgatctgagagagcggctggaaaacctgagaaagaagcctgaaaatatcccccagcccatcagcaatacatctagagccaacctgaataagctgctgaccgattacaccgaaatgaagaaggcgatcctgcatgtgtactgggaagagttccagaaggaccctgtgggcctgatgagccgggtggcccagcctgccagcaagaagatcgatcagaacaagctgaaacctgagatggacgagaagggcaacctgaccaccgccggctttgcctgctctcagtgtggccagcccctgttcgtgtacaagctggagcaggtgtctgagaagggcaaggcttacaccaactacttcggacggtgcaatgtggccgagcacgaaaagctgatcctgctggcccagctgaagcccgagaaggatagcgacgaagccgtgacatatagcctgggaaagtttgggcagagggccctggatttctacagcattcatgtgaccaaggagtccacccaccccgtgaagcccctggcccagatcgccggaaacagatacgcctccggacctgtgggaaaggccctgagcgacgcatgtatgggcacaatcgcctccttcctgtctaagtaccaggacatcatcatcgaacaccagaaggtggtgaagggcaaccagaagagactggagagcctgcgggagctggccggcaaggaaaacctggaataccctagcgtgaccctgccacctcagcctcacaccaaggagggcgttgatgcctacaacgaagtgatcgcccgggtgcgaatgtgggtgaacctgaacctgtggcagaagctgaagctaagcagagatgatgccaagcctctgctgagactgaagggattcccttcctttcctctggtcgagagacaggccaacgaagtggactggtgggacatggtgtgtaacgtgaagaagctgatcaacgagaaaaaggaggatggcaaggtgttttggcagaatctggctggctacaagagacaggaagccctgagaccatacctgagcagcgaggaagatcggaagaagggaaagaaattcgctcggtaccagctgggcgacctgctgctgcacctggaaaagaagcacggcgaggactggggaaaggtgtacgacgaggcctgggagcggattgacaagaaagtggaaggcctgagcaagcacatcaagctggaagaggaacggagaagcgaggacgcccagagcaaggccgccctgaccgactggctgcgggctaaggccagcttcgtgatcgagggcctgaaggaggccgacaaggacgagttctgcagatgcgagctgaagctgcagaagtggtacggggacctgcggggaaagcccttcgccatcgaagccgagaacagcatcctggacatcagcggcttcagcaagcagtacaactgtgccttcatctggcagaaggacggcgtgaagaagctgaacctgtacctgatcatcaactacttcaagggcggcaagctgcggttcaagaagatcaaacctgaagccttcgaagccaacagattctacaccgtgatcaacaaaaagagcggcgagatcgtgcccatggaggtgaacttcaacttcgacgaccccaacctgatcatcctgcctctggcctttggcaagagacagggcagagaattcatctggaacgacctgctgtccctggaaaccggcagcctgaagctggccaacggaagagtgatcgagaagacactgtacaacagaagaacccggcaggatgagcctgccctgttcgtggccctgaccttcgagcggcgggaggtcctggactcctccaatatcaaaccaatgaacctgatcggcgtggcaagaggcgaaaacatccccgccgtgatcgccctgaccgaccccgagggctgcccactgagccggtttaaggatagcctgggaaacccaacccacatcctgagaatcggcgagagctataaggagaagcagcggaccatccaggccaagaaggaggtggagcagcggagagccggcggctacagccggaagtacgccagcaaagccaagaatctggcagacgatatggtgagaaacaccgctagagatctgctgtactacgccgtgacccaggatgccatgctgatcttcgccaacctgagccggggcttcggccggcagggcaagcggaccttcatggccgagagacagtacacacggatggaggactggctgaccgccaagctggcctacgagggcctgagcaagacctacctgtccaagacactggcccagtacacctccaagacatgcagcaactgtgggtttaccatcaccagcgccgactacgacagggtgctggagaagctgaagaagacagcaacaggctggatgaccacaattaacggcaaggagctgaaggtggagggccagattacctactacaacagatacaagagacagaacgtagtcaaggacctgtccgtcgagctggatagactgagcgaagaatctgtgaacaacgacatctcctcctggacaaagggcagaagcggagaagctctgagcctcctgaagaaaagattctcccatagacccgtgcaggagaagttcgtgtgcctgaactgcggcttcgagacacacgcagccgagcaagccgccctgaacatcgccagatcctggctgttcctgcggagccaggagtacaagaaataccagacaaacaagacaaccggcaacaccgataagagagccttcgtcgagacctggcagtccttttaccggaagaagcttaaggaggtgtggaaacctgccgtgcggtctggcggatctggcggaggctccaccagccccaagaaaaagagaaaagtctaagctgccttctgcggggcttgccttctggccatgcccttcttctctcccttgcacctgtacctcttggtctttgaataaagcctgagtaggaaggctagcaaaaaaaaaaaaaaaaaaaaaaaaaaaaaaaaaaaaaaaaaaaaaaaaaaaaaaaaaaaaaaaaaaaaaaaaaaaaaaaagcccagccggctccccaacctctaccgaggagggcacctctgagtccgccacccccgagagcggccctggcacctccaccgagcccagcgagggcagcgcacccggcagccctgccggcagccccacctccacagaggagggaaccagcaccgagcccagcgaaggcagcgccccaggcaccagcaccgagcctagtgagcaggagattaaacggatcaacaagatcagaagaagacttgtgaaagacagcaacaccaagaaggccggcaagacaggccccatgaaaaccctgctggttagagtgatgacacccgatctgagagagcggctggaaaacctgagaaagaagcctgaaaatatcccccagcccatcagcaatacatctagagccaacctgaataagctgctgaccgattacaccgaaatgaagaaggcgatcctgcatgtgtactgggaagagttccagaaggaccctgtgggcctgatgagccgggtggcccagcctgccagcaagaagatcgatcagaacaagctgaaacctgagatggacgagaagggcaacctgaccaccgccggctttgcctgctctcagtgtggccagcccctgttcgtgtacaagctggagcaggtgtctgagaagggcaaggcttacaccaactacttcggacggtgcaatgtggccgagcacgaaaagctgatcctgctggcccagctgaagcccgagaaggatagcgacgaagccgtgacatatagcctgggaaagtttgggcagagggccctggatttctacagcattcatgtgaccaaggagtccacccaccccgtgaagcccctggcccagatcgccggaaacagatacgcctccggacctgtgggaaaggccctgagcgacgcatgtatgggcacaatcgcctccttcctgtctaagtaccaggacatcatcatcgaacaccagaaggtggtgaagggcaaccagaagagactggagagcctgcgggagctggccggcaaggaaaacctggaataccctagcgtgaccctgccacctcagcctcacaccaaggagggcgttgatgcctacaacgaagtgatcgcccgggtgcgaatgtgggtgaacctgaacctgtggcagaagctgaagctaagcagagatgatgccaagcctctgctgagactgaagggattcccttcctttcctctggtcgagagacaggccaacgaagtggactggtgggacatggtgtgtaacgtgaagaagctgatcaacgagaaaaaggaggatggcaaggtgttttggcagaatctggctggctacaagagacaggaagccctgagaccatacctgagcagcgaggaagatcggaagaagggaaagaaattcgctcggtaccagctgggcgacctgctgctgcacctggaaaagaagcacggcgaggactggggaaaggtgtacgacgaggcctgggagcggattgacaagaaagtggaaggcctgagcaagcacatcaagctggaagaggaacggagaagcgaggacgcccagagcaaggccgccctgaccgactggctgcgggctaaggccagcttcgtgatcgagggcctgaaggaggccgacaaggacgagttctgcagatgcgagctgaagctgcagaagtggtacggggacctgcggggaaagcccttcgccatcgaagccgagaacagcatcctggacatcagcggcttcagcaagcagtacaactgtgccttcatctggcagaaggacggcgtgaagaagctgaacctgtacctgatcatcaactacttcaagggcggcaagctgcggttcaagaagatcaaacctgaagccttcgaagccaacagattctacaccgtgatcaacaaaaagagcggcgagatcgtgcccatggaggtgaacttcaacttcgacgaccccaacctgatcatcctgcctctggcctttggcaagagacagggcagagaattcatctggaacgacctgctgtccctggaaaccggcagcctgaagctggccaacggaagagtgatcgagaagacactgtacaacagaagaacccggcaggatgagcctgccctgttcgtggccctgaccttcgagcggcgggaggtcctggactcctccaatatcaaaccaatgaacctgatcggcgtggcaagaggcgaaaacatccccgccgtgatcgccctgaccgaccccgagggctgcccactgagccggtttaaggatagcctgggaaacccaacccacatcctgagaatcggcgagagctataaggagaagcagcggaccatccaggccaagaaggaggtggagcagcggagagccggcggctacagccggaagtacgccagcaaagccaagaatctggcagacgatatggtgagaaacaccgctagagatctgctgtactacgccgtgacccaggatgccatgctgatcttcgccaacctgagccggggcttcggccggcagggcaagcggaccttcatggccgagagacagtacacacggatggaggactggctgaccgccaagctggcctacgagggcctgagcaagacctacctgtccaagacactggcccagtacacctccaagacatgcagcaactgtgggtttaccatcaccagcgccgactacgacagggtgctggagaagctgaagaagacagcaacaggctggatgaccacaattaacggcaaggagctgaaggtggagggccagattacctactacaacagatacaagagacagaacgtagtcaaggacctgtccgtcgagctggatagactgagcgaagaatctgtgaacaacgacatctcctcctggacaaagggcagaagcggagaagctctgagcctcctgaagaaaagattctcccatagacccgtgcaggagaagttcgtgtgcctgaactgcggcttcgagacacacgcagccgagcaagccgccctgaacatcgccagatcctggctgttcctgcggagccaggagtacaagaaataccagacaaacaagacaaccggcaacaccgataagagagccttcgtcgagacctggcagtccttttaccggaagaagcttaaggaggtgtggaaacctgccgtgcggtctggcggatctggcggaggctccaccagccccaagaaaaagagaaaagtctaagctgccttctgcggggcttgccttctggccatgcccttcttctctcccttgcacctgtacctcttggtctttgaataaagcctgagtaggaaggctagcaaaaaaaaaaaaaaaaaaaaaaaaaaaaaaaaaaaaaaaaaaaaaaaaaaaaaaaaaaaaaaaaaaaaaaaaaaaaaaaa

SEQ ID NO: 9737 - RNA, 8793 nt, synthetic construct
  source 1..8793: mol_type = other RNA
aggaaataagagagaaaagaagagtaagaagaaatataagagccaccatggcccctaagaagaagcgtaaagtgagccggatgaaccacgaccaggagttcgacccccctaaggtgtaccctcccgtccccgccgagaagagaaagcccatccgggtcctgagcctgttcgatggcatcgccaccggtctgctggtgctgaaggacctgggcatccaggtggataggtacattgcctccgaggtgtgcgaggactccatcaccgtgggaatggtgcgtcatcagggcaagatcatgtacgtgggcgacgtgcggagcgtgacacagaagcatatccaggagtggggccctttcgacctggtgatcggcggcagcccttgcaatgacctgagcatcgtgaacccagcccggaagggcctgtacgagggaaccggcagactgttcttcgagttttacagactgctgcacgacgcccggcctaaggaaggcgacgaccggcccttcttttggctgttcgagaatgtggtggccatgggagtcagcgacaagcgggatattagccggttcctggagagcaaccccgtgatgatcgatgccaaggaagtgagcgccgcccaccgggccagatacttctggggcaatctgcctggcatgaacagacccctggccagcaccgtgaacgacaagctggagctgcaggagtgcctggagcacggccggatcgccaagttcagcaaggtgagaaccatcaccacccgaagcaacagcatcaaacaaggcaaggaccagcactttcctgtgttcatgaacgagaaggaggacatcctgtggtgtaccgagatggagagagtgttcgggttcccagtccactacacagatgtcagcaacatgtctagactggccagacagagactgctgggaagaagctggtccgtccctgtgatcagacacctgttcgcccctctgaaggagtacttcgcctgcgtgagcagcggcaacagcaacgccaacagccggggccccagcttctctagcggcctggtgccactgtccctgagagggagccacatgggccccatggagatctacaaaaccgtgagcgcctggaagcggcagcctgtgcgcgtgctgagcctgtttcggaatatcgataaagtcctgaaaagcctgggattcctggagagcggctctggctccggcggtggcaccctgaagtacgtggaggatgtgacaaacgtggtcagacgggatgtggagaagtggggccccttcgatctggtgtacggcagcacccaacccctgggcagctcttgtgaccggtgccctggctggtacatgtttcagttccaccggatcctgcagtacgccctgccgagacaggagtcccagcggccattcttttggattttcatggacaacttgctgctgaccgaggatgaccaggaaactaccactcggttcctgcagaccgaagccgtgaccctgcaggacgtgagaggccgggactaccagaacgccatgcgggtgtggtccaacatccctggactgaaaagcaagcacgcacctctgacccctaaagaagaggagtacctgcaggcccaggtgcggagcagaagcaagctggacgcccctaaggtggatctgctggtgaagaattgcctcctgcccctgagagagtacttcaagtatttcagccagaatagtctgcccctgggaggcagcggcggcggcgtgaccttcaaggacgtggccgtgatcttcaccgaggaggagctgggcctgctggaccccgcccagaggaagctgtacagggacgtgatgctggagaacttcaggaacctgctgagcgtgggccaccagcccttccacggcgacaccttccacttcctgagggaggagaagttctgggtgatgggcaccaccagccagagggagggcaacctgggcggcaagatccagaccgagatggagaccgtgcccggcggcccaagcagcggcgcccctcctcccagcggcggcaggcggcccaagcagcggcgcccctcctcccagcggcggcagcccagccggctccccaacctctaccgaggagggcacctctgagtccgccacccccgagagcggccctggcacctccaccgagcccagcgagggcagcgcacccggcagccctgccggcagccccacctccacagaggagggaaccagcaccgagcccagcgaaggcagcgccccaggcaccagcaccgagcctagtgagcaggagattaaacggatcaacaagatcagaagaagacttgtgaaagacagcaacaccaagaaggccggcaagacaggccccatgaaaaccctgctggttagagtgatgacacccgatctgagagagcggctggaaaacctgagaaagaagcctgaaaatatcccccagcccatcagcaatacatctagagccaacctgaataagctgctgaccgattacaccgaaatgaagaaggcgatcctgcatgtgtactgggaagagttccagaaggaccctgtgggcctgatgagccgggtggcccagcctgccagcaagaagatcgatcagaacaagctgaaacctgagatggacgagaagggcaacctgaccaccgccggctttgcctgctctcagtgtggccagcccctgttcgtgtacaagctggagcaggtgtctgagaagggcaaggcttacaccaactacttcggacggtgcaatgtggccgagcacgaaaagctgatcctgctggcccagctgaagcccgagaaggatagcgacgaagccgtgacatatagcctgggaaagtttgggcagagggccctggatttctacagcattcatgtgaccaaggagtccacccaccccgtgaagcccctggcccagatcgccggaaacagatacgcctccggacctgtgggaaaggccctgagcgacgcatgtatgggcacaatcgcctccttcctgtctaagtaccaggacatcatcatcgaacaccagaaggtggtgaagggcaaccagaagagactggagagcctgcgggagctggccggcaaggaaaacctggaataccctagcgtgaccctgccacctcagcctcacaccaaggagggcgttgatgcctacaacgaagtgatcgcccgggtgcgaatgtgggtgaacctgaacctgtggcagaagctgaagctaagcagagatgatgccaagcctctgctgagactgaagggattcccttcctttcctctggtcgagagacaggccaacgaagtggactggtgggacatggtgtgtaacgtgaagaagctgatcaacgagaaaaaggaggatggcaaggtgttttggcagaatctggctggctacaagagacaggaagccctgagaccatacctgagcagcgaggaagatcggaagaagggaaagaaattcgctcggtaccagctgggcgacctgctgctgcacctggaaaagaagcacggcgaggactggggaaaggtgtacgacgaggcctgggagcggattgacaagaaagtggaaggcctgagcaagcacatcaagctggaagaggaacggagaagcgaggacgcccagagcaaggccgccctgaccgactggctgcgggctaaggccagcttcgtgatcgagggcctgaaggaggccgacaaggacgagttctgcagatgcgagctgaagctgcagaagtggtacggggacctgcggggaaagcccttcgccatcgaagccgagaacagcatcctggacatcagcggcttcagcaagcagtacaactgtgccttcatctggcagaaggacggcgtgaagaagctgaacctgtacctgatcatcaactacttcaagggcggcaagctgcggttcaagaagatcaaacctgaagccttcgaagccaacagattctacaccgtgatcaacaaaaagagcggcgagatcgtgcccatggaggtgaacttcaacttcgacgaccccaacctgatcatcctgcctctggcctttggcaagagacagggcagagaattcatctggaacgacctgctgtccctggaaaccggcagcctgaagctggccaacggaagagtgatcgagaagacactgtacaacagaagaacccggcaggatgagcctgccctgttcgtggccctgaccttcgagcggcgggaggtcctggactcctccaatatcaaaccaatgaacctgatcggcgtggcaagaggcgaaaacatccccgccgtgatcgccctgaccgaccccgagggctgcccactgagccggtttaaggatagcctgggaaacccaacccacatcctgagaatcggcgagagctataaggagaagcagcggaccatccaggccaagaaggaggtggagcagcggagagccggcggctacagccggaagtacgccagcaaagccaagaatctggcagacgatatggtgagaaacaccgctagagatctgctgtactacgccgtgacccaggatgccatgctgatcttcgccaacctgagccggggcttcggccggcagggcaagcggaccttcatggccgagagacagtacacacggatggaggactggctgaccgccaagctggcctacgagggcctgagcaagacctacctgtccaagacactggcccagtacacctccaagacatgcagcaactgtgggtttaccatcaccagcgccgactacgacagggtgctggagaagctgaagaagacagcaacaggctggatgaccacaattaacggcaaggagctgaaggtggagggccagattacctactacaacagatacaagagacagaacgtagtcaaggacctgtccgtcgagctggatagactgagcgaagaatctgtgaacaacgacatctcctcctggacaaagggcagaagcggagaagctctgagcctcctgaagaaaagattctcccatagacccgtgcaggagaagttcgtgtgcctgaactgcggcttcgagacacacgcagccgagcaagccgccctgaacatcgccagatcctggctgttcctgcggagccaggagtacaagaaataccagacaaacaagacaaccggcaacaccgataagagagccttcgtcgagacctggcagtccttttaccggaagaagcttaaggaggtgtggaaacctgccgtgcggtctggcggatctggcggaggctccaccagccccaagaaaaagagaaaagtctaagctgccttctgcggggcttgccttctggccatgcccttcttctctcccttgcacctgtacctcttggtctttgaataaagcctgagtaggaaggctagcaaaaaaaaaaaaaaaaaaaaaaaaaaaaaaaaaaaaaaaaaaaaaaaaaaaaaaaaaaaaaaaaaaaaaaaaaaaaaaaagcccagccggctccccaacctctaccgaggagggcacctctgagtccgccacccccgagagcggccctggcacctccaccgagcccagcgagggcagcgcacccggcagccctgccggcagccccacctccacagaggagggaaccagcaccgagcccagcgaaggcagcgccccaggcaccagcaccgagcctagtgagcaggagattaaacggatcaacaagatcagaagaagacttgtgaaagacagcaacaccaagaaggccggcaagacaggccccatgaaaaccctgctggttagagtgatgacacccgatctgagagagcggctggaaaacctgagaaagaagcctgaaaatatcccccagcccatcagcaatacatctagagccaacctgaataagctgctgaccgattacaccgaaatgaagaaggcgatcctgcatgtgtactgggaagagttccagaaggaccctgtgggcctgatgagccgggtggcccagcctgccagcaagaagatcgatcagaacaagctgaaacctgagatggacgagaagggcaacctgaccaccgccggctttgcctgctctcagtgtggccagcccctgttcgtgtacaagctggagcaggtgtctgagaagggcaaggcttacaccaactacttcggacggtgcaatgtggccgagcacgaaaagctgatcctgctggcccagctgaagcccgagaaggatagcgacgaagccgtgacatatagcctgggaaagtttgggcagagggccctggatttctacagcattcatgtgaccaaggagtccacccaccccgtgaagcccctggcccagatcgccggaaacagatacgcctccggacctgtgggaaaggccctgagcgacgcatgtatgggcacaatcgcctccttcctgtctaagtaccaggacatcatcatcgaacaccagaaggtggtgaagggcaaccagaagagactggagagcctgcgggagctggccggcaaggaaaacctggaataccctagcgtgaccctgccacctcagcctcacaccaaggagggcgttgatgcctacaacgaagtgatcgcccgggtgcgaatgtgggtgaacctgaacctgtggcagaagctgaagctaagcagagatgatgccaagcctctgctgagactgaagggattcccttcctttcctctggtcgagagacaggccaacgaagtggactggtgggacatggtgtgtaacgtgaagaagctgatcaacgagaaaaaggaggatggcaaggtgttttggcagaatctggctggctacaagagacaggaagccctgagaccatacctgagcagcgaggaagatcggaagaagggaaagaaattcgctcggtaccagctgggcgacctgctgctgcacctggaaaagaagcacggcgaggactggggaaaggtgtacgacgaggcctgggagcggattgacaagaaagtggaaggcctgagcaagcacatcaagctggaagaggaacggagaagcgaggacgcccagagcaaggccgccctgaccgactggctgcgggctaaggccagcttcgtgatcgagggcctgaaggaggccgacaaggacgagttctgcagatgcgagctgaagctgcagaagtggtacggggacctgcggggaaagcccttcgccatcgaagccgagaacagcatcctggacatcagcggcttcagcaagcagtacaactgtgccttcatctggcagaaggacggcgtgaagaagctgaacctgtacctgatcatcaactacttcaagggcggcaagctgcggttcaagaagatcaaacctgaagccttcgaagccaacagattctacaccgtgatcaacaaaaagagcggcgagatcgtgcccatggaggtgaacttcaacttcgacgaccccaacctgatcatcctgcctctggcctttggcaagagacagggcagagaattcatctggaacgacctgctgtccctggaaaccggcagcctgaagctggccaacggaagagtgatcgagaagacactgtacaacagaagaacccggcaggatgagcctgccctgttcgtggccctgaccttcgagcggcgggaggtcctggactcctccaatatcaaaccaatgaacctgatcggcgtggcaagaggcgaaaacatccccgccgtgatcgccctgaccgaccccgagggctgcccactgagccggtttaaggatagcctgggaaacccaacccacatcctgagaatcggcgagagctataaggagaagcagcggaccatccaggccaagaaggaggtggagcagcggagagccggcggctacagccggaagtacgccagcaaagccaagaatctggcagacgatatggtgagaaacaccgctagagatctgctgtactacgccgtgacccaggatgccatgctgatcttcgccaacctgagccggggcttcggccggcagggcaagcggaccttcatggccgagagacagtacacacggatggaggactggctgaccgccaagctggcctacgagggcctgagcaagacctacctgtccaagacactggcccagtacacctccaagacatgcagcaactgtgggtttaccatcaccagcgccgactacgacagggtgctggagaagctgaagaagacagcaacaggctggatgaccacaattaacggcaaggagctgaaggtggagggccagattacctactacaacagatacaagagacagaacgtagtcaaggacctgtccgtcgagctggatagactgagcgaagaatctgtgaacaacgacatctcctcctggacaaagggcagaagcggagaagctctgagcctcctgaagaaaagattctcccatagacccgtgcaggagaagttcgtgtgcctgaactgcggcttcgagacacacgcagccgagcaagccgccctgaacatcgccagatcctggctgttcctgcggagccaggagtacaagaaataccagacaaacaagacaaccggcaacaccgataagagagccttcgtcgagacctggcagtccttttaccggaagaagcttaaggaggtgtggaaacctgccgtgcggtctggcggatctggcggaggctccaccagccccaagaaaaagagaaaagtctaagctgccttctgcggggcttgccttctggccatgcccttcttctctcccttgcacctgtacctcttggtctttgaataaagcctgagtaggaaggctagcaaaaaaaaaaaaaaaaaaaaaaaaaaaaaaaaaaaaaaaaaaaaaaaaaaaaaaaaaaaaaaaaaaaaaaaaaaaaaaaa

SEQ ID NO: 9738 - RNA, 8787 nt, synthetic construct
  source 1..8787: mol_type = other RNA
aggaaataagagagaaaagaagagtaagaagaaatataagagccaccatggcccctaagaagaagcgtaaagtgagccggatgaaccacgaccaggagttcgacccccctaaggtgtaccctcccgtccccgccgagaagagaaagcccatccgggtcctgagcctgttcgatggcatcgccaccggtctgctggtgctgaaggacctgggcatccaggtggataggtacattgcctccgaggtgtgcgaggactccatcaccgtgggaatggtgcgtcatcagggcaagatcatgtacgtgggcgacgtgcggagcgtgacacagaagcatatccaggagtggggccctttcgacctggtgatcggcggcagcccttgcaatgacctgagcatcgtgaacccagcccggaagggcctgtacgagggaaccggcagactgttcttcgagttttacagactgctgcacgacgcccggcctaaggaaggcgacgaccggcccttcttttggctgttcgagaatgtggtggccatgggagtcagcgacaagcgggatattagccggttcctggagagcaaccccgtgatgatcgatgccaaggaagtgagcgccgcccaccgggccagatacttctggggcaatctgcctggcatgaacagacccctggccagcaccgtgaacgacaagctggagctgcaggagtgcctggagcacggccggatcgccaagttcagcaaggtgagaaccatcaccacccgaagcaacagcatcaaacaaggcaaggaccagcactttcctgtgttcatgaacgagaaggaggacatcctgtggtgtaccgagatggagagagtgttcgggttcccagtccactacacagatgtcagcaacatgtctagactggccagacagagactgctgggaagaagctggtccgtccctgtgatcagacacctgttcgcccctctgaaggagtacttcgcctgcgtgagcagcggcaacagcaacgccaacagccggggccccagcttctctagcggcctggtgccactgtccctgagagggagccacatgggccccatggagatctacaaaaccgtgagcgcctggaagcggcagcctgtgcgcgtgctgagcctgtttcggaatatcgataaagtcctgaaaagcctgggattcctggagagcggctctggctccggcggtggcaccctgaagtacgtggaggatgtgacaaacgtggtcagacgggatgtggagaagtggggccccttcgatctggtgtacggcagcacccaacccctgggcagctcttgtgaccggtgccctggctggtacatgtttcagttccaccggatcctgcagtacgccctgccgagacaggagtcccagcggccattcttttggattttcatggacaacttgctgctgaccgaggatgaccaggaaactaccactcggttcctgcagaccgaagccgtgaccctgcaggacgtgagaggccgggactaccagaacgccatgcgggtgtggtccaacatccctggactgaaaagcaagcacgcacctctgacccctaaagaagaggagtacctgcaggcccaggtgcggagcagaagcaagctggacgcccctaaggtggatctgctggtgaagaattgcctcctgcccctgagagagtacttcaagtatttcagccagaatagtctgcccctgggaggcagcggcggcggcagccagggcctggtgaccttcggcgacgtggccatcgacttcagccaggaggagtgggagtggctgagccccatccagaggaacctgtacaggaaggtgatgctggagaactacaggaacctggccagcctgggcctgtgcgtgagcaagcccgacgtgatcagcctgctggagcagggcaaggagccctggaccgtgaagaggaggatgaccagggccggctgccccgacctgaaggccgtgggcggcccaagcagcggcgcccctcctcccagcggcggcaggcggcccaagcagcggcgcccctcctcccagcggcggcagcccagccggctccccaacctctaccgaggagggcacctctgagtccgccacccccgagagcggccctggcacctccaccgagcccagcgagggcagcgcacccggcagccctgccggcagccccacctccacagaggagggaaccagcaccgagcccagcgaaggcagcgccccaggcaccagcaccgagcctagtgagcaggagattaaacggatcaacaagatcagaagaagacttgtgaaagacagcaacaccaagaaggccggcaagacaggccccatgaaaaccctgctggttagagtgatgacacccgatctgagagagcggctggaaaacctgagaaagaagcctgaaaatatcccccagcccatcagcaatacatctagagccaacctgaataagctgctgaccgattacaccgaaatgaagaaggcgatcctgcatgtgtactgggaagagttccagaaggaccctgtgggcctgatgagccgggtggcccagcctgccagcaagaagatcgatcagaacaagctgaaacctgagatggacgagaagggcaacctgaccaccgccggctttgcctgctctcagtgtggccagcccctgttcgtgtacaagctggagcaggtgtctgagaagggcaaggcttacaccaactacttcggacggtgcaatgtggccgagcacgaaaagctgatcctgctggcccagctgaagcccgagaaggatagcgacgaagccgtgacatatagcctgggaaagtttgggcagagggccctggatttctacagcattcatgtgaccaaggagtccacccaccccgtgaagcccctggcccagatcgccggaaacagatacgcctccggacctgtgggaaaggccctgagcgacgcatgtatgggcacaatcgcctccttcctgtctaagtaccaggacatcatcatcgaacaccagaaggtggtgaagggcaaccagaagagactggagagcctgcgggagctggccggcaaggaaaacctggaataccctagcgtgaccctgccacctcagcctcacaccaaggagggcgttgatgcctacaacgaagtgatcgcccgggtgcgaatgtgggtgaacctgaacctgtggcagaagctgaagctaagcagagatgatgccaagcctctgctgagactgaagggattcccttcctttcctctggtcgagagacaggccaacgaagtggactggtgggacatggtgtgtaacgtgaagaagctgatcaacgagaaaaaggaggatggcaaggtgttttggcagaatctggctggctacaagagacaggaagccctgagaccatacctgagcagcgaggaagatcggaagaagggaaagaaattcgctcggtaccagctgggcgacctgctgctgcacctggaaaagaagcacggcgaggactggggaaaggtgtacgacgaggcctgggagcggattgacaagaaagtggaaggcctgagcaagcacatcaagctggaagaggaacggagaagcgaggacgcccagagcaaggccgccctgaccgactggctgcgggctaaggccagcttcgtgatcgagggcctgaaggaggccgacaaggacgagttctgcagatgcgagctgaagctgcagaagtggtacggggacctgcggggaaagcccttcgccatcgaagccgagaacagcatcctggacatcagcggcttcagcaagcagtacaactgtgccttcatctggcagaaggacggcgtgaagaagctgaacctgtacctgatcatcaactacttcaagggcggcaagctgcggttcaagaagatcaaacctgaagccttcgaagccaacagattctacaccgtgatcaacaaaaagagcggcgagatcgtgcccatggaggtgaacttcaacttcgacgaccccaacctgatcatcctgcctctggcctttggcaagagacagggcagagaattcatctggaacgacctgctgtccctggaaaccggcagcctgaagctggccaacggaagagtgatcgagaagacactgtacaacagaagaacccggcaggatgagcctgccctgttcgtggccctgaccttcgagcggcgggaggtcctggactcctccaatatcaaaccaatgaacctgatcggcgtggcaagaggcgaaaacatccccgccgtgatcgccctgaccgaccccgagggctgcccactgagccggtttaaggatagcctgggaaacccaacccacatcctgagaatcggcgagagctataaggagaagcagcggaccatccaggccaagaaggaggtggagcagcggagagccggcggctacagccggaagtacgccagcaaagccaagaatctggcagacgatatggtgagaaacaccgctagagatctgctgtactacgccgtgacccaggatgccatgctgatcttcgccaacctgagccggggcttcggccggcagggcaagcggaccttcatggccgagagacagtacacacggatggaggactggctgaccgccaagctggcctacgagggcctgagcaagacctacctgtccaagacactggcccagtacacctccaagacatgcagcaactgtgggtttaccatcaccagcgccgactacgacagggtgctggagaagctgaagaagacagcaacaggctggatgaccacaattaacggcaaggagctgaaggtggagggccagattacctactacaacagatacaagagacagaacgtagtcaaggacctgtccgtcgagctggatagactgagcgaagaatctgtgaacaacgacatctcctcctggacaaagggcagaagcggagaagctctgagcctcctgaagaaaagattctcccatagacccgtgcaggagaagttcgtgtgcctgaactgcggcttcgagacacacgcagccgagcaagccgccctgaacatcgccagatcctggctgttcctgcggagccaggagtacaagaaataccagacaaacaagacaaccggcaacaccgataagagagccttcgtcgagacctggcagtccttttaccggaagaagcttaaggaggtgtggaaacctgccgtgcggtctggcggatctggcggaggctccaccagccccaagaaaaagagaaaagtctaagctgccttctgcggggcttgccttctggccatgcccttcttctctcccttgcacctgtacctcttggtctttgaataaagcctgagtaggaaggctagcaaaaaaaaaaaaaaaaaaaaaaaaaaaaaaaaaaaaaaaaaaaaaaaaaaaaaaaaaaaaaaaaaaaaaaaaaaaaaaaagcccagccggctccccaacctctaccgaggagggcacctctgagtccgccacccccgagagcggccctggcacctccaccgagcccagcgagggcagcgcacccggcagccctgccggcagccccacctccacagaggagggaaccagcaccgagcccagcgaaggcagcgccccaggcaccagcaccgagcctagtgagcaggagattaaacggatcaacaagatcagaagaagacttgtgaaagacagcaacaccaagaaggccggcaagacaggccccatgaaaaccctgctggttagagtgatgacacccgatctgagagagcggctggaaaacctgagaaagaagcctgaaaatatcccccagcccatcagcaatacatctagagccaacctgaataagctgctgaccgattacaccgaaatgaagaaggcgatcctgcatgtgtactgggaagagttccagaaggaccctgtgggcctgatgagccgggtggcccagcctgccagcaagaagatcgatcagaacaagctgaaacctgagatggacgagaagggcaacctgaccaccgccggctttgcctgctctcagtgtggccagcccctgttcgtgtacaagctggagcaggtgtctgagaagggcaaggcttacaccaactacttcggacggtgcaatgtggccgagcacgaaaagctgatcctgctggcccagctgaagcccgagaaggatagcgacgaagccgtgacatatagcctgggaaagtttgggcagagggccctggatttctacagcattcatgtgaccaaggagtccacccaccccgtgaagcccctggcccagatcgccggaaacagatacgcctccggacctgtgggaaaggccctgagcgacgcatgtatgggcacaatcgcctccttcctgtctaagtaccaggacatcatcatcgaacaccagaaggtggtgaagggcaaccagaagagactggagagcctgcgggagctggccggcaaggaaaacctggaataccctagcgtgaccctgccacctcagcctcacaccaaggagggcgttgatgcctacaacgaagtgatcgcccgggtgcgaatgtgggtgaacctgaacctgtggcagaagctgaagctaagcagagatgatgccaagcctctgctgagactgaagggattcccttcctttcctctggtcgagagacaggccaacgaagtggactggtgggacatggtgtgtaacgtgaagaagctgatcaacgagaaaaaggaggatggcaaggtgttttggcagaatctggctggctacaagagacaggaagccctgagaccatacctgagcagcgaggaagatcggaagaagggaaagaaattcgctcggtaccagctgggcgacctgctgctgcacctggaaaagaagcacggcgaggactggggaaaggtgtacgacgaggcctgggagcggattgacaagaaagtggaaggcctgagcaagcacatcaagctggaagaggaacggagaagcgaggacgcccagagcaaggccgccctgaccgactggctgcgggctaaggccagcttcgtgatcgagggcctgaaggaggccgacaaggacgagttctgcagatgcgagctgaagctgcagaagtggtacggggacctgcggggaaagcccttcgccatcgaagccgagaacagcatcctggacatcagcggcttcagcaagcagtacaactgtgccttcatctggcagaaggacggcgtgaagaagctgaacctgtacctgatcatcaactacttcaagggcggcaagctgcggttcaagaagatcaaacctgaagccttcgaagccaacagattctacaccgtgatcaacaaaaagagcggcgagatcgtgcccatggaggtgaacttcaacttcgacgaccccaacctgatcatcctgcctctggcctttggcaagagacagggcagagaattcatctggaacgacctgctgtccctggaaaccggcagcctgaagctggccaacggaagagtgatcgagaagacactgtacaacagaagaacccggcaggatgagcctgccctgttcgtggccctgaccttcgagcggcgggaggtcctggactcctccaatatcaaaccaatgaacctgatcggcgtggcaagaggcgaaaacatccccgccgtgatcgccctgaccgaccccgagggctgcccactgagccggtttaaggatagcctgggaaacccaacccacatcctgagaatcggcgagagctataaggagaagcagcggaccatccaggccaagaaggaggtggagcagcggagagccggcggctacagccggaagtacgccagcaaagccaagaatctggcagacgatatggtgagaaacaccgctagagatctgctgtactacgccgtgacccaggatgccatgctgatcttcgccaacctgagccggggcttcggccggcagggcaagcggaccttcatggccgagagacagtacacacggatggaggactggctgaccgccaagctggcctacgagggcctgagcaagacctacctgtccaagacactggcccagtacacctccaagacatgcagcaactgtgggtttaccatcaccagcgccgactacgacagggtgctggagaagctgaagaagacagcaacaggctggatgaccacaattaacggcaaggagctgaaggtggagggccagattacctactacaacagatacaagagacagaacgtagtcaaggacctgtccgtcgagctggatagactgagcgaagaatctgtgaacaacgacatctcctcctggacaaagggcagaagcggagaagctctgagcctcctgaagaaaagattctcccatagacccgtgcaggagaagttcgtgtgcctgaactgcggcttcgagacacacgcagccgagcaagccgccctgaacatcgccagatcctggctgttcctgcggagccaggagtacaagaaataccagacaaacaagacaaccggcaacaccgataagagagccttcgtcgagacctggcagtccttttaccggaagaagcttaaggaggtgtggaaacctgccgtgcggtctggcggatctggcggaggctccaccagccccaagaaaaagagaaaagtctaagctgccttctgcggggcttgccttctggccatgcccttcttctctcccttgcacctgtacctcttggtctttgaataaagcctgagtaggaaggctagcaaaaaaaaaaaaaaaaaaaaaaaaaaaaaaaaaaaaaaaaaaaaaaaaaaaaaaaaaaaaaaaaaaaaaaaaaaaaaaaa

SEQ ID NO: 9739 - RNA, 8787 nt, synthetic construct
  source 1..8787: mol_type = other RNA
aggaaataagagagaaaagaagagtaagaagaaatataagagccaccatggcccctaagaagaagcgtaaagtgagccggatgaaccacgaccaggagttcgacccccctaaggtgtaccctcccgtccccgccgagaagagaaagcccatccgggtcctgagcctgttcgatggcatcgccaccggtctgctggtgctgaaggacctgggcatccaggtggataggtacattgcctccgaggtgtgcgaggactccatcaccgtgggaatggtgcgtcatcagggcaagatcatgtacgtgggcgacgtgcggagcgtgacacagaagcatatccaggagtggggccctttcgacctggtgatcggcggcagcccttgcaatgacctgagcatcgtgaacccagcccggaagggcctgtacgagggaaccggcagactgttcttcgagttttacagactgctgcacgacgcccggcctaaggaaggcgacgaccggcccttcttttggctgttcgagaatgtggtggccatgggagtcagcgacaagcgggatattagccggttcctggagagcaaccccgtgatgatcgatgccaaggaagtgagcgccgcccaccgggccagatacttctggggcaatctgcctggcatgaacagacccctggccagcaccgtgaacgacaagctggagctgcaggagtgcctggagcacggccggatcgccaagttcagcaaggtgagaaccatcaccacccgaagcaacagcatcaaacaaggcaaggaccagcactttcctgtgttcatgaacgagaaggaggacatcctgtggtgtaccgagatggagagagtgttcgggttcccagtccactacacagatgtcagcaacatgtctagactggccagacagagactgctgggaagaagctggtccgtccctgtgatcagacacctgttcgcccctctgaaggagtacttcgcctgcgtgagcagcggcaacagcaacgccaacagccggggccccagcttctctagcggcctggtgccactgtccctgagagggagccacatgggccccatggagatctacaaaaccgtgagcgcctggaagcggcagcctgtgcgcgtgctgagcctgtttcggaatatcgataaagtcctgaaaagcctgggattcctggagagcggctctggctccggcggtggcaccctgaagtacgtggaggatgtgacaaacgtggtcagacgggatgtggagaagtggggccccttcgatctggtgtacggcagcacccaacccctgggcagctcttgtgaccggtgccctggctggtacatgtttcagttccaccggatcctgcagtacgccctgccgagacaggagtcccagcggccattcttttggattttcatggacaacttgctgctgaccgaggatgaccaggaaactaccactcggttcctgcagaccgaagccgtgaccctgcaggacgtgagaggccgggactaccagaacgccatgcgggtgtggtccaacatccctggactgaaaagcaagcacgcacctctgacccctaaagaagaggagtacctgcaggcccaggtgcggagcagaagcaagctggacgcccctaaggtggatctgctggtgaagaattgcctcctgcccctgagagagtacttcaagtatttcagccagaatagtctgcccctgggaggcagcggcggcggcgcccaggaggtggtgagcttcaaggacgtggccgtggacttcaccagggaggagtggaggctgctgagccccccccagaaggagctgtacaaggaggtgatgctggagaacgccaggaacctgctgagcgtgggcctgagcgccccccccgaggacatgttcagcagcctggagcagagggaggccccctggatgctggagaaggacgacctgaggagctgctgccccgagggcaagatgaggggcggcccaagcagcggcgcccctcctcccagcggcggcaggcggcccaagcagcggcgcccctcctcccagcggcggcagcccagccggctccccaacctctaccgaggagggcacctctgagtccgccacccccgagagcggccctggcacctccaccgagcccagcgagggcagcgcacccggcagccctgccggcagccccacctccacagaggagggaaccagcaccgagcccagcgaaggcagcgccccaggcaccagcaccgagcctagtgagcaggagattaaacggatcaacaagatcagaagaagacttgtgaaagacagcaacaccaagaaggccggcaagacaggccccatgaaaaccctgctggttagagtgatgacacccgatctgagagagcggctggaaaacctgagaaagaagcctgaaaatatcccccagcccatcagcaatacatctagagccaacctgaataagctgctgaccgattacaccgaaatgaagaaggcgatcctgcatgtgtactgggaagagttccagaaggaccctgtgggcctgatgagccgggtggcccagcctgccagcaagaagatcgatcagaacaagctgaaacctgagatggacgagaagggcaacctgaccaccgccggctttgcctgctctcagtgtggccagcccctgttcgtgtacaagctggagcaggtgtctgagaagggcaaggcttacaccaactacttcggacggtgcaatgtggccgagcacgaaaagctgatcctgctggcccagctgaagcccgagaaggatagcgacgaagccgtgacatatagcctgggaaagtttgggcagagggccctggatttctacagcattcatgtgaccaaggagtccacccaccccgtgaagcccctggcccagatcgccggaaacagatacgcctccggacctgtgggaaaggccctgagcgacgcatgtatgggcacaatcgcctccttcctgtctaagtaccaggacatcatcatcgaacaccagaaggtggtgaagggcaaccagaagagactggagagcctgcgggagctggccggcaaggaaaacctggaataccctagcgtgaccctgccacctcagcctcacaccaaggagggcgttgatgcctacaacgaagtgatcgcccgggtgcgaatgtgggtgaacctgaacctgtggcagaagctgaagctaagcagagatgatgccaagcctctgctgagactgaagggattcccttcctttcctctggtcgagagacaggccaacgaagtggactggtgggacatggtgtgtaacgtgaagaagctgatcaacgagaaaaaggaggatggcaaggtgttttggcagaatctggctggctacaagagacaggaagccctgagaccatacctgagcagcgaggaagatcggaagaagggaaagaaattcgctcggtaccagctgggcgacctgctgctgcacctggaaaagaagcacggcgaggactggggaaaggtgtacgacgaggcctgggagcggattgacaagaaagtggaaggcctgagcaagcacatcaagctggaagaggaacggagaagcgaggacgcccagagcaaggccgccctgaccgactggctgcgggctaaggccagcttcgtgatcgagggcctgaaggaggccgacaaggacgagttctgcagatgcgagctgaagctgcagaagtggtacggggacctgcggggaaagcccttcgccatcgaagccgagaacagcatcctggacatcagcggcttcagcaagcagtacaactgtgccttcatctggcagaaggacggcgtgaagaagctgaacctgtacctgatcatcaactacttcaagggcggcaagctgcggttcaagaagatcaaacctgaagccttcgaagccaacagattctacaccgtgatcaacaaaaagagcggcgagatcgtgcccatggaggtgaacttcaacttcgacgaccccaacctgatcatcctgcctctggcctttggcaagagacagggcagagaattcatctggaacgacctgctgtccctggaaaccggcagcctgaagctggccaacggaagagtgatcgagaagacactgtacaacagaagaacccggcaggatgagcctgccctgttcgtggccctgaccttcgagcggcgggaggtcctggactcctccaatatcaaaccaatgaacctgatcggcgtggcaagaggcgaaaacatccccgccgtgatcgccctgaccgaccccgagggctgcccactgagccggtttaaggatagcctgggaaacccaacccacatcctgagaatcggcgagagctataaggagaagcagcggaccatccaggccaagaaggaggtggagcagcggagagccggcggctacagccggaagtacgccagcaaagccaagaatctggcagacgatatggtgagaaacaccgctagagatctgctgtactacgccgtgacccaggatgccatgctgatcttcgccaacctgagccggggcttcggccggcagggcaagcggaccttcatggccgagagacagtacacacggatggaggactggctgaccgccaagctggcctacgagggcctgagcaagacctacctgtccaagacactggcccagtacacctccaagacatgcagcaactgtgggtttaccatcaccagcgccgactacgacagggtgctggagaagctgaagaagacagcaacaggctggatgaccacaattaacggcaaggagctgaaggtggagggccagattacctactacaacagatacaagagacagaacgtagtcaaggacctgtccgtcgagctggatagactgagcgaagaatctgtgaacaacgacatctcctcctggacaaagggcagaagcggagaagctctgagcctcctgaagaaaagattctcccatagacccgtgcaggagaagttcgtgtgcctgaactgcggcttcgagacacacgcagccgagcaagccgccctgaacatcgccagatcctggctgttcctgcggagccaggagtacaagaaataccagacaaacaagacaaccggcaacaccgataagagagccttcgtcgagacctggcagtccttttaccggaagaagcttaaggaggtgtggaaacctgccgtgcggtctggcggatctggcggaggctccaccagccccaagaaaaagagaaaagtctaagctgccttctgcggggcttgccttctggccatgcccttcttctctcccttgcacctgtacctcttggtctttgaataaagcctgagtaggaaggctagcaaaaaaaaaaaaaaaaaaaaaaaaaaaaaaaaaaaaaaaaaaaaaaaaaaaaaaaaaaaaaaaaaaaaaaaaaaaaaaaagcccagccggctccccaacctctaccgaggagggcacctctgagtccgccacccccgagagcggccctggcacctccaccgagcccagcgagggcagcgcacccggcagccctgccggcagccccacctccacagaggagggaaccagcaccgagcccagcgaaggcagcgccccaggcaccagcaccgagcctagtgagcaggagattaaacggatcaacaagatcagaagaagacttgtgaaagacagcaacaccaagaaggccggcaagacaggccccatgaaaaccctgctggttagagtgatgacacccgatctgagagagcggctggaaaacctgagaaagaagcctgaaaatatcccccagcccatcagcaatacatctagagccaacctgaataagctgctgaccgattacaccgaaatgaagaaggcgatcctgcatgtgtactgggaagagttccagaaggaccctgtgggcctgatgagccgggtggcccagcctgccagcaagaagatcgatcagaacaagctgaaacctgagatggacgagaagggcaacctgaccaccgccggctttgcctgctctcagtgtggccagcccctgttcgtgtacaagctggagcaggtgtctgagaagggcaaggcttacaccaactacttcggacggtgcaatgtggccgagcacgaaaagctgatcctgctggcccagctgaagcccgagaaggatagcgacgaagccgtgacatatagcctgggaaagtttgggcagagggccctggatttctacagcattcatgtgaccaaggagtccacccaccccgtgaagcccctggcccagatcgccggaaacagatacgcctccggacctgtgggaaaggccctgagcgacgcatgtatgggcacaatcgcctccttcctgtctaagtaccaggacatcatcatcgaacaccagaaggtggtgaagggcaaccagaagagactggagagcctgcgggagctggccggcaaggaaaacctggaataccctagcgtgaccctgccacctcagcctcacaccaaggagggcgttgatgcctacaacgaagtgatcgcccgggtgcgaatgtgggtgaacctgaacctgtggcagaagctgaagctaagcagagatgatgccaagcctctgctgagactgaagggattcccttcctttcctctggtcgagagacaggccaacgaagtggactggtgggacatggtgtgtaacgtgaagaagctgatcaacgagaaaaaggaggatggcaaggtgttttggcagaatctggctggctacaagagacaggaagccctgagaccatacctgagcagcgaggaagatcggaagaagggaaagaaattcgctcggtaccagctgggcgacctgctgctgcacctggaaaagaagcacggcgaggactggggaaaggtgtacgacgaggcctgggagcggattgacaagaaagtggaaggcctgagcaagcacatcaagctggaagaggaacggagaagcgaggacgcccagagcaaggccgccctgaccgactggctgcgggctaaggccagcttcgtgatcgagggcctgaaggaggccgacaaggacgagttctgcagatgcgagctgaagctgcagaagtggtacggggacctgcggggaaagcccttcgccatcgaagccgagaacagcatcctggacatcagcggcttcagcaagcagtacaactgtgccttcatctggcagaaggacggcgtgaagaagctgaacctgtacctgatcatcaactacttcaagggcggcaagctgcggttcaagaagatcaaacctgaagccttcgaagccaacagattctacaccgtgatcaacaaaaagagcggcgagatcgtgcccatggaggtgaacttcaacttcgacgaccccaacctgatcatcctgcctctggcctttggcaagagacagggcagagaattcatctggaacgacctgctgtccctggaaaccggcagcctgaagctggccaacggaagagtgatcgagaagacactgtacaacagaagaacccggcaggatgagcctgccctgttcgtggccctgaccttcgagcggcgggaggtcctggactcctccaatatcaaaccaatgaacctgatcggcgtggcaagaggcgaaaacatccccgccgtgatcgccctgaccgaccccgagggctgcccactgagccggtttaaggatagcctgggaaacccaacccacatcctgagaatcggcgagagctataaggagaagcagcggaccatccaggccaagaaggaggtggagcagcggagagccggcggctacagccggaagtacgccagcaaagccaagaatctggcagacgatatggtgagaaacaccgctagagatctgctgtactacgccgtgacccaggatgccatgctgatcttcgccaacctgagccggggcttcggccggcagggcaagcggaccttcatggccgagagacagtacacacggatggaggactggctgaccgccaagctggcctacgagggcctgagcaagacctacctgtccaagacactggcccagtacacctccaagacatgcagcaactgtgggtttaccatcaccagcgccgactacgacagggtgctggagaagctgaagaagacagcaacaggctggatgaccacaattaacggcaaggagctgaaggtggagggccagattacctactacaacagatacaagagacagaacgtagtcaaggacctgtccgtcgagctggatagactgagcgaagaatctgtgaacaacgacatctcctcctggacaaagggcagaagcggagaagctctgagcctcctgaagaaaagattctcccatagacccgtgcaggagaagttcgtgtgcctgaactgcggcttcgagacacacgcagccgagcaagccgccctgaacatcgccagatcctggctgttcctgcggagccaggagtacaagaaataccagacaaacaagacaaccggcaacaccgataagagagccttcgtcgagacctggcagtccttttaccggaagaagcttaaggaggtgtggaaacctgccgtgcggtctggcggatctggcggaggctccaccagccccaagaaaaagagaaaagtctaagctgccttctgcggggcttgccttctggccatgcccttcttctctcccttgcacctgtacctcttggtctttgaataaagcctgagtaggaaggctagcaaaaaaaaaaaaaaaaaaaaaaaaaaaaaaaaaaaaaaaaaaaaaaaaaaaaaaaaaaaaaaaaaaaaaaaaaaaaaaaa

SEQ ID NO: 9740 - RNA, 8787 nt, synthetic construct
  source 1..8787: mol_type = other RNA
aggaaataagagagaaaagaagagtaagaagaaatataagagccaccatggcccctaagaagaagcgtaaagtgagccggatgaaccacgaccaggagttcgacccccctaaggtgtaccctcccgtccccgccgagaagagaaagcccatccgggtcctgagcctgttcgatggcatcgccaccggtctgctggtgctgaaggacctgggcatccaggtggataggtacattgcctccgaggtgtgcgaggactccatcaccgtgggaatggtgcgtcatcagggcaagatcatgtacgtgggcgacgtgcggagcgtgacacagaagcatatccaggagtggggccctttcgacctggtgatcggcggcagcccttgcaatgacctgagcatcgtgaacccagcccggaagggcctgtacgagggaaccggcagactgttcttcgagttttacagactgctgcacgacgcccggcctaaggaaggcgacgaccggcccttcttttggctgttcgagaatgtggtggccatgggagtcagcgacaagcgggatattagccggttcctggagagcaaccccgtgatgatcgatgccaaggaagtgagcgccgcccaccgggccagatacttctggggcaatctgcctggcatgaacagacccctggccagcaccgtgaacgacaagctggagctgcaggagtgcctggagcacggccggatcgccaagttcagcaaggtgagaaccatcaccacccgaagcaacagcatcaaacaaggcaaggaccagcactttcctgtgttcatgaacgagaaggaggacatcctgtggtgtaccgagatggagagagtgttcgggttcccagtccactacacagatgtcagcaacatgtctagactggccagacagagactgctgggaagaagctggtccgtccctgtgatcagacacctgttcgcccctctgaaggagtacttcgcctgcgtgagcagcggcaacagcaacgccaacagccggggccccagcttctctagcggcctggtgccactgtccctgagagggagccacatgggccccatggagatctacaaaaccgtgagcgcctggaagcggcagcctgtgcgcgtgctgagcctgtttcggaatatcgataaagtcctgaaaagcctgggattcctggagagcggctctggctccggcggtggcaccctgaagtacgtggaggatgtgacaaacgtggtcagacgggatgtggagaagtggggccccttcgatctggtgtacggcagcacccaacccctgggcagctcttgtgaccggtgccctggctggtacatgtttcagttccaccggatcctgcagtacgccctgccgagacaggagtcccagcggccattcttttggattttcatggacaacttgctgctgaccgaggatgaccaggaaactaccactcggttcctgcagaccgaagccgtgaccctgcaggacgtgagaggccgggactaccagaacgccatgcgggtgtggtccaacatccctggactgaaaagcaagcacgcacctctgacccctaaagaagaggagtacctgcaggcccaggtgcggagcagaagcaagctggacgcccctaaggtggatctgctggtgaagaattgcctcctgcccctgagagagtacttcaagtatttcagccagaatagtctgcccctgggaggcagcggcggcggcagccagagcctggtgaccttcggcgacgtggccgtggacttcagccaggaggagtgggagaggctgagcagcgaccagagggacctgtacaggagggtgatgctggagaactacaggaacctggtgagcctgggcctgtgcttcagcaagcccgacatcatcagcagcctggagcagaggaaggagctgtggatggccaagagggaggtgaccaggggccagtgccccgactggaaggccgtgggcggcccaagcagcggcgcccctcctcccagcggcggcaggcggcccaagcagcggcgcccctcctcccagcggcggcagcccagccggctccccaacctctaccgaggagggcacctctgagtccgccacccccgagagcggccctggcacctccaccgagcccagcgagggcagcgcacccggcagccctgccggcagccccacctccacagaggagggaaccagcaccgagcccagcgaaggcagcgccccaggcaccagcaccgagcctagtgagcaggagattaaacggatcaacaagatcagaagaagacttgtgaaagacagcaacaccaagaaggccggcaagacaggccccatgaaaaccctgctggttagagtgatgacacccgatctgagagagcggctggaaaacctgagaaagaagcctgaaaatatcccccagcccatcagcaatacatctagagccaacctgaataagctgctgaccgattacaccgaaatgaagaaggcgatcctgcatgtgtactgggaagagttccagaaggaccctgtgggcctgatgagccgggtggcccagcctgccagcaagaagatcgatcagaacaagctgaaacctgagatggacgagaagggcaacctgaccaccgccggctttgcctgctctcagtgtggccagcccctgttcgtgtacaagctggagcaggtgtctgagaagggcaaggcttacaccaactacttcggacggtgcaatgtggccgagcacgaaaagctgatcctgctggcccagctgaagcccgagaaggatagcgacgaagccgtgacatatagcctgggaaagtttgggcagagggccctggatttctacagcattcatgtgaccaaggagtccacccaccccgtgaagcccctggcccagatcgccggaaacagatacgcctccggacctgtgggaaaggccctgagcgacgcatgtatgggcacaatcgcctccttcctgtctaagtaccaggacatcatcatcgaacaccagaaggtggtgaagggcaaccagaagagactggagagcctgcgggagctggccggcaaggaaaacctggaataccctagcgtgaccctgccacctcagcctcacaccaaggagggcgttgatgcctacaacgaagtgatcgcccgggtgcgaatgtgggtgaacctgaacctgtggcagaagctgaagctaagcagagatgatgccaagcctctgctgagactgaagggattcccttcctttcctctggtcgagagacaggccaacgaagtggactggtgggacatggtgtgtaacgtgaagaagctgatcaacgagaaaaaggaggatggcaaggtgttttggcagaatctggctggctacaagagacaggaagccctgagaccatacctgagcagcgaggaagatcggaagaagggaaagaaattcgctcggtaccagctgggcgacctgctgctgcacctggaaaagaagcacggcgaggactggggaaaggtgtacgacgaggcctgggagcggattgacaagaaagtggaaggcctgagcaagcacatcaagctggaagaggaacggagaagcgaggacgcccagagcaaggccgccctgaccgactggctgcgggctaaggccagcttcgtgatcgagggcctgaaggaggccgacaaggacgagttctgcagatgcgagctgaagctgcagaagtggtacggggacctgcggggaaagcccttcgccatcgaagccgagaacagcatcctggacatcagcggcttcagcaagcagtacaactgtgccttcatctggcagaaggacggcgtgaagaagctgaacctgtacctgatcatcaactacttcaagggcggcaagctgcggttcaagaagatcaaacctgaagccttcgaagccaacagattctacaccgtgatcaacaaaaagagcggcgagatcgtgcccatggaggtgaacttcaacttcgacgaccccaacctgatcatcctgcctctggcctttggcaagagacagggcagagaattcatctggaacgacctgctgtccctggaaaccggcagcctgaagctggccaacggaagagtgatcgagaagacactgtacaacagaagaacccggcaggatgagcctgccctgttcgtggccctgaccttcgagcggcgggaggtcctggactcctccaatatcaaaccaatgaacctgatcggcgtggcaagaggcgaaaacatccccgccgtgatcgccctgaccgaccccgagggctgcccactgagccggtttaaggatagcctgggaaacccaacccacatcctgagaatcggcgagagctataaggagaagcagcggaccatccaggccaagaaggaggtggagcagcggagagccggcggctacagccggaagtacgccagcaaagccaagaatctggcagacgatatggtgagaaacaccgctagagatctgctgtactacgccgtgacccaggatgccatgctgatcttcgccaacctgagccggggcttcggccggcagggcaagcggaccttcatggccgagagacagtacacacggatggaggactggctgaccgccaagctggcctacgagggcctgagcaagacctacctgtccaagacactggcccagtacacctccaagacatgcagcaactgtgggtttaccatcaccagcgccgactacgacagggtgctggagaagctgaagaagacagcaacaggctggatgaccacaattaacggcaaggagctgaaggtggagggccagattacctactacaacagatacaagagacagaacgtagtcaaggacctgtccgtcgagctggatagactgagcgaagaatctgtgaacaacgacatctcctcctggacaaagggcagaagcggagaagctctgagcctcctgaagaaaagattctcccatagacccgtgcaggagaagttcgtgtgcctgaactgcggcttcgagacacacgcagccgagcaagccgccctgaacatcgccagatcctggctgttcctgcggagccaggagtacaagaaataccagacaaacaagacaaccggcaacaccgataagagagccttcgtcgagacctggcagtccttttaccggaagaagcttaaggaggtgtggaaacctgccgtgcggtctggcggatctggcggaggctccaccagccccaagaaaaagagaaaagtctaagctgccttctgcggggcttgccttctggccatgcccttcttctctcccttgcacctgtacctcttggtctttgaataaagcctgagtaggaaggctagcaaaaaaaaaaaaaaaaaaaaaaaaaaaaaaaaaaaaaaaaaaaaaaaaaaaaaaaaaaaaaaaaaaaaaaaaaaaaaaaagcccagccggctccccaacctctaccgaggagggcacctctgagtccgccacccccgagagcggccctggcacctccaccgagcccagcgagggcagcgcacccggcagccctgccggcagccccacctccacagaggagggaaccagcaccgagcccagcgaaggcagcgccccaggcaccagcaccgagcctagtgagcaggagattaaacggatcaacaagatcagaagaagacttgtgaaagacagcaacaccaagaaggccggcaagacaggccccatgaaaaccctgctggttagagtgatgacacccgatctgagagagcggctggaaaacctgagaaagaagcctgaaaatatcccccagcccatcagcaatacatctagagccaacctgaataagctgctgaccgattacaccgaaatgaagaaggcgatcctgcatgtgtactgggaagagttccagaaggaccctgtgggcctgatgagccgggtggcccagcctgccagcaagaagatcgatcagaacaagctgaaacctgagatggacgagaagggcaacctgaccaccgccggctttgcctgctctcagtgtggccagcccctgttcgtgtacaagctggagcaggtgtctgagaagggcaaggcttacaccaactacttcggacggtgcaatgtggccgagcacgaaaagctgatcctgctggcccagctgaagcccgagaaggatagcgacgaagccgtgacatatagcctgggaaagtttgggcagagggccctggatttctacagcattcatgtgaccaaggagtccacccaccccgtgaagcccctggcccagatcgccggaaacagatacgcctccggacctgtgggaaaggccctgagcgacgcatgtatgggcacaatcgcctccttcctgtctaagtaccaggacatcatcatcgaacaccagaaggtggtgaagggcaaccagaagagactggagagcctgcgggagctggccggcaaggaaaacctggaataccctagcgtgaccctgccacctcagcctcacaccaaggagggcgttgatgcctacaacgaagtgatcgcccgggtgcgaatgtgggtgaacctgaacctgtggcagaagctgaagctaagcagagatgatgccaagcctctgctgagactgaagggattcccttcctttcctctggtcgagagacaggccaacgaagtggactggtgggacatggtgtgtaacgtgaagaagctgatcaacgagaaaaaggaggatggcaaggtgttttggcagaatctggctggctacaagagacaggaagccctgagaccatacctgagcagcgaggaagatcggaagaagggaaagaaattcgctcggtaccagctgggcgacctgctgctgcacctggaaaagaagcacggcgaggactggggaaaggtgtacgacgaggcctgggagcggattgacaagaaagtggaaggcctgagcaagcacatcaagctggaagaggaacggagaagcgaggacgcccagagcaaggccgccctgaccgactggctgcgggctaaggccagcttcgtgatcgagggcctgaaggaggccgacaaggacgagttctgcagatgcgagctgaagctgcagaagtggtacggggacctgcggggaaagcccttcgccatcgaagccgagaacagcatcctggacatcagcggcttcagcaagcagtacaactgtgccttcatctggcagaaggacggcgtgaagaagctgaacctgtacctgatcatcaactacttcaagggcggcaagctgcggttcaagaagatcaaacctgaagccttcgaagccaacagattctacaccgtgatcaacaaaaagagcggcgagatcgtgcccatggaggtgaacttcaacttcgacgaccccaacctgatcatcctgcctctggcctttggcaagagacagggcagagaattcatctggaacgacctgctgtccctggaaaccggcagcctgaagctggccaacggaagagtgatcgagaagacactgtacaacagaagaacccggcaggatgagcctgccctgttcgtggccctgaccttcgagcggcgggaggtcctggactcctccaatatcaaaccaatgaacctgatcggcgtggcaagaggcgaaaacatccccgccgtgatcgccctgaccgaccccgagggctgcccactgagccggtttaaggatagcctgggaaacccaacccacatcctgagaatcggcgagagctataaggagaagcagcggaccatccaggccaagaaggaggtggagcagcggagagccggcggctacagccggaagtacgccagcaaagccaagaatctggcagacgatatggtgagaaacaccgctagagatctgctgtactacgccgtgacccaggatgccatgctgatcttcgccaacctgagccggggcttcggccggcagggcaagcggaccttcatggccgagagacagtacacacggatggaggactggctgaccgccaagctggcctacgagggcctgagcaagacctacctgtccaagacactggcccagtacacctccaagacatgcagcaactgtgggtttaccatcaccagcgccgactacgacagggtgctggagaagctgaagaagacagcaacaggctggatgaccacaattaacggcaaggagctgaaggtggagggccagattacctactacaacagatacaagagacagaacgtagtcaaggacctgtccgtcgagctggatagactgagcgaagaatctgtgaacaacgacatctcctcctggacaaagggcagaagcggagaagctctgagcctcctgaagaaaagattctcccatagacccgtgcaggagaagttcgtgtgcctgaactgcggcttcgagacacacgcagccgagcaagccgccctgaacatcgccagatcctggctgttcctgcggagccaggagtacaagaaataccagacaaacaagacaaccggcaacaccgataagagagccttcgtcgagacctggcagtccttttaccggaagaagcttaaggaggtgtggaaacctgccgtgcggtctggcggatctggcggaggctccaccagccccaagaaaaagagaaaagtctaagctgccttctgcggggcttgccttctggccatgcccttcttctctcccttgcacctgtacctcttggtctttgaataaagcctgagtaggaaggctagcaaaaaaaaaaaaaaaaaaaaaaaaaaaaaaaaaaaaaaaaaaaaaaaaaaaaaaaaaaaaaaaaaaaaaaaaaaaaaaaa

SEQ ID NO: 9741 - RNA, 8787 nt, synthetic construct
  source 1..8787: mol_type = other RNA
aggaaataagagagaaaagaagagtaagaagaaatataagagccaccatggcccctaagaagaagcgtaaagtgagccggatgaaccacgaccaggagttcgacccccctaaggtgtaccctcccgtccccgccgagaagagaaagcccatccgggtcctgagcctgttcgatggcatcgccaccggtctgctggtgctgaaggacctgggcatccaggtggataggtacattgcctccgaggtgtgcgaggactccatcaccgtgggaatggtgcgtcatcagggcaagatcatgtacgtgggcgacgtgcggagcgtgacacagaagcatatccaggagtggggccctttcgacctggtgatcggcggcagcccttgcaatgacctgagcatcgtgaacccagcccggaagggcctgtacgagggaaccggcagactgttcttcgagttttacagactgctgcacgacgcccggcctaaggaaggcgacgaccggcccttcttttggctgttcgagaatgtggtggccatgggagtcagcgacaagcgggatattagccggttcctggagagcaaccccgtgatgatcgatgccaaggaagtgagcgccgcccaccgggccagatacttctggggcaatctgcctggcatgaacagacccctggccagcaccgtgaacgacaagctggagctgcaggagtgcctggagcacggccggatcgccaagttcagcaaggtgagaaccatcaccacccgaagcaacagcatcaaacaaggcaaggaccagcactttcctgtgttcatgaacgagaaggaggacatcctgtggtgtaccgagatggagagagtgttcgggttcccagtccactacacagatgtcagcaacatgtctagactggccagacagagactgctgggaagaagctggtccgtccctgtgatcagacacctgttcgcccctctgaaggagtacttcgcctgcgtgagcagcggcaacagcaacgccaacagccggggccccagcttctctagcggcctggtgccactgtccctgagagggagccacatgggccccatggagatctacaaaaccgtgagcgcctggaagcggcagcctgtgcgcgtgctgagcctgtttcggaatatcgataaagtcctgaaaagcctgggattcctggagagcggctctggctccggcggtggcaccctgaagtacgtggaggatgtgacaaacgtggtcagacgggatgtggagaagtggggccccttcgatctggtgtacggcagcacccaacccctgggcagctcttgtgaccggtgccctggctggtacatgtttcagttccaccggatcctgcagtacgccctgccgagacaggagtcccagcggccattcttttggattttcatggacaacttgctgctgaccgaggatgaccaggaaactaccactcggttcctgcagaccgaagccgtgaccctgcaggacgtgagaggccgggactaccagaacgccatgcgggtgtggtccaacatccctggactgaaaagcaagcacgcacctctgacccctaaagaagaggagtacctgcaggcccaggtgcggagcagaagcaagctggacgcccctaaggtggatctgctggtgaagaattgcctcctgcccctgagagagtacttcaagtatttcagccagaatagtctgcccctgggaggcagcggcggcggcaagcccggcgccctgagcttcgccgacgtggccgtgtacttcagcagcgaggagtggggctgcctgaggcccgcccagagggccctgtacagggacgtgatgagggagacctacggccacctgggcgccctgggcttcgccggccccaagcccgccctgatcagctggatggagaggaagaaggaggcctggagccccgaggccgaggaccccgaggacagggccaggcaccccggctacggcggcggcccaagcagcggcgcccctcctcccagcggcggcaggcggcccaagcagcggcgcccctcctcccagcggcggcagcccagccggctccccaacctctaccgaggagggcacctctgagtccgccacccccgagagcggccctggcacctccaccgagcccagcgagggcagcgcacccggcagccctgccggcagccccacctccacagaggagggaaccagcaccgagcccagcgaaggcagcgccccaggcaccagcaccgagcctagtgagcaggagattaaacggatcaacaagatcagaagaagacttgtgaaagacagcaacaccaagaaggccggcaagacaggccccatgaaaaccctgctggttagagtgatgacacccgatctgagagagcggctggaaaacctgagaaagaagcctgaaaatatcccccagcccatcagcaatacatctagagccaacctgaataagctgctgaccgattacaccgaaatgaagaaggcgatcctgcatgtgtactgggaagagttccagaaggaccctgtgggcctgatgagccgggtggcccagcctgccagcaagaagatcgatcagaacaagctgaaacctgagatggacgagaagggcaacctgaccaccgccggctttgcctgctctcagtgtggccagcccctgttcgtgtacaagctggagcaggtgtctgagaagggcaaggcttacaccaactacttcggacggtgcaatgtggccgagcacgaaaagctgatcctgctggcccagctgaagcccgagaaggatagcgacgaagccgtgacatatagcctgggaaagtttgggcagagggccctggatttctacagcattcatgtgaccaaggagtccacccaccccgtgaagcccctggcccagatcgccggaaacagatacgcctccggacctgtgggaaaggccctgagcgacgcatgtatgggcacaatcgcctccttcctgtctaagtaccaggacatcatcatcgaacaccagaaggtggtgaagggcaaccagaagagactggagagcctgcgggagctggccggcaaggaaaacctggaataccctagcgtgaccctgccacctcagcctcacaccaaggagggcgttgatgcctacaacgaagtgatcgcccgggtgcgaatgtgggtgaacctgaacctgtggcagaagctgaagctaagcagagatgatgccaagcctctgctgagactgaagggattcccttcctttcctctggtcgagagacaggccaacgaagtggactggtgggacatggtgtgtaacgtgaagaagctgatcaacgagaaaaaggaggatggcaaggtgttttggcagaatctggctggctacaagagacaggaagccctgagaccatacctgagcagcgaggaagatcggaagaagggaaagaaattcgctcggtaccagctgggcgacctgctgctgcacctggaaaagaagcacggcgaggactggggaaaggtgtacgacgaggcctgggagcggattgacaagaaagtggaaggcctgagcaagcacatcaagctggaagaggaacggagaagcgaggacgcccagagcaaggccgccctgaccgactggctgcgggctaaggccagcttcgtgatcgagggcctgaaggaggccgacaaggacgagttctgcagatgcgagctgaagctgcagaagtggtacggggacctgcggggaaagcccttcgccatcgaagccgagaacagcatcctggacatcagcggcttcagcaagcagtacaactgtgccttcatctggcagaaggacggcgtgaagaagctgaacctgtacctgatcatcaactacttcaagggcggcaagctgcggttcaagaagatcaaacctgaagccttcgaagccaacagattctacaccgtgatcaacaaaaagagcggcgagatcgtgcccatggaggtgaacttcaacttcgacgaccccaacctgatcatcctgcctctggcctttggcaagagacagggcagagaattcatctggaacgacctgctgtccctggaaaccggcagcctgaagctggccaacggaagagtgatcgagaagacactgtacaacagaagaacccggcaggatgagcctgccctgttcgtggccctgaccttcgagcggcgggaggtcctggactcctccaatatcaaaccaatgaacctgatcggcgtggcaagaggcgaaaacatccccgccgtgatcgccctgaccgaccccgagggctgcccactgagccggtttaaggatagcctgggaaacccaacccacatcctgagaatcggcgagagctataaggagaagcagcggaccatccaggccaagaaggaggtggagcagcggagagccggcggctacagccggaagtacgccagcaaagccaagaatctggcagacgatatggtgagaaacaccgctagagatctgctgtactacgccgtgacccaggatgccatgctgatcttcgccaacctgagccggggcttcggccggcagggcaagcggaccttcatggccgagagacagtacacacggatggaggactggctgaccgccaagctggcctacgagggcctgagcaagacctacctgtccaagacactggcccagtacacctccaagacatgcagcaactgtgggtttaccatcaccagcgccgactacgacagggtgctggagaagctgaagaagacagcaacaggctggatgaccacaattaacggcaaggagctgaaggtggagggccagattacctactacaacagatacaagagacagaacgtagtcaaggacctgtccgtcgagctggatagactgagcgaagaatctgtgaacaacgacatctcctcctggacaaagggcagaagcggagaagctctgagcctcctgaagaaaagattctcccatagacccgtgcaggagaagttcgtgtgcctgaactgcggcttcgagacacacgcagccgagcaagccgccctgaacatcgccagatcctggctgttcctgcggagccaggagtacaagaaataccagacaaacaagacaaccggcaacaccgataagagagccttcgtcgagacctggcagtccttttaccggaagaagcttaaggaggtgtggaaacctgccgtgcggtctggcggatctggcggaggctccaccagccccaagaaaaagagaaaagtctaagctgccttctgcggggcttgccttctggccatgcccttcttctctcccttgcacctgtacctcttggtctttgaataaagcctgagtaggaaggctagcaaaaaaaaaaaaaaaaaaaaaaaaaaaaaaaaaaaaaaaaaaaaaaaaaaaaaaaaaaaaaaaaaaaaaaaaaaaaaaaagcccagccggctccccaacctctaccgaggagggcacctctgagtccgccacccccgagagcggccctggcacctccaccgagcccagcgagggcagcgcacccggcagccctgccggcagccccacctccacagaggagggaaccagcaccgagcccagcgaaggcagcgccccaggcaccagcaccgagcctagtgagcaggagattaaacggatcaacaagatcagaagaagacttgtgaaagacagcaacaccaagaaggccggcaagacaggccccatgaaaaccctgctggttagagtgatgacacccgatctgagagagcggctggaaaacctgagaaagaagcctgaaaatatcccccagcccatcagcaatacatctagagccaacctgaataagctgctgaccgattacaccgaaatgaagaaggcgatcctgcatgtgtactgggaagagttccagaaggaccctgtgggcctgatgagccgggtggcccagcctgccagcaagaagatcgatcagaacaagctgaaacctgagatggacgagaagggcaacctgaccaccgccggctttgcctgctctcagtgtggccagcccctgttcgtgtacaagctggagcaggtgtctgagaagggcaaggcttacaccaactacttcggacggtgcaatgtggccgagcacgaaaagctgatcctgctggcccagctgaagcccgagaaggatagcgacgaagccgtgacatatagcctgggaaagtttgggcagagggccctggatttctacagcattcatgtgaccaaggagtccacccaccccgtgaagcccctggcccagatcgccggaaacagatacgcctccggacctgtgggaaaggccctgagcgacgcatgtatgggcacaatcgcctccttcctgtctaagtaccaggacatcatcatcgaacaccagaaggtggtgaagggcaaccagaagagactggagagcctgcgggagctggccggcaaggaaaacctggaataccctagcgtgaccctgccacctcagcctcacaccaaggagggcgttgatgcctacaacgaagtgatcgcccgggtgcgaatgtgggtgaacctgaacctgtggcagaagctgaagctaagcagagatgatgccaagcctctgctgagactgaagggattcccttcctttcctctggtcgagagacaggccaacgaagtggactggtgggacatggtgtgtaacgtgaagaagctgatcaacgagaaaaaggaggatggcaaggtgttttggcagaatctggctggctacaagagacaggaagccctgagaccatacctgagcagcgaggaagatcggaagaagggaaagaaattcgctcggtaccagctgggcgacctgctgctgcacctggaaaagaagcacggcgaggactggggaaaggtgtacgacgaggcctgggagcggattgacaagaaagtggaaggcctgagcaagcacatcaagctggaagaggaacggagaagcgaggacgcccagagcaaggccgccctgaccgactggctgcgggctaaggccagcttcgtgatcgagggcctgaaggaggccgacaaggacgagttctgcagatgcgagctgaagctgcagaagtggtacggggacctgcggggaaagcccttcgccatcgaagccgagaacagcatcctggacatcagcggcttcagcaagcagtacaactgtgccttcatctggcagaaggacggcgtgaagaagctgaacctgtacctgatcatcaactacttcaagggcggcaagctgcggttcaagaagatcaaacctgaagccttcgaagccaacagattctacaccgtgatcaacaaaaagagcggcgagatcgtgcccatggaggtgaacttcaacttcgacgaccccaacctgatcatcctgcctctggcctttggcaagagacagggcagagaattcatctggaacgacctgctgtccctggaaaccggcagcctgaagctggccaacggaagagtgatcgagaagacactgtacaacagaagaacccggcaggatgagcctgccctgttcgtggccctgaccttcgagcggcgggaggtcctggactcctccaatatcaaaccaatgaacctgatcggcgtggcaagaggcgaaaacatccccgccgtgatcgccctgaccgaccccgagggctgcccactgagccggtttaaggatagcctgggaaacccaacccacatcctgagaatcggcgagagctataaggagaagcagcggaccatccaggccaagaaggaggtggagcagcggagagccggcggctacagccggaagtacgccagcaaagccaagaatctggcagacgatatggtgagaaacaccgctagagatctgctgtactacgccgtgacccaggatgccatgctgatcttcgccaacctgagccggggcttcggccggcagggcaagcggaccttcatggccgagagacagtacacacggatggaggactggctgaccgccaagctggcctacgagggcctgagcaagacctacctgtccaagacactggcccagtacacctccaagacatgcagcaactgtgggtttaccatcaccagcgccgactacgacagggtgctggagaagctgaagaagacagcaacaggctggatgaccacaattaacggcaaggagctgaaggtggagggccagattacctactacaacagatacaagagacagaacgtagtcaaggacctgtccgtcgagctggatagactgagcgaagaatctgtgaacaacgacatctcctcctggacaaagggcagaagcggagaagctctgagcctcctgaagaaaagattctcccatagacccgtgcaggagaagttcgtgtgcctgaactgcggcttcgagacacacgcagccgagcaagccgccctgaacatcgccagatcctggctgttcctgcggagccaggagtacaagaaataccagacaaacaagacaaccggcaacaccgataagagagccttcgtcgagacctggcagtccttttaccggaagaagcttaaggaggtgtggaaacctgccgtgcggtctggcggatctggcggaggctccaccagccccaagaaaaagagaaaagtctaagctgccttctgcggggcttgccttctggccatgcccttcttctctcccttgcacctgtacctcttggtctttgaataaagcctgagtaggaaggctagcaaaaaaaaaaaaaaaaaaaaaaaaaaaaaaaaaaaaaaaaaaaaaaaaaaaaaaaaaaaaaaaaaaaaaaaaaaaaaaaa

SEQ ID NO: 9742 - RNA, 8787 nt, synthetic construct
  source 1..8787: mol_type = other RNA
aggaaataagagagaaaagaagagtaagaagaaatataagagccaccatggcccctaagaagaagcgtaaagtgagccggatgaaccacgaccaggagttcgacccccctaaggtgtaccctcccgtccccgccgagaagagaaagcccatccgggtcctgagcctgttcgatggcatcgccaccggtctgctggtgctgaaggacctgggcatccaggtggataggtacattgcctccgaggtgtgcgaggactccatcaccgtgggaatggtgcgtcatcagggcaagatcatgtacgtgggcgacgtgcggagcgtgacacagaagcatatccaggagtggggccctttcgacctggtgatcggcggcagcccttgcaatgacctgagcatcgtgaacccagcccggaagggcctgtacgagggaaccggcagactgttcttcgagttttacagactgctgcacgacgcccggcctaaggaaggcgacgaccggcccttcttttggctgttcgagaatgtggtggccatgggagtcagcgacaagcgggatattagccggttcctggagagcaaccccgtgatgatcgatgccaaggaagtgagcgccgcccaccgggccagatacttctggggcaatctgcctggcatgaacagacccctggccagcaccgtgaacgacaagctggagctgcaggagtgcctggagcacggccggatcgccaagttcagcaaggtgagaaccatcaccacccgaagcaacagcatcaaacaaggcaaggaccagcactttcctgtgttcatgaacgagaaggaggacatcctgtggtgtaccgagatggagagagtgttcgggttcccagtccactacacagatgtcagcaacatgtctagactggccagacagagactgctgggaagaagctggtccgtccctgtgatcagacacctgttcgcccctctgaaggagtacttcgcctgcgtgagcagcggcaacagcaacgccaacagccggggccccagcttctctagcggcctggtgccactgtccctgagagggagccacatgggccccatggagatctacaaaaccgtgagcgcctggaagcggcagcctgtgcgcgtgctgagcctgtttcggaatatcgataaagtcctgaaaagcctgggattcctggagagcggctctggctccggcggtggcaccctgaagtacgtggaggatgtgacaaacgtggtcagacgggatgtggagaagtggggccccttcgatctggtgtacggcagcacccaacccctgggcagctcttgtgaccggtgccctggctggtacatgtttcagttccaccggatcctgcagtacgccctgccgagacaggagtcccagcggccattcttttggattttcatggacaacttgctgctgaccgaggatgaccaggaaactaccactcggttcctgcagaccgaagccgtgaccctgcaggacgtgagaggccgggactaccagaacgccatgcgggtgtggtccaacatccctggactgaaaagcaagcacgcacctctgacccctaaagaagaggagtacctgcaggcccaggtgcggagcagaagcaagctggacgcccctaaggtggatctgctggtgaagaattgcctcctgcccctgagagagtacttcaagtatttcagccagaatagtctgcccctgggaggcagcggcggcggcatggagcccctgaagttcagggacgtggccgtggagttcagcctggaggagtggcagtgcctggacaccatccagcagaacctgtacaggaacgtgatgctggagaactacaggaacctggtgttcctgggcatcgccgtgagcaagcccgacctgatcacctgcctggagcaggagaaggagccctggaccaggaagaggcacaggatggtggccaagcccgtgacctgcagccacttcgccggcggcccaagcagcggcgcccctcctcccagcggcggcaggcggcccaagcagcggcgcccctcctcccagcggcggcagcccagccggctccccaacctctaccgaggagggcacctctgagtccgccacccccgagagcggccctggcacctccaccgagcccagcgagggcagcgcacccggcagccctgccggcagccccacctccacagaggagggaaccagcaccgagcccagcgaaggcagcgccccaggcaccagcaccgagcctagtgagcaggagattaaacggatcaacaagatcagaagaagacttgtgaaagacagcaacaccaagaaggccggcaagacaggccccatgaaaaccctgctggttagagtgatgacacccgatctgagagagcggctggaaaacctgagaaagaagcctgaaaatatcccccagcccatcagcaatacatctagagccaacctgaataagctgctgaccgattacaccgaaatgaagaaggcgatcctgcatgtgtactgggaagagttccagaaggaccctgtgggcctgatgagccgggtggcccagcctgccagcaagaagatcgatcagaacaagctgaaacctgagatggacgagaagggcaacctgaccaccgccggctttgcctgctctcagtgtggccagcccctgttcgtgtacaagctggagcaggtgtctgagaagggcaaggcttacaccaactacttcggacggtgcaatgtggccgagcacgaaaagctgatcctgctggcccagctgaagcccgagaaggatagcgacgaagccgtgacatatagcctgggaaagtttgggcagagggccctggatttctacagcattcatgtgaccaaggagtccacccaccccgtgaagcccctggcccagatcgccggaaacagatacgcctccggacctgtgggaaaggccctgagcgacgcatgtatgggcacaatcgcctccttcctgtctaagtaccaggacatcatcatcgaacaccagaaggtggtgaagggcaaccagaagagactggagagcctgcgggagctggccggcaaggaaaacctggaataccctagcgtgaccctgccacctcagcctcacaccaaggagggcgttgatgcctacaacgaagtgatcgcccgggtgcgaatgtgggtgaacctgaacctgtggcagaagctgaagctaagcagagatgatgccaagcctctgctgagactgaagggattcccttcctttcctctggtcgagagacaggccaacgaagtggactggtgggacatggtgtgtaacgtgaagaagctgatcaacgagaaaaaggaggatggcaaggtgttttggcagaatctggctggctacaagagacaggaagccctgagaccatacctgagcagcgaggaagatcggaagaagggaaagaaattcgctcggtaccagctgggcgacctgctgctgcacctggaaaagaagcacggcgaggactggggaaaggtgtacgacgaggcctgggagcggattgacaagaaagtggaaggcctgagcaagcacatcaagctggaagaggaacggagaagcgaggacgcccagagcaaggccgccctgaccgactggctgcgggctaaggccagcttcgtgatcgagggcctgaaggaggccgacaaggacgagttctgcagatgcgagctgaagctgcagaagtggtacggggacctgcggggaaagcccttcgccatcgaagccgagaacagcatcctggacatcagcggcttcagcaagcagtacaactgtgccttcatctggcagaaggacggcgtgaagaagctgaacctgtacctgatcatcaactacttcaagggcggcaagctgcggttcaagaagatcaaacctgaagccttcgaagccaacagattctacaccgtgatcaacaaaaagagcggcgagatcgtgcccatggaggtgaacttcaacttcgacgaccccaacctgatcatcctgcctctggcctttggcaagagacagggcagagaattcatctggaacgacctgctgtccctggaaaccggcagcctgaagctggccaacggaagagtgatcgagaagacactgtacaacagaagaacccggcaggatgagcctgccctgttcgtggccctgaccttcgagcggcgggaggtcctggactcctccaatatcaaaccaatgaacctgatcggcgtggcaagaggcgaaaacatccccgccgtgatcgccctgaccgaccccgagggctgcccactgagccggtttaaggatagcctgggaaacccaacccacatcctgagaatcggcgagagctataaggagaagcagcggaccatccaggccaagaaggaggtggagcagcggagagccggcggctacagccggaagtacgccagcaaagccaagaatctggcagacgatatggtgagaaacaccgctagagatctgctgtactacgccgtgacccaggatgccatgctgatcttcgccaacctgagccggggcttcggccggcagggcaagcggaccttcatggccgagagacagtacacacggatggaggactggctgaccgccaagctggcctacgagggcctgagcaagacctacctgtccaagacactggcccagtacacctccaagacatgcagcaactgtgggtttaccatcaccagcgccgactacgacagggtgctggagaagctgaagaagacagcaacaggctggatgaccacaattaacggcaaggagctgaaggtggagggccagattacctactacaacagatacaagagacagaacgtagtcaaggacctgtccgtcgagctggatagactgagcgaagaatctgtgaacaacgacatctcctcctggacaaagggcagaagcggagaagctctgagcctcctgaagaaaagattctcccatagacccgtgcaggagaagttcgtgtgcctgaactgcggcttcgagacacacgcagccgagcaagccgccctgaacatcgccagatcctggctgttcctgcggagccaggagtacaagaaataccagacaaacaagacaaccggcaacaccgataagagagccttcgtcgagacctggcagtccttttaccggaagaagcttaaggaggtgtggaaacctgccgtgcggtctggcggatctggcggaggctccaccagccccaagaaaaagagaaaagtctaagctgccttctgcggggcttgccttctggccatgcccttcttctctcccttgcacctgtacctcttggtctttgaataaagcctgagtaggaaggctagcaaaaaaaaaaaaaaaaaaaaaaaaaaaaaaaaaaaaaaaaaaaaaaaaaaaaaaaaaaaaaaaaaaaaaaaaaaaaaaaagcccagccggctccccaacctctaccgaggagggcacctctgagtccgccacccccgagagcggccctggcacctccaccgagcccagcgagggcagcgcacccggcagccctgccggcagccccacctccacagaggagggaaccagcaccgagcccagcgaaggcagcgccccaggcaccagcaccgagcctagtgagcaggagattaaacggatcaacaagatcagaagaagacttgtgaaagacagcaacaccaagaaggccggcaagacaggccccatgaaaaccctgctggttagagtgatgacacccgatctgagagagcggctggaaaacctgagaaagaagcctgaaaatatcccccagcccatcagcaatacatctagagccaacctgaataagctgctgaccgattacaccgaaatgaagaaggcgatcctgcatgtgtactgggaagagttccagaaggaccctgtgggcctgatgagccgggtggcccagcctgccagcaagaagatcgatcagaacaagctgaaacctgagatggacgagaagggcaacctgaccaccgccggctttgcctgctctcagtgtggccagcccctgttcgtgtacaagctggagcaggtgtctgagaagggcaaggcttacaccaactacttcggacggtgcaatgtggccgagcacgaaaagctgatcctgctggcccagctgaagcccgagaaggatagcgacgaagccgtgacatatagcctgggaaagtttgggcagagggccctggatttctacagcattcatgtgaccaaggagtccacccaccccgtgaagcccctggcccagatcgccggaaacagatacgcctccggacctgtgggaaaggccctgagcgacgcatgtatgggcacaatcgcctccttcctgtctaagtaccaggacatcatcatcgaacaccagaaggtggtgaagggcaaccagaagagactggagagcctgcgggagctggccggcaaggaaaacctggaataccctagcgtgaccctgccacctcagcctcacaccaaggagggcgttgatgcctacaacgaagtgatcgcccgggtgcgaatgtgggtgaacctgaacctgtggcagaagctgaagctaagcagagatgatgccaagcctctgctgagactgaagggattcccttcctttcctctggtcgagagacaggccaacgaagtggactggtgggacatggtgtgtaacgtgaagaagctgatcaacgagaaaaaggaggatggcaaggtgttttggcagaatctggctggctacaagagacaggaagccctgagaccatacctgagcagcgaggaagatcggaagaagggaaagaaattcgctcggtaccagctgggcgacctgctgctgcacctggaaaagaagcacggcgaggactggggaaaggtgtacgacgaggcctgggagcggattgacaagaaagtggaaggcctgagcaagcacatcaagctggaagaggaacggagaagcgaggacgcccagagcaaggccgccctgaccgactggctgcgggctaaggccagcttcgtgatcgagggcctgaaggaggccgacaaggacgagttctgcagatgcgagctgaagctgcagaagtggtacggggacctgcggggaaagcccttcgccatcgaagccgagaacagcatcctggacatcagcggcttcagcaagcagtacaactgtgccttcatctggcagaaggacggcgtgaagaagctgaacctgtacctgatcatcaactacttcaagggcggcaagctgcggttcaagaagatcaaacctgaagccttcgaagccaacagattctacaccgtgatcaacaaaaagagcggcgagatcgtgcccatggaggtgaacttcaacttcgacgaccccaacctgatcatcctgcctctggcctttggcaagagacagggcagagaattcatctggaacgacctgctgtccctggaaaccggcagcctgaagctggccaacggaagagtgatcgagaagacactgtacaacagaagaacccggcaggatgagcctgccctgttcgtggccctgaccttcgagcggcgggaggtcctggactcctccaatatcaaaccaatgaacctgatcggcgtggcaagaggcgaaaacatccccgccgtgatcgccctgaccgaccccgagggctgcccactgagccggtttaaggatagcctgggaaacccaacccacatcctgagaatcggcgagagctataaggagaagcagcggaccatccaggccaagaaggaggtggagcagcggagagccggcggctacagccggaagtacgccagcaaagccaagaatctggcagacgatatggtgagaaacaccgctagagatctgctgtactacgccgtgacccaggatgccatgctgatcttcgccaacctgagccggggcttcggccggcagggcaagcggaccttcatggccgagagacagtacacacggatggaggactggctgaccgccaagctggcctacgagggcctgagcaagacctacctgtccaagacactggcccagtacacctccaagacatgcagcaactgtgggtttaccatcaccagcgccgactacgacagggtgctggagaagctgaagaagacagcaacaggctggatgaccacaattaacggcaaggagctgaaggtggagggccagattacctactacaacagatacaagagacagaacgtagtcaaggacctgtccgtcgagctggatagactgagcgaagaatctgtgaacaacgacatctcctcctggacaaagggcagaagcggagaagctctgagcctcctgaagaaaagattctcccatagacccgtgcaggagaagttcgtgtgcctgaactgcggcttcgagacacacgcagccgagcaagccgccctgaacatcgccagatcctggctgttcctgcggagccaggagtacaagaaataccagacaaacaagacaaccggcaacaccgataagagagccttcgtcgagacctggcagtccttttaccggaagaagcttaaggaggtgtggaaacctgccgtgcggtctggcggatctggcggaggctccaccagccccaagaaaaagagaaaagtctaagctgccttctgcggggcttgccttctggccatgcccttcttctctcccttgcacctgtacctcttggtctttgaataaagcctgagtaggaaggctagcaaaaaaaaaaaaaaaaaaaaaaaaaaaaaaaaaaaaaaaaaaaaaaaaaaaaaaaaaaaaaaaaaaaaaaaaaaaaaaaa

SEQ ID NO: 9743 - RNA, 8787 nt, synthetic construct
  source 1..8787: mol_type = other RNA
aggaaataagagagaaaagaagagtaagaagaaatataagagccaccatggcccctaagaagaagcgtaaagtgagccggatgaaccacgaccaggagttcgacccccctaaggtgtaccctcccgtccccgccgagaagagaaagcccatccgggtcctgagcctgttcgatggcatcgccaccggtctgctggtgctgaaggacctgggcatccaggtggataggtacattgcctccgaggtgtgcgaggactccatcaccgtgggaatggtgcgtcatcagggcaagatcatgtacgtgggcgacgtgcggagcgtgacacagaagcatatccaggagtggggccctttcgacctggtgatcggcggcagcccttgcaatgacctgagcatcgtgaacccagcccggaagggcctgtacgagggaaccggcagactgttcttcgagttttacagactgctgcacgacgcccggcctaaggaaggcgacgaccggcccttcttttggctgttcgagaatgtggtggccatgggagtcagcgacaagcgggatattagccggttcctggagagcaaccccgtgatgatcgatgccaaggaagtgagcgccgcccaccgggccagatacttctggggcaatctgcctggcatgaacagacccctggccagcaccgtgaacgacaagctggagctgcaggagtgcctggagcacggccggatcgccaagttcagcaaggtgagaaccatcaccacccgaagcaacagcatcaaacaaggcaaggaccagcactttcctgtgttcatgaacgagaaggaggacatcctgtggtgtaccgagatggagagagtgttcgggttcccagtccactacacagatgtcagcaacatgtctagactggccagacagagactgctgggaagaagctggtccgtccctgtgatcagacacctgttcgcccctctgaaggagtacttcgcctgcgtgagcagcggcaacagcaacgccaacagccggggccccagcttctctagcggcctggtgccactgtccctgagagggagccacatgggccccatggagatctacaaaaccgtgagcgcctggaagcggcagcctgtgcgcgtgctgagcctgtttcggaatatcgataaagtcctgaaaagcctgggattcctggagagcggctctggctccggcggtggcaccctgaagtacgtggaggatgtgacaaacgtggtcagacgggatgtggagaagtggggccccttcgatctggtgtacggcagcacccaacccctgggcagctcttgtgaccggtgccctggctggtacatgtttcagttccaccggatcctgcagtacgccctgccgagacaggagtcccagcggccattcttttggattttcatggacaacttgctgctgaccgaggatgaccaggaaactaccactcggttcctgcagaccgaagccgtgaccctgcaggacgtgagaggccgggactaccagaacgccatgcgggtgtggtccaacatccctggactgaaaagcaagcacgcacctctgacccctaaagaagaggagtacctgcaggcccaggtgcggagcagaagcaagctggacgcccctaaggtggatctgctggtgaagaattgcctcctgcccctgagagagtacttcaagtatttcagccagaatagtctgcccctgggaggcagcggcggcggcctgctgcaggagagcctgaccctggaggacgtggccgtggacttcacccaggaggagtggaggctgctggcccccgcccagaaggacctgtacagggacgtgatgctggagaacttcaggaacctggtgagcgtgggctacgtggccagcatgcccgccgccctgagcaggctggagaggggcggcaggtggatgaccgaggacgagaccaggaggggcatctgccccgagatcaagaaggacggcggcccaagcagcggcgcccctcctcccagcggcggcaggcggcccaagcagcggcgcccctcctcccagcggcggcagcccagccggctccccaacctctaccgaggagggcacctctgagtccgccacccccgagagcggccctggcacctccaccgagcccagcgagggcagcgcacccggcagccctgccggcagccccacctccacagaggagggaaccagcaccgagcccagcgaaggcagcgccccaggcaccagcaccgagcctagtgagcaggagattaaacggatcaacaagatcagaagaagacttgtgaaagacagcaacaccaagaaggccggcaagacaggccccatgaaaaccctgctggttagagtgatgacacccgatctgagagagcggctggaaaacctgagaaagaagcctgaaaatatcccccagcccatcagcaatacatctagagccaacctgaataagctgctgaccgattacaccgaaatgaagaaggcgatcctgcatgtgtactgggaagagttccagaaggaccctgtgggcctgatgagccgggtggcccagcctgccagcaagaagatcgatcagaacaagctgaaacctgagatggacgagaagggcaacctgaccaccgccggctttgcctgctctcagtgtggccagcccctgttcgtgtacaagctggagcaggtgtctgagaagggcaaggcttacaccaactacttcggacggtgcaatgtggccgagcacgaaaagctgatcctgctggcccagctgaagcccgagaaggatagcgacgaagccgtgacatatagcctgggaaagtttgggcagagggccctggatttctacagcattcatgtgaccaaggagtccacccaccccgtgaagcccctggcccagatcgccggaaacagatacgcctccggacctgtgggaaaggccctgagcgacgcatgtatgggcacaatcgcctccttcctgtctaagtaccaggacatcatcatcgaacaccagaaggtggtgaagggcaaccagaagagactggagagcctgcgggagctggccggcaaggaaaacctggaataccctagcgtgaccctgccacctcagcctcacaccaaggagggcgttgatgcctacaacgaagtgatcgcccgggtgcgaatgtgggtgaacctgaacctgtggcagaagctgaagctaagcagagatgatgccaagcctctgctgagactgaagggattcccttcctttcctctggtcgagagacaggccaacgaagtggactggtgggacatggtgtgtaacgtgaagaagctgatcaacgagaaaaaggaggatggcaaggtgttttggcagaatctggctggctacaagagacaggaagccctgagaccatacctgagcagcgaggaagatcggaagaagggaaagaaattcgctcggtaccagctgggcgacctgctgctgcacctggaaaagaagcacggcgaggactggggaaaggtgtacgacgaggcctgggagcggattgacaagaaagtggaaggcctgagcaagcacatcaagctggaagaggaacggagaagcgaggacgcccagagcaaggccgccctgaccgactggctgcgggctaaggccagcttcgtgatcgagggcctgaaggaggccgacaaggacgagttctgcagatgcgagctgaagctgcagaagtggtacggggacctgcggggaaagcccttcgccatcgaagccgagaacagcatcctggacatcagcggcttcagcaagcagtacaactgtgccttcatctggcagaaggacggcgtgaagaagctgaacctgtacctgatcatcaactacttcaagggcggcaagctgcggttcaagaagatcaaacctgaagccttcgaagccaacagattctacaccgtgatcaacaaaaagagcggcgagatcgtgcccatggaggtgaacttcaacttcgacgaccccaacctgatcatcctgcctctggcctttggcaagagacagggcagagaattcatctggaacgacctgctgtccctggaaaccggcagcctgaagctggccaacggaagagtgatcgagaagacactgtacaacagaagaacccggcaggatgagcctgccctgttcgtggccctgaccttcgagcggcgggaggtcctggactcctccaatatcaaaccaatgaacctgatcggcgtggcaagaggcgaaaacatccccgccgtgatcgccctgaccgaccccgagggctgcccactgagccggtttaaggatagcctgggaaacccaacccacatcctgagaatcggcgagagctataaggagaagcagcggaccatccaggccaagaaggaggtggagcagcggagagccggcggctacagccggaagtacgccagcaaagccaagaatctggcagacgatatggtgagaaacaccgctagagatctgctgtactacgccgtgacccaggatgccatgctgatcttcgccaacctgagccggggcttcggccggcagggcaagcggaccttcatggccgagagacagtacacacggatggaggactggctgaccgccaagctggcctacgagggcctgagcaagacctacctgtccaagacactggcccagtacacctccaagacatgcagcaactgtgggtttaccatcaccagcgccgactacgacagggtgctggagaagctgaagaagacagcaacaggctggatgaccacaattaacggcaaggagctgaaggtggagggccagattacctactacaacagatacaagagacagaacgtagtcaaggacctgtccgtcgagctggatagactgagcgaagaatctgtgaacaacgacatctcctcctggacaaagggcagaagcggagaagctctgagcctcctgaagaaaagattctcccatagacccgtgcaggagaagttcgtgtgcctgaactgcggcttcgagacacacgcagccgagcaagccgccctgaacatcgccagatcctggctgttcctgcggagccaggagtacaagaaataccagacaaacaagacaaccggcaacaccgataagagagccttcgtcgagacctggcagtccttttaccggaagaagcttaaggaggtgtggaaacctgccgtgcggtctggcggatctggcggaggctccaccagccccaagaaaaagagaaaagtctaagctgccttctgcggggcttgccttctggccatgcccttcttctctcccttgcacctgtacctcttggtctttgaataaagcctgagtaggaaggctagcaaaaaaaaaaaaaaaaaaaaaaaaaaaaaaaaaaaaaaaaaaaaaaaaaaaaaaaaaaaaaaaaaaaaaaaaaaaaaaaagcccagccggctccccaacctctaccgaggagggcacctctgagtccgccacccccgagagcggccctggcacctccaccgagcccagcgagggcagcgcacccggcagccctgccggcagccccacctccacagaggagggaaccagcaccgagcccagcgaaggcagcgccccaggcaccagcaccgagcctagtgagcaggagattaaacggatcaacaagatcagaagaagacttgtgaaagacagcaacaccaagaaggccggcaagacaggccccatgaaaaccctgctggttagagtgatgacacccgatctgagagagcggctggaaaacctgagaaagaagcctgaaaatatcccccagcccatcagcaatacatctagagccaacctgaataagctgctgaccgattacaccgaaatgaagaaggcgatcctgcatgtgtactgggaagagttccagaaggaccctgtgggcctgatgagccgggtggcccagcctgccagcaagaagatcgatcagaacaagctgaaacctgagatggacgagaagggcaacctgaccaccgccggctttgcctgctctcagtgtggccagcccctgttcgtgtacaagctggagcaggtgtctgagaagggcaaggcttacaccaactacttcggacggtgcaatgtggccgagcacgaaaagctgatcctgctggcccagctgaagcccgagaaggatagcgacgaagccgtgacatatagcctgggaaagtttgggcagagggccctggatttctacagcattcatgtgaccaaggagtccacccaccccgtgaagcccctggcccagatcgccggaaacagatacgcctccggacctgtgggaaaggccctgagcgacgcatgtatgggcacaatcgcctccttcctgtctaagtaccaggacatcatcatcgaacaccagaaggtggtgaagggcaaccagaagagactggagagcctgcgggagctggccggcaaggaaaacctggaataccctagcgtgaccctgccacctcagcctcacaccaaggagggcgttgatgcctacaacgaagtgatcgcccgggtgcgaatgtgggtgaacctgaacctgtggcagaagctgaagctaagcagagatgatgccaagcctctgctgagactgaagggattcccttcctttcctctggtcgagagacaggccaacgaagtggactggtgggacatggtgtgtaacgtgaagaagctgatcaacgagaaaaaggaggatggcaaggtgttttggcagaatctggctggctacaagagacaggaagccctgagaccatacctgagcagcgaggaagatcggaagaagggaaagaaattcgctcggtaccagctgggcgacctgctgctgcacctggaaaagaagcacggcgaggactggggaaaggtgtacgacgaggcctgggagcggattgacaagaaagtggaaggcctgagcaagcacatcaagctggaagaggaacggagaagcgaggacgcccagagcaaggccgccctgaccgactggctgcgggctaaggccagcttcgtgatcgagggcctgaaggaggccgacaaggacgagttctgcagatgcgagctgaagctgcagaagtggtacggggacctgcggggaaagcccttcgccatcgaagccgagaacagcatcctggacatcagcggcttcagcaagcagtacaactgtgccttcatctggcagaaggacggcgtgaagaagctgaacctgtacctgatcatcaactacttcaagggcggcaagctgcggttcaagaagatcaaacctgaagccttcgaagccaacagattctacaccgtgatcaacaaaaagagcggcgagatcgtgcccatggaggtgaacttcaacttcgacgaccccaacctgatcatcctgcctctggcctttggcaagagacagggcagagaattcatctggaacgacctgctgtccctggaaaccggcagcctgaagctggccaacggaagagtgatcgagaagacactgtacaacagaagaacccggcaggatgagcctgccctgttcgtggccctgaccttcgagcggcgggaggtcctggactcctccaatatcaaaccaatgaacctgatcggcgtggcaagaggcgaaaacatccccgccgtgatcgccctgaccgaccccgagggctgcccactgagccggtttaaggatagcctgggaaacccaacccacatcctgagaatcggcgagagctataaggagaagcagcggaccatccaggccaagaaggaggtggagcagcggagagccggcggctacagccggaagtacgccagcaaagccaagaatctggcagacgatatggtgagaaacaccgctagagatctgctgtactacgccgtgacccaggatgccatgctgatcttcgccaacctgagccggggcttcggccggcagggcaagcggaccttcatggccgagagacagtacacacggatggaggactggctgaccgccaagctggcctacgagggcctgagcaagacctacctgtccaagacactggcccagtacacctccaagacatgcagcaactgtgggtttaccatcaccagcgccgactacgacagggtgctggagaagctgaagaagacagcaacaggctggatgaccacaattaacggcaaggagctgaaggtggagggccagattacctactacaacagatacaagagacagaacgtagtcaaggacctgtccgtcgagctggatagactgagcgaagaatctgtgaacaacgacatctcctcctggacaaagggcagaagcggagaagctctgagcctcctgaagaaaagattctcccatagacccgtgcaggagaagttcgtgtgcctgaactgcggcttcgagacacacgcagccgagcaagccgccctgaacatcgccagatcctggctgttcctgcggagccaggagtacaagaaataccagacaaacaagacaaccggcaacaccgataagagagccttcgtcgagacctggcagtccttttaccggaagaagcttaaggaggtgtggaaacctgccgtgcggtctggcggatctggcggaggctccaccagccccaagaaaaagagaaaagtctaagctgccttctgcggggcttgccttctggccatgcccttcttctctcccttgcacctgtacctcttggtctttgaataaagcctgagtaggaaggctagcaaaaaaaaaaaaaaaaaaaaaaaaaaaaaaaaaaaaaaaaaaaaaaaaaaaaaaaaaaaaaaaaaaaaaaaaaaaaaaaa

SEQ ID NO: 9744 - RNA, 8787 nt, synthetic construct
  source 1..8787: mol_type = other RNA
aggaaataagagagaaaagaagagtaagaagaaatataagagccaccatggcccctaagaagaagcgtaaagtgagccggatgaaccacgaccaggagttcgacccccctaaggtgtaccctcccgtccccgccgagaagagaaagcccatccgggtcctgagcctgttcgatggcatcgccaccggtctgctggtgctgaaggacctgggcatccaggtggataggtacattgcctccgaggtgtgcgaggactccatcaccgtgggaatggtgcgtcatcagggcaagatcatgtacgtgggcgacgtgcggagcgtgacacagaagcatatccaggagtggggccctttcgacctggtgatcggcggcagcccttgcaatgacctgagcatcgtgaacccagcccggaagggcctgtacgagggaaccggcagactgttcttcgagttttacagactgctgcacgacgcccggcctaaggaaggcgacgaccggcccttcttttggctgttcgagaatgtggtggccatgggagtcagcgacaagcgggatattagccggttcctggagagcaaccccgtgatgatcgatgccaaggaagtgagcgccgcccaccgggccagatacttctggggcaatctgcctggcatgaacagacccctggccagcaccgtgaacgacaagctggagctgcaggagtgcctggagcacggccggatcgccaagttcagcaaggtgagaaccatcaccacccgaagcaacagcatcaaacaaggcaaggaccagcactttcctgtgttcatgaacgagaaggaggacatcctgtggtgtaccgagatggagagagtgttcgggttcccagtccactacacagatgtcagcaacatgtctagactggccagacagagactgctgggaagaagctggtccgtccctgtgatcagacacctgttcgcccctctgaaggagtacttcgcctgcgtgagcagcggcaacagcaacgccaacagccggggccccagcttctctagcggcctggtgccactgtccctgagagggagccacatgggccccatggagatctacaaaaccgtgagcgcctggaagcggcagcctgtgcgcgtgctgagcctgtttcggaatatcgataaagtcctgaaaagcctgggattcctggagagcggctctggctccggcggtggcaccctgaagtacgtggaggatgtgacaaacgtggtcagacgggatgtggagaagtggggccccttcgatctggtgtacggcagcacccaacccctgggcagctcttgtgaccggtgccctggctggtacatgtttcagttccaccggatcctgcagtacgccctgccgagacaggagtcccagcggccattcttttggattttcatggacaacttgctgctgaccgaggatgaccaggaaactaccactcggttcctgcagaccgaagccgtgaccctgcaggacgtgagaggccgggactaccagaacgccatgcgggtgtggtccaacatccctggactgaaaagcaagcacgcacctctgacccctaaagaagaggagtacctgcaggcccaggtgcggagcagaagcaagctggacgcccctaaggtggatctgctggtgaagaattgcctcctgcccctgagagagtacttcaagtatttcagccagaatagtctgcccctgggaggcagcggcggcggcatgaacaccgtgacctacgacgacgtgcacgtgaacttcacctgggaggagtggaccctgctggaccccagccagaagaacctgtacaaggacgtgatgctggagacctacaggaacctgaccgccgtgggctacagctgggaggaccacaacgtggaggagcactgccagagctacaggaggcacagcaggctggagaggagccacaccggcgagaagagcagcgtgcacacccagtgcgtgggcggcccaagcagcggcgcccctcctcccagcggcggcaggcggcccaagcagcggcgcccctcctcccagcggcggcagcccagccggctccccaacctctaccgaggagggcacctctgagtccgccacccccgagagcggccctggcacctccaccgagcccagcgagggcagcgcacccggcagccctgccggcagccccacctccacagaggagggaaccagcaccgagcccagcgaaggcagcgccccaggcaccagcaccgagcctagtgagcaggagattaaacggatcaacaagatcagaagaagacttgtgaaagacagcaacaccaagaaggccggcaagacaggccccatgaaaaccctgctggttagagtgatgacacccgatctgagagagcggctggaaaacctgagaaagaagcctgaaaatatcccccagcccatcagcaatacatctagagccaacctgaataagctgctgaccgattacaccgaaatgaagaaggcgatcctgcatgtgtactgggaagagttccagaaggaccctgtgggcctgatgagccgggtggcccagcctgccagcaagaagatcgatcagaacaagctgaaacctgagatggacgagaagggcaacctgaccaccgccggctttgcctgctctcagtgtggccagcccctgttcgtgtacaagctggagcaggtgtctgagaagggcaaggcttacaccaactacttcggacggtgcaatgtggccgagcacgaaaagctgatcctgctggcccagctgaagcccgagaaggatagcgacgaagccgtgacatatagcctgggaaagtttgggcagagggccctggatttctacagcattcatgtgaccaaggagtccacccaccccgtgaagcccctggcccagatcgccggaaacagatacgcctccggacctgtgggaaaggccctgagcgacgcatgtatgggcacaatcgcctccttcctgtctaagtaccaggacatcatcatcgaacaccagaaggtggtgaagggcaaccagaagagactggagagcctgcgggagctggccggcaaggaaaacctggaataccctagcgtgaccctgccacctcagcctcacaccaaggagggcgttgatgcctacaacgaagtgatcgcccgggtgcgaatgtgggtgaacctgaacctgtggcagaagctgaagctaagcagagatgatgccaagcctctgctgagactgaagggattcccttcctttcctctggtcgagagacaggccaacgaagtggactggtgggacatggtgtgtaacgtgaagaagctgatcaacgagaaaaaggaggatggcaaggtgttttggcagaatctggctggctacaagagacaggaagccctgagaccatacctgagcagcgaggaagatcggaagaagggaaagaaattcgctcggtaccagctgggcgacctgctgctgcacctggaaaagaagcacggcgaggactggggaaaggtgtacgacgaggcctgggagcggattgacaagaaagtggaaggcctgagcaagcacatcaagctggaagaggaacggagaagcgaggacgcccagagcaaggccgccctgaccgactggctgcgggctaaggccagcttcgtgatcgagggcctgaaggaggccgacaaggacgagttctgcagatgcgagctgaagctgcagaagtggtacggggacctgcggggaaagcccttcgccatcgaagccgagaacagcatcctggacatcagcggcttcagcaagcagtacaactgtgccttcatctggcagaaggacggcgtgaagaagctgaacctgtacctgatcatcaactacttcaagggcggcaagctgcggttcaagaagatcaaacctgaagccttcgaagccaacagattctacaccgtgatcaacaaaaagagcggcgagatcgtgcccatggaggtgaacttcaacttcgacgaccccaacctgatcatcctgcctctggcctttggcaagagacagggcagagaattcatctggaacgacctgctgtccctggaaaccggcagcctgaagctggccaacggaagagtgatcgagaagacactgtacaacagaagaacccggcaggatgagcctgccctgttcgtggccctgaccttcgagcggcgggaggtcctggactcctccaatatcaaaccaatgaacctgatcggcgtggcaagaggcgaaaacatccccgccgtgatcgccctgaccgaccccgagggctgcccactgagccggtttaaggatagcctgggaaacccaacccacatcctgagaatcggcgagagctataaggagaagcagcggaccatccaggccaagaaggaggtggagcagcggagagccggcggctacagccggaagtacgccagcaaagccaagaatctggcagacgatatggtgagaaacaccgctagagatctgctgtactacgccgtgacccaggatgccatgctgatcttcgccaacctgagccggggcttcggccggcagggcaagcggaccttcatggccgagagacagtacacacggatggaggactggctgaccgccaagctggcctacgagggcctgagcaagacctacctgtccaagacactggcccagtacacctccaagacatgcagcaactgtgggtttaccatcaccagcgccgactacgacagggtgctggagaagctgaagaagacagcaacaggctggatgaccacaattaacggcaaggagctgaaggtggagggccagattacctactacaacagatacaagagacagaacgtagtcaaggacctgtccgtcgagctggatagactgagcgaagaatctgtgaacaacgacatctcctcctggacaaagggcagaagcggagaagctctgagcctcctgaagaaaagattctcccatagacccgtgcaggagaagttcgtgtgcctgaactgcggcttcgagacacacgcagccgagcaagccgccctgaacatcgccagatcctggctgttcctgcggagccaggagtacaagaaataccagacaaacaagacaaccggcaacaccgataagagagccttcgtcgagacctggcagtccttttaccggaagaagcttaaggaggtgtggaaacctgccgtgcggtctggcggatctggcggaggctccaccagccccaagaaaaagagaaaagtctaagctgccttctgcggggcttgccttctggccatgcccttcttctctcccttgcacctgtacctcttggtctttgaataaagcctgagtaggaaggctagcaaaaaaaaaaaaaaaaaaaaaaaaaaaaaaaaaaaaaaaaaaaaaaaaaaaaaaaaaaaaaaaaaaaaaaaaaaaaaaaagcccagccggctccccaacctctaccgaggagggcacctctgagtccgccacccccgagagcggccctggcacctccaccgagcccagcgagggcagcgcacccggcagccctgccggcagccccacctccacagaggagggaaccagcaccgagcccagcgaaggcagcgccccaggcaccagcaccgagcctagtgagcaggagattaaacggatcaacaagatcagaagaagacttgtgaaagacagcaacaccaagaaggccggcaagacaggccccatgaaaaccctgctggttagagtgatgacacccgatctgagagagcggctggaaaacctgagaaagaagcctgaaaatatcccccagcccatcagcaatacatctagagccaacctgaataagctgctgaccgattacaccgaaatgaagaaggcgatcctgcatgtgtactgggaagagttccagaaggaccctgtgggcctgatgagccgggtggcccagcctgccagcaagaagatcgatcagaacaagctgaaacctgagatggacgagaagggcaacctgaccaccgccggctttgcctgctctcagtgtggccagcccctgttcgtgtacaagctggagcaggtgtctgagaagggcaaggcttacaccaactacttcggacggtgcaatgtggccgagcacgaaaagctgatcctgctggcccagctgaagcccgagaaggatagcgacgaagccgtgacatatagcctgggaaagtttgggcagagggccctggatttctacagcattcatgtgaccaaggagtccacccaccccgtgaagcccctggcccagatcgccggaaacagatacgcctccggacctgtgggaaaggccctgagcgacgcatgtatgggcacaatcgcctccttcctgtctaagtaccaggacatcatcatcgaacaccagaaggtggtgaagggcaaccagaagagactggagagcctgcgggagctggccggcaaggaaaacctggaataccctagcgtgaccctgccacctcagcctcacaccaaggagggcgttgatgcctacaacgaagtgatcgcccgggtgcgaatgtgggtgaacctgaacctgtggcagaagctgaagctaagcagagatgatgccaagcctctgctgagactgaagggattcccttcctttcctctggtcgagagacaggccaacgaagtggactggtgggacatggtgtgtaacgtgaagaagctgatcaacgagaaaaaggaggatggcaaggtgttttggcagaatctggctggctacaagagacaggaagccctgagaccatacctgagcagcgaggaagatcggaagaagggaaagaaattcgctcggtaccagctgggcgacctgctgctgcacctggaaaagaagcacggcgaggactggggaaaggtgtacgacgaggcctgggagcggattgacaagaaagtggaaggcctgagcaagcacatcaagctggaagaggaacggagaagcgaggacgcccagagcaaggccgccctgaccgactggctgcgggctaaggccagcttcgtgatcgagggcctgaaggaggccgacaaggacgagttctgcagatgcgagctgaagctgcagaagtggtacggggacctgcggggaaagcccttcgccatcgaagccgagaacagcatcctggacatcagcggcttcagcaagcagtacaactgtgccttcatctggcagaaggacggcgtgaagaagctgaacctgtacctgatcatcaactacttcaagggcggcaagctgcggttcaagaagatcaaacctgaagccttcgaagccaacagattctacaccgtgatcaacaaaaagagcggcgagatcgtgcccatggaggtgaacttcaacttcgacgaccccaacctgatcatcctgcctctggcctttggcaagagacagggcagagaattcatctggaacgacctgctgtccctggaaaccggcagcctgaagctggccaacggaagagtgatcgagaagacactgtacaacagaagaacccggcaggatgagcctgccctgttcgtggccctgaccttcgagcggcgggaggtcctggactcctccaatatcaaaccaatgaacctgatcggcgtggcaagaggcgaaaacatccccgccgtgatcgccctgaccgaccccgagggctgcccactgagccggtttaaggatagcctgggaaacccaacccacatcctgagaatcggcgagagctataaggagaagcagcggaccatccaggccaagaaggaggtggagcagcggagagccggcggctacagccggaagtacgccagcaaagccaagaatctggcagacgatatggtgagaaacaccgctagagatctgctgtactacgccgtgacccaggatgccatgctgatcttcgccaacctgagccggggcttcggccggcagggcaagcggaccttcatggccgagagacagtacacacggatggaggactggctgaccgccaagctggcctacgagggcctgagcaagacctacctgtccaagacactggcccagtacacctccaagacatgcagcaactgtgggtttaccatcaccagcgccgactacgacagggtgctggagaagctgaagaagacagcaacaggctggatgaccacaattaacggcaaggagctgaaggtggagggccagattacctactacaacagatacaagagacagaacgtagtcaaggacctgtccgtcgagctggatagactgagcgaagaatctgtgaacaacgacatctcctcctggacaaagggcagaagcggagaagctctgagcctcctgaagaaaagattctcccatagacccgtgcaggagaagttcgtgtgcctgaactgcggcttcgagacacacgcagccgagcaagccgccctgaacatcgccagatcctggctgttcctgcggagccaggagtacaagaaataccagacaaacaagacaaccggcaacaccgataagagagccttcgtcgagacctggcagtccttttaccggaagaagcttaaggaggtgtggaaacctgccgtgcggtctggcggatctggcggaggctccaccagccccaagaaaaagagaaaagtctaagctgccttctgcggggcttgccttctggccatgcccttcttctctcccttgcacctgtacctcttggtctttgaataaagcctgagtaggaaggctagcaaaaaaaaaaaaaaaaaaaaaaaaaaaaaaaaaaaaaaaaaaaaaaaaaaaaaaaaaaaaaaaaaaaaaaaaaaaaaaaa

SEQ ID NO: 9745 - RNA, 8787 nt, synthetic construct
  source 1..8787: mol_type = other RNA
aggaaataagagagaaaagaagagtaagaagaaatataagagccaccatggcccctaagaagaagcgtaaagtgagccggatgaaccacgaccaggagttcgacccccctaaggtgtaccctcccgtccccgccgagaagagaaagcccatccgggtcctgagcctgttcgatggcatcgccaccggtctgctggtgctgaaggacctgggcatccaggtggataggtacattgcctccgaggtgtgcgaggactccatcaccgtgggaatggtgcgtcatcagggcaagatcatgtacgtgggcgacgtgcggagcgtgacacagaagcatatccaggagtggggccctttcgacctggtgatcggcggcagcccttgcaatgacctgagcatcgtgaacccagcccggaagggcctgtacgagggaaccggcagactgttcttcgagttttacagactgctgcacgacgcccggcctaaggaaggcgacgaccggcccttcttttggctgttcgagaatgtggtggccatgggagtcagcgacaagcgggatattagccggttcctggagagcaaccccgtgatgatcgatgccaaggaagtgagcgccgcccaccgggccagatacttctggggcaatctgcctggcatgaacagacccctggccagcaccgtgaacgacaagctggagctgcaggagtgcctggagcacggccggatcgccaagttcagcaaggtgagaaccatcaccacccgaagcaacagcatcaaacaaggcaaggaccagcactttcctgtgttcatgaacgagaaggaggacatcctgtggtgtaccgagatggagagagtgttcgggttcccagtccactacacagatgtcagcaacatgtctagactggccagacagagactgctgggaagaagctggtccgtccctgtgatcagacacctgttcgcccctctgaaggagtacttcgcctgcgtgagcagcggcaacagcaacgccaacagccggggccccagcttctctagcggcctggtgccactgtccctgagagggagccacatgggccccatggagatctacaaaaccgtgagcgcctggaagcggcagcctgtgcgcgtgctgagcctgtttcggaatatcgataaagtcctgaaaagcctgggattcctggagagcggctctggctccggcggtggcaccctgaagtacgtggaggatgtgacaaacgtggtcagacgggatgtggagaagtggggccccttcgatctggtgtacggcagcacccaacccctgggcagctcttgtgaccggtgccctggctggtacatgtttcagttccaccggatcctgcagtacgccctgccgagacaggagtcccagcggccattcttttggattttcatggacaacttgctgctgaccgaggatgaccaggaaactaccactcggttcctgcagaccgaagccgtgaccctgcaggacgtgagaggccgggactaccagaacgccatgcgggtgtggtccaacatccctggactgaaaagcaagcacgcacctctgacccctaaagaagaggagtacctgcaggcccaggtgcggagcagaagcaagctggacgcccctaaggtggatctgctggtgaagaattgcctcctgcccctgagagagtacttcaagtatttcagccagaatagtctgcccctgggaggcagcggcggcggcgccagggcccccgtgagcttcgaggaggtggccgtgtacttcagccccgaggagtggcagaccctgcagggctggcagaaggagatgtacaggggcgtgatgagggagaactacgagatcatgctgagcctgggctaccagttcagcaagcccgagatcctgctgatgatggagaggggcgaggagccctgcgtggaggactgccagaggaggatccccgtgaccttcagggagaagcacctgggcggcccaagcagcggcgcccctcctcccagcggcggcaggcggcccaagcagcggcgcccctcctcccagcggcggcagcccagccggctccccaacctctaccgaggagggcacctctgagtccgccacccccgagagcggccctggcacctccaccgagcccagcgagggcagcgcacccggcagccctgccggcagccccacctccacagaggagggaaccagcaccgagcccagcgaaggcagcgccccaggcaccagcaccgagcctagtgagcaggagattaaacggatcaacaagatcagaagaagacttgtgaaagacagcaacaccaagaaggccggcaagacaggccccatgaaaaccctgctggttagagtgatgacacccgatctgagagagcggctggaaaacctgagaaagaagcctgaaaatatcccccagcccatcagcaatacatctagagccaacctgaataagctgctgaccgattacaccgaaatgaagaaggcgatcctgcatgtgtactgggaagagttccagaaggaccctgtgggcctgatgagccgggtggcccagcctgccagcaagaagatcgatcagaacaagctgaaacctgagatggacgagaagggcaacctgaccaccgccggctttgcctgctctcagtgtggccagcccctgttcgtgtacaagctggagcaggtgtctgagaagggcaaggcttacaccaactacttcggacggtgcaatgtggccgagcacgaaaagctgatcctgctggcccagctgaagcccgagaaggatagcgacgaagccgtgacatatagcctgggaaagtttgggcagagggccctggatttctacagcattcatgtgaccaaggagtccacccaccccgtgaagcccctggcccagatcgccggaaacagatacgcctccggacctgtgggaaaggccctgagcgacgcatgtatgggcacaatcgcctccttcctgtctaagtaccaggacatcatcatcgaacaccagaaggtggtgaagggcaaccagaagagactggagagcctgcgggagctggccggcaaggaaaacctggaataccctagcgtgaccctgccacctcagcctcacaccaaggagggcgttgatgcctacaacgaagtgatcgcccgggtgcgaatgtgggtgaacctgaacctgtggcagaagctgaagctaagcagagatgatgccaagcctctgctgagactgaagggattcccttcctttcctctggtcgagagacaggccaacgaagtggactggtgggacatggtgtgtaacgtgaagaagctgatcaacgagaaaaaggaggatggcaaggtgttttggcagaatctggctggctacaagagacaggaagccctgagaccatacctgagcagcgaggaagatcggaagaagggaaagaaattcgctcggtaccagctgggcgacctgctgctgcacctggaaaagaagcacggcgaggactggggaaaggtgtacgacgaggcctgggagcggattgacaagaaagtggaaggcctgagcaagcacatcaagctggaagaggaacggagaagcgaggacgcccagagcaaggccgccctgaccgactggctgcgggctaaggccagcttcgtgatcgagggcctgaaggaggccgacaaggacgagttctgcagatgcgagctgaagctgcagaagtggtacggggacctgcggggaaagcccttcgccatcgaagccgagaacagcatcctggacatcagcggcttcagcaagcagtacaactgtgccttcatctggcagaaggacggcgtgaagaagctgaacctgtacctgatcatcaactacttcaagggcggcaagctgcggttcaagaagatcaaacctgaagccttcgaagccaacagattctacaccgtgatcaacaaaaagagcggcgagatcgtgcccatggaggtgaacttcaacttcgacgaccccaacctgatcatcctgcctctggcctttggcaagagacagggcagagaattcatctggaacgacctgctgtccctggaaaccggcagcctgaagctggccaacggaagagtgatcgagaagacactgtacaacagaagaacccggcaggatgagcctgccctgttcgtggccctgaccttcgagcggcgggaggtcctggactcctccaatatcaaaccaatgaacctgatcggcgtggcaagaggcgaaaacatccccgccgtgatcgccctgaccgaccccgagggctgcccactgagccggtttaaggatagcctgggaaacccaacccacatcctgagaatcggcgagagctataaggagaagcagcggaccatccaggccaagaaggaggtggagcagcggagagccggcggctacagccggaagtacgccagcaaagccaagaatctggcagacgatatggtgagaaacaccgctagagatctgctgtactacgccgtgacccaggatgccatgctgatcttcgccaacctgagccggggcttcggccggcagggcaagcggaccttcatggccgagagacagtacacacggatggaggactggctgaccgccaagctggcctacgagggcctgagcaagacctacctgtccaagacactggcccagtacacctccaagacatgcagcaactgtgggtttaccatcaccagcgccgactacgacagggtgctggagaagctgaagaagacagcaacaggctggatgaccacaattaacggcaaggagctgaaggtggagggccagattacctactacaacagatacaagagacagaacgtagtcaaggacctgtccgtcgagctggatagactgagcgaagaatctgtgaacaacgacatctcctcctggacaaagggcagaagcggagaagctctgagcctcctgaagaaaagattctcccatagacccgtgcaggagaagttcgtgtgcctgaactgcggcttcgagacacacgcagccgagcaagccgccctgaacatcgccagatcctggctgttcctgcggagccaggagtacaagaaataccagacaaacaagacaaccggcaacaccgataagagagccttcgtcgagacctggcagtccttttaccggaagaagcttaaggaggtgtggaaacctgccgtgcggtctggcggatctggcggaggctccaccagccccaagaaaaagagaaaagtctaagctgccttctgcggggcttgccttctggccatgcccttcttctctcccttgcacctgtacctcttggtctttgaataaagcctgagtaggaaggctagcaaaaaaaaaaaaaaaaaaaaaaaaaaaaaaaaaaaaaaaaaaaaaaaaaaaaaaaaaaaaaaaaaaaaaaaaaaaaaaaagcccagccggctccccaacctctaccgaggagggcacctctgagtccgccacccccgagagcggccctggcacctccaccgagcccagcgagggcagcgcacccggcagccctgccggcagccccacctccacagaggagggaaccagcaccgagcccagcgaaggcagcgccccaggcaccagcaccgagcctagtgagcaggagattaaacggatcaacaagatcagaagaagacttgtgaaagacagcaacaccaagaaggccggcaagacaggccccatgaaaaccctgctggttagagtgatgacacccgatctgagagagcggctggaaaacctgagaaagaagcctgaaaatatcccccagcccatcagcaatacatctagagccaacctgaataagctgctgaccgattacaccgaaatgaagaaggcgatcctgcatgtgtactgggaagagttccagaaggaccctgtgggcctgatgagccgggtggcccagcctgccagcaagaagatcgatcagaacaagctgaaacctgagatggacgagaagggcaacctgaccaccgccggctttgcctgctctcagtgtggccagcccctgttcgtgtacaagctggagcaggtgtctgagaagggcaaggcttacaccaactacttcggacggtgcaatgtggccgagcacgaaaagctgatcctgctggcccagctgaagcccgagaaggatagcgacgaagccgtgacatatagcctgggaaagtttgggcagagggccctggatttctacagcattcatgtgaccaaggagtccacccaccccgtgaagcccctggcccagatcgccggaaacagatacgcctccggacctgtgggaaaggccctgagcgacgcatgtatgggcacaatcgcctccttcctgtctaagtaccaggacatcatcatcgaacaccagaaggtggtgaagggcaaccagaagagactggagagcctgcgggagctggccggcaaggaaaacctggaataccctagcgtgaccctgccacctcagcctcacaccaaggagggcgttgatgcctacaacgaagtgatcgcccgggtgcgaatgtgggtgaacctgaacctgtggcagaagctgaagctaagcagagatgatgccaagcctctgctgagactgaagggattcccttcctttcctctggtcgagagacaggccaacgaagtggactggtgggacatggtgtgtaacgtgaagaagctgatcaacgagaaaaaggaggatggcaaggtgttttggcagaatctggctggctacaagagacaggaagccctgagaccatacctgagcagcgaggaagatcggaagaagggaaagaaattcgctcggtaccagctgggcgacctgctgctgcacctggaaaagaagcacggcgaggactggggaaaggtgtacgacgaggcctgggagcggattgacaagaaagtggaaggcctgagcaagcacatcaagctggaagaggaacggagaagcgaggacgcccagagcaaggccgccctgaccgactggctgcgggctaaggccagcttcgtgatcgagggcctgaaggaggccgacaaggacgagttctgcagatgcgagctgaagctgcagaagtggtacggggacctgcggggaaagcccttcgccatcgaagccgagaacagcatcctggacatcagcggcttcagcaagcagtacaactgtgccttcatctggcagaaggacggcgtgaagaagctgaacctgtacctgatcatcaactacttcaagggcggcaagctgcggttcaagaagatcaaacctgaagccttcgaagccaacagattctacaccgtgatcaacaaaaagagcggcgagatcgtgcccatggaggtgaacttcaacttcgacgaccccaacctgatcatcctgcctctggcctttggcaagagacagggcagagaattcatctggaacgacctgctgtccctggaaaccggcagcctgaagctggccaacggaagagtgatcgagaagacactgtacaacagaagaacccggcaggatgagcctgccctgttcgtggccctgaccttcgagcggcgggaggtcctggactcctccaatatcaaaccaatgaacctgatcggcgtggcaagaggcgaaaacatccccgccgtgatcgccctgaccgaccccgagggctgcccactgagccggtttaaggatagcctgggaaacccaacccacatcctgagaatcggcgagagctataaggagaagcagcggaccatccaggccaagaaggaggtggagcagcggagagccggcggctacagccggaagtacgccagcaaagccaagaatctggcagacgatatggtgagaaacaccgctagagatctgctgtactacgccgtgacccaggatgccatgctgatcttcgccaacctgagccggggcttcggccggcagggcaagcggaccttcatggccgagagacagtacacacggatggaggactggctgaccgccaagctggcctacgagggcctgagcaagacctacctgtccaagacactggcccagtacacctccaagacatgcagcaactgtgggtttaccatcaccagcgccgactacgacagggtgctggagaagctgaagaagacagcaacaggctggatgaccacaattaacggcaaggagctgaaggtggagggccagattacctactacaacagatacaagagacagaacgtagtcaaggacctgtccgtcgagctggatagactgagcgaagaatctgtgaacaacgacatctcctcctggacaaagggcagaagcggagaagctctgagcctcctgaagaaaagattctcccatagacccgtgcaggagaagttcgtgtgcctgaactgcggcttcgagacacacgcagccgagcaagccgccctgaacatcgccagatcctggctgttcctgcggagccaggagtacaagaaataccagacaaacaagacaaccggcaacaccgataagagagccttcgtcgagacctggcagtccttttaccggaagaagcttaaggaggtgtggaaacctgccgtgcggtctggcggatctggcggaggctccaccagccccaagaaaaagagaaaagtctaagctgccttctgcggggcttgccttctggccatgcccttcttctctcccttgcacctgtacctcttggtctttgaataaagcctgagtaggaaggctagcaaaaaaaaaaaaaaaaaaaaaaaaaaaaaaaaaaaaaaaaaaaaaaaaaaaaaaaaaaaaaaaaaaaaaaaaaaaaaaaa

SEQ ID NO: 9746 - RNA, 8787 nt, synthetic construct
  source 1..8787: mol_type = other RNA
aggaaataagagagaaaagaagagtaagaagaaatataagagccaccatggcccctaagaagaagcgtaaagtgagccggatgaaccacgaccaggagttcgacccccctaaggtgtaccctcccgtccccgccgagaagagaaagcccatccgggtcctgagcctgttcgatggcatcgccaccggtctgctggtgctgaaggacctgggcatccaggtggataggtacattgcctccgaggtgtgcgaggactccatcaccgtgggaatggtgcgtcatcagggcaagatcatgtacgtgggcgacgtgcggagcgtgacacagaagcatatccaggagtggggccctttcgacctggtgatcggcggcagcccttgcaatgacctgagcatcgtgaacccagcccggaagggcctgtacgagggaaccggcagactgttcttcgagttttacagactgctgcacgacgcccggcctaaggaaggcgacgaccggcccttcttttggctgttcgagaatgtggtggccatgggagtcagcgacaagcgggatattagccggttcctggagagcaaccccgtgatgatcgatgccaaggaagtgagcgccgcccaccgggccagatacttctggggcaatctgcctggcatgaacagacccctggccagcaccgtgaacgacaagctggagctgcaggagtgcctggagcacggccggatcgccaagttcagcaaggtgagaaccatcaccacccgaagcaacagcatcaaacaaggcaaggaccagcactttcctgtgttcatgaacgagaaggaggacatcctgtggtgtaccgagatggagagagtgttcgggttcccagtccactacacagatgtcagcaacatgtctagactggccagacagagactgctgggaagaagctggtccgtccctgtgatcagacacctgttcgcccctctgaaggagtacttcgcctgcgtgagcagcggcaacagcaacgccaacagccggggccccagcttctctagcggcctggtgccactgtccctgagagggagccacatgggccccatggagatctacaaaaccgtgagcgcctggaagcggcagcctgtgcgcgtgctgagcctgtttcggaatatcgataaagtcctgaaaagcctgggattcctggagagcggctctggctccggcggtggcaccctgaagtacgtggaggatgtgacaaacgtggtcagacgggatgtggagaagtggggccccttcgatctggtgtacggcagcacccaacccctgggcagctcttgtgaccggtgccctggctggtacatgtttcagttccaccggatcctgcagtacgccctgccgagacaggagtcccagcggccattcttttggattttcatggacaacttgctgctgaccgaggatgaccaggaaactaccactcggttcctgcagaccgaagccgtgaccctgcaggacgtgagaggccgggactaccagaacgccatgcgggtgtggtccaacatccctggactgaaaagcaagcacgcacctctgacccctaaagaagaggagtacctgcaggcccaggtgcggagcagaagcaagctggacgcccctaaggtggatctgctggtgaagaattgcctcctgcccctgagagagtacttcaagtatttcagccagaatagtctgcccctgggaggcagcggcggcggcatggagaccctgaccttcagggacgtggccatcgagttcagcctggaggagtggcagtgcctggacatcgcccagcaggacctgtacaggaaggtgatgctggagaactacaggaacctggccttcctgggcatcgccctgaccaagcccgacctgatcacctgcctggagcagaggaaggtgccctggaacatgaagaggcacgagatggccgacgagccccccgtgctgtgcagcaacttcggcggcccaagcagcggcgcccctcctcccagcggcggcaggcggcccaagcagcggcgcccctcctcccagcggcggcagcccagccggctccccaacctctaccgaggagggcacctctgagtccgccacccccgagagcggccctggcacctccaccgagcccagcgagggcagcgcacccggcagccctgccggcagccccacctccacagaggagggaaccagcaccgagcccagcgaaggcagcgccccaggcaccagcaccgagcctagtgagcaggagattaaacggatcaacaagatcagaagaagacttgtgaaagacagcaacaccaagaaggccggcaagacaggccccatgaaaaccctgctggttagagtgatgacacccgatctgagagagcggctggaaaacctgagaaagaagcctgaaaatatcccccagcccatcagcaatacatctagagccaacctgaataagctgctgaccgattacaccgaaatgaagaaggcgatcctgcatgtgtactgggaagagttccagaaggaccctgtgggcctgatgagccgggtggcccagcctgccagcaagaagatcgatcagaacaagctgaaacctgagatggacgagaagggcaacctgaccaccgccggctttgcctgctctcagtgtggccagcccctgttcgtgtacaagctggagcaggtgtctgagaagggcaaggcttacaccaactacttcggacggtgcaatgtggccgagcacgaaaagctgatcctgctggcccagctgaagcccgagaaggatagcgacgaagccgtgacatatagcctgggaaagtttgggcagagggccctggatttctacagcattcatgtgaccaaggagtccacccaccccgtgaagcccctggcccagatcgccggaaacagatacgcctccggacctgtgggaaaggccctgagcgacgcatgtatgggcacaatcgcctccttcctgtctaagtaccaggacatcatcatcgaacaccagaaggtggtgaagggcaaccagaagagactggagagcctgcgggagctggccggcaaggaaaacctggaataccctagcgtgaccctgccacctcagcctcacaccaaggagggcgttgatgcctacaacgaagtgatcgcccgggtgcgaatgtgggtgaacctgaacctgtggcagaagctgaagctaagcagagatgatgccaagcctctgctgagactgaagggattcccttcctttcctctggtcgagagacaggccaacgaagtggactggtgggacatggtgtgtaacgtgaagaagctgatcaacgagaaaaaggaggatggcaaggtgttttggcagaatctggctggctacaagagacaggaagccctgagaccatacctgagcagcgaggaagatcggaagaagggaaagaaattcgctcggtaccagctgggcgacctgctgctgcacctggaaaagaagcacggcgaggactggggaaaggtgtacgacgaggcctgggagcggattgacaagaaagtggaaggcctgagcaagcacatcaagctggaagaggaacggagaagcgaggacgcccagagcaaggccgccctgaccgactggctgcgggctaaggccagcttcgtgatcgagggcctgaaggaggccgacaaggacgagttctgcagatgcgagctgaagctgcagaagtggtacggggacctgcggggaaagcccttcgccatcgaagccgagaacagcatcctggacatcagcggcttcagcaagcagtacaactgtgccttcatctggcagaaggacggcgtgaagaagctgaacctgtacctgatcatcaactacttcaagggcggcaagctgcggttcaagaagatcaaacctgaagccttcgaagccaacagattctacaccgtgatcaacaaaaagagcggcgagatcgtgcccatggaggtgaacttcaacttcgacgaccccaacctgatcatcctgcctctggcctttggcaagagacagggcagagaattcatctggaacgacctgctgtccctggaaaccggcagcctgaagctggccaacggaagagtgatcgagaagacactgtacaacagaagaacccggcaggatgagcctgccctgttcgtggccctgaccttcgagcggcgggaggtcctggactcctccaatatcaaaccaatgaacctgatcggcgtggcaagaggcgaaaacatccccgccgtgatcgccctgaccgaccccgagggctgcccactgagccggtttaaggatagcctgggaaacccaacccacatcctgagaatcggcgagagctataaggagaagcagcggaccatccaggccaagaaggaggtggagcagcggagagccggcggctacagccggaagtacgccagcaaagccaagaatctggcagacgatatggtgagaaacaccgctagagatctgctgtactacgccgtgacccaggatgccatgctgatcttcgccaacctgagccggggcttcggccggcagggcaagcggaccttcatggccgagagacagtacacacggatggaggactggctgaccgccaagctggcctacgagggcctgagcaagacctacctgtccaagacactggcccagtacacctccaagacatgcagcaactgtgggtttaccatcaccagcgccgactacgacagggtgctggagaagctgaagaagacagcaacaggctggatgaccacaattaacggcaaggagctgaaggtggagggccagattacctactacaacagatacaagagacagaacgtagtcaaggacctgtccgtcgagctggatagactgagcgaagaatctgtgaacaacgacatctcctcctggacaaagggcagaagcggagaagctctgagcctcctgaagaaaagattctcccatagacccgtgcaggagaagttcgtgtgcctgaactgcggcttcgagacacacgcagccgagcaagccgccctgaacatcgccagatcctggctgttcctgcggagccaggagtacaagaaataccagacaaacaagacaaccggcaacaccgataagagagccttcgtcgagacctggcagtccttttaccggaagaagcttaaggaggtgtggaaacctgccgtgcggtctggcggatctggcggaggctccaccagccccaagaaaaagagaaaagtctaagctgccttctgcggggcttgccttctggccatgcccttcttctctcccttgcacctgtacctcttggtctttgaataaagcctgagtaggaaggctagcaaaaaaaaaaaaaaaaaaaaaaaaaaaaaaaaaaaaaaaaaaaaaaaaaaaaaaaaaaaaaaaaaaaaaaaaaaaaaaaagcccagccggctccccaacctctaccgaggagggcacctctgagtccgccacccccgagagcggccctggcacctccaccgagcccagcgagggcagcgcacccggcagccctgccggcagccccacctccacagaggagggaaccagcaccgagcccagcgaaggcagcgccccaggcaccagcaccgagcctagtgagcaggagattaaacggatcaacaagatcagaagaagacttgtgaaagacagcaacaccaagaaggccggcaagacaggccccatgaaaaccctgctggttagagtgatgacacccgatctgagagagcggctggaaaacctgagaaagaagcctgaaaatatcccccagcccatcagcaatacatctagagccaacctgaataagctgctgaccgattacaccgaaatgaagaaggcgatcctgcatgtgtactgggaagagttccagaaggaccctgtgggcctgatgagccgggtggcccagcctgccagcaagaagatcgatcagaacaagctgaaacctgagatggacgagaagggcaacctgaccaccgccggctttgcctgctctcagtgtggccagcccctgttcgtgtacaagctggagcaggtgtctgagaagggcaaggcttacaccaactacttcggacggtgcaatgtggccgagcacgaaaagctgatcctgctggcccagctgaagcccgagaaggatagcgacgaagccgtgacatatagcctgggaaagtttgggcagagggccctggatttctacagcattcatgtgaccaaggagtccacccaccccgtgaagcccctggcccagatcgccggaaacagatacgcctccggacctgtgggaaaggccctgagcgacgcatgtatgggcacaatcgcctccttcctgtctaagtaccaggacatcatcatcgaacaccagaaggtggtgaagggcaaccagaagagactggagagcctgcgggagctggccggcaaggaaaacctggaataccctagcgtgaccctgccacctcagcctcacaccaaggagggcgttgatgcctacaacgaagtgatcgcccgggtgcgaatgtgggtgaacctgaacctgtggcagaagctgaagctaagcagagatgatgccaagcctctgctgagactgaagggattcccttcctttcctctggtcgagagacaggccaacgaagtggactggtgggacatggtgtgtaacgtgaagaagctgatcaacgagaaaaaggaggatggcaaggtgttttggcagaatctggctggctacaagagacaggaagccctgagaccatacctgagcagcgaggaagatcggaagaagggaaagaaattcgctcggtaccagctgggcgacctgctgctgcacctggaaaagaagcacggcgaggactggggaaaggtgtacgacgaggcctgggagcggattgacaagaaagtggaaggcctgagcaagcacatcaagctggaagaggaacggagaagcgaggacgcccagagcaaggccgccctgaccgactggctgcgggctaaggccagcttcgtgatcgagggcctgaaggaggccgacaaggacgagttctgcagatgcgagctgaagctgcagaagtggtacggggacctgcggggaaagcccttcgccatcgaagccgagaacagcatcctggacatcagcggcttcagcaagcagtacaactgtgccttcatctggcagaaggacggcgtgaagaagctgaacctgtacctgatcatcaactacttcaagggcggcaagctgcggttcaagaagatcaaacctgaagccttcgaagccaacagattctacaccgtgatcaacaaaaagagcggcgagatcgtgcccatggaggtgaacttcaacttcgacgaccccaacctgatcatcctgcctctggcctttggcaagagacagggcagagaattcatctggaacgacctgctgtccctggaaaccggcagcctgaagctggccaacggaagagtgatcgagaagacactgtacaacagaagaacccggcaggatgagcctgccctgttcgtggccctgaccttcgagcggcgggaggtcctggactcctccaatatcaaaccaatgaacctgatcggcgtggcaagaggcgaaaacatccccgccgtgatcgccctgaccgaccccgagggctgcccactgagccggtttaaggatagcctgggaaacccaacccacatcctgagaatcggcgagagctataaggagaagcagcggaccatccaggccaagaaggaggtggagcagcggagagccggcggctacagccggaagtacgccagcaaagccaagaatctggcagacgatatggtgagaaacaccgctagagatctgctgtactacgccgtgacccaggatgccatgctgatcttcgccaacctgagccggggcttcggccggcagggcaagcggaccttcatggccgagagacagtacacacggatggaggactggctgaccgccaagctggcctacgagggcctgagcaagacctacctgtccaagacactggcccagtacacctccaagacatgcagcaactgtgggtttaccatcaccagcgccgactacgacagggtgctggagaagctgaagaagacagcaacaggctggatgaccacaattaacggcaaggagctgaaggtggagggccagattacctactacaacagatacaagagacagaacgtagtcaaggacctgtccgtcgagctggatagactgagcgaagaatctgtgaacaacgacatctcctcctggacaaagggcagaagcggagaagctctgagcctcctgaagaaaagattctcccatagacccgtgcaggagaagttcgtgtgcctgaactgcggcttcgagacacacgcagccgagcaagccgccctgaacatcgccagatcctggctgttcctgcggagccaggagtacaagaaataccagacaaacaagacaaccggcaacaccgataagagagccttcgtcgagacctggcagtccttttaccggaagaagcttaaggaggtgtggaaacctgccgtgcggtctggcggatctggcggaggctccaccagccccaagaaaaagagaaaagtctaagctgccttctgcggggcttgccttctggccatgcccttcttctctcccttgcacctgtacctcttggtctttgaataaagcctgagtaggaaggctagcaaaaaaaaaaaaaaaaaaaaaaaaaaaaaaaaaaaaaaaaaaaaaaaaaaaaaaaaaaaaaaaaaaaaaaaaaaaaaaaa

SEQ ID NO: 9747 - RNA, 8787 nt, synthetic construct
  source 1..8787: mol_type = other RNA
aggaaataagagagaaaagaagagtaagaagaaatataagagccaccatggcccctaagaagaagcgtaaagtgagccggatgaaccacgaccaggagttcgacccccctaaggtgtaccctcccgtccccgccgagaagagaaagcccatccgggtcctgagcctgttcgatggcatcgccaccggtctgctggtgctgaaggacctgggcatccaggtggataggtacattgcctccgaggtgtgcgaggactccatcaccgtgggaatggtgcgtcatcagggcaagatcatgtacgtgggcgacgtgcggagcgtgacacagaagcatatccaggagtggggccctttcgacctggtgatcggcggcagcccttgcaatgacctgagcatcgtgaacccagcccggaagggcctgtacgagggaaccggcagactgttcttcgagttttacagactgctgcacgacgcccggcctaaggaaggcgacgaccggcccttcttttggctgttcgagaatgtggtggccatgggagtcagcgacaagcgggatattagccggttcctggagagcaaccccgtgatgatcgatgccaaggaagtgagcgccgcccaccgggccagatacttctggggcaatctgcctggcatgaacagacccctggccagcaccgtgaacgacaagctggagctgcaggagtgcctggagcacggccggatcgccaagttcagcaaggtgagaaccatcaccacccgaagcaacagcatcaaacaaggcaaggaccagcactttcctgtgttcatgaacgagaaggaggacatcctgtggtgtaccgagatggagagagtgttcgggttcccagtccactacacagatgtcagcaacatgtctagactggccagacagagactgctgggaagaagctggtccgtccctgtgatcagacacctgttcgcccctctgaaggagtacttcgcctgcgtgagcagcggcaacagcaacgccaacagccggggccccagcttctctagcggcctggtgccactgtccctgagagggagccacatgggccccatggagatctacaaaaccgtgagcgcctggaagcggcagcctgtgcgcgtgctgagcctgtttcggaatatcgataaagtcctgaaaagcctgggattcctggagagcggctctggctccggcggtggcaccctgaagtacgtggaggatgtgacaaacgtggtcagacgggatgtggagaagtggggccccttcgatctggtgtacggcagcacccaacccctgggcagctcttgtgaccggtgccctggctggtacatgtttcagttccaccggatcctgcagtacgccctgccgagacaggagtcccagcggccattcttttggattttcatggacaacttgctgctgaccgaggatgaccaggaaactaccactcggttcctgcagaccgaagccgtgaccctgcaggacgtgagaggccgggactaccagaacgccatgcgggtgtggtccaacatccctggactgaaaagcaagcacgcacctctgacccctaaagaagaggagtacctgcaggcccaggtgcggagcagaagcaagctggacgcccctaaggtggatctgctggtgaagaattgcctcctgcccctgagagagtacttcaagtatttcagccagaatagtctgcccctgggaggcagcggcggcggcgaggagctgcccgtggtgttcgaggacgtggccgtgtacttcaccagggaggagtggggcgtgctggacaagaggcagaaggagctgtacagggacgtgatgaggatgaactacgagctgctggccagcctgggccccgccgccgccaagcccgacctgatcagcaagctggagaggagggccgccccctggatcaaggaccccaacggccccaagtggggcaagggcagggtgcccgcctgcggcggcccaagcagcggcgcccctcctcccagcggcggcaggcggcccaagcagcggcgcccctcctcccagcggcggcagcccagccggctccccaacctctaccgaggagggcacctctgagtccgccacccccgagagcggccctggcacctccaccgagcccagcgagggcagcgcacccggcagccctgccggcagccccacctccacagaggagggaaccagcaccgagcccagcgaaggcagcgccccaggcaccagcaccgagcctagtgagcaggagattaaacggatcaacaagatcagaagaagacttgtgaaagacagcaacaccaagaaggccggcaagacaggccccatgaaaaccctgctggttagagtgatgacacccgatctgagagagcggctggaaaacctgagaaagaagcctgaaaatatcccccagcccatcagcaatacatctagagccaacctgaataagctgctgaccgattacaccgaaatgaagaaggcgatcctgcatgtgtactgggaagagttccagaaggaccctgtgggcctgatgagccgggtggcccagcctgccagcaagaagatcgatcagaacaagctgaaacctgagatggacgagaagggcaacctgaccaccgccggctttgcctgctctcagtgtggccagcccctgttcgtgtacaagctggagcaggtgtctgagaagggcaaggcttacaccaactacttcggacggtgcaatgtggccgagcacgaaaagctgatcctgctggcccagctgaagcccgagaaggatagcgacgaagccgtgacatatagcctgggaaagtttgggcagagggccctggatttctacagcattcatgtgaccaaggagtccacccaccccgtgaagcccctggcccagatcgccggaaacagatacgcctccggacctgtgggaaaggccctgagcgacgcatgtatgggcacaatcgcctccttcctgtctaagtaccaggacatcatcatcgaacaccagaaggtggtgaagggcaaccagaagagactggagagcctgcgggagctggccggcaaggaaaacctggaataccctagcgtgaccctgccacctcagcctcacaccaaggagggcgttgatgcctacaacgaagtgatcgcccgggtgcgaatgtgggtgaacctgaacctgtggcagaagctgaagctaagcagagatgatgccaagcctctgctgagactgaagggattcccttcctttcctctggtcgagagacaggccaacgaagtggactggtgggacatggtgtgtaacgtgaagaagctgatcaacgagaaaaaggaggatggcaaggtgttttggcagaatctggctggctacaagagacaggaagccctgagaccatacctgagcagcgaggaagatcggaagaagggaaagaaattcgctcggtaccagctgggcgacctgctgctgcacctggaaaagaagcacggcgaggactggggaaaggtgtacgacgaggcctgggagcggattgacaagaaagtggaaggcctgagcaagcacatcaagctggaagaggaacggagaagcgaggacgcccagagcaaggccgccctgaccgactggctgcgggctaaggccagcttcgtgatcgagggcctgaaggaggccgacaaggacgagttctgcagatgcgagctgaagctgcagaagtggtacggggacctgcggggaaagcccttcgccatcgaagccgagaacagcatcctggacatcagcggcttcagcaagcagtacaactgtgccttcatctggcagaaggacggcgtgaagaagctgaacctgtacctgatcatcaactacttcaagggcggcaagctgcggttcaagaagatcaaacctgaagccttcgaagccaacagattctacaccgtgatcaacaaaaagagcggcgagatcgtgcccatggaggtgaacttcaacttcgacgaccccaacctgatcatcctgcctctggcctttggcaagagacagggcagagaattcatctggaacgacctgctgtccctggaaaccggcagcctgaagctggccaacggaagagtgatcgagaagacactgtacaacagaagaacccggcaggatgagcctgccctgttcgtggccctgaccttcgagcggcgggaggtcctggactcctccaatatcaaaccaatgaacctgatcggcgtggcaagaggcgaaaacatccccgccgtgatcgccctgaccgaccccgagggctgcccactgagccggtttaaggatagcctgggaaacccaacccacatcctgagaatcggcgagagctataaggagaagcagcggaccatccaggccaagaaggaggtggagcagcggagagccggcggctacagccggaagtacgccagcaaagccaagaatctggcagacgatatggtgagaaacaccgctagagatctgctgtactacgccgtgacccaggatgccatgctgatcttcgccaacctgagccggggcttcggccggcagggcaagcggaccttcatggccgagagacagtacacacggatggaggactggctgaccgccaagctggcctacgagggcctgagcaagacctacctgtccaagacactggcccagtacacctccaagacatgcagcaactgtgggtttaccatcaccagcgccgactacgacagggtgctggagaagctgaagaagacagcaacaggctggatgaccacaattaacggcaaggagctgaaggtggagggccagattacctactacaacagatacaagagacagaacgtagtcaaggacctgtccgtcgagctggatagactgagcgaagaatctgtgaacaacgacatctcctcctggacaaagggcagaagcggagaagctctgagcctcctgaagaaaagattctcccatagacccgtgcaggagaagttcgtgtgcctgaactgcggcttcgagacacacgcagccgagcaagccgccctgaacatcgccagatcctggctgttcctgcggagccaggagtacaagaaataccagacaaacaagacaaccggcaacaccgataagagagccttcgtcgagacctggcagtccttttaccggaagaagcttaaggaggtgtggaaacctgccgtgcggtctggcggatctggcggaggctccaccagccccaagaaaaagagaaaagtctaagctgccttctgcggggcttgccttctggccatgcccttcttctctcccttgcacctgtacctcttggtctttgaataaagcctgagtaggaaggctagcaaaaaaaaaaaaaaaaaaaaaaaaaaaaaaaaaaaaaaaaaaaaaaaaaaaaaaaaaaaaaaaaaaaaaaaaaaaaaaaagcccagccggctccccaacctctaccgaggagggcacctctgagtccgccacccccgagagcggccctggcacctccaccgagcccagcgagggcagcgcacccggcagccctgccggcagccccacctccacagaggagggaaccagcaccgagcccagcgaaggcagcgccccaggcaccagcaccgagcctagtgagcaggagattaaacggatcaacaagatcagaagaagacttgtgaaagacagcaacaccaagaaggccggcaagacaggccccatgaaaaccctgctggttagagtgatgacacccgatctgagagagcggctggaaaacctgagaaagaagcctgaaaatatcccccagcccatcagcaatacatctagagccaacctgaataagctgctgaccgattacaccgaaatgaagaaggcgatcctgcatgtgtactgggaagagttccagaaggaccctgtgggcctgatgagccgggtggcccagcctgccagcaagaagatcgatcagaacaagctgaaacctgagatggacgagaagggcaacctgaccaccgccggctttgcctgctctcagtgtggccagcccctgttcgtgtacaagctggagcaggtgtctgagaagggcaaggcttacaccaactacttcggacggtgcaatgtggccgagcacgaaaagctgatcctgctggcccagctgaagcccgagaaggatagcgacgaagccgtgacatatagcctgggaaagtttgggcagagggccctggatttctacagcattcatgtgaccaaggagtccacccaccccgtgaagcccctggcccagatcgccggaaacagatacgcctccggacctgtgggaaaggccctgagcgacgcatgtatgggcacaatcgcctccttcctgtctaagtaccaggacatcatcatcgaacaccagaaggtggtgaagggcaaccagaagagactggagagcctgcgggagctggccggcaaggaaaacctggaataccctagcgtgaccctgccacctcagcctcacaccaaggagggcgttgatgcctacaacgaagtgatcgcccgggtgcgaatgtgggtgaacctgaacctgtggcagaagctgaagctaagcagagatgatgccaagcctctgctgagactgaagggattcccttcctttcctctggtcgagagacaggccaacgaagtggactggtgggacatggtgtgtaacgtgaagaagctgatcaacgagaaaaaggaggatggcaaggtgttttggcagaatctggctggctacaagagacaggaagccctgagaccatacctgagcagcgaggaagatcggaagaagggaaagaaattcgctcggtaccagctgggcgacctgctgctgcacctggaaaagaagcacggcgaggactggggaaaggtgtacgacgaggcctgggagcggattgacaagaaagtggaaggcctgagcaagcacatcaagctggaagaggaacggagaagcgaggacgcccagagcaaggccgccctgaccgactggctgcgggctaaggccagcttcgtgatcgagggcctgaaggaggccgacaaggacgagttctgcagatgcgagctgaagctgcagaagtggtacggggacctgcggggaaagcccttcgccatcgaagccgagaacagcatcctggacatcagcggcttcagcaagcagtacaactgtgccttcatctggcagaaggacggcgtgaagaagctgaacctgtacctgatcatcaactacttcaagggcggcaagctgcggttcaagaagatcaaacctgaagccttcgaagccaacagattctacaccgtgatcaacaaaaagagcggcgagatcgtgcccatggaggtgaacttcaacttcgacgaccccaacctgatcatcctgcctctggcctttggcaagagacagggcagagaattcatctggaacgacctgctgtccctggaaaccggcagcctgaagctggccaacggaagagtgatcgagaagacactgtacaacagaagaacccggcaggatgagcctgccctgttcgtggccctgaccttcgagcggcgggaggtcctggactcctccaatatcaaaccaatgaacctgatcggcgtggcaagaggcgaaaacatccccgccgtgatcgccctgaccgaccccgagggctgcccactgagccggtttaaggatagcctgggaaacccaacccacatcctgagaatcggcgagagctataaggagaagcagcggaccatccaggccaagaaggaggtggagcagcggagagccggcggctacagccggaagtacgccagcaaagccaagaatctggcagacgatatggtgagaaacaccgctagagatctgctgtactacgccgtgacccaggatgccatgctgatcttcgccaacctgagccggggcttcggccggcagggcaagcggaccttcatggccgagagacagtacacacggatggaggactggctgaccgccaagctggcctacgagggcctgagcaagacctacctgtccaagacactggcccagtacacctccaagacatgcagcaactgtgggtttaccatcaccagcgccgactacgacagggtgctggagaagctgaagaagacagcaacaggctggatgaccacaattaacggcaaggagctgaaggtggagggccagattacctactacaacagatacaagagacagaacgtagtcaaggacctgtccgtcgagctggatagactgagcgaagaatctgtgaacaacgacatctcctcctggacaaagggcagaagcggagaagctctgagcctcctgaagaaaagattctcccatagacccgtgcaggagaagttcgtgtgcctgaactgcggcttcgagacacacgcagccgagcaagccgccctgaacatcgccagatcctggctgttcctgcggagccaggagtacaagaaataccagacaaacaagacaaccggcaacaccgataagagagccttcgtcgagacctggcagtccttttaccggaagaagcttaaggaggtgtggaaacctgccgtgcggtctggcggatctggcggaggctccaccagccccaagaaaaagagaaaagtctaagctgccttctgcggggcttgccttctggccatgcccttcttctctcccttgcacctgtacctcttggtctttgaataaagcctgagtaggaaggctagcaaaaaaaaaaaaaaaaaaaaaaaaaaaaaaaaaaaaaaaaaaaaaaaaaaaaaaaaaaaaaaaaaaaaaaaaaaaaaaaa

SEQ ID NO: 9748 - RNA, 8787 nt, synthetic construct
  source 1..8787: mol_type = other RNA
aggaaataagagagaaaagaagagtaagaagaaatataagagccaccatggcccctaagaagaagcgtaaagtgagccggatgaaccacgaccaggagttcgacccccctaaggtgtaccctcccgtccccgccgagaagagaaagcccatccgggtcctgagcctgttcgatggcatcgccaccggtctgctggtgctgaaggacctgggcatccaggtggataggtacattgcctccgaggtgtgcgaggactccatcaccgtgggaatggtgcgtcatcagggcaagatcatgtacgtgggcgacgtgcggagcgtgacacagaagcatatccaggagtggggccctttcgacctggtgatcggcggcagcccttgcaatgacctgagcatcgtgaacccagcccggaagggcctgtacgagggaaccggcagactgttcttcgagttttacagactgctgcacgacgcccggcctaaggaaggcgacgaccggcccttcttttggctgttcgagaatgtggtggccatgggagtcagcgacaagcgggatattagccggttcctggagagcaaccccgtgatgatcgatgccaaggaagtgagcgccgcccaccgggccagatacttctggggcaatctgcctggcatgaacagacccctggccagcaccgtgaacgacaagctggagctgcaggagtgcctggagcacggccggatcgccaagttcagcaaggtgagaaccatcaccacccgaagcaacagcatcaaacaaggcaaggaccagcactttcctgtgttcatgaacgagaaggaggacatcctgtggtgtaccgagatggagagagtgttcgggttcccagtccactacacagatgtcagcaacatgtctagactggccagacagagactgctgggaagaagctggtccgtccctgtgatcagacacctgttcgcccctctgaaggagtacttcgcctgcgtgagcagcggcaacagcaacgccaacagccggggccccagcttctctagcggcctggtgccactgtccctgagagggagccacatgggccccatggagatctacaaaaccgtgagcgcctggaagcggcagcctgtgcgcgtgctgagcctgtttcggaatatcgataaagtcctgaaaagcctgggattcctggagagcggctctggctccggcggtggcaccctgaagtacgtggaggatgtgacaaacgtggtcagacgggatgtggagaagtggggccccttcgatctggtgtacggcagcacccaacccctgggcagctcttgtgaccggtgccctggctggtacatgtttcagttccaccggatcctgcagtacgccctgccgagacaggagtcccagcggccattcttttggattttcatggacaacttgctgctgaccgaggatgaccaggaaactaccactcggttcctgcagaccgaagccgtgaccctgcaggacgtgagaggccgggactaccagaacgccatgcgggtgtggtccaacatccctggactgaaaagcaagcacgcacctctgacccctaaagaagaggagtacctgcaggcccaggtgcggagcagaagcaagctggacgcccctaaggtggatctgctggtgaagaattgcctcctgcccctgagagagtacttcaagtatttcagccagaatagtctgcccctgggaggcagcggcggcggcagccaggacctggtgaccttcaaggacgtggccatcgacttcagccaggaggagtggcagtggatgaaccccgcccagaagaggctgtacaggagcatgatgctggagaactaccagagcctggtgagcctgggcctgtgcgtgagcaagccctacgtgatcagcctgctggagcagggcagggagccctgggagatgaccagcgagatgaccaggagccccttcagcgactgggagagcatcggcggcccaagcagcggcgcccctcctcccagcggcggcaggcggcccaagcagcggcgcccctcctcccagcggcggcagcccagccggctccccaacctctaccgaggagggcacctctgagtccgccacccccgagagcggccctggcacctccaccgagcccagcgagggcagcgcacccggcagccctgccggcagccccacctccacagaggagggaaccagcaccgagcccagcgaaggcagcgccccaggcaccagcaccgagcctagtgagcaggagattaaacggatcaacaagatcagaagaagacttgtgaaagacagcaacaccaagaaggccggcaagacaggccccatgaaaaccctgctggttagagtgatgacacccgatctgagagagcggctggaaaacctgagaaagaagcctgaaaatatcccccagcccatcagcaatacatctagagccaacctgaataagctgctgaccgattacaccgaaatgaagaaggcgatcctgcatgtgtactgggaagagttccagaaggaccctgtgggcctgatgagccgggtggcccagcctgccagcaagaagatcgatcagaacaagctgaaacctgagatggacgagaagggcaacctgaccaccgccggctttgcctgctctcagtgtggccagcccctgttcgtgtacaagctggagcaggtgtctgagaagggcaaggcttacaccaactacttcggacggtgcaatgtggccgagcacgaaaagctgatcctgctggcccagctgaagcccgagaaggatagcgacgaagccgtgacatatagcctgggaaagtttgggcagagggccctggatttctacagcattcatgtgaccaaggagtccacccaccccgtgaagcccctggcccagatcgccggaaacagatacgcctccggacctgtgggaaaggccctgagcgacgcatgtatgggcacaatcgcctccttcctgtctaagtaccaggacatcatcatcgaacaccagaaggtggtgaagggcaaccagaagagactggagagcctgcgggagctggccggcaaggaaaacctggaataccctagcgtgaccctgccacctcagcctcacaccaaggagggcgttgatgcctacaacgaagtgatcgcccgggtgcgaatgtgggtgaacctgaacctgtggcagaagctgaagctaagcagagatgatgccaagcctctgctgagactgaagggattcccttcctttcctctggtcgagagacaggccaacgaagtggactggtgggacatggtgtgtaacgtgaagaagctgatcaacgagaaaaaggaggatggcaaggtgttttggcagaatctggctggctacaagagacaggaagccctgagaccatacctgagcagcgaggaagatcggaagaagggaaagaaattcgctcggtaccagctgggcgacctgctgctgcacctggaaaagaagcacggcgaggactggggaaaggtgtacgacgaggcctgggagcggattgacaagaaagtggaaggcctgagcaagcacatcaagctggaagaggaacggagaagcgaggacgcccagagcaaggccgccctgaccgactggctgcgggctaaggccagcttcgtgatcgagggcctgaaggaggccgacaaggacgagttctgcagatgcgagctgaagctgcagaagtggtacggggacctgcggggaaagcccttcgccatcgaagccgagaacagcatcctggacatcagcggcttcagcaagcagtacaactgtgccttcatctggcagaaggacggcgtgaagaagctgaacctgtacctgatcatcaactacttcaagggcggcaagctgcggttcaagaagatcaaacctgaagccttcgaagccaacagattctacaccgtgatcaacaaaaagagcggcgagatcgtgcccatggaggtgaacttcaacttcgacgaccccaacctgatcatcctgcctctggcctttggcaagagacagggcagagaattcatctggaacgacctgctgtccctggaaaccggcagcctgaagctggccaacggaagagtgatcgagaagacactgtacaacagaagaacccggcaggatgagcctgccctgttcgtggccctgaccttcgagcggcgggaggtcctggactcctccaatatcaaaccaatgaacctgatcggcgtggcaagaggcgaaaacatccccgccgtgatcgccctgaccgaccccgagggctgcccactgagccggtttaaggatagcctgggaaacccaacccacatcctgagaatcggcgagagctataaggagaagcagcggaccatccaggccaagaaggaggtggagcagcggagagccggcggctacagccggaagtacgccagcaaagccaagaatctggcagacgatatggtgagaaacaccgctagagatctgctgtactacgccgtgacccaggatgccatgctgatcttcgccaacctgagccggggcttcggccggcagggcaagcggaccttcatggccgagagacagtacacacggatggaggactggctgaccgccaagctggcctacgagggcctgagcaagacctacctgtccaagacactggcccagtacacctccaagacatgcagcaactgtgggtttaccatcaccagcgccgactacgacagggtgctggagaagctgaagaagacagcaacaggctggatgaccacaattaacggcaaggagctgaaggtggagggccagattacctactacaacagatacaagagacagaacgtagtcaaggacctgtccgtcgagctggatagactgagcgaagaatctgtgaacaacgacatctcctcctggacaaagggcagaagcggagaagctctgagcctcctgaagaaaagattctcccatagacccgtgcaggagaagttcgtgtgcctgaactgcggcttcgagacacacgcagccgagcaagccgccctgaacatcgccagatcctggctgttcctgcggagccaggagtacaagaaataccagacaaacaagacaaccggcaacaccgataagagagccttcgtcgagacctggcagtccttttaccggaagaagcttaaggaggtgtggaaacctgccgtgcggtctggcggatctggcggaggctccaccagccccaagaaaaagagaaaagtctaagctgccttctgcggggcttgccttctggccatgcccttcttctctcccttgcacctgtacctcttggtctttgaataaagcctgagtaggaaggctagcaaaaaaaaaaaaaaaaaaaaaaaaaaaaaaaaaaaaaaaaaaaaaaaaaaaaaaaaaaaaaaaaaaaaaaaaaaaaaaaagcccagccggctccccaacctctaccgaggagggcacctctgagtccgccacccccgagagcggccctggcacctccaccgagcccagcgagggcagcgcacccggcagccctgccggcagccccacctccacagaggagggaaccagcaccgagcccagcgaaggcagcgccccaggcaccagcaccgagcctagtgagcaggagattaaacggatcaacaagatcagaagaagacttgtgaaagacagcaacaccaagaaggccggcaagacaggccccatgaaaaccctgctggttagagtgatgacacccgatctgagagagcggctggaaaacctgagaaagaagcctgaaaatatcccccagcccatcagcaatacatctagagccaacctgaataagctgctgaccgattacaccgaaatgaagaaggcgatcctgcatgtgtactgggaagagttccagaaggaccctgtgggcctgatgagccgggtggcccagcctgccagcaagaagatcgatcagaacaagctgaaacctgagatggacgagaagggcaacctgaccaccgccggctttgcctgctctcagtgtggccagcccctgttcgtgtacaagctggagcaggtgtctgagaagggcaaggcttacaccaactacttcggacggtgcaatgtggccgagcacgaaaagctgatcctgctggcccagctgaagcccgagaaggatagcgacgaagccgtgacatatagcctgggaaagtttgggcagagggccctggatttctacagcattcatgtgaccaaggagtccacccaccccgtgaagcccctggcccagatcgccggaaacagatacgcctccggacctgtgggaaaggccctgagcgacgcatgtatgggcacaatcgcctccttcctgtctaagtaccaggacatcatcatcgaacaccagaaggtggtgaagggcaaccagaagagactggagagcctgcgggagctggccggcaaggaaaacctggaataccctagcgtgaccctgccacctcagcctcacaccaaggagggcgttgatgcctacaacgaagtgatcgcccgggtgcgaatgtgggtgaacctgaacctgtggcagaagctgaagctaagcagagatgatgccaagcctctgctgagactgaagggattcccttcctttcctctggtcgagagacaggccaacgaagtggactggtgggacatggtgtgtaacgtgaagaagctgatcaacgagaaaaaggaggatggcaaggtgttttggcagaatctggctggctacaagagacaggaagccctgagaccatacctgagcagcgaggaagatcggaagaagggaaagaaattcgctcggtaccagctgggcgacctgctgctgcacctggaaaagaagcacggcgaggactggggaaaggtgtacgacgaggcctgggagcggattgacaagaaagtggaaggcctgagcaagcacatcaagctggaagaggaacggagaagcgaggacgcccagagcaaggccgccctgaccgactggctgcgggctaaggccagcttcgtgatcgagggcctgaaggaggccgacaaggacgagttctgcagatgcgagctgaagctgcagaagtggtacggggacctgcggggaaagcccttcgccatcgaagccgagaacagcatcctggacatcagcggcttcagcaagcagtacaactgtgccttcatctggcagaaggacggcgtgaagaagctgaacctgtacctgatcatcaactacttcaagggcggcaagctgcggttcaagaagatcaaacctgaagccttcgaagccaacagattctacaccgtgatcaacaaaaagagcggcgagatcgtgcccatggaggtgaacttcaacttcgacgaccccaacctgatcatcctgcctctggcctttggcaagagacagggcagagaattcatctggaacgacctgctgtccctggaaaccggcagcctgaagctggccaacggaagagtgatcgagaagacactgtacaacagaagaacccggcaggatgagcctgccctgttcgtggccctgaccttcgagcggcgggaggtcctggactcctccaatatcaaaccaatgaacctgatcggcgtggcaagaggcgaaaacatccccgccgtgatcgccctgaccgaccccgagggctgcccactgagccggtttaaggatagcctgggaaacccaacccacatcctgagaatcggcgagagctataaggagaagcagcggaccatccaggccaagaaggaggtggagcagcggagagccggcggctacagccggaagtacgccagcaaagccaagaatctggcagacgatatggtgagaaacaccgctagagatctgctgtactacgccgtgacccaggatgccatgctgatcttcgccaacctgagccggggcttcggccggcagggcaagcggaccttcatggccgagagacagtacacacggatggaggactggctgaccgccaagctggcctacgagggcctgagcaagacctacctgtccaagacactggcccagtacacctccaagacatgcagcaactgtgggtttaccatcaccagcgccgactacgacagggtgctggagaagctgaagaagacagcaacaggctggatgaccacaattaacggcaaggagctgaaggtggagggccagattacctactacaacagatacaagagacagaacgtagtcaaggacctgtccgtcgagctggatagactgagcgaagaatctgtgaacaacgacatctcctcctggacaaagggcagaagcggagaagctctgagcctcctgaagaaaagattctcccatagacccgtgcaggagaagttcgtgtgcctgaactgcggcttcgagacacacgcagccgagcaagccgccctgaacatcgccagatcctggctgttcctgcggagccaggagtacaagaaataccagacaaacaagacaaccggcaacaccgataagagagccttcgtcgagacctggcagtccttttaccggaagaagcttaaggaggtgtggaaacctgccgtgcggtctggcggatctggcggaggctccaccagccccaagaaaaagagaaaagtctaagctgccttctgcggggcttgccttctggccatgcccttcttctctcccttgcacctgtacctcttggtctttgaataaagcctgagtaggaaggctagcaaaaaaaaaaaaaaaaaaaaaaaaaaaaaaaaaaaaaaaaaaaaaaaaaaaaaaaaaaaaaaaaaaaaaaaaaaaaaaaa

SEQ ID NO: 9749 - RNA, 8787 nt, synthetic construct
  source 1..8787: mol_type = other RNA
aggaaataagagagaaaagaagagtaagaagaaatataagagccaccatggcccctaagaagaagcgtaaagtgagccggatgaaccacgaccaggagttcgacccccctaaggtgtaccctcccgtccccgccgagaagagaaagcccatccgggtcctgagcctgttcgatggcatcgccaccggtctgctggtgctgaaggacctgggcatccaggtggataggtacattgcctccgaggtgtgcgaggactccatcaccgtgggaatggtgcgtcatcagggcaagatcatgtacgtgggcgacgtgcggagcgtgacacagaagcatatccaggagtggggccctttcgacctggtgatcggcggcagcccttgcaatgacctgagcatcgtgaacccagcccggaagggcctgtacgagggaaccggcagactgttcttcgagttttacagactgctgcacgacgcccggcctaaggaaggcgacgaccggcccttcttttggctgttcgagaatgtggtggccatgggagtcagcgacaagcgggatattagccggttcctggagagcaaccccgtgatgatcgatgccaaggaagtgagcgccgcccaccgggccagatacttctggggcaatctgcctggcatgaacagacccctggccagcaccgtgaacgacaagctggagctgcaggagtgcctggagcacggccggatcgccaagttcagcaaggtgagaaccatcaccacccgaagcaacagcatcaaacaaggcaaggaccagcactttcctgtgttcatgaacgagaaggaggacatcctgtggtgtaccgagatggagagagtgttcgggttcccagtccactacacagatgtcagcaacatgtctagactggccagacagagactgctgggaagaagctggtccgtccctgtgatcagacacctgttcgcccctctgaaggagtacttcgcctgcgtgagcagcggcaacagcaacgccaacagccggggccccagcttctctagcggcctggtgccactgtccctgagagggagccacatgggccccatggagatctacaaaaccgtgagcgcctggaagcggcagcctgtgcgcgtgctgagcctgtttcggaatatcgataaagtcctgaaaagcctgggattcctggagagcggctctggctccggcggtggcaccctgaagtacgtggaggatgtgacaaacgtggtcagacgggatgtggagaagtggggccccttcgatctggtgtacggcagcacccaacccctgggcagctcttgtgaccggtgccctggctggtacatgtttcagttccaccggatcctgcagtacgccctgccgagacaggagtcccagcggccattcttttggattttcatggacaacttgctgctgaccgaggatgaccaggaaactaccactcggttcctgcagaccgaagccgtgaccctgcaggacgtgagaggccgggactaccagaacgccatgcgggtgtggtccaacatccctggactgaaaagcaagcacgcacctctgacccctaaagaagaggagtacctgcaggcccaggtgcggagcagaagcaagctggacgcccctaaggtggatctgctggtgaagaattgcctcctgcccctgagagagtacttcaagtatttcagccagaatagtctgcccctgggaggcagcggcggcggcagcgaggagaccgtgaccttcaaggacgtggccgtggacttcacctgggaggagtggaagcagctgacccccgtgcagagggacctgtacagggacgtgatgctggagaactaccagaacctggtgagcctgggcctgcccgtgttccagagcgacctgatcagccagctggagaggggcgaggtgccctggatccccgagggcgagaccttcaggggcccctgccccggcagcatcaaccagggcggcccaagcagcggcgcccctcctcccagcggcggcaggcggcccaagcagcggcgcccctcctcccagcggcggcagcccagccggctccccaacctctaccgaggagggcacctctgagtccgccacccccgagagcggccctggcacctccaccgagcccagcgagggcagcgcacccggcagccctgccggcagccccacctccacagaggagggaaccagcaccgagcccagcgaaggcagcgccccaggcaccagcaccgagcctagtgagcaggagattaaacggatcaacaagatcagaagaagacttgtgaaagacagcaacaccaagaaggccggcaagacaggccccatgaaaaccctgctggttagagtgatgacacccgatctgagagagcggctggaaaacctgagaaagaagcctgaaaatatcccccagcccatcagcaatacatctagagccaacctgaataagctgctgaccgattacaccgaaatgaagaaggcgatcctgcatgtgtactgggaagagttccagaaggaccctgtgggcctgatgagccgggtggcccagcctgccagcaagaagatcgatcagaacaagctgaaacctgagatggacgagaagggcaacctgaccaccgccggctttgcctgctctcagtgtggccagcccctgttcgtgtacaagctggagcaggtgtctgagaagggcaaggcttacaccaactacttcggacggtgcaatgtggccgagcacgaaaagctgatcctgctggcccagctgaagcccgagaaggatagcgacgaagccgtgacatatagcctgggaaagtttgggcagagggccctggatttctacagcattcatgtgaccaaggagtccacccaccccgtgaagcccctggcccagatcgccggaaacagatacgcctccggacctgtgggaaaggccctgagcgacgcatgtatgggcacaatcgcctccttcctgtctaagtaccaggacatcatcatcgaacaccagaaggtggtgaagggcaaccagaagagactggagagcctgcgggagctggccggcaaggaaaacctggaataccctagcgtgaccctgccacctcagcctcacaccaaggagggcgttgatgcctacaacgaagtgatcgcccgggtgcgaatgtgggtgaacctgaacctgtggcagaagctgaagctaagcagagatgatgccaagcctctgctgagactgaagggattcccttcctttcctctggtcgagagacaggccaacgaagtggactggtgggacatggtgtgtaacgtgaagaagctgatcaacgagaaaaaggaggatggcaaggtgttttggcagaatctggctggctacaagagacaggaagccctgagaccatacctgagcagcgaggaagatcggaagaagggaaagaaattcgctcggtaccagctgggcgacctgctgctgcacctggaaaagaagcacggcgaggactggggaaaggtgtacgacgaggcctgggagcggattgacaagaaagtggaaggcctgagcaagcacatcaagctggaagaggaacggagaagcgaggacgcccagagcaaggccgccctgaccgactggctgcgggctaaggccagcttcgtgatcgagggcctgaaggaggccgacaaggacgagttctgcagatgcgagctgaagctgcagaagtggtacggggacctgcggggaaagcccttcgccatcgaagccgagaacagcatcctggacatcagcggcttcagcaagcagtacaactgtgccttcatctggcagaaggacggcgtgaagaagctgaacctgtacctgatcatcaactacttcaagggcggcaagctgcggttcaagaagatcaaacctgaagccttcgaagccaacagattctacaccgtgatcaacaaaaagagcggcgagatcgtgcccatggaggtgaacttcaacttcgacgaccccaacctgatcatcctgcctctggcctttggcaagagacagggcagagaattcatctggaacgacctgctgtccctggaaaccggcagcctgaagctggccaacggaagagtgatcgagaagacactgtacaacagaagaacccggcaggatgagcctgccctgttcgtggccctgaccttcgagcggcgggaggtcctggactcctccaatatcaaaccaatgaacctgatcggcgtggcaagaggcgaaaacatccccgccgtgatcgccctgaccgaccccgagggctgcccactgagccggtttaaggatagcctgggaaacccaacccacatcctgagaatcggcgagagctataaggagaagcagcggaccatccaggccaagaaggaggtggagcagcggagagccggcggctacagccggaagtacgccagcaaagccaagaatctggcagacgatatggtgagaaacaccgctagagatctgctgtactacgccgtgacccaggatgccatgctgatcttcgccaacctgagccggggcttcggccggcagggcaagcggaccttcatggccgagagacagtacacacggatggaggactggctgaccgccaagctggcctacgagggcctgagcaagacctacctgtccaagacactggcccagtacacctccaagacatgcagcaactgtgggtttaccatcaccagcgccgactacgacagggtgctggagaagctgaagaagacagcaacaggctggatgaccacaattaacggcaaggagctgaaggtggagggccagattacctactacaacagatacaagagacagaacgtagtcaaggacctgtccgtcgagctggatagactgagcgaagaatctgtgaacaacgacatctcctcctggacaaagggcagaagcggagaagctctgagcctcctgaagaaaagattctcccatagacccgtgcaggagaagttcgtgtgcctgaactgcggcttcgagacacacgcagccgagcaagccgccctgaacatcgccagatcctggctgttcctgcggagccaggagtacaagaaataccagacaaacaagacaaccggcaacaccgataagagagccttcgtcgagacctggcagtccttttaccggaagaagcttaaggaggtgtggaaacctgccgtgcggtctggcggatctggcggaggctccaccagccccaagaaaaagagaaaagtctaagctgccttctgcggggcttgccttctggccatgcccttcttctctcccttgcacctgtacctcttggtctttgaataaagcctgagtaggaaggctagcaaaaaaaaaaaaaaaaaaaaaaaaaaaaaaaaaaaaaaaaaaaaaaaaaaaaaaaaaaaaaaaaaaaaaaaaaaaaaaaagcccagccggctccccaacctctaccgaggagggcacctctgagtccgccacccccgagagcggccctggcacctccaccgagcccagcgagggcagcgcacccggcagccctgccggcagccccacctccacagaggagggaaccagcaccgagcccagcgaaggcagcgccccaggcaccagcaccgagcctagtgagcaggagattaaacggatcaacaagatcagaagaagacttgtgaaagacagcaacaccaagaaggccggcaagacaggccccatgaaaaccctgctggttagagtgatgacacccgatctgagagagcggctggaaaacctgagaaagaagcctgaaaatatcccccagcccatcagcaatacatctagagccaacctgaataagctgctgaccgattacaccgaaatgaagaaggcgatcctgcatgtgtactgggaagagttccagaaggaccctgtgggcctgatgagccgggtggcccagcctgccagcaagaagatcgatcagaacaagctgaaacctgagatggacgagaagggcaacctgaccaccgccggctttgcctgctctcagtgtggccagcccctgttcgtgtacaagctggagcaggtgtctgagaagggcaaggcttacaccaactacttcggacggtgcaatgtggccgagcacgaaaagctgatcctgctggcccagctgaagcccgagaaggatagcgacgaagccgtgacatatagcctgggaaagtttgggcagagggccctggatttctacagcattcatgtgaccaaggagtccacccaccccgtgaagcccctggcccagatcgccggaaacagatacgcctccggacctgtgggaaaggccctgagcgacgcatgtatgggcacaatcgcctccttcctgtctaagtaccaggacatcatcatcgaacaccagaaggtggtgaagggcaaccagaagagactggagagcctgcgggagctggccggcaaggaaaacctggaataccctagcgtgaccctgccacctcagcctcacaccaaggagggcgttgatgcctacaacgaagtgatcgcccgggtgcgaatgtgggtgaacctgaacctgtggcagaagctgaagctaagcagagatgatgccaagcctctgctgagactgaagggattcccttcctttcctctggtcgagagacaggccaacgaagtggactggtgggacatggtgtgtaacgtgaagaagctgatcaacgagaaaaaggaggatggcaaggtgttttggcagaatctggctggctacaagagacaggaagccctgagaccatacctgagcagcgaggaagatcggaagaagggaaagaaattcgctcggtaccagctgggcgacctgctgctgcacctggaaaagaagcacggcgaggactggggaaaggtgtacgacgaggcctgggagcggattgacaagaaagtggaaggcctgagcaagcacatcaagctggaagaggaacggagaagcgaggacgcccagagcaaggccgccctgaccgactggctgcgggctaaggccagcttcgtgatcgagggcctgaaggaggccgacaaggacgagttctgcagatgcgagctgaagctgcagaagtggtacggggacctgcggggaaagcccttcgccatcgaagccgagaacagcatcctggacatcagcggcttcagcaagcagtacaactgtgccttcatctggcagaaggacggcgtgaagaagctgaacctgtacctgatcatcaactacttcaagggcggcaagctgcggttcaagaagatcaaacctgaagccttcgaagccaacagattctacaccgtgatcaacaaaaagagcggcgagatcgtgcccatggaggtgaacttcaacttcgacgaccccaacctgatcatcctgcctctggcctttggcaagagacagggcagagaattcatctggaacgacctgctgtccctggaaaccggcagcctgaagctggccaacggaagagtgatcgagaagacactgtacaacagaagaacccggcaggatgagcctgccctgttcgtggccctgaccttcgagcggcgggaggtcctggactcctccaatatcaaaccaatgaacctgatcggcgtggcaagaggcgaaaacatccccgccgtgatcgccctgaccgaccccgagggctgcccactgagccggtttaaggatagcctgggaaacccaacccacatcctgagaatcggcgagagctataaggagaagcagcggaccatccaggccaagaaggaggtggagcagcggagagccggcggctacagccggaagtacgccagcaaagccaagaatctggcagacgatatggtgagaaacaccgctagagatctgctgtactacgccgtgacccaggatgccatgctgatcttcgccaacctgagccggggcttcggccggcagggcaagcggaccttcatggccgagagacagtacacacggatggaggactggctgaccgccaagctggcctacgagggcctgagcaagacctacctgtccaagacactggcccagtacacctccaagacatgcagcaactgtgggtttaccatcaccagcgccgactacgacagggtgctggagaagctgaagaagacagcaacaggctggatgaccacaattaacggcaaggagctgaaggtggagggccagattacctactacaacagatacaagagacagaacgtagtcaaggacctgtccgtcgagctggatagactgagcgaagaatctgtgaacaacgacatctcctcctggacaaagggcagaagcggagaagctctgagcctcctgaagaaaagattctcccatagacccgtgcaggagaagttcgtgtgcctgaactgcggcttcgagacacacgcagccgagcaagccgccctgaacatcgccagatcctggctgttcctgcggagccaggagtacaagaaataccagacaaacaagacaaccggcaacaccgataagagagccttcgtcgagacctggcagtccttttaccggaagaagcttaaggaggtgtggaaacctgccgtgcggtctggcggatctggcggaggctccaccagccccaagaaaaagagaaaagtctaagctgccttctgcggggcttgccttctggccatgcccttcttctctcccttgcacctgtacctcttggtctttgaataaagcctgagtaggaaggctagcaaaaaaaaaaaaaaaaaaaaaaaaaaaaaaaaaaaaaaaaaaaaaaaaaaaaaaaaaaaaaaaaaaaaaaaaaaaaaaaa

SEQ ID NO: 9750 - RNA, 8787 nt, synthetic construct
  source 1..8787: mol_type = other RNA
aggaaataagagagaaaagaagagtaagaagaaatataagagccaccatggcccctaagaagaagcgtaaagtgagccggatgaaccacgaccaggagttcgacccccctaaggtgtaccctcccgtccccgccgagaagagaaagcccatccgggtcctgagcctgttcgatggcatcgccaccggtctgctggtgctgaaggacctgggcatccaggtggataggtacattgcctccgaggtgtgcgaggactccatcaccgtgggaatggtgcgtcatcagggcaagatcatgtacgtgggcgacgtgcggagcgtgacacagaagcatatccaggagtggggccctttcgacctggtgatcggcggcagcccttgcaatgacctgagcatcgtgaacccagcccggaagggcctgtacgagggaaccggcagactgttcttcgagttttacagactgctgcacgacgcccggcctaaggaaggcgacgaccggcccttcttttggctgttcgagaatgtggtggccatgggagtcagcgacaagcgggatattagccggttcctggagagcaaccccgtgatgatcgatgccaaggaagtgagcgccgcccaccgggccagatacttctggggcaatctgcctggcatgaacagacccctggccagcaccgtgaacgacaagctggagctgcaggagtgcctggagcacggccggatcgccaagttcagcaaggtgagaaccatcaccacccgaagcaacagcatcaaacaaggcaaggaccagcactttcctgtgttcatgaacgagaaggaggacatcctgtggtgtaccgagatggagagagtgttcgggttcccagtccactacacagatgtcagcaacatgtctagactggccagacagagactgctgggaagaagctggtccgtccctgtgatcagacacctgttcgcccctctgaaggagtacttcgcctgcgtgagcagcggcaacagcaacgccaacagccggggccccagcttctctagcggcctggtgccactgtccctgagagggagccacatgggccccatggagatctacaaaaccgtgagcgcctggaagcggcagcctgtgcgcgtgctgagcctgtttcggaatatcgataaagtcctgaaaagcctgggattcctggagagcggctctggctccggcggtggcaccctgaagtacgtggaggatgtgacaaacgtggtcagacgggatgtggagaagtggggccccttcgatctggtgtacggcagcacccaacccctgggcagctcttgtgaccggtgccctggctggtacatgtttcagttccaccggatcctgcagtacgccctgccgagacaggagtcccagcggccattcttttggattttcatggacaacttgctgctgaccgaggatgaccaggaaactaccactcggttcctgcagaccgaagccgtgaccctgcaggacgtgagaggccgggactaccagaacgccatgcgggtgtggtccaacatccctggactgaaaagcaagcacgcacctctgacccctaaagaagaggagtacctgcaggcccaggtgcggagcagaagcaagctggacgcccctaaggtggatctgctggtgaagaattgcctcctgcccctgagagagtacttcaagtatttcagccagaatagtctgcccctgggaggcagcggcggcggcttccaggaggccgtgaccttcaaggacgtggccgtggccttcaccgaggaggagctgggcctgctggacagcgcccagaggaagctgtacagggaggtgatgctggagaacttcaggaacctggtgagcgtgggccaccagagcttcaagcccgagatgatcagccagctggagagggaggagaagctgtgggtgaaggagatccagacccagatgggcaggtgcaggggcggcaggaaccagggcggcccaagcagcggcgcccctcctcccagcggcggcaggcggcccaagcagcggcgcccctcctcccagcggcggcagcccagccggctccccaacctctaccgaggagggcacctctgagtccgccacccccgagagcggccctggcacctccaccgagcccagcgagggcagcgcacccggcagccctgccggcagccccacctccacagaggagggaaccagcaccgagcccagcgaaggcagcgccccaggcaccagcaccgagcctagtgagcaggagattaaacggatcaacaagatcagaagaagacttgtgaaagacagcaacaccaagaaggccggcaagacaggccccatgaaaaccctgctggttagagtgatgacacccgatctgagagagcggctggaaaacctgagaaagaagcctgaaaatatcccccagcccatcagcaatacatctagagccaacctgaataagctgctgaccgattacaccgaaatgaagaaggcgatcctgcatgtgtactgggaagagttccagaaggaccctgtgggcctgatgagccgggtggcccagcctgccagcaagaagatcgatcagaacaagctgaaacctgagatggacgagaagggcaacctgaccaccgccggctttgcctgctctcagtgtggccagcccctgttcgtgtacaagctggagcaggtgtctgagaagggcaaggcttacaccaactacttcggacggtgcaatgtggccgagcacgaaaagctgatcctgctggcccagctgaagcccgagaaggatagcgacgaagccgtgacatatagcctgggaaagtttgggcagagggccctggatttctacagcattcatgtgaccaaggagtccacccaccccgtgaagcccctggcccagatcgccggaaacagatacgcctccggacctgtgggaaaggccctgagcgacgcatgtatgggcacaatcgcctccttcctgtctaagtaccaggacatcatcatcgaacaccagaaggtggtgaagggcaaccagaagagactggagagcctgcgggagctggccggcaaggaaaacctggaataccctagcgtgaccctgccacctcagcctcacaccaaggagggcgttgatgcctacaacgaagtgatcgcccgggtgcgaatgtgggtgaacctgaacctgtggcagaagctgaagctaagcagagatgatgccaagcctctgctgagactgaagggattcccttcctttcctctggtcgagagacaggccaacgaagtggactggtgggacatggtgtgtaacgtgaagaagctgatcaacgagaaaaaggaggatggcaaggtgttttggcagaatctggctggctacaagagacaggaagccctgagaccatacctgagcagcgaggaagatcggaagaagggaaagaaattcgctcggtaccagctgggcgacctgctgctgcacctggaaaagaagcacggcgaggactggggaaaggtgtacgacgaggcctgggagcggattgacaagaaagtggaaggcctgagcaagcacatcaagctggaagaggaacggagaagcgaggacgcccagagcaaggccgccctgaccgactggctgcgggctaaggccagcttcgtgatcgagggcctgaaggaggccgacaaggacgagttctgcagatgcgagctgaagctgcagaagtggtacggggacctgcggggaaagcccttcgccatcgaagccgagaacagcatcctggacatcagcggcttcagcaagcagtacaactgtgccttcatctggcagaaggacggcgtgaagaagctgaacctgtacctgatcatcaactacttcaagggcggcaagctgcggttcaagaagatcaaacctgaagccttcgaagccaacagattctacaccgtgatcaacaaaaagagcggcgagatcgtgcccatggaggtgaacttcaacttcgacgaccccaacctgatcatcctgcctctggcctttggcaagagacagggcagagaattcatctggaacgacctgctgtccctggaaaccggcagcctgaagctggccaacggaagagtgatcgagaagacactgtacaacagaagaacccggcaggatgagcctgccctgttcgtggccctgaccttcgagcggcgggaggtcctggactcctccaatatcaaaccaatgaacctgatcggcgtggcaagaggcgaaaacatccccgccgtgatcgccctgaccgaccccgagggctgcccactgagccggtttaaggatagcctgggaaacccaacccacatcctgagaatcggcgagagctataaggagaagcagcggaccatccaggccaagaaggaggtggagcagcggagagccggcggctacagccggaagtacgccagcaaagccaagaatctggcagacgatatggtgagaaacaccgctagagatctgctgtactacgccgtgacccaggatgccatgctgatcttcgccaacctgagccggggcttcggccggcagggcaagcggaccttcatggccgagagacagtacacacggatggaggactggctgaccgccaagctggcctacgagggcctgagcaagacctacctgtccaagacactggcccagtacacctccaagacatgcagcaactgtgggtttaccatcaccagcgccgactacgacagggtgctggagaagctgaagaagacagcaacaggctggatgaccacaattaacggcaaggagctgaaggtggagggccagattacctactacaacagatacaagagacagaacgtagtcaaggacctgtccgtcgagctggatagactgagcgaagaatctgtgaacaacgacatctcctcctggacaaagggcagaagcggagaagctctgagcctcctgaagaaaagattctcccatagacccgtgcaggagaagttcgtgtgcctgaactgcggcttcgagacacacgcagccgagcaagccgccctgaacatcgccagatcctggctgttcctgcggagccaggagtacaagaaataccagacaaacaagacaaccggcaacaccgataagagagccttcgtcgagacctggcagtccttttaccggaagaagcttaaggaggtgtggaaacctgccgtgcggtctggcggatctggcggaggctccaccagccccaagaaaaagagaaaagtctaagctgccttctgcggggcttgccttctggccatgcccttcttctctcccttgcacctgtacctcttggtctttgaataaagcctgagtaggaaggctagcaaaaaaaaaaaaaaaaaaaaaaaaaaaaaaaaaaaaaaaaaaaaaaaaaaaaaaaaaaaaaaaaaaaaaaaaaaaaaaaagcccagccggctccccaacctctaccgaggagggcacctctgagtccgccacccccgagagcggccctggcacctccaccgagcccagcgagggcagcgcacccggcagccctgccggcagccccacctccacagaggagggaaccagcaccgagcccagcgaaggcagcgccccaggcaccagcaccgagcctagtgagcaggagattaaacggatcaacaagatcagaagaagacttgtgaaagacagcaacaccaagaaggccggcaagacaggccccatgaaaaccctgctggttagagtgatgacacccgatctgagagagcggctggaaaacctgagaaagaagcctgaaaatatcccccagcccatcagcaatacatctagagccaacctgaataagctgctgaccgattacaccgaaatgaagaaggcgatcctgcatgtgtactgggaagagttccagaaggaccctgtgggcctgatgagccgggtggcccagcctgccagcaagaagatcgatcagaacaagctgaaacctgagatggacgagaagggcaacctgaccaccgccggctttgcctgctctcagtgtggccagcccctgttcgtgtacaagctggagcaggtgtctgagaagggcaaggcttacaccaactacttcggacggtgcaatgtggccgagcacgaaaagctgatcctgctggcccagctgaagcccgagaaggatagcgacgaagccgtgacatatagcctgggaaagtttgggcagagggccctggatttctacagcattcatgtgaccaaggagtccacccaccccgtgaagcccctggcccagatcgccggaaacagatacgcctccggacctgtgggaaaggccctgagcgacgcatgtatgggcacaatcgcctccttcctgtctaagtaccaggacatcatcatcgaacaccagaaggtggtgaagggcaaccagaagagactggagagcctgcgggagctggccggcaaggaaaacctggaataccctagcgtgaccctgccacctcagcctcacaccaaggagggcgttgatgcctacaacgaagtgatcgcccgggtgcgaatgtgggtgaacctgaacctgtggcagaagctgaagctaagcagagatgatgccaagcctctgctgagactgaagggattcccttcctttcctctggtcgagagacaggccaacgaagtggactggtgggacatggtgtgtaacgtgaagaagctgatcaacgagaaaaaggaggatggcaaggtgttttggcagaatctggctggctacaagagacaggaagccctgagaccatacctgagcagcgaggaagatcggaagaagggaaagaaattcgctcggtaccagctgggcgacctgctgctgcacctggaaaagaagcacggcgaggactggggaaaggtgtacgacgaggcctgggagcggattgacaagaaagtggaaggcctgagcaagcacatcaagctggaagaggaacggagaagcgaggacgcccagagcaaggccgccctgaccgactggctgcgggctaaggccagcttcgtgatcgagggcctgaaggaggccgacaaggacgagttctgcagatgcgagctgaagctgcagaagtggtacggggacctgcggggaaagcccttcgccatcgaagccgagaacagcatcctggacatcagcggcttcagcaagcagtacaactgtgccttcatctggcagaaggacggcgtgaagaagctgaacctgtacctgatcatcaactacttcaagggcggcaagctgcggttcaagaagatcaaacctgaagccttcgaagccaacagattctacaccgtgatcaacaaaaagagcggcgagatcgtgcccatggaggtgaacttcaacttcgacgaccccaacctgatcatcctgcctctggcctttggcaagagacagggcagagaattcatctggaacgacctgctgtccctggaaaccggcagcctgaagctggccaacggaagagtgatcgagaagacactgtacaacagaagaacccggcaggatgagcctgccctgttcgtggccctgaccttcgagcggcgggaggtcctggactcctccaatatcaaaccaatgaacctgatcggcgtggcaagaggcgaaaacatccccgccgtgatcgccctgaccgaccccgagggctgcccactgagccggtttaaggatagcctgggaaacccaacccacatcctgagaatcggcgagagctataaggagaagcagcggaccatccaggccaagaaggaggtggagcagcggagagccggcggctacagccggaagtacgccagcaaagccaagaatctggcagacgatatggtgagaaacaccgctagagatctgctgtactacgccgtgacccaggatgccatgctgatcttcgccaacctgagccggggcttcggccggcagggcaagcggaccttcatggccgagagacagtacacacggatggaggactggctgaccgccaagctggcctacgagggcctgagcaagacctacctgtccaagacactggcccagtacacctccaagacatgcagcaactgtgggtttaccatcaccagcgccgactacgacagggtgctggagaagctgaagaagacagcaacaggctggatgaccacaattaacggcaaggagctgaaggtggagggccagattacctactacaacagatacaagagacagaacgtagtcaaggacctgtccgtcgagctggatagactgagcgaagaatctgtgaacaacgacatctcctcctggacaaagggcagaagcggagaagctctgagcctcctgaagaaaagattctcccatagacccgtgcaggagaagttcgtgtgcctgaactgcggcttcgagacacacgcagccgagcaagccgccctgaacatcgccagatcctggctgttcctgcggagccaggagtacaagaaataccagacaaacaagacaaccggcaacaccgataagagagccttcgtcgagacctggcagtccttttaccggaagaagcttaaggaggtgtggaaacctgccgtgcggtctggcggatctggcggaggctccaccagccccaagaaaaagagaaaagtctaagctgccttctgcggggcttgccttctggccatgcccttcttctctcccttgcacctgtacctcttggtctttgaataaagcctgagtaggaaggctagcaaaaaaaaaaaaaaaaaaaaaaaaaaaaaaaaaaaaaaaaaaaaaaaaaaaaaaaaaaaaaaaaaaaaaaaaaaaaaaaa

SEQ ID NO: 9751 - RNA, 8787 nt, synthetic construct
  source 1..8787: mol_type = other RNA
aggaaataagagagaaaagaagagtaagaagaaatataagagccaccatggcccctaagaagaagcgtaaagtgagccggatgaaccacgaccaggagttcgacccccctaaggtgtaccctcccgtccccgccgagaagagaaagcccatccgggtcctgagcctgttcgatggcatcgccaccggtctgctggtgctgaaggacctgggcatccaggtggataggtacattgcctccgaggtgtgcgaggactccatcaccgtgggaatggtgcgtcatcagggcaagatcatgtacgtgggcgacgtgcggagcgtgacacagaagcatatccaggagtggggccctttcgacctggtgatcggcggcagcccttgcaatgacctgagcatcgtgaacccagcccggaagggcctgtacgagggaaccggcagactgttcttcgagttttacagactgctgcacgacgcccggcctaaggaaggcgacgaccggcccttcttttggctgttcgagaatgtggtggccatgggagtcagcgacaagcgggatattagccggttcctggagagcaaccccgtgatgatcgatgccaaggaagtgagcgccgcccaccgggccagatacttctggggcaatctgcctggcatgaacagacccctggccagcaccgtgaacgacaagctggagctgcaggagtgcctggagcacggccggatcgccaagttcagcaaggtgagaaccatcaccacccgaagcaacagcatcaaacaaggcaaggaccagcactttcctgtgttcatgaacgagaaggaggacatcctgtggtgtaccgagatggagagagtgttcgggttcccagtccactacacagatgtcagcaacatgtctagactggccagacagagactgctgggaagaagctggtccgtccctgtgatcagacacctgttcgcccctctgaaggagtacttcgcctgcgtgagcagcggcaacagcaacgccaacagccggggccccagcttctctagcggcctggtgccactgtccctgagagggagccacatgggccccatggagatctacaaaaccgtgagcgcctggaagcggcagcctgtgcgcgtgctgagcctgtttcggaatatcgataaagtcctgaaaagcctgggattcctggagagcggctctggctccggcggtggcaccctgaagtacgtggaggatgtgacaaacgtggtcagacgggatgtggagaagtggggccccttcgatctggtgtacggcagcacccaacccctgggcagctcttgtgaccggtgccctggctggtacatgtttcagttccaccggatcctgcagtacgccctgccgagacaggagtcccagcggccattcttttggattttcatggacaacttgctgctgaccgaggatgaccaggaaactaccactcggttcctgcagaccgaagccgtgaccctgcaggacgtgagaggccgggactaccagaacgccatgcgggtgtggtccaacatccctggactgaaaagcaagcacgcacctctgacccctaaagaagaggagtacctgcaggcccaggtgcggagcagaagcaagctggacgcccctaaggtggatctgctggtgaagaattgcctcctgcccctgagagagtacttcaagtatttcagccagaatagtctgcccctgggaggcagcggcggcggccaggccagcgtgaccttcgaggacgtggccgtgaggttcacccaggaggagtgggccctgctggaccccagccagaagatcctgtacggcgacgtgatgcaggagacctacaggaacctgaccagcgtgggcatcaactgggagtgctgggacctggaggcctacttcaggagcctggagaggaacctgagggtgcagctggtgaagagggactgcgagctgaagaacaacgacccctgcggcggcggcccaagcagcggcgcccctcctcccagcggcggcaggcggcccaagcagcggcgcccctcctcccagcggcggcagcccagccggctccccaacctctaccgaggagggcacctctgagtccgccacccccgagagcggccctggcacctccaccgagcccagcgagggcagcgcacccggcagccctgccggcagccccacctccacagaggagggaaccagcaccgagcccagcgaaggcagcgccccaggcaccagcaccgagcctagtgagcaggagattaaacggatcaacaagatcagaagaagacttgtgaaagacagcaacaccaagaaggccggcaagacaggccccatgaaaaccctgctggttagagtgatgacacccgatctgagagagcggctggaaaacctgagaaagaagcctgaaaatatcccccagcccatcagcaatacatctagagccaacctgaataagctgctgaccgattacaccgaaatgaagaaggcgatcctgcatgtgtactgggaagagttccagaaggaccctgtgggcctgatgagccgggtggcccagcctgccagcaagaagatcgatcagaacaagctgaaacctgagatggacgagaagggcaacctgaccaccgccggctttgcctgctctcagtgtggccagcccctgttcgtgtacaagctggagcaggtgtctgagaagggcaaggcttacaccaactacttcggacggtgcaatgtggccgagcacgaaaagctgatcctgctggcccagctgaagcccgagaaggatagcgacgaagccgtgacatatagcctgggaaagtttgggcagagggccctggatttctacagcattcatgtgaccaaggagtccacccaccccgtgaagcccctggcccagatcgccggaaacagatacgcctccggacctgtgggaaaggccctgagcgacgcatgtatgggcacaatcgcctccttcctgtctaagtaccaggacatcatcatcgaacaccagaaggtggtgaagggcaaccagaagagactggagagcctgcgggagctggccggcaaggaaaacctggaataccctagcgtgaccctgccacctcagcctcacaccaaggagggcgttgatgcctacaacgaagtgatcgcccgggtgcgaatgtgggtgaacctgaacctgtggcagaagctgaagctaagcagagatgatgccaagcctctgctgagactgaagggattcccttcctttcctctggtcgagagacaggccaacgaagtggactggtgggacatggtgtgtaacgtgaagaagctgatcaacgagaaaaaggaggatggcaaggtgttttggcagaatctggctggctacaagagacaggaagccctgagaccatacctgagcagcgaggaagatcggaagaagggaaagaaattcgctcggtaccagctgggcgacctgctgctgcacctggaaaagaagcacggcgaggactggggaaaggtgtacgacgaggcctgggagcggattgacaagaaagtggaaggcctgagcaagcacatcaagctggaagaggaacggagaagcgaggacgcccagagcaaggccgccctgaccgactggctgcgggctaaggccagcttcgtgatcgagggcctgaaggaggccgacaaggacgagttctgcagatgcgagctgaagctgcagaagtggtacggggacctgcggggaaagcccttcgccatcgaagccgagaacagcatcctggacatcagcggcttcagcaagcagtacaactgtgccttcatctggcagaaggacggcgtgaagaagctgaacctgtacctgatcatcaactacttcaagggcggcaagctgcggttcaagaagatcaaacctgaagccttcgaagccaacagattctacaccgtgatcaacaaaaagagcggcgagatcgtgcccatggaggtgaacttcaacttcgacgaccccaacctgatcatcctgcctctggcctttggcaagagacagggcagagaattcatctggaacgacctgctgtccctggaaaccggcagcctgaagctggccaacggaagagtgatcgagaagacactgtacaacagaagaacccggcaggatgagcctgccctgttcgtggccctgaccttcgagcggcgggaggtcctggactcctccaatatcaaaccaatgaacctgatcggcgtggcaagaggcgaaaacatccccgccgtgatcgccctgaccgaccccgagggctgcccactgagccggtttaaggatagcctgggaaacccaacccacatcctgagaatcggcgagagctataaggagaagcagcggaccatccaggccaagaaggaggtggagcagcggagagccggcggctacagccggaagtacgccagcaaagccaagaatctggcagacgatatggtgagaaacaccgctagagatctgctgtactacgccgtgacccaggatgccatgctgatcttcgccaacctgagccggggcttcggccggcagggcaagcggaccttcatggccgagagacagtacacacggatggaggactggctgaccgccaagctggcctacgagggcctgagcaagacctacctgtccaagacactggcccagtacacctccaagacatgcagcaactgtgggtttaccatcaccagcgccgactacgacagggtgctggagaagctgaagaagacagcaacaggctggatgaccacaattaacggcaaggagctgaaggtggagggccagattacctactacaacagatacaagagacagaacgtagtcaaggacctgtccgtcgagctggatagactgagcgaagaatctgtgaacaacgacatctcctcctggacaaagggcagaagcggagaagctctgagcctcctgaagaaaagattctcccatagacccgtgcaggagaagttcgtgtgcctgaactgcggcttcgagacacacgcagccgagcaagccgccctgaacatcgccagatcctggctgttcctgcggagccaggagtacaagaaataccagacaaacaagacaaccggcaacaccgataagagagccttcgtcgagacctggcagtccttttaccggaagaagcttaaggaggtgtggaaacctgccgtgcggtctggcggatctggcggaggctccaccagccccaagaaaaagagaaaagtctaagctgccttctgcggggcttgccttctggccatgcccttcttctctcccttgcacctgtacctcttggtctttgaataaagcctgagtaggaaggctagcaaaaaaaaaaaaaaaaaaaaaaaaaaaaaaaaaaaaaaaaaaaaaaaaaaaaaaaaaaaaaaaaaaaaaaaaaaaaaaaagcccagccggctccccaacctctaccgaggagggcacctctgagtccgccacccccgagagcggccctggcacctccaccgagcccagcgagggcagcgcacccggcagccctgccggcagccccacctccacagaggagggaaccagcaccgagcccagcgaaggcagcgccccaggcaccagcaccgagcctagtgagcaggagattaaacggatcaacaagatcagaagaagacttgtgaaagacagcaacaccaagaaggccggcaagacaggccccatgaaaaccctgctggttagagtgatgacacccgatctgagagagcggctggaaaacctgagaaagaagcctgaaaatatcccccagcccatcagcaatacatctagagccaacctgaataagctgctgaccgattacaccgaaatgaagaaggcgatcctgcatgtgtactgggaagagttccagaaggaccctgtgggcctgatgagccgggtggcccagcctgccagcaagaagatcgatcagaacaagctgaaacctgagatggacgagaagggcaacctgaccaccgccggctttgcctgctctcagtgtggccagcccctgttcgtgtacaagctggagcaggtgtctgagaagggcaaggcttacaccaactacttcggacggtgcaatgtggccgagcacgaaaagctgatcctgctggcccagctgaagcccgagaaggatagcgacgaagccgtgacatatagcctgggaaagtttgggcagagggccctggatttctacagcattcatgtgaccaaggagtccacccaccccgtgaagcccctggcccagatcgccggaaacagatacgcctccggacctgtgggaaaggccctgagcgacgcatgtatgggcacaatcgcctccttcctgtctaagtaccaggacatcatcatcgaacaccagaaggtggtgaagggcaaccagaagagactggagagcctgcgggagctggccggcaaggaaaacctggaataccctagcgtgaccctgccacctcagcctcacaccaaggagggcgttgatgcctacaacgaagtgatcgcccgggtgcgaatgtgggtgaacctgaacctgtggcagaagctgaagctaagcagagatgatgccaagcctctgctgagactgaagggattcccttcctttcctctggtcgagagacaggccaacgaagtggactggtgggacatggtgtgtaacgtgaagaagctgatcaacgagaaaaaggaggatggcaaggtgttttggcagaatctggctggctacaagagacaggaagccctgagaccatacctgagcagcgaggaagatcggaagaagggaaagaaattcgctcggtaccagctgggcgacctgctgctgcacctggaaaagaagcacggcgaggactggggaaaggtgtacgacgaggcctgggagcggattgacaagaaagtggaaggcctgagcaagcacatcaagctggaagaggaacggagaagcgaggacgcccagagcaaggccgccctgaccgactggctgcgggctaaggccagcttcgtgatcgagggcctgaaggaggccgacaaggacgagttctgcagatgcgagctgaagctgcagaagtggtacggggacctgcggggaaagcccttcgccatcgaagccgagaacagcatcctggacatcagcggcttcagcaagcagtacaactgtgccttcatctggcagaaggacggcgtgaagaagctgaacctgtacctgatcatcaactacttcaagggcggcaagctgcggttcaagaagatcaaacctgaagccttcgaagccaacagattctacaccgtgatcaacaaaaagagcggcgagatcgtgcccatggaggtgaacttcaacttcgacgaccccaacctgatcatcctgcctctggcctttggcaagagacagggcagagaattcatctggaacgacctgctgtccctggaaaccggcagcctgaagctggccaacggaagagtgatcgagaagacactgtacaacagaagaacccggcaggatgagcctgccctgttcgtggccctgaccttcgagcggcgggaggtcctggactcctccaatatcaaaccaatgaacctgatcggcgtggcaagaggcgaaaacatccccgccgtgatcgccctgaccgaccccgagggctgcccactgagccggtttaaggatagcctgggaaacccaacccacatcctgagaatcggcgagagctataaggagaagcagcggaccatccaggccaagaaggaggtggagcagcggagagccggcggctacagccggaagtacgccagcaaagccaagaatctggcagacgatatggtgagaaacaccgctagagatctgctgtactacgccgtgacccaggatgccatgctgatcttcgccaacctgagccggggcttcggccggcagggcaagcggaccttcatggccgagagacagtacacacggatggaggactggctgaccgccaagctggcctacgagggcctgagcaagacctacctgtccaagacactggcccagtacacctccaagacatgcagcaactgtgggtttaccatcaccagcgccgactacgacagggtgctggagaagctgaagaagacagcaacaggctggatgaccacaattaacggcaaggagctgaaggtggagggccagattacctactacaacagatacaagagacagaacgtagtcaaggacctgtccgtcgagctggatagactgagcgaagaatctgtgaacaacgacatctcctcctggacaaagggcagaagcggagaagctctgagcctcctgaagaaaagattctcccatagacccgtgcaggagaagttcgtgtgcctgaactgcggcttcgagacacacgcagccgagcaagccgccctgaacatcgccagatcctggctgttcctgcggagccaggagtacaagaaataccagacaaacaagacaaccggcaacaccgataagagagccttcgtcgagacctggcagtccttttaccggaagaagcttaaggaggtgtggaaacctgccgtgcggtctggcggatctggcggaggctccaccagccccaagaaaaagagaaaagtctaagctgccttctgcggggcttgccttctggccatgcccttcttctctcccttgcacctgtacctcttggtctttgaataaagcctgagtaggaaggctagcaaaaaaaaaaaaaaaaaaaaaaaaaaaaaaaaaaaaaaaaaaaaaaaaaaaaaaaaaaaaaaaaaaaaaaaaaaaaaaaa

SEQ ID NO: 9752 - RNA, 8787 nt, synthetic construct
  source 1..8787: mol_type = other RNA
aggaaataagagagaaaagaagagtaagaagaaatataagagccaccatggcccctaagaagaagcgtaaagtgagccggatgaaccacgaccaggagttcgacccccctaaggtgtaccctcccgtccccgccgagaagagaaagcccatccgggtcctgagcctgttcgatggcatcgccaccggtctgctggtgctgaaggacctgggcatccaggtggataggtacattgcctccgaggtgtgcgaggactccatcaccgtgggaatggtgcgtcatcagggcaagatcatgtacgtgggcgacgtgcggagcgtgacacagaagcatatccaggagtggggccctttcgacctggtgatcggcggcagcccttgcaatgacctgagcatcgtgaacccagcccggaagggcctgtacgagggaaccggcagactgttcttcgagttttacagactgctgcacgacgcccggcctaaggaaggcgacgaccggcccttcttttggctgttcgagaatgtggtggccatgggagtcagcgacaagcgggatattagccggttcctggagagcaaccccgtgatgatcgatgccaaggaagtgagcgccgcccaccgggccagatacttctggggcaatctgcctggcatgaacagacccctggccagcaccgtgaacgacaagctggagctgcaggagtgcctggagcacggccggatcgccaagttcagcaaggtgagaaccatcaccacccgaagcaacagcatcaaacaaggcaaggaccagcactttcctgtgttcatgaacgagaaggaggacatcctgtggtgtaccgagatggagagagtgttcgggttcccagtccactacacagatgtcagcaacatgtctagactggccagacagagactgctgggaagaagctggtccgtccctgtgatcagacacctgttcgcccctctgaaggagtacttcgcctgcgtgagcagcggcaacagcaacgccaacagccggggccccagcttctctagcggcctggtgccactgtccctgagagggagccacatgggccccatggagatctacaaaaccgtgagcgcctggaagcggcagcctgtgcgcgtgctgagcctgtttcggaatatcgataaagtcctgaaaagcctgggattcctggagagcggctctggctccggcggtggcaccctgaagtacgtggaggatgtgacaaacgtggtcagacgggatgtggagaagtggggccccttcgatctggtgtacggcagcacccaacccctgggcagctcttgtgaccggtgccctggctggtacatgtttcagttccaccggatcctgcagtacgccctgccgagacaggagtcccagcggccattcttttggattttcatggacaacttgctgctgaccgaggatgaccaggaaactaccactcggttcctgcagaccgaagccgtgaccctgcaggacgtgagaggccgggactaccagaacgccatgcgggtgtggtccaacatccctggactgaaaagcaagcacgcacctctgacccctaaagaagaggagtacctgcaggcccaggtgcggagcagaagcaagctggacgcccctaaggtggatctgctggtgaagaattgcctcctgcccctgagagagtacttcaagtatttcagccagaatagtctgcccctgggaggcagcggcggcggcatggacagcgtggccttcgaggacgtggccgtgaacttcacccaggaggagtgggccctgctgagccccagccagaagaacctgtacagggacgtgatgctggaggccttcaggaacctggccagcgtgggcatccagtggaaggaccaggacaccgagaacctgtaccagaacctgggcatcaagctgaggcacatgagggcccacgccggccacaccaggagcgagtgcggcggcgagtggggcggcccaagcagcggcgcccctcctcccagcggcggcaggcggcccaagcagcggcgcccctcctcccagcggcggcagcccagccggctccccaacctctaccgaggagggcacctctgagtccgccacccccgagagcggccctggcacctccaccgagcccagcgagggcagcgcacccggcagccctgccggcagccccacctccacagaggagggaaccagcaccgagcccagcgaaggcagcgccccaggcaccagcaccgagcctagtgagcaggagattaaacggatcaacaagatcagaagaagacttgtgaaagacagcaacaccaagaaggccggcaagacaggccccatgaaaaccctgctggttagagtgatgacacccgatctgagagagcggctggaaaacctgagaaagaagcctgaaaatatcccccagcccatcagcaatacatctagagccaacctgaataagctgctgaccgattacaccgaaatgaagaaggcgatcctgcatgtgtactgggaagagttccagaaggaccctgtgggcctgatgagccgggtggcccagcctgccagcaagaagatcgatcagaacaagctgaaacctgagatggacgagaagggcaacctgaccaccgccggctttgcctgctctcagtgtggccagcccctgttcgtgtacaagctggagcaggtgtctgagaagggcaaggcttacaccaactacttcggacggtgcaatgtggccgagcacgaaaagctgatcctgctggcccagctgaagcccgagaaggatagcgacgaagccgtgacatatagcctgggaaagtttgggcagagggccctggatttctacagcattcatgtgaccaaggagtccacccaccccgtgaagcccctggcccagatcgccggaaacagatacgcctccggacctgtgggaaaggccctgagcgacgcatgtatgggcacaatcgcctccttcctgtctaagtaccaggacatcatcatcgaacaccagaaggtggtgaagggcaaccagaagagactggagagcctgcgggagctggccggcaaggaaaacctggaataccctagcgtgaccctgccacctcagcctcacaccaaggagggcgttgatgcctacaacgaagtgatcgcccgggtgcgaatgtgggtgaacctgaacctgtggcagaagctgaagctaagcagagatgatgccaagcctctgctgagactgaagggattcccttcctttcctctggtcgagagacaggccaacgaagtggactggtgggacatggtgtgtaacgtgaagaagctgatcaacgagaaaaaggaggatggcaaggtgttttggcagaatctggctggctacaagagacaggaagccctgagaccatacctgagcagcgaggaagatcggaagaagggaaagaaattcgctcggtaccagctgggcgacctgctgctgcacctggaaaagaagcacggcgaggactggggaaaggtgtacgacgaggcctgggagcggattgacaagaaagtggaaggcctgagcaagcacatcaagctggaagaggaacggagaagcgaggacgcccagagcaaggccgccctgaccgactggctgcgggctaaggccagcttcgtgatcgagggcctgaaggaggccgacaaggacgagttctgcagatgcgagctgaagctgcagaagtggtacggggacctgcggggaaagcccttcgccatcgaagccgagaacagcatcctggacatcagcggcttcagcaagcagtacaactgtgccttcatctggcagaaggacggcgtgaagaagctgaacctgtacctgatcatcaactacttcaagggcggcaagctgcggttcaagaagatcaaacctgaagccttcgaagccaacagattctacaccgtgatcaacaaaaagagcggcgagatcgtgcccatggaggtgaacttcaacttcgacgaccccaacctgatcatcctgcctctggcctttggcaagagacagggcagagaattcatctggaacgacctgctgtccctggaaaccggcagcctgaagctggccaacggaagagtgatcgagaagacactgtacaacagaagaacccggcaggatgagcctgccctgttcgtggccctgaccttcgagcggcgggaggtcctggactcctccaatatcaaaccaatgaacctgatcggcgtggcaagaggcgaaaacatccccgccgtgatcgccctgaccgaccccgagggctgcccactgagccggtttaaggatagcctgggaaacccaacccacatcctgagaatcggcgagagctataaggagaagcagcggaccatccaggccaagaaggaggtggagcagcggagagccggcggctacagccggaagtacgccagcaaagccaagaatctggcagacgatatggtgagaaacaccgctagagatctgctgtactacgccgtgacccaggatgccatgctgatcttcgccaacctgagccggggcttcggccggcagggcaagcggaccttcatggccgagagacagtacacacggatggaggactggctgaccgccaagctggcctacgagggcctgagcaagacctacctgtccaagacactggcccagtacacctccaagacatgcagcaactgtgggtttaccatcaccagcgccgactacgacagggtgctggagaagctgaagaagacagcaacaggctggatgaccacaattaacggcaaggagctgaaggtggagggccagattacctactacaacagatacaagagacagaacgtagtcaaggacctgtccgtcgagctggatagactgagcgaagaatctgtgaacaacgacatctcctcctggacaaagggcagaagcggagaagctctgagcctcctgaagaaaagattctcccatagacccgtgcaggagaagttcgtgtgcctgaactgcggcttcgagacacacgcagccgagcaagccgccctgaacatcgccagatcctggctgttcctgcggagccaggagtacaagaaataccagacaaacaagacaaccggcaacaccgataagagagccttcgtcgagacctggcagtccttttaccggaagaagcttaaggaggtgtggaaacctgccgtgcggtctggcggatctggcggaggctccaccagccccaagaaaaagagaaaagtctaagctgccttctgcggggcttgccttctggccatgcccttcttctctcccttgcacctgtacctcttggtctttgaataaagcctgagtaggaaggctagcaaaaaaaaaaaaaaaaaaaaaaaaaaaaaaaaaaaaaaaaaaaaaaaaaaaaaaaaaaaaaaaaaaaaaaaaaaaaaaaagcccagccggctccccaacctctaccgaggagggcacctctgagtccgccacccccgagagcggccctggcacctccaccgagcccagcgagggcagcgcacccggcagccctgccggcagccccacctccacagaggagggaaccagcaccgagcccagcgaaggcagcgccccaggcaccagcaccgagcctagtgagcaggagattaaacggatcaacaagatcagaagaagacttgtgaaagacagcaacaccaagaaggccggcaagacaggccccatgaaaaccctgctggttagagtgatgacacccgatctgagagagcggctggaaaacctgagaaagaagcctgaaaatatcccccagcccatcagcaatacatctagagccaacctgaataagctgctgaccgattacaccgaaatgaagaaggcgatcctgcatgtgtactgggaagagttccagaaggaccctgtgggcctgatgagccgggtggcccagcctgccagcaagaagatcgatcagaacaagctgaaacctgagatggacgagaagggcaacctgaccaccgccggctttgcctgctctcagtgtggccagcccctgttcgtgtacaagctggagcaggtgtctgagaagggcaaggcttacaccaactacttcggacggtgcaatgtggccgagcacgaaaagctgatcctgctggcccagctgaagcccgagaaggatagcgacgaagccgtgacatatagcctgggaaagtttgggcagagggccctggatttctacagcattcatgtgaccaaggagtccacccaccccgtgaagcccctggcccagatcgccggaaacagatacgcctccggacctgtgggaaaggccctgagcgacgcatgtatgggcacaatcgcctccttcctgtctaagtaccaggacatcatcatcgaacaccagaaggtggtgaagggcaaccagaagagactggagagcctgcgggagctggccggcaaggaaaacctggaataccctagcgtgaccctgccacctcagcctcacaccaaggagggcgttgatgcctacaacgaagtgatcgcccgggtgcgaatgtgggtgaacctgaacctgtggcagaagctgaagctaagcagagatgatgccaagcctctgctgagactgaagggattcccttcctttcctctggtcgagagacaggccaacgaagtggactggtgggacatggtgtgtaacgtgaagaagctgatcaacgagaaaaaggaggatggcaaggtgttttggcagaatctggctggctacaagagacaggaagccctgagaccatacctgagcagcgaggaagatcggaagaagggaaagaaattcgctcggtaccagctgggcgacctgctgctgcacctggaaaagaagcacggcgaggactggggaaaggtgtacgacgaggcctgggagcggattgacaagaaagtggaaggcctgagcaagcacatcaagctggaagaggaacggagaagcgaggacgcccagagcaaggccgccctgaccgactggctgcgggctaaggccagcttcgtgatcgagggcctgaaggaggccgacaaggacgagttctgcagatgcgagctgaagctgcagaagtggtacggggacctgcggggaaagcccttcgccatcgaagccgagaacagcatcctggacatcagcggcttcagcaagcagtacaactgtgccttcatctggcagaaggacggcgtgaagaagctgaacctgtacctgatcatcaactacttcaagggcggcaagctgcggttcaagaagatcaaacctgaagccttcgaagccaacagattctacaccgtgatcaacaaaaagagcggcgagatcgtgcccatggaggtgaacttcaacttcgacgaccccaacctgatcatcctgcctctggcctttggcaagagacagggcagagaattcatctggaacgacctgctgtccctggaaaccggcagcctgaagctggccaacggaagagtgatcgagaagacactgtacaacagaagaacccggcaggatgagcctgccctgttcgtggccctgaccttcgagcggcgggaggtcctggactcctccaatatcaaaccaatgaacctgatcggcgtggcaagaggcgaaaacatccccgccgtgatcgccctgaccgaccccgagggctgcccactgagccggtttaaggatagcctgggaaacccaacccacatcctgagaatcggcgagagctataaggagaagcagcggaccatccaggccaagaaggaggtggagcagcggagagccggcggctacagccggaagtacgccagcaaagccaagaatctggcagacgatatggtgagaaacaccgctagagatctgctgtactacgccgtgacccaggatgccatgctgatcttcgccaacctgagccggggcttcggccggcagggcaagcggaccttcatggccgagagacagtacacacggatggaggactggctgaccgccaagctggcctacgagggcctgagcaagacctacctgtccaagacactggcccagtacacctccaagacatgcagcaactgtgggtttaccatcaccagcgccgactacgacagggtgctggagaagctgaagaagacagcaacaggctggatgaccacaattaacggcaaggagctgaaggtggagggccagattacctactacaacagatacaagagacagaacgtagtcaaggacctgtccgtcgagctggatagactgagcgaagaatctgtgaacaacgacatctcctcctggacaaagggcagaagcggagaagctctgagcctcctgaagaaaagattctcccatagacccgtgcaggagaagttcgtgtgcctgaactgcggcttcgagacacacgcagccgagcaagccgccctgaacatcgccagatcctggctgttcctgcggagccaggagtacaagaaataccagacaaacaagacaaccggcaacaccgataagagagccttcgtcgagacctggcagtccttttaccggaagaagcttaaggaggtgtggaaacctgccgtgcggtctggcggatctggcggaggctccaccagccccaagaaaaagagaaaagtctaagctgccttctgcggggcttgccttctggccatgcccttcttctctcccttgcacctgtacctcttggtctttgaataaagcctgagtaggaaggctagcaaaaaaaaaaaaaaaaaaaaaaaaaaaaaaaaaaaaaaaaaaaaaaaaaaaaaaaaaaaaaaaaaaaaaaaaaaaaaaaa

SEQ ID NO: 9753 - RNA, 8787 nt, synthetic construct
  source 1..8787: mol_type = other RNA
aggaaataagagagaaaagaagagtaagaagaaatataagagccaccatggcccctaagaagaagcgtaaagtgagccggatgaaccacgaccaggagttcgacccccctaaggtgtaccctcccgtccccgccgagaagagaaagcccatccgggtcctgagcctgttcgatggcatcgccaccggtctgctggtgctgaaggacctgggcatccaggtggataggtacattgcctccgaggtgtgcgaggactccatcaccgtgggaatggtgcgtcatcagggcaagatcatgtacgtgggcgacgtgcggagcgtgacacagaagcatatccaggagtggggccctttcgacctggtgatcggcggcagcccttgcaatgacctgagcatcgtgaacccagcccggaagggcctgtacgagggaaccggcagactgttcttcgagttttacagactgctgcacgacgcccggcctaaggaaggcgacgaccggcccttcttttggctgttcgagaatgtggtggccatgggagtcagcgacaagcgggatattagccggttcctggagagcaaccccgtgatgatcgatgccaaggaagtgagcgccgcccaccgggccagatacttctggggcaatctgcctggcatgaacagacccctggccagcaccgtgaacgacaagctggagctgcaggagtgcctggagcacggccggatcgccaagttcagcaaggtgagaaccatcaccacccgaagcaacagcatcaaacaaggcaaggaccagcactttcctgtgttcatgaacgagaaggaggacatcctgtggtgtaccgagatggagagagtgttcgggttcccagtccactacacagatgtcagcaacatgtctagactggccagacagagactgctgggaagaagctggtccgtccctgtgatcagacacctgttcgcccctctgaaggagtacttcgcctgcgtgagcagcggcaacagcaacgccaacagccggggccccagcttctctagcggcctggtgccactgtccctgagagggagccacatgggccccatggagatctacaaaaccgtgagcgcctggaagcggcagcctgtgcgcgtgctgagcctgtttcggaatatcgataaagtcctgaaaagcctgggattcctggagagcggctctggctccggcggtggcaccctgaagtacgtggaggatgtgacaaacgtggtcagacgggatgtggagaagtggggccccttcgatctggtgtacggcagcacccaacccctgggcagctcttgtgaccggtgccctggctggtacatgtttcagttccaccggatcctgcagtacgccctgccgagacaggagtcccagcggccattcttttggattttcatggacaacttgctgctgaccgaggatgaccaggaaactaccactcggttcctgcagaccgaagccgtgaccctgcaggacgtgagaggccgggactaccagaacgccatgcgggtgtggtccaacatccctggactgaaaagcaagcacgcacctctgacccctaaagaagaggagtacctgcaggcccaggtgcggagcagaagcaagctggacgcccctaaggtggatctgctggtgaagaattgcctcctgcccctgagagagtacttcaagtatttcagccagaatagtctgcccctgggaggcagcggcggcggcatggtgcacggcagcgtgaccttcagggacgtggccatcgacttcagccaggaggagtgggagtgcctgcagcccgaccagaggaccctgtacagggacgtgatgctggagaactacagccacctgatcagcctgggcagcagcatcagcaagcccgacgtgatcaccctgctggagcaggagaaggagccctggatggtggtgaggaaggagaccagcaggaggtaccccgacctggagagcggcggcccaagcagcggcgcccctcctcccagcggcggcaggcggcccaagcagcggcgcccctcctcccagcggcggcagcccagccggctccccaacctctaccgaggagggcacctctgagtccgccacccccgagagcggccctggcacctccaccgagcccagcgagggcagcgcacccggcagccctgccggcagccccacctccacagaggagggaaccagcaccgagcccagcgaaggcagcgccccaggcaccagcaccgagcctagtgagcaggagattaaacggatcaacaagatcagaagaagacttgtgaaagacagcaacaccaagaaggccggcaagacaggccccatgaaaaccctgctggttagagtgatgacacccgatctgagagagcggctggaaaacctgagaaagaagcctgaaaatatcccccagcccatcagcaatacatctagagccaacctgaataagctgctgaccgattacaccgaaatgaagaaggcgatcctgcatgtgtactgggaagagttccagaaggaccctgtgggcctgatgagccgggtggcccagcctgccagcaagaagatcgatcagaacaagctgaaacctgagatggacgagaagggcaacctgaccaccgccggctttgcctgctctcagtgtggccagcccctgttcgtgtacaagctggagcaggtgtctgagaagggcaaggcttacaccaactacttcggacggtgcaatgtggccgagcacgaaaagctgatcctgctggcccagctgaagcccgagaaggatagcgacgaagccgtgacatatagcctgggaaagtttgggcagagggccctggatttctacagcattcatgtgaccaaggagtccacccaccccgtgaagcccctggcccagatcgccggaaacagatacgcctccggacctgtgggaaaggccctgagcgacgcatgtatgggcacaatcgcctccttcctgtctaagtaccaggacatcatcatcgaacaccagaaggtggtgaagggcaaccagaagagactggagagcctgcgggagctggccggcaaggaaaacctggaataccctagcgtgaccctgccacctcagcctcacaccaaggagggcgttgatgcctacaacgaagtgatcgcccgggtgcgaatgtgggtgaacctgaacctgtggcagaagctgaagctaagcagagatgatgccaagcctctgctgagactgaagggattcccttcctttcctctggtcgagagacaggccaacgaagtggactggtgggacatggtgtgtaacgtgaagaagctgatcaacgagaaaaaggaggatggcaaggtgttttggcagaatctggctggctacaagagacaggaagccctgagaccatacctgagcagcgaggaagatcggaagaagggaaagaaattcgctcggtaccagctgggcgacctgctgctgcacctggaaaagaagcacggcgaggactggggaaaggtgtacgacgaggcctgggagcggattgacaagaaagtggaaggcctgagcaagcacatcaagctggaagaggaacggagaagcgaggacgcccagagcaaggccgccctgaccgactggctgcgggctaaggccagcttcgtgatcgagggcctgaaggaggccgacaaggacgagttctgcagatgcgagctgaagctgcagaagtggtacggggacctgcggggaaagcccttcgccatcgaagccgagaacagcatcctggacatcagcggcttcagcaagcagtacaactgtgccttcatctggcagaaggacggcgtgaagaagctgaacctgtacctgatcatcaactacttcaagggcggcaagctgcggttcaagaagatcaaacctgaagccttcgaagccaacagattctacaccgtgatcaacaaaaagagcggcgagatcgtgcccatggaggtgaacttcaacttcgacgaccccaacctgatcatcctgcctctggcctttggcaagagacagggcagagaattcatctggaacgacctgctgtccctggaaaccggcagcctgaagctggccaacggaagagtgatcgagaagacactgtacaacagaagaacccggcaggatgagcctgccctgttcgtggccctgaccttcgagcggcgggaggtcctggactcctccaatatcaaaccaatgaacctgatcggcgtggcaagaggcgaaaacatccccgccgtgatcgccctgaccgaccccgagggctgcccactgagccggtttaaggatagcctgggaaacccaacccacatcctgagaatcggcgagagctataaggagaagcagcggaccatccaggccaagaaggaggtggagcagcggagagccggcggctacagccggaagtacgccagcaaagccaagaatctggcagacgatatggtgagaaacaccgctagagatctgctgtactacgccgtgacccaggatgccatgctgatcttcgccaacctgagccggggcttcggccggcagggcaagcggaccttcatggccgagagacagtacacacggatggaggactggctgaccgccaagctggcctacgagggcctgagcaagacctacctgtccaagacactggcccagtacacctccaagacatgcagcaactgtgggtttaccatcaccagcgccgactacgacagggtgctggagaagctgaagaagacagcaacaggctggatgaccacaattaacggcaaggagctgaaggtggagggccagattacctactacaacagatacaagagacagaacgtagtcaaggacctgtccgtcgagctggatagactgagcgaagaatctgtgaacaacgacatctcctcctggacaaagggcagaagcggagaagctctgagcctcctgaagaaaagattctcccatagacccgtgcaggagaagttcgtgtgcctgaactgcggcttcgagacacacgcagccgagcaagccgccctgaacatcgccagatcctggctgttcctgcggagccaggagtacaagaaataccagacaaacaagacaaccggcaacaccgataagagagccttcgtcgagacctggcagtccttttaccggaagaagcttaaggaggtgtggaaacctgccgtgcggtctggcggatctggcggaggctccaccagccccaagaaaaagagaaaagtctaagctgccttctgcggggcttgccttctggccatgcccttcttctctcccttgcacctgtacctcttggtctttgaataaagcctgagtaggaaggctagcaaaaaaaaaaaaaaaaaaaaaaaaaaaaaaaaaaaaaaaaaaaaaaaaaaaaaaaaaaaaaaaaaaaaaaaaaaaaaaaagcccagccggctccccaacctctaccgaggagggcacctctgagtccgccacccccgagagcggccctggcacctccaccgagcccagcgagggcagcgcacccggcagccctgccggcagccccacctccacagaggagggaaccagcaccgagcccagcgaaggcagcgccccaggcaccagcaccgagcctagtgagcaggagattaaacggatcaacaagatcagaagaagacttgtgaaagacagcaacaccaagaaggccggcaagacaggccccatgaaaaccctgctggttagagtgatgacacccgatctgagagagcggctggaaaacctgagaaagaagcctgaaaatatcccccagcccatcagcaatacatctagagccaacctgaataagctgctgaccgattacaccgaaatgaagaaggcgatcctgcatgtgtactgggaagagttccagaaggaccctgtgggcctgatgagccgggtggcccagcctgccagcaagaagatcgatcagaacaagctgaaacctgagatggacgagaagggcaacctgaccaccgccggctttgcctgctctcagtgtggccagcccctgttcgtgtacaagctggagcaggtgtctgagaagggcaaggcttacaccaactacttcggacggtgcaatgtggccgagcacgaaaagctgatcctgctggcccagctgaagcccgagaaggatagcgacgaagccgtgacatatagcctgggaaagtttgggcagagggccctggatttctacagcattcatgtgaccaaggagtccacccaccccgtgaagcccctggcccagatcgccggaaacagatacgcctccggacctgtgggaaaggccctgagcgacgcatgtatgggcacaatcgcctccttcctgtctaagtaccaggacatcatcatcgaacaccagaaggtggtgaagggcaaccagaagagactggagagcctgcgggagctggccggcaaggaaaacctggaataccctagcgtgaccctgccacctcagcctcacaccaaggagggcgttgatgcctacaacgaagtgatcgcccgggtgcgaatgtgggtgaacctgaacctgtggcagaagctgaagctaagcagagatgatgccaagcctctgctgagactgaagggattcccttcctttcctctggtcgagagacaggccaacgaagtggactggtgggacatggtgtgtaacgtgaagaagctgatcaacgagaaaaaggaggatggcaaggtgttttggcagaatctggctggctacaagagacaggaagccctgagaccatacctgagcagcgaggaagatcggaagaagggaaagaaattcgctcggtaccagctgggcgacctgctgctgcacctggaaaagaagcacggcgaggactggggaaaggtgtacgacgaggcctgggagcggattgacaagaaagtggaaggcctgagcaagcacatcaagctggaagaggaacggagaagcgaggacgcccagagcaaggccgccctgaccgactggctgcgggctaaggccagcttcgtgatcgagggcctgaaggaggccgacaaggacgagttctgcagatgcgagctgaagctgcagaagtggtacggggacctgcggggaaagcccttcgccatcgaagccgagaacagcatcctggacatcagcggcttcagcaagcagtacaactgtgccttcatctggcagaaggacggcgtgaagaagctgaacctgtacctgatcatcaactacttcaagggcggcaagctgcggttcaagaagatcaaacctgaagccttcgaagccaacagattctacaccgtgatcaacaaaaagagcggcgagatcgtgcccatggaggtgaacttcaacttcgacgaccccaacctgatcatcctgcctctggcctttggcaagagacagggcagagaattcatctggaacgacctgctgtccctggaaaccggcagcctgaagctggccaacggaagagtgatcgagaagacactgtacaacagaagaacccggcaggatgagcctgccctgttcgtggccctgaccttcgagcggcgggaggtcctggactcctccaatatcaaaccaatgaacctgatcggcgtggcaagaggcgaaaacatccccgccgtgatcgccctgaccgaccccgagggctgcccactgagccggtttaaggatagcctgggaaacccaacccacatcctgagaatcggcgagagctataaggagaagcagcggaccatccaggccaagaaggaggtggagcagcggagagccggcggctacagccggaagtacgccagcaaagccaagaatctggcagacgatatggtgagaaacaccgctagagatctgctgtactacgccgtgacccaggatgccatgctgatcttcgccaacctgagccggggcttcggccggcagggcaagcggaccttcatggccgagagacagtacacacggatggaggactggctgaccgccaagctggcctacgagggcctgagcaagacctacctgtccaagacactggcccagtacacctccaagacatgcagcaactgtgggtttaccatcaccagcgccgactacgacagggtgctggagaagctgaagaagacagcaacaggctggatgaccacaattaacggcaaggagctgaaggtggagggccagattacctactacaacagatacaagagacagaacgtagtcaaggacctgtccgtcgagctggatagactgagcgaagaatctgtgaacaacgacatctcctcctggacaaagggcagaagcggagaagctctgagcctcctgaagaaaagattctcccatagacccgtgcaggagaagttcgtgtgcctgaactgcggcttcgagacacacgcagccgagcaagccgccctgaacatcgccagatcctggctgttcctgcggagccaggagtacaagaaataccagacaaacaagacaaccggcaacaccgataagagagccttcgtcgagacctggcagtccttttaccggaagaagcttaaggaggtgtggaaacctgccgtgcggtctggcggatctggcggaggctccaccagccccaagaaaaagagaaaagtctaagctgccttctgcggggcttgccttctggccatgcccttcttctctcccttgcacctgtacctcttggtctttgaataaagcctgagtaggaaggctagcaaaaaaaaaaaaaaaaaaaaaaaaaaaaaaaaaaaaaaaaaaaaaaaaaaaaaaaaaaaaaaaaaaaaaaaaaaaaaaaa

SEQ ID NO: 9754 - RNA, 8787 nt, synthetic construct
  source 1..8787: mol_type = other RNA
aggaaataagagagaaaagaagagtaagaagaaatataagagccaccatggcccctaagaagaagcgtaaagtgagccggatgaaccacgaccaggagttcgacccccctaaggtgtaccctcccgtccccgccgagaagagaaagcccatccgggtcctgagcctgttcgatggcatcgccaccggtctgctggtgctgaaggacctgggcatccaggtggataggtacattgcctccgaggtgtgcgaggactccatcaccgtgggaatggtgcgtcatcagggcaagatcatgtacgtgggcgacgtgcggagcgtgacacagaagcatatccaggagtggggccctttcgacctggtgatcggcggcagcccttgcaatgacctgagcatcgtgaacccagcccggaagggcctgtacgagggaaccggcagactgttcttcgagttttacagactgctgcacgacgcccggcctaaggaaggcgacgaccggcccttcttttggctgttcgagaatgtggtggccatgggagtcagcgacaagcgggatattagccggttcctggagagcaaccccgtgatgatcgatgccaaggaagtgagcgccgcccaccgggccagatacttctggggcaatctgcctggcatgaacagacccctggccagcaccgtgaacgacaagctggagctgcaggagtgcctggagcacggccggatcgccaagttcagcaaggtgagaaccatcaccacccgaagcaacagcatcaaacaaggcaaggaccagcactttcctgtgttcatgaacgagaaggaggacatcctgtggtgtaccgagatggagagagtgttcgggttcccagtccactacacagatgtcagcaacatgtctagactggccagacagagactgctgggaagaagctggtccgtccctgtgatcagacacctgttcgcccctctgaaggagtacttcgcctgcgtgagcagcggcaacagcaacgccaacagccggggccccagcttctctagcggcctggtgccactgtccctgagagggagccacatgggccccatggagatctacaaaaccgtgagcgcctggaagcggcagcctgtgcgcgtgctgagcctgtttcggaatatcgataaagtcctgaaaagcctgggattcctggagagcggctctggctccggcggtggcaccctgaagtacgtggaggatgtgacaaacgtggtcagacgggatgtggagaagtggggccccttcgatctggtgtacggcagcacccaacccctgggcagctcttgtgaccggtgccctggctggtacatgtttcagttccaccggatcctgcagtacgccctgccgagacaggagtcccagcggccattcttttggattttcatggacaacttgctgctgaccgaggatgaccaggaaactaccactcggttcctgcagaccgaagccgtgaccctgcaggacgtgagaggccgggactaccagaacgccatgcgggtgtggtccaacatccctggactgaaaagcaagcacgcacctctgacccctaaagaagaggagtacctgcaggcccaggtgcggagcagaagcaagctggacgcccctaaggtggatctgctggtgaagaattgcctcctgcccctgagagagtacttcaagtatttcagccagaatagtctgcccctgggaggcagcggcggcggcacccaggtgagcgtgaccttcgacgacgtggccgtgaccttcacccaggaggagtggggccacctggaccccgcccagaggaccctgtacagggaggtgatgctggagacctgcaggctgctgatgagcctgggctgccccgtgcccaggcccgagctgatctaccagcaggagcacggccaggagctgtggaccgtgaagagggacctgagcaggagcacctgcgccggctacagcagcgagggcggcccaagcagcggcgcccctcctcccagcggcggcaggcggcccaagcagcggcgcccctcctcccagcggcggcagcccagccggctccccaacctctaccgaggagggcacctctgagtccgccacccccgagagcggccctggcacctccaccgagcccagcgagggcagcgcacccggcagccctgccggcagccccacctccacagaggagggaaccagcaccgagcccagcgaaggcagcgccccaggcaccagcaccgagcctagtgagcaggagattaaacggatcaacaagatcagaagaagacttgtgaaagacagcaacaccaagaaggccggcaagacaggccccatgaaaaccctgctggttagagtgatgacacccgatctgagagagcggctggaaaacctgagaaagaagcctgaaaatatcccccagcccatcagcaatacatctagagccaacctgaataagctgctgaccgattacaccgaaatgaagaaggcgatcctgcatgtgtactgggaagagttccagaaggaccctgtgggcctgatgagccgggtggcccagcctgccagcaagaagatcgatcagaacaagctgaaacctgagatggacgagaagggcaacctgaccaccgccggctttgcctgctctcagtgtggccagcccctgttcgtgtacaagctggagcaggtgtctgagaagggcaaggcttacaccaactacttcggacggtgcaatgtggccgagcacgaaaagctgatcctgctggcccagctgaagcccgagaaggatagcgacgaagccgtgacatatagcctgggaaagtttgggcagagggccctggatttctacagcattcatgtgaccaaggagtccacccaccccgtgaagcccctggcccagatcgccggaaacagatacgcctccggacctgtgggaaaggccctgagcgacgcatgtatgggcacaatcgcctccttcctgtctaagtaccaggacatcatcatcgaacaccagaaggtggtgaagggcaaccagaagagactggagagcctgcgggagctggccggcaaggaaaacctggaataccctagcgtgaccctgccacctcagcctcacaccaaggagggcgttgatgcctacaacgaagtgatcgcccgggtgcgaatgtgggtgaacctgaacctgtggcagaagctgaagctaagcagagatgatgccaagcctctgctgagactgaagggattcccttcctttcctctggtcgagagacaggccaacgaagtggactggtgggacatggtgtgtaacgtgaagaagctgatcaacgagaaaaaggaggatggcaaggtgttttggcagaatctggctggctacaagagacaggaagccctgagaccatacctgagcagcgaggaagatcggaagaagggaaagaaattcgctcggtaccagctgggcgacctgctgctgcacctggaaaagaagcacggcgaggactggggaaaggtgtacgacgaggcctgggagcggattgacaagaaagtggaaggcctgagcaagcacatcaagctggaagaggaacggagaagcgaggacgcccagagcaaggccgccctgaccgactggctgcgggctaaggccagcttcgtgatcgagggcctgaaggaggccgacaaggacgagttctgcagatgcgagctgaagctgcagaagtggtacggggacctgcggggaaagcccttcgccatcgaagccgagaacagcatcctggacatcagcggcttcagcaagcagtacaactgtgccttcatctggcagaaggacggcgtgaagaagctgaacctgtacctgatcatcaactacttcaagggcggcaagctgcggttcaagaagatcaaacctgaagccttcgaagccaacagattctacaccgtgatcaacaaaaagagcggcgagatcgtgcccatggaggtgaacttcaacttcgacgaccccaacctgatcatcctgcctctggcctttggcaagagacagggcagagaattcatctggaacgacctgctgtccctggaaaccggcagcctgaagctggccaacggaagagtgatcgagaagacactgtacaacagaagaacccggcaggatgagcctgccctgttcgtggccctgaccttcgagcggcgggaggtcctggactcctccaatatcaaaccaatgaacctgatcggcgtggcaagaggcgaaaacatccccgccgtgatcgccctgaccgaccccgagggctgcccactgagccggtttaaggatagcctgggaaacccaacccacatcctgagaatcggcgagagctataaggagaagcagcggaccatccaggccaagaaggaggtggagcagcggagagccggcggctacagccggaagtacgccagcaaagccaagaatctggcagacgatatggtgagaaacaccgctagagatctgctgtactacgccgtgacccaggatgccatgctgatcttcgccaacctgagccggggcttcggccggcagggcaagcggaccttcatggccgagagacagtacacacggatggaggactggctgaccgccaagctggcctacgagggcctgagcaagacctacctgtccaagacactggcccagtacacctccaagacatgcagcaactgtgggtttaccatcaccagcgccgactacgacagggtgctggagaagctgaagaagacagcaacaggctggatgaccacaattaacggcaaggagctgaaggtggagggccagattacctactacaacagatacaagagacagaacgtagtcaaggacctgtccgtcgagctggatagactgagcgaagaatctgtgaacaacgacatctcctcctggacaaagggcagaagcggagaagctctgagcctcctgaagaaaagattctcccatagacccgtgcaggagaagttcgtgtgcctgaactgcggcttcgagacacacgcagccgagcaagccgccctgaacatcgccagatcctggctgttcctgcggagccaggagtacaagaaataccagacaaacaagacaaccggcaacaccgataagagagccttcgtcgagacctggcagtccttttaccggaagaagcttaaggaggtgtggaaacctgccgtgcggtctggcggatctggcggaggctccaccagccccaagaaaaagagaaaagtctaagctgccttctgcggggcttgccttctggccatgcccttcttctctcccttgcacctgtacctcttggtctttgaataaagcctgagtaggaaggctagcaaaaaaaaaaaaaaaaaaaaaaaaaaaaaaaaaaaaaaaaaaaaaaaaaaaaaaaaaaaaaaaaaaaaaaaaaaaaaaaagcccagccggctccccaacctctaccgaggagggcacctctgagtccgccacccccgagagcggccctggcacctccaccgagcccagcgagggcagcgcacccggcagccctgccggcagccccacctccacagaggagggaaccagcaccgagcccagcgaaggcagcgccccaggcaccagcaccgagcctagtgagcaggagattaaacggatcaacaagatcagaagaagacttgtgaaagacagcaacaccaagaaggccggcaagacaggccccatgaaaaccctgctggttagagtgatgacacccgatctgagagagcggctggaaaacctgagaaagaagcctgaaaatatcccccagcccatcagcaatacatctagagccaacctgaataagctgctgaccgattacaccgaaatgaagaaggcgatcctgcatgtgtactgggaagagttccagaaggaccctgtgggcctgatgagccgggtggcccagcctgccagcaagaagatcgatcagaacaagctgaaacctgagatggacgagaagggcaacctgaccaccgccggctttgcctgctctcagtgtggccagcccctgttcgtgtacaagctggagcaggtgtctgagaagggcaaggcttacaccaactacttcggacggtgcaatgtggccgagcacgaaaagctgatcctgctggcccagctgaagcccgagaaggatagcgacgaagccgtgacatatagcctgggaaagtttgggcagagggccctggatttctacagcattcatgtgaccaaggagtccacccaccccgtgaagcccctggcccagatcgccggaaacagatacgcctccggacctgtgggaaaggccctgagcgacgcatgtatgggcacaatcgcctccttcctgtctaagtaccaggacatcatcatcgaacaccagaaggtggtgaagggcaaccagaagagactggagagcctgcgggagctggccggcaaggaaaacctggaataccctagcgtgaccctgccacctcagcctcacaccaaggagggcgttgatgcctacaacgaagtgatcgcccgggtgcgaatgtgggtgaacctgaacctgtggcagaagctgaagctaagcagagatgatgccaagcctctgctgagactgaagggattcccttcctttcctctggtcgagagacaggccaacgaagtggactggtgggacatggtgtgtaacgtgaagaagctgatcaacgagaaaaaggaggatggcaaggtgttttggcagaatctggctggctacaagagacaggaagccctgagaccatacctgagcagcgaggaagatcggaagaagggaaagaaattcgctcggtaccagctgggcgacctgctgctgcacctggaaaagaagcacggcgaggactggggaaaggtgtacgacgaggcctgggagcggattgacaagaaagtggaaggcctgagcaagcacatcaagctggaagaggaacggagaagcgaggacgcccagagcaaggccgccctgaccgactggctgcgggctaaggccagcttcgtgatcgagggcctgaaggaggccgacaaggacgagttctgcagatgcgagctgaagctgcagaagtggtacggggacctgcggggaaagcccttcgccatcgaagccgagaacagcatcctggacatcagcggcttcagcaagcagtacaactgtgccttcatctggcagaaggacggcgtgaagaagctgaacctgtacctgatcatcaactacttcaagggcggcaagctgcggttcaagaagatcaaacctgaagccttcgaagccaacagattctacaccgtgatcaacaaaaagagcggcgagatcgtgcccatggaggtgaacttcaacttcgacgaccccaacctgatcatcctgcctctggcctttggcaagagacagggcagagaattcatctggaacgacctgctgtccctggaaaccggcagcctgaagctggccaacggaagagtgatcgagaagacactgtacaacagaagaacccggcaggatgagcctgccctgttcgtggccctgaccttcgagcggcgggaggtcctggactcctccaatatcaaaccaatgaacctgatcggcgtggcaagaggcgaaaacatccccgccgtgatcgccctgaccgaccccgagggctgcccactgagccggtttaaggatagcctgggaaacccaacccacatcctgagaatcggcgagagctataaggagaagcagcggaccatccaggccaagaaggaggtggagcagcggagagccggcggctacagccggaagtacgccagcaaagccaagaatctggcagacgatatggtgagaaacaccgctagagatctgctgtactacgccgtgacccaggatgccatgctgatcttcgccaacctgagccggggcttcggccggcagggcaagcggaccttcatggccgagagacagtacacacggatggaggactggctgaccgccaagctggcctacgagggcctgagcaagacctacctgtccaagacactggcccagtacacctccaagacatgcagcaactgtgggtttaccatcaccagcgccgactacgacagggtgctggagaagctgaagaagacagcaacaggctggatgaccacaattaacggcaaggagctgaaggtggagggccagattacctactacaacagatacaagagacagaacgtagtcaaggacctgtccgtcgagctggatagactgagcgaagaatctgtgaacaacgacatctcctcctggacaaagggcagaagcggagaagctctgagcctcctgaagaaaagattctcccatagacccgtgcaggagaagttcgtgtgcctgaactgcggcttcgagacacacgcagccgagcaagccgccctgaacatcgccagatcctggctgttcctgcggagccaggagtacaagaaataccagacaaacaagacaaccggcaacaccgataagagagccttcgtcgagacctggcagtccttttaccggaagaagcttaaggaggtgtggaaacctgccgtgcggtctggcggatctggcggaggctccaccagccccaagaaaaagagaaaagtctaagctgccttctgcggggcttgccttctggccatgcccttcttctctcccttgcacctgtacctcttggtctttgaataaagcctgagtaggaaggctagcaaaaaaaaaaaaaaaaaaaaaaaaaaaaaaaaaaaaaaaaaaaaaaaaaaaaaaaaaaaaaaaaaaaaaaaaaaaaaaaa

SEQ ID NO: 9755 - RNA, 8787 nt, synthetic construct
  source 1..8787: mol_type = other RNA
aggaaataagagagaaaagaagagtaagaagaaatataagagccaccatggcccctaagaagaagcgtaaagtgagccggatgaaccacgaccaggagttcgacccccctaaggtgtaccctcccgtccccgccgagaagagaaagcccatccgggtcctgagcctgttcgatggcatcgccaccggtctgctggtgctgaaggacctgggcatccaggtggataggtacattgcctccgaggtgtgcgaggactccatcaccgtgggaatggtgcgtcatcagggcaagatcatgtacgtgggcgacgtgcggagcgtgacacagaagcatatccaggagtggggccctttcgacctggtgatcggcggcagcccttgcaatgacctgagcatcgtgaacccagcccggaagggcctgtacgagggaaccggcagactgttcttcgagttttacagactgctgcacgacgcccggcctaaggaaggcgacgaccggcccttcttttggctgttcgagaatgtggtggccatgggagtcagcgacaagcgggatattagccggttcctggagagcaaccccgtgatgatcgatgccaaggaagtgagcgccgcccaccgggccagatacttctggggcaatctgcctggcatgaacagacccctggccagcaccgtgaacgacaagctggagctgcaggagtgcctggagcacggccggatcgccaagttcagcaaggtgagaaccatcaccacccgaagcaacagcatcaaacaaggcaaggaccagcactttcctgtgttcatgaacgagaaggaggacatcctgtggtgtaccgagatggagagagtgttcgggttcccagtccactacacagatgtcagcaacatgtctagactggccagacagagactgctgggaagaagctggtccgtccctgtgatcagacacctgttcgcccctctgaaggagtacttcgcctgcgtgagcagcggcaacagcaacgccaacagccggggccccagcttctctagcggcctggtgccactgtccctgagagggagccacatgggccccatggagatctacaaaaccgtgagcgcctggaagcggcagcctgtgcgcgtgctgagcctgtttcggaatatcgataaagtcctgaaaagcctgggattcctggagagcggctctggctccggcggtggcaccctgaagtacgtggaggatgtgacaaacgtggtcagacgggatgtggagaagtggggccccttcgatctggtgtacggcagcacccaacccctgggcagctcttgtgaccggtgccctggctggtacatgtttcagttccaccggatcctgcagtacgccctgccgagacaggagtcccagcggccattcttttggattttcatggacaacttgctgctgaccgaggatgaccaggaaactaccactcggttcctgcagaccgaagccgtgaccctgcaggacgtgagaggccgggactaccagaacgccatgcgggtgtggtccaacatccctggactgaaaagcaagcacgcacctctgacccctaaagaagaggagtacctgcaggcccaggtgcggagcagaagcaagctggacgcccctaaggtggatctgctggtgaagaattgcctcctgcccctgagagagtacttcaagtatttcagccagaatagtctgcccctgggaggcagcggcggcggcatggccttcgaggacgtggccgtgtacttcagcgaggaggagtggggcctgctggacaccgcccagagggccctgtacaggcacgtgatgctggagaacttcaccctggtgaccagcctgggcctgagcaccagcaggcccctggtggtgatccagctggagaggggcgaggacccctgggtgcccagcgtgaaggacatgaccctggccaggaacgcctacggcaggaggaccaccggcagcggcggcccaagcagcggcgcccctcctcccagcggcggcaggcggcccaagcagcggcgcccctcctcccagcggcggcagcccagccggctccccaacctctaccgaggagggcacctctgagtccgccacccccgagagcggccctggcacctccaccgagcccagcgagggcagcgcacccggcagccctgccggcagccccacctccacagaggagggaaccagcaccgagcccagcgaaggcagcgccccaggcaccagcaccgagcctagtgagcaggagattaaacggatcaacaagatcagaagaagacttgtgaaagacagcaacaccaagaaggccggcaagacaggccccatgaaaaccctgctggttagagtgatgacacccgatctgagagagcggctggaaaacctgagaaagaagcctgaaaatatcccccagcccatcagcaatacatctagagccaacctgaataagctgctgaccgattacaccgaaatgaagaaggcgatcctgcatgtgtactgggaagagttccagaaggaccctgtgggcctgatgagccgggtggcccagcctgccagcaagaagatcgatcagaacaagctgaaacctgagatggacgagaagggcaacctgaccaccgccggctttgcctgctctcagtgtggccagcccctgttcgtgtacaagctggagcaggtgtctgagaagggcaaggcttacaccaactacttcggacggtgcaatgtggccgagcacgaaaagctgatcctgctggcccagctgaagcccgagaaggatagcgacgaagccgtgacatatagcctgggaaagtttgggcagagggccctggatttctacagcattcatgtgaccaaggagtccacccaccccgtgaagcccctggcccagatcgccggaaacagatacgcctccggacctgtgggaaaggccctgagcgacgcatgtatgggcacaatcgcctccttcctgtctaagtaccaggacatcatcatcgaacaccagaaggtggtgaagggcaaccagaagagactggagagcctgcgggagctggccggcaaggaaaacctggaataccctagcgtgaccctgccacctcagcctcacaccaaggagggcgttgatgcctacaacgaagtgatcgcccgggtgcgaatgtgggtgaacctgaacctgtggcagaagctgaagctaagcagagatgatgccaagcctctgctgagactgaagggattcccttcctttcctctggtcgagagacaggccaacgaagtggactggtgggacatggtgtgtaacgtgaagaagctgatcaacgagaaaaaggaggatggcaaggtgttttggcagaatctggctggctacaagagacaggaagccctgagaccatacctgagcagcgaggaagatcggaagaagggaaagaaattcgctcggtaccagctgggcgacctgctgctgcacctggaaaagaagcacggcgaggactggggaaaggtgtacgacgaggcctgggagcggattgacaagaaagtggaaggcctgagcaagcacatcaagctggaagaggaacggagaagcgaggacgcccagagcaaggccgccctgaccgactggctgcgggctaaggccagcttcgtgatcgagggcctgaaggaggccgacaaggacgagttctgcagatgcgagctgaagctgcagaagtggtacggggacctgcggggaaagcccttcgccatcgaagccgagaacagcatcctggacatcagcggcttcagcaagcagtacaactgtgccttcatctggcagaaggacggcgtgaagaagctgaacctgtacctgatcatcaactacttcaagggcggcaagctgcggttcaagaagatcaaacctgaagccttcgaagccaacagattctacaccgtgatcaacaaaaagagcggcgagatcgtgcccatggaggtgaacttcaacttcgacgaccccaacctgatcatcctgcctctggcctttggcaagagacagggcagagaattcatctggaacgacctgctgtccctggaaaccggcagcctgaagctggccaacggaagagtgatcgagaagacactgtacaacagaagaacccggcaggatgagcctgccctgttcgtggccctgaccttcgagcggcgggaggtcctggactcctccaatatcaaaccaatgaacctgatcggcgtggcaagaggcgaaaacatccccgccgtgatcgccctgaccgaccccgagggctgcccactgagccggtttaaggatagcctgggaaacccaacccacatcctgagaatcggcgagagctataaggagaagcagcggaccatccaggccaagaaggaggtggagcagcggagagccggcggctacagccggaagtacgccagcaaagccaagaatctggcagacgatatggtgagaaacaccgctagagatctgctgtactacgccgtgacccaggatgccatgctgatcttcgccaacctgagccggggcttcggccggcagggcaagcggaccttcatggccgagagacagtacacacggatggaggactggctgaccgccaagctggcctacgagggcctgagcaagacctacctgtccaagacactggcccagtacacctccaagacatgcagcaactgtgggtttaccatcaccagcgccgactacgacagggtgctggagaagctgaagaagacagcaacaggctggatgaccacaattaacggcaaggagctgaaggtggagggccagattacctactacaacagatacaagagacagaacgtagtcaaggacctgtccgtcgagctggatagactgagcgaagaatctgtgaacaacgacatctcctcctggacaaagggcagaagcggagaagctctgagcctcctgaagaaaagattctcccatagacccgtgcaggagaagttcgtgtgcctgaactgcggcttcgagacacacgcagccgagcaagccgccctgaacatcgccagatcctggctgttcctgcggagccaggagtacaagaaataccagacaaacaagacaaccggcaacaccgataagagagccttcgtcgagacctggcagtccttttaccggaagaagcttaaggaggtgtggaaacctgccgtgcggtctggcggatctggcggaggctccaccagccccaagaaaaagagaaaagtctaagctgccttctgcggggcttgccttctggccatgcccttcttctctcccttgcacctgtacctcttggtctttgaataaagcctgagtaggaaggctagcaaaaaaaaaaaaaaaaaaaaaaaaaaaaaaaaaaaaaaaaaaaaaaaaaaaaaaaaaaaaaaaaaaaaaaaaaaaaaaaagcccagccggctccccaacctctaccgaggagggcacctctgagtccgccacccccgagagcggccctggcacctccaccgagcccagcgagggcagcgcacccggcagccctgccggcagccccacctccacagaggagggaaccagcaccgagcccagcgaaggcagcgccccaggcaccagcaccgagcctagtgagcaggagattaaacggatcaacaagatcagaagaagacttgtgaaagacagcaacaccaagaaggccggcaagacaggccccatgaaaaccctgctggttagagtgatgacacccgatctgagagagcggctggaaaacctgagaaagaagcctgaaaatatcccccagcccatcagcaatacatctagagccaacctgaataagctgctgaccgattacaccgaaatgaagaaggcgatcctgcatgtgtactgggaagagttccagaaggaccctgtgggcctgatgagccgggtggcccagcctgccagcaagaagatcgatcagaacaagctgaaacctgagatggacgagaagggcaacctgaccaccgccggctttgcctgctctcagtgtggccagcccctgttcgtgtacaagctggagcaggtgtctgagaagggcaaggcttacaccaactacttcggacggtgcaatgtggccgagcacgaaaagctgatcctgctggcccagctgaagcccgagaaggatagcgacgaagccgtgacatatagcctgggaaagtttgggcagagggccctggatttctacagcattcatgtgaccaaggagtccacccaccccgtgaagcccctggcccagatcgccggaaacagatacgcctccggacctgtgggaaaggccctgagcgacgcatgtatgggcacaatcgcctccttcctgtctaagtaccaggacatcatcatcgaacaccagaaggtggtgaagggcaaccagaagagactggagagcctgcgggagctggccggcaaggaaaacctggaataccctagcgtgaccctgccacctcagcctcacaccaaggagggcgttgatgcctacaacgaagtgatcgcccgggtgcgaatgtgggtgaacctgaacctgtggcagaagctgaagctaagcagagatgatgccaagcctctgctgagactgaagggattcccttcctttcctctggtcgagagacaggccaacgaagtggactggtgggacatggtgtgtaacgtgaagaagctgatcaacgagaaaaaggaggatggcaaggtgttttggcagaatctggctggctacaagagacaggaagccctgagaccatacctgagcagcgaggaagatcggaagaagggaaagaaattcgctcggtaccagctgggcgacctgctgctgcacctggaaaagaagcacggcgaggactggggaaaggtgtacgacgaggcctgggagcggattgacaagaaagtggaaggcctgagcaagcacatcaagctggaagaggaacggagaagcgaggacgcccagagcaaggccgccctgaccgactggctgcgggctaaggccagcttcgtgatcgagggcctgaaggaggccgacaaggacgagttctgcagatgcgagctgaagctgcagaagtggtacggggacctgcggggaaagcccttcgccatcgaagccgagaacagcatcctggacatcagcggcttcagcaagcagtacaactgtgccttcatctggcagaaggacggcgtgaagaagctgaacctgtacctgatcatcaactacttcaagggcggcaagctgcggttcaagaagatcaaacctgaagccttcgaagccaacagattctacaccgtgatcaacaaaaagagcggcgagatcgtgcccatggaggtgaacttcaacttcgacgaccccaacctgatcatcctgcctctggcctttggcaagagacagggcagagaattcatctggaacgacctgctgtccctggaaaccggcagcctgaagctggccaacggaagagtgatcgagaagacactgtacaacagaagaacccggcaggatgagcctgccctgttcgtggccctgaccttcgagcggcgggaggtcctggactcctccaatatcaaaccaatgaacctgatcggcgtggcaagaggcgaaaacatccccgccgtgatcgccctgaccgaccccgagggctgcccactgagccggtttaaggatagcctgggaaacccaacccacatcctgagaatcggcgagagctataaggagaagcagcggaccatccaggccaagaaggaggtggagcagcggagagccggcggctacagccggaagtacgccagcaaagccaagaatctggcagacgatatggtgagaaacaccgctagagatctgctgtactacgccgtgacccaggatgccatgctgatcttcgccaacctgagccggggcttcggccggcagggcaagcggaccttcatggccgagagacagtacacacggatggaggactggctgaccgccaagctggcctacgagggcctgagcaagacctacctgtccaagacactggcccagtacacctccaagacatgcagcaactgtgggtttaccatcaccagcgccgactacgacagggtgctggagaagctgaagaagacagcaacaggctggatgaccacaattaacggcaaggagctgaaggtggagggccagattacctactacaacagatacaagagacagaacgtagtcaaggacctgtccgtcgagctggatagactgagcgaagaatctgtgaacaacgacatctcctcctggacaaagggcagaagcggagaagctctgagcctcctgaagaaaagattctcccatagacccgtgcaggagaagttcgtgtgcctgaactgcggcttcgagacacacgcagccgagcaagccgccctgaacatcgccagatcctggctgttcctgcggagccaggagtacaagaaataccagacaaacaagacaaccggcaacaccgataagagagccttcgtcgagacctggcagtccttttaccggaagaagcttaaggaggtgtggaaacctgccgtgcggtctggcggatctggcggaggctccaccagccccaagaaaaagagaaaagtctaagctgccttctgcggggcttgccttctggccatgcccttcttctctcccttgcacctgtacctcttggtctttgaataaagcctgagtaggaaggctagcaaaaaaaaaaaaaaaaaaaaaaaaaaaaaaaaaaaaaaaaaaaaaaaaaaaaaaaaaaaaaaaaaaaaaaaaaaaaaaaa

SEQ ID NO: 9756 - RNA, 8787 nt, synthetic construct
  source 1..8787: mol_type = other RNA
aggaaataagagagaaaagaagagtaagaagaaatataagagccaccatggcccctaagaagaagcgtaaagtgagccggatgaaccacgaccaggagttcgacccccctaaggtgtaccctcccgtccccgccgagaagagaaagcccatccgggtcctgagcctgttcgatggcatcgccaccggtctgctggtgctgaaggacctgggcatccaggtggataggtacattgcctccgaggtgtgcgaggactccatcaccgtgggaatggtgcgtcatcagggcaagatcatgtacgtgggcgacgtgcggagcgtgacacagaagcatatccaggagtggggccctttcgacctggtgatcggcggcagcccttgcaatgacctgagcatcgtgaacccagcccggaagggcctgtacgagggaaccggcagactgttcttcgagttttacagactgctgcacgacgcccggcctaaggaaggcgacgaccggcccttcttttggctgttcgagaatgtggtggccatgggagtcagcgacaagcgggatattagccggttcctggagagcaaccccgtgatgatcgatgccaaggaagtgagcgccgcccaccgggccagatacttctggggcaatctgcctggcatgaacagacccctggccagcaccgtgaacgacaagctggagctgcaggagtgcctggagcacggccggatcgccaagttcagcaaggtgagaaccatcaccacccgaagcaacagcatcaaacaaggcaaggaccagcactttcctgtgttcatgaacgagaaggaggacatcctgtggtgtaccgagatggagagagtgttcgggttcccagtccactacacagatgtcagcaacatgtctagactggccagacagagactgctgggaagaagctggtccgtccctgtgatcagacacctgttcgcccctctgaaggagtacttcgcctgcgtgagcagcggcaacagcaacgccaacagccggggccccagcttctctagcggcctggtgccactgtccctgagagggagccacatgggccccatggagatctacaaaaccgtgagcgcctggaagcggcagcctgtgcgcgtgctgagcctgtttcggaatatcgataaagtcctgaaaagcctgggattcctggagagcggctctggctccggcggtggcaccctgaagtacgtggaggatgtgacaaacgtggtcagacgggatgtggagaagtggggccccttcgatctggtgtacggcagcacccaacccctgggcagctcttgtgaccggtgccctggctggtacatgtttcagttccaccggatcctgcagtacgccctgccgagacaggagtcccagcggccattcttttggattttcatggacaacttgctgctgaccgaggatgaccaggaaactaccactcggttcctgcagaccgaagccgtgaccctgcaggacgtgagaggccgggactaccagaacgccatgcgggtgtggtccaacatccctggactgaaaagcaagcacgcacctctgacccctaaagaagaggagtacctgcaggcccaggtgcggagcagaagcaagctggacgcccctaaggtggatctgctggtgaagaattgcctcctgcccctgagagagtacttcaagtatttcagccagaatagtctgcccctgggaggcagcggcggcggcatggccgccagccaggagagcctgaccttcaaggacgtgagcgtggacttcagcctggaggagtgggagtgcctggaccccgcccagaggaagctgtacagcgacgtgatgctggagaactacagcaacctggtgagcctgggcctggtggtgagcaagcccggcctggtgaccttcctggagcagatgcaggaggtgtgggacgtgagcaggaagaagagcatcagcaccccccccggcaggggcggcccaagcagcggcgcccctcctcccagcggcggcaggcggcccaagcagcggcgcccctcctcccagcggcggcagcccagccggctccccaacctctaccgaggagggcacctctgagtccgccacccccgagagcggccctggcacctccaccgagcccagcgagggcagcgcacccggcagccctgccggcagccccacctccacagaggagggaaccagcaccgagcccagcgaaggcagcgccccaggcaccagcaccgagcctagtgagcaggagattaaacggatcaacaagatcagaagaagacttgtgaaagacagcaacaccaagaaggccggcaagacaggccccatgaaaaccctgctggttagagtgatgacacccgatctgagagagcggctggaaaacctgagaaagaagcctgaaaatatcccccagcccatcagcaatacatctagagccaacctgaataagctgctgaccgattacaccgaaatgaagaaggcgatcctgcatgtgtactgggaagagttccagaaggaccctgtgggcctgatgagccgggtggcccagcctgccagcaagaagatcgatcagaacaagctgaaacctgagatggacgagaagggcaacctgaccaccgccggctttgcctgctctcagtgtggccagcccctgttcgtgtacaagctggagcaggtgtctgagaagggcaaggcttacaccaactacttcggacggtgcaatgtggccgagcacgaaaagctgatcctgctggcccagctgaagcccgagaaggatagcgacgaagccgtgacatatagcctgggaaagtttgggcagagggccctggatttctacagcattcatgtgaccaaggagtccacccaccccgtgaagcccctggcccagatcgccggaaacagatacgcctccggacctgtgggaaaggccctgagcgacgcatgtatgggcacaatcgcctccttcctgtctaagtaccaggacatcatcatcgaacaccagaaggtggtgaagggcaaccagaagagactggagagcctgcgggagctggccggcaaggaaaacctggaataccctagcgtgaccctgccacctcagcctcacaccaaggagggcgttgatgcctacaacgaagtgatcgcccgggtgcgaatgtgggtgaacctgaacctgtggcagaagctgaagctaagcagagatgatgccaagcctctgctgagactgaagggattcccttcctttcctctggtcgagagacaggccaacgaagtggactggtgggacatggtgtgtaacgtgaagaagctgatcaacgagaaaaaggaggatggcaaggtgttttggcagaatctggctggctacaagagacaggaagccctgagaccatacctgagcagcgaggaagatcggaagaagggaaagaaattcgctcggtaccagctgggcgacctgctgctgcacctggaaaagaagcacggcgaggactggggaaaggtgtacgacgaggcctgggagcggattgacaagaaagtggaaggcctgagcaagcacatcaagctggaagaggaacggagaagcgaggacgcccagagcaaggccgccctgaccgactggctgcgggctaaggccagcttcgtgatcgagggcctgaaggaggccgacaaggacgagttctgcagatgcgagctgaagctgcagaagtggtacggggacctgcggggaaagcccttcgccatcgaagccgagaacagcatcctggacatcagcggcttcagcaagcagtacaactgtgccttcatctggcagaaggacggcgtgaagaagctgaacctgtacctgatcatcaactacttcaagggcggcaagctgcggttcaagaagatcaaacctgaagccttcgaagccaacagattctacaccgtgatcaacaaaaagagcggcgagatcgtgcccatggaggtgaacttcaacttcgacgaccccaacctgatcatcctgcctctggcctttggcaagagacagggcagagaattcatctggaacgacctgctgtccctggaaaccggcagcctgaagctggccaacggaagagtgatcgagaagacactgtacaacagaagaacccggcaggatgagcctgccctgttcgtggccctgaccttcgagcggcgggaggtcctggactcctccaatatcaaaccaatgaacctgatcggcgtggcaagaggcgaaaacatccccgccgtgatcgccctgaccgaccccgagggctgcccactgagccggtttaaggatagcctgggaaacccaacccacatcctgagaatcggcgagagctataaggagaagcagcggaccatccaggccaagaaggaggtggagcagcggagagccggcggctacagccggaagtacgccagcaaagccaagaatctggcagacgatatggtgagaaacaccgctagagatctgctgtactacgccgtgacccaggatgccatgctgatcttcgccaacctgagccggggcttcggccggcagggcaagcggaccttcatggccgagagacagtacacacggatggaggactggctgaccgccaagctggcctacgagggcctgagcaagacctacctgtccaagacactggcccagtacacctccaagacatgcagcaactgtgggtttaccatcaccagcgccgactacgacagggtgctggagaagctgaagaagacagcaacaggctggatgaccacaattaacggcaaggagctgaaggtggagggccagattacctactacaacagatacaagagacagaacgtagtcaaggacctgtccgtcgagctggatagactgagcgaagaatctgtgaacaacgacatctcctcctggacaaagggcagaagcggagaagctctgagcctcctgaagaaaagattctcccatagacccgtgcaggagaagttcgtgtgcctgaactgcggcttcgagacacacgcagccgagcaagccgccctgaacatcgccagatcctggctgttcctgcggagccaggagtacaagaaataccagacaaacaagacaaccggcaacaccgataagagagccttcgtcgagacctggcagtccttttaccggaagaagcttaaggaggtgtggaaacctgccgtgcggtctggcggatctggcggaggctccaccagccccaagaaaaagagaaaagtctaagctgccttctgcggggcttgccttctggccatgcccttcttctctcccttgcacctgtacctcttggtctttgaataaagcctgagtaggaaggctagcaaaaaaaaaaaaaaaaaaaaaaaaaaaaaaaaaaaaaaaaaaaaaaaaaaaaaaaaaaaaaaaaaaaaaaaaaaaaaaaagcccagccggctccccaacctctaccgaggagggcacctctgagtccgccacccccgagagcggccctggcacctccaccgagcccagcgagggcagcgcacccggcagccctgccggcagccccacctccacagaggagggaaccagcaccgagcccagcgaaggcagcgccccaggcaccagcaccgagcctagtgagcaggagattaaacggatcaacaagatcagaagaagacttgtgaaagacagcaacaccaagaaggccggcaagacaggccccatgaaaaccctgctggttagagtgatgacacccgatctgagagagcggctggaaaacctgagaaagaagcctgaaaatatcccccagcccatcagcaatacatctagagccaacctgaataagctgctgaccgattacaccgaaatgaagaaggcgatcctgcatgtgtactgggaagagttccagaaggaccctgtgggcctgatgagccgggtggcccagcctgccagcaagaagatcgatcagaacaagctgaaacctgagatggacgagaagggcaacctgaccaccgccggctttgcctgctctcagtgtggccagcccctgttcgtgtacaagctggagcaggtgtctgagaagggcaaggcttacaccaactacttcggacggtgcaatgtggccgagcacgaaaagctgatcctgctggcccagctgaagcccgagaaggatagcgacgaagccgtgacatatagcctgggaaagtttgggcagagggccctggatttctacagcattcatgtgaccaaggagtccacccaccccgtgaagcccctggcccagatcgccggaaacagatacgcctccggacctgtgggaaaggccctgagcgacgcatgtatgggcacaatcgcctccttcctgtctaagtaccaggacatcatcatcgaacaccagaaggtggtgaagggcaaccagaagagactggagagcctgcgggagctggccggcaaggaaaacctggaataccctagcgtgaccctgccacctcagcctcacaccaaggagggcgttgatgcctacaacgaagtgatcgcccgggtgcgaatgtgggtgaacctgaacctgtggcagaagctgaagctaagcagagatgatgccaagcctctgctgagactgaagggattcccttcctttcctctggtcgagagacaggccaacgaagtggactggtgggacatggtgtgtaacgtgaagaagctgatcaacgagaaaaaggaggatggcaaggtgttttggcagaatctggctggctacaagagacaggaagccctgagaccatacctgagcagcgaggaagatcggaagaagggaaagaaattcgctcggtaccagctgggcgacctgctgctgcacctggaaaagaagcacggcgaggactggggaaaggtgtacgacgaggcctgggagcggattgacaagaaagtggaaggcctgagcaagcacatcaagctggaagaggaacggagaagcgaggacgcccagagcaaggccgccctgaccgactggctgcgggctaaggccagcttcgtgatcgagggcctgaaggaggccgacaaggacgagttctgcagatgcgagctgaagctgcagaagtggtacggggacctgcggggaaagcccttcgccatcgaagccgagaacagcatcctggacatcagcggcttcagcaagcagtacaactgtgccttcatctggcagaaggacggcgtgaagaagctgaacctgtacctgatcatcaactacttcaagggcggcaagctgcggttcaagaagatcaaacctgaagccttcgaagccaacagattctacaccgtgatcaacaaaaagagcggcgagatcgtgcccatggaggtgaacttcaacttcgacgaccccaacctgatcatcctgcctctggcctttggcaagagacagggcagagaattcatctggaacgacctgctgtccctggaaaccggcagcctgaagctggccaacggaagagtgatcgagaagacactgtacaacagaagaacccggcaggatgagcctgccctgttcgtggccctgaccttcgagcggcgggaggtcctggactcctccaatatcaaaccaatgaacctgatcggcgtggcaagaggcgaaaacatccccgccgtgatcgccctgaccgaccccgagggctgcccactgagccggtttaaggatagcctgggaaacccaacccacatcctgagaatcggcgagagctataaggagaagcagcggaccatccaggccaagaaggaggtggagcagcggagagccggcggctacagccggaagtacgccagcaaagccaagaatctggcagacgatatggtgagaaacaccgctagagatctgctgtactacgccgtgacccaggatgccatgctgatcttcgccaacctgagccggggcttcggccggcagggcaagcggaccttcatggccgagagacagtacacacggatggaggactggctgaccgccaagctggcctacgagggcctgagcaagacctacctgtccaagacactggcccagtacacctccaagacatgcagcaactgtgggtttaccatcaccagcgccgactacgacagggtgctggagaagctgaagaagacagcaacaggctggatgaccacaattaacggcaaggagctgaaggtggagggccagattacctactacaacagatacaagagacagaacgtagtcaaggacctgtccgtcgagctggatagactgagcgaagaatctgtgaacaacgacatctcctcctggacaaagggcagaagcggagaagctctgagcctcctgaagaaaagattctcccatagacccgtgcaggagaagttcgtgtgcctgaactgcggcttcgagacacacgcagccgagcaagccgccctgaacatcgccagatcctggctgttcctgcggagccaggagtacaagaaataccagacaaacaagacaaccggcaacaccgataagagagccttcgtcgagacctggcagtccttttaccggaagaagcttaaggaggtgtggaaacctgccgtgcggtctggcggatctggcggaggctccaccagccccaagaaaaagagaaaagtctaagctgccttctgcggggcttgccttctggccatgcccttcttctctcccttgcacctgtacctcttggtctttgaataaagcctgagtaggaaggctagcaaaaaaaaaaaaaaaaaaaaaaaaaaaaaaaaaaaaaaaaaaaaaaaaaaaaaaaaaaaaaaaaaaaaaaaaaaaaaaaa

SEQ ID NO: 9757 - RNA, 8787 nt, synthetic construct
  source 1..8787: mol_type = other RNA
aggaaataagagagaaaagaagagtaagaagaaatataagagccaccatggcccctaagaagaagcgtaaagtgagccggatgaaccacgaccaggagttcgacccccctaaggtgtaccctcccgtccccgccgagaagagaaagcccatccgggtcctgagcctgttcgatggcatcgccaccggtctgctggtgctgaaggacctgggcatccaggtggataggtacattgcctccgaggtgtgcgaggactccatcaccgtgggaatggtgcgtcatcagggcaagatcatgtacgtgggcgacgtgcggagcgtgacacagaagcatatccaggagtggggccctttcgacctggtgatcggcggcagcccttgcaatgacctgagcatcgtgaacccagcccggaagggcctgtacgagggaaccggcagactgttcttcgagttttacagactgctgcacgacgcccggcctaaggaaggcgacgaccggcccttcttttggctgttcgagaatgtggtggccatgggagtcagcgacaagcgggatattagccggttcctggagagcaaccccgtgatgatcgatgccaaggaagtgagcgccgcccaccgggccagatacttctggggcaatctgcctggcatgaacagacccctggccagcaccgtgaacgacaagctggagctgcaggagtgcctggagcacggccggatcgccaagttcagcaaggtgagaaccatcaccacccgaagcaacagcatcaaacaaggcaaggaccagcactttcctgtgttcatgaacgagaaggaggacatcctgtggtgtaccgagatggagagagtgttcgggttcccagtccactacacagatgtcagcaacatgtctagactggccagacagagactgctgggaagaagctggtccgtccctgtgatcagacacctgttcgcccctctgaaggagtacttcgcctgcgtgagcagcggcaacagcaacgccaacagccggggccccagcttctctagcggcctggtgccactgtccctgagagggagccacatgggccccatggagatctacaaaaccgtgagcgcctggaagcggcagcctgtgcgcgtgctgagcctgtttcggaatatcgataaagtcctgaaaagcctgggattcctggagagcggctctggctccggcggtggcaccctgaagtacgtggaggatgtgacaaacgtggtcagacgggatgtggagaagtggggccccttcgatctggtgtacggcagcacccaacccctgggcagctcttgtgaccggtgccctggctggtacatgtttcagttccaccggatcctgcagtacgccctgccgagacaggagtcccagcggccattcttttggattttcatggacaacttgctgctgaccgaggatgaccaggaaactaccactcggttcctgcagaccgaagccgtgaccctgcaggacgtgagaggccgggactaccagaacgccatgcgggtgtggtccaacatccctggactgaaaagcaagcacgcacctctgacccctaaagaagaggagtacctgcaggcccaggtgcggagcagaagcaagctggacgcccctaaggtggatctgctggtgaagaattgcctcctgcccctgagagagtacttcaagtatttcagccagaatagtctgcccctgggaggcagcggcggcggcagccagggcctggtgaccttcggcgacgtggccctggacttcagccaggaggagtgggagtggctgaaccccagccagaaggacctgtacagggacgtgatgctggagaactacaggaacctggtgtggctgggcctgagcatcagcaagcccaacatgatcagcctgctggagcagggcaaggagccctggatggtggagagggagatgagccacggccagtgcgccgactgggagagctggggcggcccaagcagcggcgcccctcctcccagcggcggcaggcggcccaagcagcggcgcccctcctcccagcggcggcagcccagccggctccccaacctctaccgaggagggcacctctgagtccgccacccccgagagcggccctggcacctccaccgagcccagcgagggcagcgcacccggcagccctgccggcagccccacctccacagaggagggaaccagcaccgagcccagcgaaggcagcgccccaggcaccagcaccgagcctagtgagcaggagattaaacggatcaacaagatcagaagaagacttgtgaaagacagcaacaccaagaaggccggcaagacaggccccatgaaaaccctgctggttagagtgatgacacccgatctgagagagcggctggaaaacctgagaaagaagcctgaaaatatcccccagcccatcagcaatacatctagagccaacctgaataagctgctgaccgattacaccgaaatgaagaaggcgatcctgcatgtgtactgggaagagttccagaaggaccctgtgggcctgatgagccgggtggcccagcctgccagcaagaagatcgatcagaacaagctgaaacctgagatggacgagaagggcaacctgaccaccgccggctttgcctgctctcagtgtggccagcccctgttcgtgtacaagctggagcaggtgtctgagaagggcaaggcttacaccaactacttcggacggtgcaatgtggccgagcacgaaaagctgatcctgctggcccagctgaagcccgagaaggatagcgacgaagccgtgacatatagcctgggaaagtttgggcagagggccctggatttctacagcattcatgtgaccaaggagtccacccaccccgtgaagcccctggcccagatcgccggaaacagatacgcctccggacctgtgggaaaggccctgagcgacgcatgtatgggcacaatcgcctccttcctgtctaagtaccaggacatcatcatcgaacaccagaaggtggtgaagggcaaccagaagagactggagagcctgcgggagctggccggcaaggaaaacctggaataccctagcgtgaccctgccacctcagcctcacaccaaggagggcgttgatgcctacaacgaagtgatcgcccgggtgcgaatgtgggtgaacctgaacctgtggcagaagctgaagctaagcagagatgatgccaagcctctgctgagactgaagggattcccttcctttcctctggtcgagagacaggccaacgaagtggactggtgggacatggtgtgtaacgtgaagaagctgatcaacgagaaaaaggaggatggcaaggtgttttggcagaatctggctggctacaagagacaggaagccctgagaccatacctgagcagcgaggaagatcggaagaagggaaagaaattcgctcggtaccagctgggcgacctgctgctgcacctggaaaagaagcacggcgaggactggggaaaggtgtacgacgaggcctgggagcggattgacaagaaagtggaaggcctgagcaagcacatcaagctggaagaggaacggagaagcgaggacgcccagagcaaggccgccctgaccgactggctgcgggctaaggccagcttcgtgatcgagggcctgaaggaggccgacaaggacgagttctgcagatgcgagctgaagctgcagaagtggtacggggacctgcggggaaagcccttcgccatcgaagccgagaacagcatcctggacatcagcggcttcagcaagcagtacaactgtgccttcatctggcagaaggacggcgtgaagaagctgaacctgtacctgatcatcaactacttcaagggcggcaagctgcggttcaagaagatcaaacctgaagccttcgaagccaacagattctacaccgtgatcaacaaaaagagcggcgagatcgtgcccatggaggtgaacttcaacttcgacgaccccaacctgatcatcctgcctctggcctttggcaagagacagggcagagaattcatctggaacgacctgctgtccctggaaaccggcagcctgaagctggccaacggaagagtgatcgagaagacactgtacaacagaagaacccggcaggatgagcctgccctgttcgtggccctgaccttcgagcggcgggaggtcctggactcctccaatatcaaaccaatgaacctgatcggcgtggcaagaggcgaaaacatccccgccgtgatcgccctgaccgaccccgagggctgcccactgagccggtttaaggatagcctgggaaacccaacccacatcctgagaatcggcgagagctataaggagaagcagcggaccatccaggccaagaaggaggtggagcagcggagagccggcggctacagccggaagtacgccagcaaagccaagaatctggcagacgatatggtgagaaacaccgctagagatctgctgtactacgccgtgacccaggatgccatgctgatcttcgccaacctgagccggggcttcggccggcagggcaagcggaccttcatggccgagagacagtacacacggatggaggactggctgaccgccaagctggcctacgagggcctgagcaagacctacctgtccaagacactggcccagtacacctccaagacatgcagcaactgtgggtttaccatcaccagcgccgactacgacagggtgctggagaagctgaagaagacagcaacaggctggatgaccacaattaacggcaaggagctgaaggtggagggccagattacctactacaacagatacaagagacagaacgtagtcaaggacctgtccgtcgagctggatagactgagcgaagaatctgtgaacaacgacatctcctcctggacaaagggcagaagcggagaagctctgagcctcctgaagaaaagattctcccatagacccgtgcaggagaagttcgtgtgcctgaactgcggcttcgagacacacgcagccgagcaagccgccctgaacatcgccagatcctggctgttcctgcggagccaggagtacaagaaataccagacaaacaagacaaccggcaacaccgataagagagccttcgtcgagacctggcagtccttttaccggaagaagcttaaggaggtgtggaaacctgccgtgcggtctggcggatctggcggaggctccaccagccccaagaaaaagagaaaagtctaagctgccttctgcggggcttgccttctggccatgcccttcttctctcccttgcacctgtacctcttggtctttgaataaagcctgagtaggaaggctagcaaaaaaaaaaaaaaaaaaaaaaaaaaaaaaaaaaaaaaaaaaaaaaaaaaaaaaaaaaaaaaaaaaaaaaaaaaaaaaaagcccagccggctccccaacctctaccgaggagggcacctctgagtccgccacccccgagagcggccctggcacctccaccgagcccagcgagggcagcgcacccggcagccctgccggcagccccacctccacagaggagggaaccagcaccgagcccagcgaaggcagcgccccaggcaccagcaccgagcctagtgagcaggagattaaacggatcaacaagatcagaagaagacttgtgaaagacagcaacaccaagaaggccggcaagacaggccccatgaaaaccctgctggttagagtgatgacacccgatctgagagagcggctggaaaacctgagaaagaagcctgaaaatatcccccagcccatcagcaatacatctagagccaacctgaataagctgctgaccgattacaccgaaatgaagaaggcgatcctgcatgtgtactgggaagagttccagaaggaccctgtgggcctgatgagccgggtggcccagcctgccagcaagaagatcgatcagaacaagctgaaacctgagatggacgagaagggcaacctgaccaccgccggctttgcctgctctcagtgtggccagcccctgttcgtgtacaagctggagcaggtgtctgagaagggcaaggcttacaccaactacttcggacggtgcaatgtggccgagcacgaaaagctgatcctgctggcccagctgaagcccgagaaggatagcgacgaagccgtgacatatagcctgggaaagtttgggcagagggccctggatttctacagcattcatgtgaccaaggagtccacccaccccgtgaagcccctggcccagatcgccggaaacagatacgcctccggacctgtgggaaaggccctgagcgacgcatgtatgggcacaatcgcctccttcctgtctaagtaccaggacatcatcatcgaacaccagaaggtggtgaagggcaaccagaagagactggagagcctgcgggagctggccggcaaggaaaacctggaataccctagcgtgaccctgccacctcagcctcacaccaaggagggcgttgatgcctacaacgaagtgatcgcccgggtgcgaatgtgggtgaacctgaacctgtggcagaagctgaagctaagcagagatgatgccaagcctctgctgagactgaagggattcccttcctttcctctggtcgagagacaggccaacgaagtggactggtgggacatggtgtgtaacgtgaagaagctgatcaacgagaaaaaggaggatggcaaggtgttttggcagaatctggctggctacaagagacaggaagccctgagaccatacctgagcagcgaggaagatcggaagaagggaaagaaattcgctcggtaccagctgggcgacctgctgctgcacctggaaaagaagcacggcgaggactggggaaaggtgtacgacgaggcctgggagcggattgacaagaaagtggaaggcctgagcaagcacatcaagctggaagaggaacggagaagcgaggacgcccagagcaaggccgccctgaccgactggctgcgggctaaggccagcttcgtgatcgagggcctgaaggaggccgacaaggacgagttctgcagatgcgagctgaagctgcagaagtggtacggggacctgcggggaaagcccttcgccatcgaagccgagaacagcatcctggacatcagcggcttcagcaagcagtacaactgtgccttcatctggcagaaggacggcgtgaagaagctgaacctgtacctgatcatcaactacttcaagggcggcaagctgcggttcaagaagatcaaacctgaagccttcgaagccaacagattctacaccgtgatcaacaaaaagagcggcgagatcgtgcccatggaggtgaacttcaacttcgacgaccccaacctgatcatcctgcctctggcctttggcaagagacagggcagagaattcatctggaacgacctgctgtccctggaaaccggcagcctgaagctggccaacggaagagtgatcgagaagacactgtacaacagaagaacccggcaggatgagcctgccctgttcgtggccctgaccttcgagcggcgggaggtcctggactcctccaatatcaaaccaatgaacctgatcggcgtggcaagaggcgaaaacatccccgccgtgatcgccctgaccgaccccgagggctgcccactgagccggtttaaggatagcctgggaaacccaacccacatcctgagaatcggcgagagctataaggagaagcagcggaccatccaggccaagaaggaggtggagcagcggagagccggcggctacagccggaagtacgccagcaaagccaagaatctggcagacgatatggtgagaaacaccgctagagatctgctgtactacgccgtgacccaggatgccatgctgatcttcgccaacctgagccggggcttcggccggcagggcaagcggaccttcatggccgagagacagtacacacggatggaggactggctgaccgccaagctggcctacgagggcctgagcaagacctacctgtccaagacactggcccagtacacctccaagacatgcagcaactgtgggtttaccatcaccagcgccgactacgacagggtgctggagaagctgaagaagacagcaacaggctggatgaccacaattaacggcaaggagctgaaggtggagggccagattacctactacaacagatacaagagacagaacgtagtcaaggacctgtccgtcgagctggatagactgagcgaagaatctgtgaacaacgacatctcctcctggacaaagggcagaagcggagaagctctgagcctcctgaagaaaagattctcccatagacccgtgcaggagaagttcgtgtgcctgaactgcggcttcgagacacacgcagccgagcaagccgccctgaacatcgccagatcctggctgttcctgcggagccaggagtacaagaaataccagacaaacaagacaaccggcaacaccgataagagagccttcgtcgagacctggcagtccttttaccggaagaagcttaaggaggtgtggaaacctgccgtgcggtctggcggatctggcggaggctccaccagccccaagaaaaagagaaaagtctaagctgccttctgcggggcttgccttctggccatgcccttcttctctcccttgcacctgtacctcttggtctttgaataaagcctgagtaggaaggctagcaaaaaaaaaaaaaaaaaaaaaaaaaaaaaaaaaaaaaaaaaaaaaaaaaaaaaaaaaaaaaaaaaaaaaaaaaaaaaaaa

SEQ ID NO: 9758 - RNA, 8787 nt, synthetic construct
  source 1..8787: mol_type = other RNA
aggaaataagagagaaaagaagagtaagaagaaatataagagccaccatggcccctaagaagaagcgtaaagtgagccggatgaaccacgaccaggagttcgacccccctaaggtgtaccctcccgtccccgccgagaagagaaagcccatccgggtcctgagcctgttcgatggcatcgccaccggtctgctggtgctgaaggacctgggcatccaggtggataggtacattgcctccgaggtgtgcgaggactccatcaccgtgggaatggtgcgtcatcagggcaagatcatgtacgtgggcgacgtgcggagcgtgacacagaagcatatccaggagtggggccctttcgacctggtgatcggcggcagcccttgcaatgacctgagcatcgtgaacccagcccggaagggcctgtacgagggaaccggcagactgttcttcgagttttacagactgctgcacgacgcccggcctaaggaaggcgacgaccggcccttcttttggctgttcgagaatgtggtggccatgggagtcagcgacaagcgggatattagccggttcctggagagcaaccccgtgatgatcgatgccaaggaagtgagcgccgcccaccgggccagatacttctggggcaatctgcctggcatgaacagacccctggccagcaccgtgaacgacaagctggagctgcaggagtgcctggagcacggccggatcgccaagttcagcaaggtgagaaccatcaccacccgaagcaacagcatcaaacaaggcaaggaccagcactttcctgtgttcatgaacgagaaggaggacatcctgtggtgtaccgagatggagagagtgttcgggttcccagtccactacacagatgtcagcaacatgtctagactggccagacagagactgctgggaagaagctggtccgtccctgtgatcagacacctgttcgcccctctgaaggagtacttcgcctgcgtgagcagcggcaacagcaacgccaacagccggggccccagcttctctagcggcctggtgccactgtccctgagagggagccacatgggccccatggagatctacaaaaccgtgagcgcctggaagcggcagcctgtgcgcgtgctgagcctgtttcggaatatcgataaagtcctgaaaagcctgggattcctggagagcggctctggctccggcggtggcaccctgaagtacgtggaggatgtgacaaacgtggtcagacgggatgtggagaagtggggccccttcgatctggtgtacggcagcacccaacccctgggcagctcttgtgaccggtgccctggctggtacatgtttcagttccaccggatcctgcagtacgccctgccgagacaggagtcccagcggccattcttttggattttcatggacaacttgctgctgaccgaggatgaccaggaaactaccactcggttcctgcagaccgaagccgtgaccctgcaggacgtgagaggccgggactaccagaacgccatgcgggtgtggtccaacatccctggactgaaaagcaagcacgcacctctgacccctaaagaagaggagtacctgcaggcccaggtgcggagcagaagcaagctggacgcccctaaggtggatctgctggtgaagaattgcctcctgcccctgagagagtacttcaagtatttcagccagaatagtctgcccctgggaggcagcggcggcggcgagaagggccccctgaccttcagggacgtggccatcgagttcagcctggaggagtggcagtgcctggacaccgcccagcaggacctgtacaggagggtgatgctggagaactacaggaacctggtgttcctgggcatcgccgtgagcaaccccgacctgatcacctgcctggagcagggcaaggagccctggaacatgaagaggcacgccatggccgacgagccccccgtgatgtacagccacggcggcccaagcagcggcgcccctcctcccagcggcggcaggcggcccaagcagcggcgcccctcctcccagcggcggcagcccagccggctccccaacctctaccgaggagggcacctctgagtccgccacccccgagagcggccctggcacctccaccgagcccagcgagggcagcgcacccggcagccctgccggcagccccacctccacagaggagggaaccagcaccgagcccagcgaaggcagcgccccaggcaccagcaccgagcctagtgagcaggagattaaacggatcaacaagatcagaagaagacttgtgaaagacagcaacaccaagaaggccggcaagacaggccccatgaaaaccctgctggttagagtgatgacacccgatctgagagagcggctggaaaacctgagaaagaagcctgaaaatatcccccagcccatcagcaatacatctagagccaacctgaataagctgctgaccgattacaccgaaatgaagaaggcgatcctgcatgtgtactgggaagagttccagaaggaccctgtgggcctgatgagccgggtggcccagcctgccagcaagaagatcgatcagaacaagctgaaacctgagatggacgagaagggcaacctgaccaccgccggctttgcctgctctcagtgtggccagcccctgttcgtgtacaagctggagcaggtgtctgagaagggcaaggcttacaccaactacttcggacggtgcaatgtggccgagcacgaaaagctgatcctgctggcccagctgaagcccgagaaggatagcgacgaagccgtgacatatagcctgggaaagtttgggcagagggccctggatttctacagcattcatgtgaccaaggagtccacccaccccgtgaagcccctggcccagatcgccggaaacagatacgcctccggacctgtgggaaaggccctgagcgacgcatgtatgggcacaatcgcctccttcctgtctaagtaccaggacatcatcatcgaacaccagaaggtggtgaagggcaaccagaagagactggagagcctgcgggagctggccggcaaggaaaacctggaataccctagcgtgaccctgccacctcagcctcacaccaaggagggcgttgatgcctacaacgaagtgatcgcccgggtgcgaatgtgggtgaacctgaacctgtggcagaagctgaagctaagcagagatgatgccaagcctctgctgagactgaagggattcccttcctttcctctggtcgagagacaggccaacgaagtggactggtgggacatggtgtgtaacgtgaagaagctgatcaacgagaaaaaggaggatggcaaggtgttttggcagaatctggctggctacaagagacaggaagccctgagaccatacctgagcagcgaggaagatcggaagaagggaaagaaattcgctcggtaccagctgggcgacctgctgctgcacctggaaaagaagcacggcgaggactggggaaaggtgtacgacgaggcctgggagcggattgacaagaaagtggaaggcctgagcaagcacatcaagctggaagaggaacggagaagcgaggacgcccagagcaaggccgccctgaccgactggctgcgggctaaggccagcttcgtgatcgagggcctgaaggaggccgacaaggacgagttctgcagatgcgagctgaagctgcagaagtggtacggggacctgcggggaaagcccttcgccatcgaagccgagaacagcatcctggacatcagcggcttcagcaagcagtacaactgtgccttcatctggcagaaggacggcgtgaagaagctgaacctgtacctgatcatcaactacttcaagggcggcaagctgcggttcaagaagatcaaacctgaagccttcgaagccaacagattctacaccgtgatcaacaaaaagagcggcgagatcgtgcccatggaggtgaacttcaacttcgacgaccccaacctgatcatcctgcctctggcctttggcaagagacagggcagagaattcatctggaacgacctgctgtccctggaaaccggcagcctgaagctggccaacggaagagtgatcgagaagacactgtacaacagaagaacccggcaggatgagcctgccctgttcgtggccctgaccttcgagcggcgggaggtcctggactcctccaatatcaaaccaatgaacctgatcggcgtggcaagaggcgaaaacatccccgccgtgatcgccctgaccgaccccgagggctgcccactgagccggtttaaggatagcctgggaaacccaacccacatcctgagaatcggcgagagctataaggagaagcagcggaccatccaggccaagaaggaggtggagcagcggagagccggcggctacagccggaagtacgccagcaaagccaagaatctggcagacgatatggtgagaaacaccgctagagatctgctgtactacgccgtgacccaggatgccatgctgatcttcgccaacctgagccggggcttcggccggcagggcaagcggaccttcatggccgagagacagtacacacggatggaggactggctgaccgccaagctggcctacgagggcctgagcaagacctacctgtccaagacactggcccagtacacctccaagacatgcagcaactgtgggtttaccatcaccagcgccgactacgacagggtgctggagaagctgaagaagacagcaacaggctggatgaccacaattaacggcaaggagctgaaggtggagggccagattacctactacaacagatacaagagacagaacgtagtcaaggacctgtccgtcgagctggatagactgagcgaagaatctgtgaacaacgacatctcctcctggacaaagggcagaagcggagaagctctgagcctcctgaagaaaagattctcccatagacccgtgcaggagaagttcgtgtgcctgaactgcggcttcgagacacacgcagccgagcaagccgccctgaacatcgccagatcctggctgttcctgcggagccaggagtacaagaaataccagacaaacaagacaaccggcaacaccgataagagagccttcgtcgagacctggcagtccttttaccggaagaagcttaaggaggtgtggaaacctgccgtgcggtctggcggatctggcggaggctccaccagccccaagaaaaagagaaaagtctaagctgccttctgcggggcttgccttctggccatgcccttcttctctcccttgcacctgtacctcttggtctttgaataaagcctgagtaggaaggctagcaaaaaaaaaaaaaaaaaaaaaaaaaaaaaaaaaaaaaaaaaaaaaaaaaaaaaaaaaaaaaaaaaaaaaaaaaaaaaaaagcccagccggctccccaacctctaccgaggagggcacctctgagtccgccacccccgagagcggccctggcacctccaccgagcccagcgagggcagcgcacccggcagccctgccggcagccccacctccacagaggagggaaccagcaccgagcccagcgaaggcagcgccccaggcaccagcaccgagcctagtgagcaggagattaaacggatcaacaagatcagaagaagacttgtgaaagacagcaacaccaagaaggccggcaagacaggccccatgaaaaccctgctggttagagtgatgacacccgatctgagagagcggctggaaaacctgagaaagaagcctgaaaatatcccccagcccatcagcaatacatctagagccaacctgaataagctgctgaccgattacaccgaaatgaagaaggcgatcctgcatgtgtactgggaagagttccagaaggaccctgtgggcctgatgagccgggtggcccagcctgccagcaagaagatcgatcagaacaagctgaaacctgagatggacgagaagggcaacctgaccaccgccggctttgcctgctctcagtgtggccagcccctgttcgtgtacaagctggagcaggtgtctgagaagggcaaggcttacaccaactacttcggacggtgcaatgtggccgagcacgaaaagctgatcctgctggcccagctgaagcccgagaaggatagcgacgaagccgtgacatatagcctgggaaagtttgggcagagggccctggatttctacagcattcatgtgaccaaggagtccacccaccccgtgaagcccctggcccagatcgccggaaacagatacgcctccggacctgtgggaaaggccctgagcgacgcatgtatgggcacaatcgcctccttcctgtctaagtaccaggacatcatcatcgaacaccagaaggtggtgaagggcaaccagaagagactggagagcctgcgggagctggccggcaaggaaaacctggaataccctagcgtgaccctgccacctcagcctcacaccaaggagggcgttgatgcctacaacgaagtgatcgcccgggtgcgaatgtgggtgaacctgaacctgtggcagaagctgaagctaagcagagatgatgccaagcctctgctgagactgaagggattcccttcctttcctctggtcgagagacaggccaacgaagtggactggtgggacatggtgtgtaacgtgaagaagctgatcaacgagaaaaaggaggatggcaaggtgttttggcagaatctggctggctacaagagacaggaagccctgagaccatacctgagcagcgaggaagatcggaagaagggaaagaaattcgctcggtaccagctgggcgacctgctgctgcacctggaaaagaagcacggcgaggactggggaaaggtgtacgacgaggcctgggagcggattgacaagaaagtggaaggcctgagcaagcacatcaagctggaagaggaacggagaagcgaggacgcccagagcaaggccgccctgaccgactggctgcgggctaaggccagcttcgtgatcgagggcctgaaggaggccgacaaggacgagttctgcagatgcgagctgaagctgcagaagtggtacggggacctgcggggaaagcccttcgccatcgaagccgagaacagcatcctggacatcagcggcttcagcaagcagtacaactgtgccttcatctggcagaaggacggcgtgaagaagctgaacctgtacctgatcatcaactacttcaagggcggcaagctgcggttcaagaagatcaaacctgaagccttcgaagccaacagattctacaccgtgatcaacaaaaagagcggcgagatcgtgcccatggaggtgaacttcaacttcgacgaccccaacctgatcatcctgcctctggcctttggcaagagacagggcagagaattcatctggaacgacctgctgtccctggaaaccggcagcctgaagctggccaacggaagagtgatcgagaagacactgtacaacagaagaacccggcaggatgagcctgccctgttcgtggccctgaccttcgagcggcgggaggtcctggactcctccaatatcaaaccaatgaacctgatcggcgtggcaagaggcgaaaacatccccgccgtgatcgccctgaccgaccccgagggctgcccactgagccggtttaaggatagcctgggaaacccaacccacatcctgagaatcggcgagagctataaggagaagcagcggaccatccaggccaagaaggaggtggagcagcggagagccggcggctacagccggaagtacgccagcaaagccaagaatctggcagacgatatggtgagaaacaccgctagagatctgctgtactacgccgtgacccaggatgccatgctgatcttcgccaacctgagccggggcttcggccggcagggcaagcggaccttcatggccgagagacagtacacacggatggaggactggctgaccgccaagctggcctacgagggcctgagcaagacctacctgtccaagacactggcccagtacacctccaagacatgcagcaactgtgggtttaccatcaccagcgccgactacgacagggtgctggagaagctgaagaagacagcaacaggctggatgaccacaattaacggcaaggagctgaaggtggagggccagattacctactacaacagatacaagagacagaacgtagtcaaggacctgtccgtcgagctggatagactgagcgaagaatctgtgaacaacgacatctcctcctggacaaagggcagaagcggagaagctctgagcctcctgaagaaaagattctcccatagacccgtgcaggagaagttcgtgtgcctgaactgcggcttcgagacacacgcagccgagcaagccgccctgaacatcgccagatcctggctgttcctgcggagccaggagtacaagaaataccagacaaacaagacaaccggcaacaccgataagagagccttcgtcgagacctggcagtccttttaccggaagaagcttaaggaggtgtggaaacctgccgtgcggtctggcggatctggcggaggctccaccagccccaagaaaaagagaaaagtctaagctgccttctgcggggcttgccttctggccatgcccttcttctctcccttgcacctgtacctcttggtctttgaataaagcctgagtaggaaggctagcaaaaaaaaaaaaaaaaaaaaaaaaaaaaaaaaaaaaaaaaaaaaaaaaaaaaaaaaaaaaaaaaaaaaaaaaaaaaaaaa

SEQ ID NO: 9759 - RNA, 8787 nt, synthetic construct
  source 1..8787: mol_type = other RNA
aggaaataagagagaaaagaagagtaagaagaaatataagagccaccatggcccctaagaagaagcgtaaagtgagccggatgaaccacgaccaggagttcgacccccctaaggtgtaccctcccgtccccgccgagaagagaaagcccatccgggtcctgagcctgttcgatggcatcgccaccggtctgctggtgctgaaggacctgggcatccaggtggataggtacattgcctccgaggtgtgcgaggactccatcaccgtgggaatggtgcgtcatcagggcaagatcatgtacgtgggcgacgtgcggagcgtgacacagaagcatatccaggagtggggccctttcgacctggtgatcggcggcagcccttgcaatgacctgagcatcgtgaacccagcccggaagggcctgtacgagggaaccggcagactgttcttcgagttttacagactgctgcacgacgcccggcctaaggaaggcgacgaccggcccttcttttggctgttcgagaatgtggtggccatgggagtcagcgacaagcgggatattagccggttcctggagagcaaccccgtgatgatcgatgccaaggaagtgagcgccgcccaccgggccagatacttctggggcaatctgcctggcatgaacagacccctggccagcaccgtgaacgacaagctggagctgcaggagtgcctggagcacggccggatcgccaagttcagcaaggtgagaaccatcaccacccgaagcaacagcatcaaacaaggcaaggaccagcactttcctgtgttcatgaacgagaaggaggacatcctgtggtgtaccgagatggagagagtgttcgggttcccagtccactacacagatgtcagcaacatgtctagactggccagacagagactgctgggaagaagctggtccgtccctgtgatcagacacctgttcgcccctctgaaggagtacttcgcctgcgtgagcagcggcaacagcaacgccaacagccggggccccagcttctctagcggcctggtgccactgtccctgagagggagccacatgggccccatggagatctacaaaaccgtgagcgcctggaagcggcagcctgtgcgcgtgctgagcctgtttcggaatatcgataaagtcctgaaaagcctgggattcctggagagcggctctggctccggcggtggcaccctgaagtacgtggaggatgtgacaaacgtggtcagacgggatgtggagaagtggggccccttcgatctggtgtacggcagcacccaacccctgggcagctcttgtgaccggtgccctggctggtacatgtttcagttccaccggatcctgcagtacgccctgccgagacaggagtcccagcggccattcttttggattttcatggacaacttgctgctgaccgaggatgaccaggaaactaccactcggttcctgcagaccgaagccgtgaccctgcaggacgtgagaggccgggactaccagaacgccatgcgggtgtggtccaacatccctggactgaaaagcaagcacgcacctctgacccctaaagaagaggagtacctgcaggcccaggtgcggagcagaagcaagctggacgcccctaaggtggatctgctggtgaagaattgcctcctgcccctgagagagtacttcaagtatttcagccagaatagtctgcccctgggaggcagcggcggcggcctgagcacccagctgaccgtggaggacgtggacatcaagttcacccccgaggagtgggagtgcctggaccccgcccagaggaccctgtacagggacgtgatggaggagacctacaggaacctgctgagcgtgggcatcggccccaggctgcccgactgcagcagctgcatccacatgaccaagaagctgcaggccaaggagaacagcggcaagggcgagatcctgcagagggtgatgtgcggcggcggcccaagcagcggcgcccctcctcccagcggcggcaggcggcccaagcagcggcgcccctcctcccagcggcggcagcccagccggctccccaacctctaccgaggagggcacctctgagtccgccacccccgagagcggccctggcacctccaccgagcccagcgagggcagcgcacccggcagccctgccggcagccccacctccacagaggagggaaccagcaccgagcccagcgaaggcagcgccccaggcaccagcaccgagcctagtgagcaggagattaaacggatcaacaagatcagaagaagacttgtgaaagacagcaacaccaagaaggccggcaagacaggccccatgaaaaccctgctggttagagtgatgacacccgatctgagagagcggctggaaaacctgagaaagaagcctgaaaatatcccccagcccatcagcaatacatctagagccaacctgaataagctgctgaccgattacaccgaaatgaagaaggcgatcctgcatgtgtactgggaagagttccagaaggaccctgtgggcctgatgagccgggtggcccagcctgccagcaagaagatcgatcagaacaagctgaaacctgagatggacgagaagggcaacctgaccaccgccggctttgcctgctctcagtgtggccagcccctgttcgtgtacaagctggagcaggtgtctgagaagggcaaggcttacaccaactacttcggacggtgcaatgtggccgagcacgaaaagctgatcctgctggcccagctgaagcccgagaaggatagcgacgaagccgtgacatatagcctgggaaagtttgggcagagggccctggatttctacagcattcatgtgaccaaggagtccacccaccccgtgaagcccctggcccagatcgccggaaacagatacgcctccggacctgtgggaaaggccctgagcgacgcatgtatgggcacaatcgcctccttcctgtctaagtaccaggacatcatcatcgaacaccagaaggtggtgaagggcaaccagaagagactggagagcctgcgggagctggccggcaaggaaaacctggaataccctagcgtgaccctgccacctcagcctcacaccaaggagggcgttgatgcctacaacgaagtgatcgcccgggtgcgaatgtgggtgaacctgaacctgtggcagaagctgaagctaagcagagatgatgccaagcctctgctgagactgaagggattcccttcctttcctctggtcgagagacaggccaacgaagtggactggtgggacatggtgtgtaacgtgaagaagctgatcaacgagaaaaaggaggatggcaaggtgttttggcagaatctggctggctacaagagacaggaagccctgagaccatacctgagcagcgaggaagatcggaagaagggaaagaaattcgctcggtaccagctgggcgacctgctgctgcacctggaaaagaagcacggcgaggactggggaaaggtgtacgacgaggcctgggagcggattgacaagaaagtggaaggcctgagcaagcacatcaagctggaagaggaacggagaagcgaggacgcccagagcaaggccgccctgaccgactggctgcgggctaaggccagcttcgtgatcgagggcctgaaggaggccgacaaggacgagttctgcagatgcgagctgaagctgcagaagtggtacggggacctgcggggaaagcccttcgccatcgaagccgagaacagcatcctggacatcagcggcttcagcaagcagtacaactgtgccttcatctggcagaaggacggcgtgaagaagctgaacctgtacctgatcatcaactacttcaagggcggcaagctgcggttcaagaagatcaaacctgaagccttcgaagccaacagattctacaccgtgatcaacaaaaagagcggcgagatcgtgcccatggaggtgaacttcaacttcgacgaccccaacctgatcatcctgcctctggcctttggcaagagacagggcagagaattcatctggaacgacctgctgtccctggaaaccggcagcctgaagctggccaacggaagagtgatcgagaagacactgtacaacagaagaacccggcaggatgagcctgccctgttcgtggccctgaccttcgagcggcgggaggtcctggactcctccaatatcaaaccaatgaacctgatcggcgtggcaagaggcgaaaacatccccgccgtgatcgccctgaccgaccccgagggctgcccactgagccggtttaaggatagcctgggaaacccaacccacatcctgagaatcggcgagagctataaggagaagcagcggaccatccaggccaagaaggaggtggagcagcggagagccggcggctacagccggaagtacgccagcaaagccaagaatctggcagacgatatggtgagaaacaccgctagagatctgctgtactacgccgtgacccaggatgccatgctgatcttcgccaacctgagccggggcttcggccggcagggcaagcggaccttcatggccgagagacagtacacacggatggaggactggctgaccgccaagctggcctacgagggcctgagcaagacctacctgtccaagacactggcccagtacacctccaagacatgcagcaactgtgggtttaccatcaccagcgccgactacgacagggtgctggagaagctgaagaagacagcaacaggctggatgaccacaattaacggcaaggagctgaaggtggagggccagattacctactacaacagatacaagagacagaacgtagtcaaggacctgtccgtcgagctggatagactgagcgaagaatctgtgaacaacgacatctcctcctggacaaagggcagaagcggagaagctctgagcctcctgaagaaaagattctcccatagacccgtgcaggagaagttcgtgtgcctgaactgcggcttcgagacacacgcagccgagcaagccgccctgaacatcgccagatcctggctgttcctgcggagccaggagtacaagaaataccagacaaacaagacaaccggcaacaccgataagagagccttcgtcgagacctggcagtccttttaccggaagaagcttaaggaggtgtggaaacctgccgtgcggtctggcggatctggcggaggctccaccagccccaagaaaaagagaaaagtctaagctgccttctgcggggcttgccttctggccatgcccttcttctctcccttgcacctgtacctcttggtctttgaataaagcctgagtaggaaggctagcaaaaaaaaaaaaaaaaaaaaaaaaaaaaaaaaaaaaaaaaaaaaaaaaaaaaaaaaaaaaaaaaaaaaaaaaaaaaaaaagcccagccggctccccaacctctaccgaggagggcacctctgagtccgccacccccgagagcggccctggcacctccaccgagcccagcgagggcagcgcacccggcagccctgccggcagccccacctccacagaggagggaaccagcaccgagcccagcgaaggcagcgccccaggcaccagcaccgagcctagtgagcaggagattaaacggatcaacaagatcagaagaagacttgtgaaagacagcaacaccaagaaggccggcaagacaggccccatgaaaaccctgctggttagagtgatgacacccgatctgagagagcggctggaaaacctgagaaagaagcctgaaaatatcccccagcccatcagcaatacatctagagccaacctgaataagctgctgaccgattacaccgaaatgaagaaggcgatcctgcatgtgtactgggaagagttccagaaggaccctgtgggcctgatgagccgggtggcccagcctgccagcaagaagatcgatcagaacaagctgaaacctgagatggacgagaagggcaacctgaccaccgccggctttgcctgctctcagtgtggccagcccctgttcgtgtacaagctggagcaggtgtctgagaagggcaaggcttacaccaactacttcggacggtgcaatgtggccgagcacgaaaagctgatcctgctggcccagctgaagcccgagaaggatagcgacgaagccgtgacatatagcctgggaaagtttgggcagagggccctggatttctacagcattcatgtgaccaaggagtccacccaccccgtgaagcccctggcccagatcgccggaaacagatacgcctccggacctgtgggaaaggccctgagcgacgcatgtatgggcacaatcgcctccttcctgtctaagtaccaggacatcatcatcgaacaccagaaggtggtgaagggcaaccagaagagactggagagcctgcgggagctggccggcaaggaaaacctggaataccctagcgtgaccctgccacctcagcctcacaccaaggagggcgttgatgcctacaacgaagtgatcgcccgggtgcgaatgtgggtgaacctgaacctgtggcagaagctgaagctaagcagagatgatgccaagcctctgctgagactgaagggattcccttcctttcctctggtcgagagacaggccaacgaagtggactggtgggacatggtgtgtaacgtgaagaagctgatcaacgagaaaaaggaggatggcaaggtgttttggcagaatctggctggctacaagagacaggaagccctgagaccatacctgagcagcgaggaagatcggaagaagggaaagaaattcgctcggtaccagctgggcgacctgctgctgcacctggaaaagaagcacggcgaggactggggaaaggtgtacgacgaggcctgggagcggattgacaagaaagtggaaggcctgagcaagcacatcaagctggaagaggaacggagaagcgaggacgcccagagcaaggccgccctgaccgactggctgcgggctaaggccagcttcgtgatcgagggcctgaaggaggccgacaaggacgagttctgcagatgcgagctgaagctgcagaagtggtacggggacctgcggggaaagcccttcgccatcgaagccgagaacagcatcctggacatcagcggcttcagcaagcagtacaactgtgccttcatctggcagaaggacggcgtgaagaagctgaacctgtacctgatcatcaactacttcaagggcggcaagctgcggttcaagaagatcaaacctgaagccttcgaagccaacagattctacaccgtgatcaacaaaaagagcggcgagatcgtgcccatggaggtgaacttcaacttcgacgaccccaacctgatcatcctgcctctggcctttggcaagagacagggcagagaattcatctggaacgacctgctgtccctggaaaccggcagcctgaagctggccaacggaagagtgatcgagaagacactgtacaacagaagaacccggcaggatgagcctgccctgttcgtggccctgaccttcgagcggcgggaggtcctggactcctccaatatcaaaccaatgaacctgatcggcgtggcaagaggcgaaaacatccccgccgtgatcgccctgaccgaccccgagggctgcccactgagccggtttaaggatagcctgggaaacccaacccacatcctgagaatcggcgagagctataaggagaagcagcggaccatccaggccaagaaggaggtggagcagcggagagccggcggctacagccggaagtacgccagcaaagccaagaatctggcagacgatatggtgagaaacaccgctagagatctgctgtactacgccgtgacccaggatgccatgctgatcttcgccaacctgagccggggcttcggccggcagggcaagcggaccttcatggccgagagacagtacacacggatggaggactggctgaccgccaagctggcctacgagggcctgagcaagacctacctgtccaagacactggcccagtacacctccaagacatgcagcaactgtgggtttaccatcaccagcgccgactacgacagggtgctggagaagctgaagaagacagcaacaggctggatgaccacaattaacggcaaggagctgaaggtggagggccagattacctactacaacagatacaagagacagaacgtagtcaaggacctgtccgtcgagctggatagactgagcgaagaatctgtgaacaacgacatctcctcctggacaaagggcagaagcggagaagctctgagcctcctgaagaaaagattctcccatagacccgtgcaggagaagttcgtgtgcctgaactgcggcttcgagacacacgcagccgagcaagccgccctgaacatcgccagatcctggctgttcctgcggagccaggagtacaagaaataccagacaaacaagacaaccggcaacaccgataagagagccttcgtcgagacctggcagtccttttaccggaagaagcttaaggaggtgtggaaacctgccgtgcggtctggcggatctggcggaggctccaccagccccaagaaaaagagaaaagtctaagctgccttctgcggggcttgccttctggccatgcccttcttctctcccttgcacctgtacctcttggtctttgaataaagcctgagtaggaaggctagcaaaaaaaaaaaaaaaaaaaaaaaaaaaaaaaaaaaaaaaaaaaaaaaaaaaaaaaaaaaaaaaaaaaaaaaaaaaaaaaa

SEQ ID NO: 9760 - RNA, 8787 nt, synthetic construct
  source 1..8787: mol_type = other RNA
aggaaataagagagaaaagaagagtaagaagaaatataagagccaccatggcccctaagaagaagcgtaaagtgagccggatgaaccacgaccaggagttcgacccccctaaggtgtaccctcccgtccccgccgagaagagaaagcccatccgggtcctgagcctgttcgatggcatcgccaccggtctgctggtgctgaaggacctgggcatccaggtggataggtacattgcctccgaggtgtgcgaggactccatcaccgtgggaatggtgcgtcatcagggcaagatcatgtacgtgggcgacgtgcggagcgtgacacagaagcatatccaggagtggggccctttcgacctggtgatcggcggcagcccttgcaatgacctgagcatcgtgaacccagcccggaagggcctgtacgagggaaccggcagactgttcttcgagttttacagactgctgcacgacgcccggcctaaggaaggcgacgaccggcccttcttttggctgttcgagaatgtggtggccatgggagtcagcgacaagcgggatattagccggttcctggagagcaaccccgtgatgatcgatgccaaggaagtgagcgccgcccaccgggccagatacttctggggcaatctgcctggcatgaacagacccctggccagcaccgtgaacgacaagctggagctgcaggagtgcctggagcacggccggatcgccaagttcagcaaggtgagaaccatcaccacccgaagcaacagcatcaaacaaggcaaggaccagcactttcctgtgttcatgaacgagaaggaggacatcctgtggtgtaccgagatggagagagtgttcgggttcccagtccactacacagatgtcagcaacatgtctagactggccagacagagactgctgggaagaagctggtccgtccctgtgatcagacacctgttcgcccctctgaaggagtacttcgcctgcgtgagcagcggcaacagcaacgccaacagccggggccccagcttctctagcggcctggtgccactgtccctgagagggagccacatgggccccatggagatctacaaaaccgtgagcgcctggaagcggcagcctgtgcgcgtgctgagcctgtttcggaatatcgataaagtcctgaaaagcctgggattcctggagagcggctctggctccggcggtggcaccctgaagtacgtggaggatgtgacaaacgtggtcagacgggatgtggagaagtggggccccttcgatctggtgtacggcagcacccaacccctgggcagctcttgtgaccggtgccctggctggtacatgtttcagttccaccggatcctgcagtacgccctgccgagacaggagtcccagcggccattcttttggattttcatggacaacttgctgctgaccgaggatgaccaggaaactaccactcggttcctgcagaccgaagccgtgaccctgcaggacgtgagaggccgggactaccagaacgccatgcgggtgtggtccaacatccctggactgaaaagcaagcacgcacctctgacccctaaagaagaggagtacctgcaggcccaggtgcggagcagaagcaagctggacgcccctaaggtggatctgctggtgaagaattgcctcctgcccctgagagagtacttcaagtatttcagccagaatagtctgcccctgggaggcagcggcggcggcgcccaggaggtggtgaccttccaggacgtggccgtggacttcaccagggaggagtggaggctgctgagccccccccagaaggagctgtacaaggaggtgatgctggagaacgccaggaacctgctgagcgtgggcctgcccgccccccccgacgacgtggtgagctacctggagcagagggagggccccagcatgctggaccaggaggacctgaggacctgcggccccgagggcgagatcaggggcggcccaagcagcggcgcccctcctcccagcggcggcaggcggcccaagcagcggcgcccctcctcccagcggcggcagcccagccggctccccaacctctaccgaggagggcacctctgagtccgccacccccgagagcggccctggcacctccaccgagcccagcgagggcagcgcacccggcagccctgccggcagccccacctccacagaggagggaaccagcaccgagcccagcgaaggcagcgccccaggcaccagcaccgagcctagtgagcaggagattaaacggatcaacaagatcagaagaagacttgtgaaagacagcaacaccaagaaggccggcaagacaggccccatgaaaaccctgctggttagagtgatgacacccgatctgagagagcggctggaaaacctgagaaagaagcctgaaaatatcccccagcccatcagcaatacatctagagccaacctgaataagctgctgaccgattacaccgaaatgaagaaggcgatcctgcatgtgtactgggaagagttccagaaggaccctgtgggcctgatgagccgggtggcccagcctgccagcaagaagatcgatcagaacaagctgaaacctgagatggacgagaagggcaacctgaccaccgccggctttgcctgctctcagtgtggccagcccctgttcgtgtacaagctggagcaggtgtctgagaagggcaaggcttacaccaactacttcggacggtgcaatgtggccgagcacgaaaagctgatcctgctggcccagctgaagcccgagaaggatagcgacgaagccgtgacatatagcctgggaaagtttgggcagagggccctggatttctacagcattcatgtgaccaaggagtccacccaccccgtgaagcccctggcccagatcgccggaaacagatacgcctccggacctgtgggaaaggccctgagcgacgcatgtatgggcacaatcgcctccttcctgtctaagtaccaggacatcatcatcgaacaccagaaggtggtgaagggcaaccagaagagactggagagcctgcgggagctggccggcaaggaaaacctggaataccctagcgtgaccctgccacctcagcctcacaccaaggagggcgttgatgcctacaacgaagtgatcgcccgggtgcgaatgtgggtgaacctgaacctgtggcagaagctgaagctaagcagagatgatgccaagcctctgctgagactgaagggattcccttcctttcctctggtcgagagacaggccaacgaagtggactggtgggacatggtgtgtaacgtgaagaagctgatcaacgagaaaaaggaggatggcaaggtgttttggcagaatctggctggctacaagagacaggaagccctgagaccatacctgagcagcgaggaagatcggaagaagggaaagaaattcgctcggtaccagctgggcgacctgctgctgcacctggaaaagaagcacggcgaggactggggaaaggtgtacgacgaggcctgggagcggattgacaagaaagtggaaggcctgagcaagcacatcaagctggaagaggaacggagaagcgaggacgcccagagcaaggccgccctgaccgactggctgcgggctaaggccagcttcgtgatcgagggcctgaaggaggccgacaaggacgagttctgcagatgcgagctgaagctgcagaagtggtacggggacctgcggggaaagcccttcgccatcgaagccgagaacagcatcctggacatcagcggcttcagcaagcagtacaactgtgccttcatctggcagaaggacggcgtgaagaagctgaacctgtacctgatcatcaactacttcaagggcggcaagctgcggttcaagaagatcaaacctgaagccttcgaagccaacagattctacaccgtgatcaacaaaaagagcggcgagatcgtgcccatggaggtgaacttcaacttcgacgaccccaacctgatcatcctgcctctggcctttggcaagagacagggcagagaattcatctggaacgacctgctgtccctggaaaccggcagcctgaagctggccaacggaagagtgatcgagaagacactgtacaacagaagaacccggcaggatgagcctgccctgttcgtggccctgaccttcgagcggcgggaggtcctggactcctccaatatcaaaccaatgaacctgatcggcgtggcaagaggcgaaaacatccccgccgtgatcgccctgaccgaccccgagggctgcccactgagccggtttaaggatagcctgggaaacccaacccacatcctgagaatcggcgagagctataaggagaagcagcggaccatccaggccaagaaggaggtggagcagcggagagccggcggctacagccggaagtacgccagcaaagccaagaatctggcagacgatatggtgagaaacaccgctagagatctgctgtactacgccgtgacccaggatgccatgctgatcttcgccaacctgagccggggcttcggccggcagggcaagcggaccttcatggccgagagacagtacacacggatggaggactggctgaccgccaagctggcctacgagggcctgagcaagacctacctgtccaagacactggcccagtacacctccaagacatgcagcaactgtgggtttaccatcaccagcgccgactacgacagggtgctggagaagctgaagaagacagcaacaggctggatgaccacaattaacggcaaggagctgaaggtggagggccagattacctactacaacagatacaagagacagaacgtagtcaaggacctgtccgtcgagctggatagactgagcgaagaatctgtgaacaacgacatctcctcctggacaaagggcagaagcggagaagctctgagcctcctgaagaaaagattctcccatagacccgtgcaggagaagttcgtgtgcctgaactgcggcttcgagacacacgcagccgagcaagccgccctgaacatcgccagatcctggctgttcctgcggagccaggagtacaagaaataccagacaaacaagacaaccggcaacaccgataagagagccttcgtcgagacctggcagtccttttaccggaagaagcttaaggaggtgtggaaacctgccgtgcggtctggcggatctggcggaggctccaccagccccaagaaaaagagaaaagtctaagctgccttctgcggggcttgccttctggccatgcccttcttctctcccttgcacctgtacctcttggtctttgaataaagcctgagtaggaaggctagcaaaaaaaaaaaaaaaaaaaaaaaaaaaaaaaaaaaaaaaaaaaaaaaaaaaaaaaaaaaaaaaaaaaaaaaaaaaaaaaagcccagccggctccccaacctctaccgaggagggcacctctgagtccgccacccccgagagcggccctggcacctccaccgagcccagcgagggcagcgcacccggcagccctgccggcagccccacctccacagaggagggaaccagcaccgagcccagcgaaggcagcgccccaggcaccagcaccgagcctagtgagcaggagattaaacggatcaacaagatcagaagaagacttgtgaaagacagcaacaccaagaaggccggcaagacaggccccatgaaaaccctgctggttagagtgatgacacccgatctgagagagcggctggaaaacctgagaaagaagcctgaaaatatcccccagcccatcagcaatacatctagagccaacctgaataagctgctgaccgattacaccgaaatgaagaaggcgatcctgcatgtgtactgggaagagttccagaaggaccctgtgggcctgatgagccgggtggcccagcctgccagcaagaagatcgatcagaacaagctgaaacctgagatggacgagaagggcaacctgaccaccgccggctttgcctgctctcagtgtggccagcccctgttcgtgtacaagctggagcaggtgtctgagaagggcaaggcttacaccaactacttcggacggtgcaatgtggccgagcacgaaaagctgatcctgctggcccagctgaagcccgagaaggatagcgacgaagccgtgacatatagcctgggaaagtttgggcagagggccctggatttctacagcattcatgtgaccaaggagtccacccaccccgtgaagcccctggcccagatcgccggaaacagatacgcctccggacctgtgggaaaggccctgagcgacgcatgtatgggcacaatcgcctccttcctgtctaagtaccaggacatcatcatcgaacaccagaaggtggtgaagggcaaccagaagagactggagagcctgcgggagctggccggcaaggaaaacctggaataccctagcgtgaccctgccacctcagcctcacaccaaggagggcgttgatgcctacaacgaagtgatcgcccgggtgcgaatgtgggtgaacctgaacctgtggcagaagctgaagctaagcagagatgatgccaagcctctgctgagactgaagggattcccttcctttcctctggtcgagagacaggccaacgaagtggactggtgggacatggtgtgtaacgtgaagaagctgatcaacgagaaaaaggaggatggcaaggtgttttggcagaatctggctggctacaagagacaggaagccctgagaccatacctgagcagcgaggaagatcggaagaagggaaagaaattcgctcggtaccagctgggcgacctgctgctgcacctggaaaagaagcacggcgaggactggggaaaggtgtacgacgaggcctgggagcggattgacaagaaagtggaaggcctgagcaagcacatcaagctggaagaggaacggagaagcgaggacgcccagagcaaggccgccctgaccgactggctgcgggctaaggccagcttcgtgatcgagggcctgaaggaggccgacaaggacgagttctgcagatgcgagctgaagctgcagaagtggtacggggacctgcggggaaagcccttcgccatcgaagccgagaacagcatcctggacatcagcggcttcagcaagcagtacaactgtgccttcatctggcagaaggacggcgtgaagaagctgaacctgtacctgatcatcaactacttcaagggcggcaagctgcggttcaagaagatcaaacctgaagccttcgaagccaacagattctacaccgtgatcaacaaaaagagcggcgagatcgtgcccatggaggtgaacttcaacttcgacgaccccaacctgatcatcctgcctctggcctttggcaagagacagggcagagaattcatctggaacgacctgctgtccctggaaaccggcagcctgaagctggccaacggaagagtgatcgagaagacactgtacaacagaagaacccggcaggatgagcctgccctgttcgtggccctgaccttcgagcggcgggaggtcctggactcctccaatatcaaaccaatgaacctgatcggcgtggcaagaggcgaaaacatccccgccgtgatcgccctgaccgaccccgagggctgcccactgagccggtttaaggatagcctgggaaacccaacccacatcctgagaatcggcgagagctataaggagaagcagcggaccatccaggccaagaaggaggtggagcagcggagagccggcggctacagccggaagtacgccagcaaagccaagaatctggcagacgatatggtgagaaacaccgctagagatctgctgtactacgccgtgacccaggatgccatgctgatcttcgccaacctgagccggggcttcggccggcagggcaagcggaccttcatggccgagagacagtacacacggatggaggactggctgaccgccaagctggcctacgagggcctgagcaagacctacctgtccaagacactggcccagtacacctccaagacatgcagcaactgtgggtttaccatcaccagcgccgactacgacagggtgctggagaagctgaagaagacagcaacaggctggatgaccacaattaacggcaaggagctgaaggtggagggccagattacctactacaacagatacaagagacagaacgtagtcaaggacctgtccgtcgagctggatagactgagcgaagaatctgtgaacaacgacatctcctcctggacaaagggcagaagcggagaagctctgagcctcctgaagaaaagattctcccatagacccgtgcaggagaagttcgtgtgcctgaactgcggcttcgagacacacgcagccgagcaagccgccctgaacatcgccagatcctggctgttcctgcggagccaggagtacaagaaataccagacaaacaagacaaccggcaacaccgataagagagccttcgtcgagacctggcagtccttttaccggaagaagcttaaggaggtgtggaaacctgccgtgcggtctggcggatctggcggaggctccaccagccccaagaaaaagagaaaagtctaagctgccttctgcggggcttgccttctggccatgcccttcttctctcccttgcacctgtacctcttggtctttgaataaagcctgagtaggaaggctagcaaaaaaaaaaaaaaaaaaaaaaaaaaaaaaaaaaaaaaaaaaaaaaaaaaaaaaaaaaaaaaaaaaaaaaaaaaaaaaaa

SEQ ID NO: 9761 - RNA, 8787 nt, synthetic construct
  source 1..8787: mol_type = other RNA
aggaaataagagagaaaagaagagtaagaagaaatataagagccaccatggcccctaagaagaagcgtaaagtgagccggatgaaccacgaccaggagttcgacccccctaaggtgtaccctcccgtccccgccgagaagagaaagcccatccgggtcctgagcctgttcgatggcatcgccaccggtctgctggtgctgaaggacctgggcatccaggtggataggtacattgcctccgaggtgtgcgaggactccatcaccgtgggaatggtgcgtcatcagggcaagatcatgtacgtgggcgacgtgcggagcgtgacacagaagcatatccaggagtggggccctttcgacctggtgatcggcggcagcccttgcaatgacctgagcatcgtgaacccagcccggaagggcctgtacgagggaaccggcagactgttcttcgagttttacagactgctgcacgacgcccggcctaaggaaggcgacgaccggcccttcttttggctgttcgagaatgtggtggccatgggagtcagcgacaagcgggatattagccggttcctggagagcaaccccgtgatgatcgatgccaaggaagtgagcgccgcccaccgggccagatacttctggggcaatctgcctggcatgaacagacccctggccagcaccgtgaacgacaagctggagctgcaggagtgcctggagcacggccggatcgccaagttcagcaaggtgagaaccatcaccacccgaagcaacagcatcaaacaaggcaaggaccagcactttcctgtgttcatgaacgagaaggaggacatcctgtggtgtaccgagatggagagagtgttcgggttcccagtccactacacagatgtcagcaacatgtctagactggccagacagagactgctgggaagaagctggtccgtccctgtgatcagacacctgttcgcccctctgaaggagtacttcgcctgcgtgagcagcggcaacagcaacgccaacagccggggccccagcttctctagcggcctggtgccactgtccctgagagggagccacatgggccccatggagatctacaaaaccgtgagcgcctggaagcggcagcctgtgcgcgtgctgagcctgtttcggaatatcgataaagtcctgaaaagcctgggattcctggagagcggctctggctccggcggtggcaccctgaagtacgtggaggatgtgacaaacgtggtcagacgggatgtggagaagtggggccccttcgatctggtgtacggcagcacccaacccctgggcagctcttgtgaccggtgccctggctggtacatgtttcagttccaccggatcctgcagtacgccctgccgagacaggagtcccagcggccattcttttggattttcatggacaacttgctgctgaccgaggatgaccaggaaactaccactcggttcctgcagaccgaagccgtgaccctgcaggacgtgagaggccgggactaccagaacgccatgcgggtgtggtccaacatccctggactgaaaagcaagcacgcacctctgacccctaaagaagaggagtacctgcaggcccaggtgcggagcagaagcaagctggacgcccctaaggtggatctgctggtgaagaattgcctcctgcccctgagagagtacttcaagtatttcagccagaatagtctgcccctgggaggcagcggcggcggcttccaggaggccgtgaccttcaaggacgtggccgtggtgttcagcgaggaggagctgggcctgctgggccccgcccagaggaagctgtacagggacgtgatgctggagaacttcaggaacctggtgagcgtgggccacagcagcagcaagcccgacgtgatcagccagctggagagggaggagaagctgtgcaccaaggagttccacacccagggcggcggcaggaaccagaaggagatggagggcggcccaagcagcggcgcccctcctcccagcggcggcaggcggcccaagcagcggcgcccctcctcccagcggcggcagcccagccggctccccaacctctaccgaggagggcacctctgagtccgccacccccgagagcggccctggcacctccaccgagcccagcgagggcagcgcacccggcagccctgccggcagccccacctccacagaggagggaaccagcaccgagcccagcgaaggcagcgccccaggcaccagcaccgagcctagtgagcaggagattaaacggatcaacaagatcagaagaagacttgtgaaagacagcaacaccaagaaggccggcaagacaggccccatgaaaaccctgctggttagagtgatgacacccgatctgagagagcggctggaaaacctgagaaagaagcctgaaaatatcccccagcccatcagcaatacatctagagccaacctgaataagctgctgaccgattacaccgaaatgaagaaggcgatcctgcatgtgtactgggaagagttccagaaggaccctgtgggcctgatgagccgggtggcccagcctgccagcaagaagatcgatcagaacaagctgaaacctgagatggacgagaagggcaacctgaccaccgccggctttgcctgctctcagtgtggccagcccctgttcgtgtacaagctggagcaggtgtctgagaagggcaaggcttacaccaactacttcggacggtgcaatgtggccgagcacgaaaagctgatcctgctggcccagctgaagcccgagaaggatagcgacgaagccgtgacatatagcctgggaaagtttgggcagagggccctggatttctacagcattcatgtgaccaaggagtccacccaccccgtgaagcccctggcccagatcgccggaaacagatacgcctccggacctgtgggaaaggccctgagcgacgcatgtatgggcacaatcgcctccttcctgtctaagtaccaggacatcatcatcgaacaccagaaggtggtgaagggcaaccagaagagactggagagcctgcgggagctggccggcaaggaaaacctggaataccctagcgtgaccctgccacctcagcctcacaccaaggagggcgttgatgcctacaacgaagtgatcgcccgggtgcgaatgtgggtgaacctgaacctgtggcagaagctgaagctaagcagagatgatgccaagcctctgctgagactgaagggattcccttcctttcctctggtcgagagacaggccaacgaagtggactggtgggacatggtgtgtaacgtgaagaagctgatcaacgagaaaaaggaggatggcaaggtgttttggcagaatctggctggctacaagagacaggaagccctgagaccatacctgagcagcgaggaagatcggaagaagggaaagaaattcgctcggtaccagctgggcgacctgctgctgcacctggaaaagaagcacggcgaggactggggaaaggtgtacgacgaggcctgggagcggattgacaagaaagtggaaggcctgagcaagcacatcaagctggaagaggaacggagaagcgaggacgcccagagcaaggccgccctgaccgactggctgcgggctaaggccagcttcgtgatcgagggcctgaaggaggccgacaaggacgagttctgcagatgcgagctgaagctgcagaagtggtacggggacctgcggggaaagcccttcgccatcgaagccgagaacagcatcctggacatcagcggcttcagcaagcagtacaactgtgccttcatctggcagaaggacggcgtgaagaagctgaacctgtacctgatcatcaactacttcaagggcggcaagctgcggttcaagaagatcaaacctgaagccttcgaagccaacagattctacaccgtgatcaacaaaaagagcggcgagatcgtgcccatggaggtgaacttcaacttcgacgaccccaacctgatcatcctgcctctggcctttggcaagagacagggcagagaattcatctggaacgacctgctgtccctggaaaccggcagcctgaagctggccaacggaagagtgatcgagaagacactgtacaacagaagaacccggcaggatgagcctgccctgttcgtggccctgaccttcgagcggcgggaggtcctggactcctccaatatcaaaccaatgaacctgatcggcgtggcaagaggcgaaaacatccccgccgtgatcgccctgaccgaccccgagggctgcccactgagccggtttaaggatagcctgggaaacccaacccacatcctgagaatcggcgagagctataaggagaagcagcggaccatccaggccaagaaggaggtggagcagcggagagccggcggctacagccggaagtacgccagcaaagccaagaatctggcagacgatatggtgagaaacaccgctagagatctgctgtactacgccgtgacccaggatgccatgctgatcttcgccaacctgagccggggcttcggccggcagggcaagcggaccttcatggccgagagacagtacacacggatggaggactggctgaccgccaagctggcctacgagggcctgagcaagacctacctgtccaagacactggcccagtacacctccaagacatgcagcaactgtgggtttaccatcaccagcgccgactacgacagggtgctggagaagctgaagaagacagcaacaggctggatgaccacaattaacggcaaggagctgaaggtggagggccagattacctactacaacagatacaagagacagaacgtagtcaaggacctgtccgtcgagctggatagactgagcgaagaatctgtgaacaacgacatctcctcctggacaaagggcagaagcggagaagctctgagcctcctgaagaaaagattctcccatagacccgtgcaggagaagttcgtgtgcctgaactgcggcttcgagacacacgcagccgagcaagccgccctgaacatcgccagatcctggctgttcctgcggagccaggagtacaagaaataccagacaaacaagacaaccggcaacaccgataagagagccttcgtcgagacctggcagtccttttaccggaagaagcttaaggaggtgtggaaacctgccgtgcggtctggcggatctggcggaggctccaccagccccaagaaaaagagaaaagtctaagctgccttctgcggggcttgccttctggccatgcccttcttctctcccttgcacctgtacctcttggtctttgaataaagcctgagtaggaaggctagcaaaaaaaaaaaaaaaaaaaaaaaaaaaaaaaaaaaaaaaaaaaaaaaaaaaaaaaaaaaaaaaaaaaaaaaaaaaaaaaagcccagccggctccccaacctctaccgaggagggcacctctgagtccgccacccccgagagcggccctggcacctccaccgagcccagcgagggcagcgcacccggcagccctgccggcagccccacctccacagaggagggaaccagcaccgagcccagcgaaggcagcgccccaggcaccagcaccgagcctagtgagcaggagattaaacggatcaacaagatcagaagaagacttgtgaaagacagcaacaccaagaaggccggcaagacaggccccatgaaaaccctgctggttagagtgatgacacccgatctgagagagcggctggaaaacctgagaaagaagcctgaaaatatcccccagcccatcagcaatacatctagagccaacctgaataagctgctgaccgattacaccgaaatgaagaaggcgatcctgcatgtgtactgggaagagttccagaaggaccctgtgggcctgatgagccgggtggcccagcctgccagcaagaagatcgatcagaacaagctgaaacctgagatggacgagaagggcaacctgaccaccgccggctttgcctgctctcagtgtggccagcccctgttcgtgtacaagctggagcaggtgtctgagaagggcaaggcttacaccaactacttcggacggtgcaatgtggccgagcacgaaaagctgatcctgctggcccagctgaagcccgagaaggatagcgacgaagccgtgacatatagcctgggaaagtttgggcagagggccctggatttctacagcattcatgtgaccaaggagtccacccaccccgtgaagcccctggcccagatcgccggaaacagatacgcctccggacctgtgggaaaggccctgagcgacgcatgtatgggcacaatcgcctccttcctgtctaagtaccaggacatcatcatcgaacaccagaaggtggtgaagggcaaccagaagagactggagagcctgcgggagctggccggcaaggaaaacctggaataccctagcgtgaccctgccacctcagcctcacaccaaggagggcgttgatgcctacaacgaagtgatcgcccgggtgcgaatgtgggtgaacctgaacctgtggcagaagctgaagctaagcagagatgatgccaagcctctgctgagactgaagggattcccttcctttcctctggtcgagagacaggccaacgaagtggactggtgggacatggtgtgtaacgtgaagaagctgatcaacgagaaaaaggaggatggcaaggtgttttggcagaatctggctggctacaagagacaggaagccctgagaccatacctgagcagcgaggaagatcggaagaagggaaagaaattcgctcggtaccagctgggcgacctgctgctgcacctggaaaagaagcacggcgaggactggggaaaggtgtacgacgaggcctgggagcggattgacaagaaagtggaaggcctgagcaagcacatcaagctggaagaggaacggagaagcgaggacgcccagagcaaggccgccctgaccgactggctgcgggctaaggccagcttcgtgatcgagggcctgaaggaggccgacaaggacgagttctgcagatgcgagctgaagctgcagaagtggtacggggacctgcggggaaagcccttcgccatcgaagccgagaacagcatcctggacatcagcggcttcagcaagcagtacaactgtgccttcatctggcagaaggacggcgtgaagaagctgaacctgtacctgatcatcaactacttcaagggcggcaagctgcggttcaagaagatcaaacctgaagccttcgaagccaacagattctacaccgtgatcaacaaaaagagcggcgagatcgtgcccatggaggtgaacttcaacttcgacgaccccaacctgatcatcctgcctctggcctttggcaagagacagggcagagaattcatctggaacgacctgctgtccctggaaaccggcagcctgaagctggccaacggaagagtgatcgagaagacactgtacaacagaagaacccggcaggatgagcctgccctgttcgtggccctgaccttcgagcggcgggaggtcctggactcctccaatatcaaaccaatgaacctgatcggcgtggcaagaggcgaaaacatccccgccgtgatcgccctgaccgaccccgagggctgcccactgagccggtttaaggatagcctgggaaacccaacccacatcctgagaatcggcgagagctataaggagaagcagcggaccatccaggccaagaaggaggtggagcagcggagagccggcggctacagccggaagtacgccagcaaagccaagaatctggcagacgatatggtgagaaacaccgctagagatctgctgtactacgccgtgacccaggatgccatgctgatcttcgccaacctgagccggggcttcggccggcagggcaagcggaccttcatggccgagagacagtacacacggatggaggactggctgaccgccaagctggcctacgagggcctgagcaagacctacctgtccaagacactggcccagtacacctccaagacatgcagcaactgtgggtttaccatcaccagcgccgactacgacagggtgctggagaagctgaagaagacagcaacaggctggatgaccacaattaacggcaaggagctgaaggtggagggccagattacctactacaacagatacaagagacagaacgtagtcaaggacctgtccgtcgagctggatagactgagcgaagaatctgtgaacaacgacatctcctcctggacaaagggcagaagcggagaagctctgagcctcctgaagaaaagattctcccatagacccgtgcaggagaagttcgtgtgcctgaactgcggcttcgagacacacgcagccgagcaagccgccctgaacatcgccagatcctggctgttcctgcggagccaggagtacaagaaataccagacaaacaagacaaccggcaacaccgataagagagccttcgtcgagacctggcagtccttttaccggaagaagcttaaggaggtgtggaaacctgccgtgcggtctggcggatctggcggaggctccaccagccccaagaaaaagagaaaagtctaagctgccttctgcggggcttgccttctggccatgcccttcttctctcccttgcacctgtacctcttggtctttgaataaagcctgagtaggaaggctagcaaaaaaaaaaaaaaaaaaaaaaaaaaaaaaaaaaaaaaaaaaaaaaaaaaaaaaaaaaaaaaaaaaaaaaaaaaaaaaaa

SEQ ID NO: 9762 - RNA, 8787 nt, synthetic construct
  source 1..8787: mol_type = other RNA
aggaaataagagagaaaagaagagtaagaagaaatataagagccaccatggcccctaagaagaagcgtaaagtgagccggatgaaccacgaccaggagttcgacccccctaaggtgtaccctcccgtccccgccgagaagagaaagcccatccgggtcctgagcctgttcgatggcatcgccaccggtctgctggtgctgaaggacctgggcatccaggtggataggtacattgcctccgaggtgtgcgaggactccatcaccgtgggaatggtgcgtcatcagggcaagatcatgtacgtgggcgacgtgcggagcgtgacacagaagcatatccaggagtggggccctttcgacctggtgatcggcggcagcccttgcaatgacctgagcatcgtgaacccagcccggaagggcctgtacgagggaaccggcagactgttcttcgagttttacagactgctgcacgacgcccggcctaaggaaggcgacgaccggcccttcttttggctgttcgagaatgtggtggccatgggagtcagcgacaagcgggatattagccggttcctggagagcaaccccgtgatgatcgatgccaaggaagtgagcgccgcccaccgggccagatacttctggggcaatctgcctggcatgaacagacccctggccagcaccgtgaacgacaagctggagctgcaggagtgcctggagcacggccggatcgccaagttcagcaaggtgagaaccatcaccacccgaagcaacagcatcaaacaaggcaaggaccagcactttcctgtgttcatgaacgagaaggaggacatcctgtggtgtaccgagatggagagagtgttcgggttcccagtccactacacagatgtcagcaacatgtctagactggccagacagagactgctgggaagaagctggtccgtccctgtgatcagacacctgttcgcccctctgaaggagtacttcgcctgcgtgagcagcggcaacagcaacgccaacagccggggccccagcttctctagcggcctggtgccactgtccctgagagggagccacatgggccccatggagatctacaaaaccgtgagcgcctggaagcggcagcctgtgcgcgtgctgagcctgtttcggaatatcgataaagtcctgaaaagcctgggattcctggagagcggctctggctccggcggtggcaccctgaagtacgtggaggatgtgacaaacgtggtcagacgggatgtggagaagtggggccccttcgatctggtgtacggcagcacccaacccctgggcagctcttgtgaccggtgccctggctggtacatgtttcagttccaccggatcctgcagtacgccctgccgagacaggagtcccagcggccattcttttggattttcatggacaacttgctgctgaccgaggatgaccaggaaactaccactcggttcctgcagaccgaagccgtgaccctgcaggacgtgagaggccgggactaccagaacgccatgcgggtgtggtccaacatccctggactgaaaagcaagcacgcacctctgacccctaaagaagaggagtacctgcaggcccaggtgcggagcagaagcaagctggacgcccctaaggtggatctgctggtgaagaattgcctcctgcccctgagagagtacttcaagtatttcagccagaatagtctgcccctgggaggcagcggcggcggcatgatcaagttccagatggtgaccttcaaggacgtggccgtggtgttcaccgaggaggagctgggcctgctggacagcgtgcagaggaagctgtacagggacgtgatgctggagaacttcaggaacctgctgctggtggcccaccagcccttcaagcccgacctgatcagccagctggagagggaggagaagctgctgatggtggagaccgagacccccggcgacggctgcagcggcaggaagggcggcccaagcagcggcgcccctcctcccagcggcggcaggcggcccaagcagcggcgcccctcctcccagcggcggcagcccagccggctccccaacctctaccgaggagggcacctctgagtccgccacccccgagagcggccctggcacctccaccgagcccagcgagggcagcgcacccggcagccctgccggcagccccacctccacagaggagggaaccagcaccgagcccagcgaaggcagcgccccaggcaccagcaccgagcctagtgagcaggagattaaacggatcaacaagatcagaagaagacttgtgaaagacagcaacaccaagaaggccggcaagacaggccccatgaaaaccctgctggttagagtgatgacacccgatctgagagagcggctggaaaacctgagaaagaagcctgaaaatatcccccagcccatcagcaatacatctagagccaacctgaataagctgctgaccgattacaccgaaatgaagaaggcgatcctgcatgtgtactgggaagagttccagaaggaccctgtgggcctgatgagccgggtggcccagcctgccagcaagaagatcgatcagaacaagctgaaacctgagatggacgagaagggcaacctgaccaccgccggctttgcctgctctcagtgtggccagcccctgttcgtgtacaagctggagcaggtgtctgagaagggcaaggcttacaccaactacttcggacggtgcaatgtggccgagcacgaaaagctgatcctgctggcccagctgaagcccgagaaggatagcgacgaagccgtgacatatagcctgggaaagtttgggcagagggccctggatttctacagcattcatgtgaccaaggagtccacccaccccgtgaagcccctggcccagatcgccggaaacagatacgcctccggacctgtgggaaaggccctgagcgacgcatgtatgggcacaatcgcctccttcctgtctaagtaccaggacatcatcatcgaacaccagaaggtggtgaagggcaaccagaagagactggagagcctgcgggagctggccggcaaggaaaacctggaataccctagcgtgaccctgccacctcagcctcacaccaaggagggcgttgatgcctacaacgaagtgatcgcccgggtgcgaatgtgggtgaacctgaacctgtggcagaagctgaagctaagcagagatgatgccaagcctctgctgagactgaagggattcccttcctttcctctggtcgagagacaggccaacgaagtggactggtgggacatggtgtgtaacgtgaagaagctgatcaacgagaaaaaggaggatggcaaggtgttttggcagaatctggctggctacaagagacaggaagccctgagaccatacctgagcagcgaggaagatcggaagaagggaaagaaattcgctcggtaccagctgggcgacctgctgctgcacctggaaaagaagcacggcgaggactggggaaaggtgtacgacgaggcctgggagcggattgacaagaaagtggaaggcctgagcaagcacatcaagctggaagaggaacggagaagcgaggacgcccagagcaaggccgccctgaccgactggctgcgggctaaggccagcttcgtgatcgagggcctgaaggaggccgacaaggacgagttctgcagatgcgagctgaagctgcagaagtggtacggggacctgcggggaaagcccttcgccatcgaagccgagaacagcatcctggacatcagcggcttcagcaagcagtacaactgtgccttcatctggcagaaggacggcgtgaagaagctgaacctgtacctgatcatcaactacttcaagggcggcaagctgcggttcaagaagatcaaacctgaagccttcgaagccaacagattctacaccgtgatcaacaaaaagagcggcgagatcgtgcccatggaggtgaacttcaacttcgacgaccccaacctgatcatcctgcctctggcctttggcaagagacagggcagagaattcatctggaacgacctgctgtccctggaaaccggcagcctgaagctggccaacggaagagtgatcgagaagacactgtacaacagaagaacccggcaggatgagcctgccctgttcgtggccctgaccttcgagcggcgggaggtcctggactcctccaatatcaaaccaatgaacctgatcggcgtggcaagaggcgaaaacatccccgccgtgatcgccctgaccgaccccgagggctgcccactgagccggtttaaggatagcctgggaaacccaacccacatcctgagaatcggcgagagctataaggagaagcagcggaccatccaggccaagaaggaggtggagcagcggagagccggcggctacagccggaagtacgccagcaaagccaagaatctggcagacgatatggtgagaaacaccgctagagatctgctgtactacgccgtgacccaggatgccatgctgatcttcgccaacctgagccggggcttcggccggcagggcaagcggaccttcatggccgagagacagtacacacggatggaggactggctgaccgccaagctggcctacgagggcctgagcaagacctacctgtccaagacactggcccagtacacctccaagacatgcagcaactgtgggtttaccatcaccagcgccgactacgacagggtgctggagaagctgaagaagacagcaacaggctggatgaccacaattaacggcaaggagctgaaggtggagggccagattacctactacaacagatacaagagacagaacgtagtcaaggacctgtccgtcgagctggatagactgagcgaagaatctgtgaacaacgacatctcctcctggacaaagggcagaagcggagaagctctgagcctcctgaagaaaagattctcccatagacccgtgcaggagaagttcgtgtgcctgaactgcggcttcgagacacacgcagccgagcaagccgccctgaacatcgccagatcctggctgttcctgcggagccaggagtacaagaaataccagacaaacaagacaaccggcaacaccgataagagagccttcgtcgagacctggcagtccttttaccggaagaagcttaaggaggtgtggaaacctgccgtgcggtctggcggatctggcggaggctccaccagccccaagaaaaagagaaaagtctaagctgccttctgcggggcttgccttctggccatgcccttcttctctcccttgcacctgtacctcttggtctttgaataaagcctgagtaggaaggctagcaaaaaaaaaaaaaaaaaaaaaaaaaaaaaaaaaaaaaaaaaaaaaaaaaaaaaaaaaaaaaaaaaaaaaaaaaaaaaaaagcccagccggctccccaacctctaccgaggagggcacctctgagtccgccacccccgagagcggccctggcacctccaccgagcccagcgagggcagcgcacccggcagccctgccggcagccccacctccacagaggagggaaccagcaccgagcccagcgaaggcagcgccccaggcaccagcaccgagcctagtgagcaggagattaaacggatcaacaagatcagaagaagacttgtgaaagacagcaacaccaagaaggccggcaagacaggccccatgaaaaccctgctggttagagtgatgacacccgatctgagagagcggctggaaaacctgagaaagaagcctgaaaatatcccccagcccatcagcaatacatctagagccaacctgaataagctgctgaccgattacaccgaaatgaagaaggcgatcctgcatgtgtactgggaagagttccagaaggaccctgtgggcctgatgagccgggtggcccagcctgccagcaagaagatcgatcagaacaagctgaaacctgagatggacgagaagggcaacctgaccaccgccggctttgcctgctctcagtgtggccagcccctgttcgtgtacaagctggagcaggtgtctgagaagggcaaggcttacaccaactacttcggacggtgcaatgtggccgagcacgaaaagctgatcctgctggcccagctgaagcccgagaaggatagcgacgaagccgtgacatatagcctgggaaagtttgggcagagggccctggatttctacagcattcatgtgaccaaggagtccacccaccccgtgaagcccctggcccagatcgccggaaacagatacgcctccggacctgtgggaaaggccctgagcgacgcatgtatgggcacaatcgcctccttcctgtctaagtaccaggacatcatcatcgaacaccagaaggtggtgaagggcaaccagaagagactggagagcctgcgggagctggccggcaaggaaaacctggaataccctagcgtgaccctgccacctcagcctcacaccaaggagggcgttgatgcctacaacgaagtgatcgcccgggtgcgaatgtgggtgaacctgaacctgtggcagaagctgaagctaagcagagatgatgccaagcctctgctgagactgaagggattcccttcctttcctctggtcgagagacaggccaacgaagtggactggtgggacatggtgtgtaacgtgaagaagctgatcaacgagaaaaaggaggatggcaaggtgttttggcagaatctggctggctacaagagacaggaagccctgagaccatacctgagcagcgaggaagatcggaagaagggaaagaaattcgctcggtaccagctgggcgacctgctgctgcacctggaaaagaagcacggcgaggactggggaaaggtgtacgacgaggcctgggagcggattgacaagaaagtggaaggcctgagcaagcacatcaagctggaagaggaacggagaagcgaggacgcccagagcaaggccgccctgaccgactggctgcgggctaaggccagcttcgtgatcgagggcctgaaggaggccgacaaggacgagttctgcagatgcgagctgaagctgcagaagtggtacggggacctgcggggaaagcccttcgccatcgaagccgagaacagcatcctggacatcagcggcttcagcaagcagtacaactgtgccttcatctggcagaaggacggcgtgaagaagctgaacctgtacctgatcatcaactacttcaagggcggcaagctgcggttcaagaagatcaaacctgaagccttcgaagccaacagattctacaccgtgatcaacaaaaagagcggcgagatcgtgcccatggaggtgaacttcaacttcgacgaccccaacctgatcatcctgcctctggcctttggcaagagacagggcagagaattcatctggaacgacctgctgtccctggaaaccggcagcctgaagctggccaacggaagagtgatcgagaagacactgtacaacagaagaacccggcaggatgagcctgccctgttcgtggccctgaccttcgagcggcgggaggtcctggactcctccaatatcaaaccaatgaacctgatcggcgtggcaagaggcgaaaacatccccgccgtgatcgccctgaccgaccccgagggctgcccactgagccggtttaaggatagcctgggaaacccaacccacatcctgagaatcggcgagagctataaggagaagcagcggaccatccaggccaagaaggaggtggagcagcggagagccggcggctacagccggaagtacgccagcaaagccaagaatctggcagacgatatggtgagaaacaccgctagagatctgctgtactacgccgtgacccaggatgccatgctgatcttcgccaacctgagccggggcttcggccggcagggcaagcggaccttcatggccgagagacagtacacacggatggaggactggctgaccgccaagctggcctacgagggcctgagcaagacctacctgtccaagacactggcccagtacacctccaagacatgcagcaactgtgggtttaccatcaccagcgccgactacgacagggtgctggagaagctgaagaagacagcaacaggctggatgaccacaattaacggcaaggagctgaaggtggagggccagattacctactacaacagatacaagagacagaacgtagtcaaggacctgtccgtcgagctggatagactgagcgaagaatctgtgaacaacgacatctcctcctggacaaagggcagaagcggagaagctctgagcctcctgaagaaaagattctcccatagacccgtgcaggagaagttcgtgtgcctgaactgcggcttcgagacacacgcagccgagcaagccgccctgaacatcgccagatcctggctgttcctgcggagccaggagtacaagaaataccagacaaacaagacaaccggcaacaccgataagagagccttcgtcgagacctggcagtccttttaccggaagaagcttaaggaggtgtggaaacctgccgtgcggtctggcggatctggcggaggctccaccagccccaagaaaaagagaaaagtctaagctgccttctgcggggcttgccttctggccatgcccttcttctctcccttgcacctgtacctcttggtctttgaataaagcctgagtaggaaggctagcaaaaaaaaaaaaaaaaaaaaaaaaaaaaaaaaaaaaaaaaaaaaaaaaaaaaaaaaaaaaaaaaaaaaaaaaaaaaaaaa

SEQ ID NO: 9763 - RNA, 8787 nt, synthetic construct
  source 1..8787: mol_type = other RNA
aggaaataagagagaaaagaagagtaagaagaaatataagagccaccatggcccctaagaagaagcgtaaagtgagccggatgaaccacgaccaggagttcgacccccctaaggtgtaccctcccgtccccgccgagaagagaaagcccatccgggtcctgagcctgttcgatggcatcgccaccggtctgctggtgctgaaggacctgggcatccaggtggataggtacattgcctccgaggtgtgcgaggactccatcaccgtgggaatggtgcgtcatcagggcaagatcatgtacgtgggcgacgtgcggagcgtgacacagaagcatatccaggagtggggccctttcgacctggtgatcggcggcagcccttgcaatgacctgagcatcgtgaacccagcccggaagggcctgtacgagggaaccggcagactgttcttcgagttttacagactgctgcacgacgcccggcctaaggaaggcgacgaccggcccttcttttggctgttcgagaatgtggtggccatgggagtcagcgacaagcgggatattagccggttcctggagagcaaccccgtgatgatcgatgccaaggaagtgagcgccgcccaccgggccagatacttctggggcaatctgcctggcatgaacagacccctggccagcaccgtgaacgacaagctggagctgcaggagtgcctggagcacggccggatcgccaagttcagcaaggtgagaaccatcaccacccgaagcaacagcatcaaacaaggcaaggaccagcactttcctgtgttcatgaacgagaaggaggacatcctgtggtgtaccgagatggagagagtgttcgggttcccagtccactacacagatgtcagcaacatgtctagactggccagacagagactgctgggaagaagctggtccgtccctgtgatcagacacctgttcgcccctctgaaggagtacttcgcctgcgtgagcagcggcaacagcaacgccaacagccggggccccagcttctctagcggcctggtgccactgtccctgagagggagccacatgggccccatggagatctacaaaaccgtgagcgcctggaagcggcagcctgtgcgcgtgctgagcctgtttcggaatatcgataaagtcctgaaaagcctgggattcctggagagcggctctggctccggcggtggcaccctgaagtacgtggaggatgtgacaaacgtggtcagacgggatgtggagaagtggggccccttcgatctggtgtacggcagcacccaacccctgggcagctcttgtgaccggtgccctggctggtacatgtttcagttccaccggatcctgcagtacgccctgccgagacaggagtcccagcggccattcttttggattttcatggacaacttgctgctgaccgaggatgaccaggaaactaccactcggttcctgcagaccgaagccgtgaccctgcaggacgtgagaggccgggactaccagaacgccatgcgggtgtggtccaacatccctggactgaaaagcaagcacgcacctctgacccctaaagaagaggagtacctgcaggcccaggtgcggagcagaagcaagctggacgcccctaaggtggatctgctggtgaagaattgcctcctgcccctgagagagtacttcaagtatttcagccagaatagtctgcccctgggaggcagcggcggcggcagccagggcctgctgaccttcaaggacatcagcgtggacttcacccaggaggagtggggccagctggcccccgcccacaggaacctgtacagggaggtgatgctggagaactacggcaacctggtgagcgtggccggctaccagctgagcaagcccagcgtgatcagccagctggagaagggccaggagccctggatgaccgagaaggagggccccggcgacagcagcagcgacctgaagaacggcggcccaagcagcggcgcccctcctcccagcggcggcaggcggcccaagcagcggcgcccctcctcccagcggcggcagcccagccggctccccaacctctaccgaggagggcacctctgagtccgccacccccgagagcggccctggcacctccaccgagcccagcgagggcagcgcacccggcagccctgccggcagccccacctccacagaggagggaaccagcaccgagcccagcgaaggcagcgccccaggcaccagcaccgagcctagtgagcaggagattaaacggatcaacaagatcagaagaagacttgtgaaagacagcaacaccaagaaggccggcaagacaggccccatgaaaaccctgctggttagagtgatgacacccgatctgagagagcggctggaaaacctgagaaagaagcctgaaaatatcccccagcccatcagcaatacatctagagccaacctgaataagctgctgaccgattacaccgaaatgaagaaggcgatcctgcatgtgtactgggaagagttccagaaggaccctgtgggcctgatgagccgggtggcccagcctgccagcaagaagatcgatcagaacaagctgaaacctgagatggacgagaagggcaacctgaccaccgccggctttgcctgctctcagtgtggccagcccctgttcgtgtacaagctggagcaggtgtctgagaagggcaaggcttacaccaactacttcggacggtgcaatgtggccgagcacgaaaagctgatcctgctggcccagctgaagcccgagaaggatagcgacgaagccgtgacatatagcctgggaaagtttgggcagagggccctggatttctacagcattcatgtgaccaaggagtccacccaccccgtgaagcccctggcccagatcgccggaaacagatacgcctccggacctgtgggaaaggccctgagcgacgcatgtatgggcacaatcgcctccttcctgtctaagtaccaggacatcatcatcgaacaccagaaggtggtgaagggcaaccagaagagactggagagcctgcgggagctggccggcaaggaaaacctggaataccctagcgtgaccctgccacctcagcctcacaccaaggagggcgttgatgcctacaacgaagtgatcgcccgggtgcgaatgtgggtgaacctgaacctgtggcagaagctgaagctaagcagagatgatgccaagcctctgctgagactgaagggattcccttcctttcctctggtcgagagacaggccaacgaagtggactggtgggacatggtgtgtaacgtgaagaagctgatcaacgagaaaaaggaggatggcaaggtgttttggcagaatctggctggctacaagagacaggaagccctgagaccatacctgagcagcgaggaagatcggaagaagggaaagaaattcgctcggtaccagctgggcgacctgctgctgcacctggaaaagaagcacggcgaggactggggaaaggtgtacgacgaggcctgggagcggattgacaagaaagtggaaggcctgagcaagcacatcaagctggaagaggaacggagaagcgaggacgcccagagcaaggccgccctgaccgactggctgcgggctaaggccagcttcgtgatcgagggcctgaaggaggccgacaaggacgagttctgcagatgcgagctgaagctgcagaagtggtacggggacctgcggggaaagcccttcgccatcgaagccgagaacagcatcctggacatcagcggcttcagcaagcagtacaactgtgccttcatctggcagaaggacggcgtgaagaagctgaacctgtacctgatcatcaactacttcaagggcggcaagctgcggttcaagaagatcaaacctgaagccttcgaagccaacagattctacaccgtgatcaacaaaaagagcggcgagatcgtgcccatggaggtgaacttcaacttcgacgaccccaacctgatcatcctgcctctggcctttggcaagagacagggcagagaattcatctggaacgacctgctgtccctggaaaccggcagcctgaagctggccaacggaagagtgatcgagaagacactgtacaacagaagaacccggcaggatgagcctgccctgttcgtggccctgaccttcgagcggcgggaggtcctggactcctccaatatcaaaccaatgaacctgatcggcgtggcaagaggcgaaaacatccccgccgtgatcgccctgaccgaccccgagggctgcccactgagccggtttaaggatagcctgggaaacccaacccacatcctgagaatcggcgagagctataaggagaagcagcggaccatccaggccaagaaggaggtggagcagcggagagccggcggctacagccggaagtacgccagcaaagccaagaatctggcagacgatatggtgagaaacaccgctagagatctgctgtactacgccgtgacccaggatgccatgctgatcttcgccaacctgagccggggcttcggccggcagggcaagcggaccttcatggccgagagacagtacacacggatggaggactggctgaccgccaagctggcctacgagggcctgagcaagacctacctgtccaagacactggcccagtacacctccaagacatgcagcaactgtgggtttaccatcaccagcgccgactacgacagggtgctggagaagctgaagaagacagcaacaggctggatgaccacaattaacggcaaggagctgaaggtggagggccagattacctactacaacagatacaagagacagaacgtagtcaaggacctgtccgtcgagctggatagactgagcgaagaatctgtgaacaacgacatctcctcctggacaaagggcagaagcggagaagctctgagcctcctgaagaaaagattctcccatagacccgtgcaggagaagttcgtgtgcctgaactgcggcttcgagacacacgcagccgagcaagccgccctgaacatcgccagatcctggctgttcctgcggagccaggagtacaagaaataccagacaaacaagacaaccggcaacaccgataagagagccttcgtcgagacctggcagtccttttaccggaagaagcttaaggaggtgtggaaacctgccgtgcggtctggcggatctggcggaggctccaccagccccaagaaaaagagaaaagtctaagctgccttctgcggggcttgccttctggccatgcccttcttctctcccttgcacctgtacctcttggtctttgaataaagcctgagtaggaaggctagcaaaaaaaaaaaaaaaaaaaaaaaaaaaaaaaaaaaaaaaaaaaaaaaaaaaaaaaaaaaaaaaaaaaaaaaaaaaaaaaagcccagccggctccccaacctctaccgaggagggcacctctgagtccgccacccccgagagcggccctggcacctccaccgagcccagcgagggcagcgcacccggcagccctgccggcagccccacctccacagaggagggaaccagcaccgagcccagcgaaggcagcgccccaggcaccagcaccgagcctagtgagcaggagattaaacggatcaacaagatcagaagaagacttgtgaaagacagcaacaccaagaaggccggcaagacaggccccatgaaaaccctgctggttagagtgatgacacccgatctgagagagcggctggaaaacctgagaaagaagcctgaaaatatcccccagcccatcagcaatacatctagagccaacctgaataagctgctgaccgattacaccgaaatgaagaaggcgatcctgcatgtgtactgggaagagttccagaaggaccctgtgggcctgatgagccgggtggcccagcctgccagcaagaagatcgatcagaacaagctgaaacctgagatggacgagaagggcaacctgaccaccgccggctttgcctgctctcagtgtggccagcccctgttcgtgtacaagctggagcaggtgtctgagaagggcaaggcttacaccaactacttcggacggtgcaatgtggccgagcacgaaaagctgatcctgctggcccagctgaagcccgagaaggatagcgacgaagccgtgacatatagcctgggaaagtttgggcagagggccctggatttctacagcattcatgtgaccaaggagtccacccaccccgtgaagcccctggcccagatcgccggaaacagatacgcctccggacctgtgggaaaggccctgagcgacgcatgtatgggcacaatcgcctccttcctgtctaagtaccaggacatcatcatcgaacaccagaaggtggtgaagggcaaccagaagagactggagagcctgcgggagctggccggcaaggaaaacctggaataccctagcgtgaccctgccacctcagcctcacaccaaggagggcgttgatgcctacaacgaagtgatcgcccgggtgcgaatgtgggtgaacctgaacctgtggcagaagctgaagctaagcagagatgatgccaagcctctgctgagactgaagggattcccttcctttcctctggtcgagagacaggccaacgaagtggactggtgggacatggtgtgtaacgtgaagaagctgatcaacgagaaaaaggaggatggcaaggtgttttggcagaatctggctggctacaagagacaggaagccctgagaccatacctgagcagcgaggaagatcggaagaagggaaagaaattcgctcggtaccagctgggcgacctgctgctgcacctggaaaagaagcacggcgaggactggggaaaggtgtacgacgaggcctgggagcggattgacaagaaagtggaaggcctgagcaagcacatcaagctggaagaggaacggagaagcgaggacgcccagagcaaggccgccctgaccgactggctgcgggctaaggccagcttcgtgatcgagggcctgaaggaggccgacaaggacgagttctgcagatgcgagctgaagctgcagaagtggtacggggacctgcggggaaagcccttcgccatcgaagccgagaacagcatcctggacatcagcggcttcagcaagcagtacaactgtgccttcatctggcagaaggacggcgtgaagaagctgaacctgtacctgatcatcaactacttcaagggcggcaagctgcggttcaagaagatcaaacctgaagccttcgaagccaacagattctacaccgtgatcaacaaaaagagcggcgagatcgtgcccatggaggtgaacttcaacttcgacgaccccaacctgatcatcctgcctctggcctttggcaagagacagggcagagaattcatctggaacgacctgctgtccctggaaaccggcagcctgaagctggccaacggaagagtgatcgagaagacactgtacaacagaagaacccggcaggatgagcctgccctgttcgtggccctgaccttcgagcggcgggaggtcctggactcctccaatatcaaaccaatgaacctgatcggcgtggcaagaggcgaaaacatccccgccgtgatcgccctgaccgaccccgagggctgcccactgagccggtttaaggatagcctgggaaacccaacccacatcctgagaatcggcgagagctataaggagaagcagcggaccatccaggccaagaaggaggtggagcagcggagagccggcggctacagccggaagtacgccagcaaagccaagaatctggcagacgatatggtgagaaacaccgctagagatctgctgtactacgccgtgacccaggatgccatgctgatcttcgccaacctgagccggggcttcggccggcagggcaagcggaccttcatggccgagagacagtacacacggatggaggactggctgaccgccaagctggcctacgagggcctgagcaagacctacctgtccaagacactggcccagtacacctccaagacatgcagcaactgtgggtttaccatcaccagcgccgactacgacagggtgctggagaagctgaagaagacagcaacaggctggatgaccacaattaacggcaaggagctgaaggtggagggccagattacctactacaacagatacaagagacagaacgtagtcaaggacctgtccgtcgagctggatagactgagcgaagaatctgtgaacaacgacatctcctcctggacaaagggcagaagcggagaagctctgagcctcctgaagaaaagattctcccatagacccgtgcaggagaagttcgtgtgcctgaactgcggcttcgagacacacgcagccgagcaagccgccctgaacatcgccagatcctggctgttcctgcggagccaggagtacaagaaataccagacaaacaagacaaccggcaacaccgataagagagccttcgtcgagacctggcagtccttttaccggaagaagcttaaggaggtgtggaaacctgccgtgcggtctggcggatctggcggaggctccaccagccccaagaaaaagagaaaagtctaagctgccttctgcggggcttgccttctggccatgcccttcttctctcccttgcacctgtacctcttggtctttgaataaagcctgagtaggaaggctagcaaaaaaaaaaaaaaaaaaaaaaaaaaaaaaaaaaaaaaaaaaaaaaaaaaaaaaaaaaaaaaaaaaaaaaaaaaaaaaaa

SEQ ID NO: 9764 - RNA, 8787 nt, synthetic construct
  source 1..8787: mol_type = other RNA
aggaaataagagagaaaagaagagtaagaagaaatataagagccaccatggcccctaagaagaagcgtaaagtgagccggatgaaccacgaccaggagttcgacccccctaaggtgtaccctcccgtccccgccgagaagagaaagcccatccgggtcctgagcctgttcgatggcatcgccaccggtctgctggtgctgaaggacctgggcatccaggtggataggtacattgcctccgaggtgtgcgaggactccatcaccgtgggaatggtgcgtcatcagggcaagatcatgtacgtgggcgacgtgcggagcgtgacacagaagcatatccaggagtggggccctttcgacctggtgatcggcggcagcccttgcaatgacctgagcatcgtgaacccagcccggaagggcctgtacgagggaaccggcagactgttcttcgagttttacagactgctgcacgacgcccggcctaaggaaggcgacgaccggcccttcttttggctgttcgagaatgtggtggccatgggagtcagcgacaagcgggatattagccggttcctggagagcaaccccgtgatgatcgatgccaaggaagtgagcgccgcccaccgggccagatacttctggggcaatctgcctggcatgaacagacccctggccagcaccgtgaacgacaagctggagctgcaggagtgcctggagcacggccggatcgccaagttcagcaaggtgagaaccatcaccacccgaagcaacagcatcaaacaaggcaaggaccagcactttcctgtgttcatgaacgagaaggaggacatcctgtggtgtaccgagatggagagagtgttcgggttcccagtccactacacagatgtcagcaacatgtctagactggccagacagagactgctgggaagaagctggtccgtccctgtgatcagacacctgttcgcccctctgaaggagtacttcgcctgcgtgagcagcggcaacagcaacgccaacagccggggccccagcttctctagcggcctggtgccactgtccctgagagggagccacatgggccccatggagatctacaaaaccgtgagcgcctggaagcggcagcctgtgcgcgtgctgagcctgtttcggaatatcgataaagtcctgaaaagcctgggattcctggagagcggctctggctccggcggtggcaccctgaagtacgtggaggatgtgacaaacgtggtcagacgggatgtggagaagtggggccccttcgatctggtgtacggcagcacccaacccctgggcagctcttgtgaccggtgccctggctggtacatgtttcagttccaccggatcctgcagtacgccctgccgagacaggagtcccagcggccattcttttggattttcatggacaacttgctgctgaccgaggatgaccaggaaactaccactcggttcctgcagaccgaagccgtgaccctgcaggacgtgagaggccgggactaccagaacgccatgcgggtgtggtccaacatccctggactgaaaagcaagcacgcacctctgacccctaaagaagaggagtacctgcaggcccaggtgcggagcagaagcaagctggacgcccctaaggtggatctgctggtgaagaattgcctcctgcccctgagagagtacttcaagtatttcagccagaatagtctgcccctgggaggcagcggcggcggcatgctgttccaggagctggtgaccttcaaggacgtggccgtggacttcacccaggaggagtggaagtgcctggcccccagccagaaggagctgtacagggaggtgatgctggagaactacaggaacctggtgagcctgggcagggccgtgagcaagcccgagctgatccaccagctggagaggggcgagaccccctggaggcccaagggcgacggctggaggaacagcctgaggcccggcgagggcggcccaagcagcggcgcccctcctcccagcggcggcaggcggcccaagcagcggcgcccctcctcccagcggcggcagcccagccggctccccaacctctaccgaggagggcacctctgagtccgccacccccgagagcggccctggcacctccaccgagcccagcgagggcagcgcacccggcagccctgccggcagccccacctccacagaggagggaaccagcaccgagcccagcgaaggcagcgccccaggcaccagcaccgagcctagtgagcaggagattaaacggatcaacaagatcagaagaagacttgtgaaagacagcaacaccaagaaggccggcaagacaggccccatgaaaaccctgctggttagagtgatgacacccgatctgagagagcggctggaaaacctgagaaagaagcctgaaaatatcccccagcccatcagcaatacatctagagccaacctgaataagctgctgaccgattacaccgaaatgaagaaggcgatcctgcatgtgtactgggaagagttccagaaggaccctgtgggcctgatgagccgggtggcccagcctgccagcaagaagatcgatcagaacaagctgaaacctgagatggacgagaagggcaacctgaccaccgccggctttgcctgctctcagtgtggccagcccctgttcgtgtacaagctggagcaggtgtctgagaagggcaaggcttacaccaactacttcggacggtgcaatgtggccgagcacgaaaagctgatcctgctggcccagctgaagcccgagaaggatagcgacgaagccgtgacatatagcctgggaaagtttgggcagagggccctggatttctacagcattcatgtgaccaaggagtccacccaccccgtgaagcccctggcccagatcgccggaaacagatacgcctccggacctgtgggaaaggccctgagcgacgcatgtatgggcacaatcgcctccttcctgtctaagtaccaggacatcatcatcgaacaccagaaggtggtgaagggcaaccagaagagactggagagcctgcgggagctggccggcaaggaaaacctggaataccctagcgtgaccctgccacctcagcctcacaccaaggagggcgttgatgcctacaacgaagtgatcgcccgggtgcgaatgtgggtgaacctgaacctgtggcagaagctgaagctaagcagagatgatgccaagcctctgctgagactgaagggattcccttcctttcctctggtcgagagacaggccaacgaagtggactggtgggacatggtgtgtaacgtgaagaagctgatcaacgagaaaaaggaggatggcaaggtgttttggcagaatctggctggctacaagagacaggaagccctgagaccatacctgagcagcgaggaagatcggaagaagggaaagaaattcgctcggtaccagctgggcgacctgctgctgcacctggaaaagaagcacggcgaggactggggaaaggtgtacgacgaggcctgggagcggattgacaagaaagtggaaggcctgagcaagcacatcaagctggaagaggaacggagaagcgaggacgcccagagcaaggccgccctgaccgactggctgcgggctaaggccagcttcgtgatcgagggcctgaaggaggccgacaaggacgagttctgcagatgcgagctgaagctgcagaagtggtacggggacctgcggggaaagcccttcgccatcgaagccgagaacagcatcctggacatcagcggcttcagcaagcagtacaactgtgccttcatctggcagaaggacggcgtgaagaagctgaacctgtacctgatcatcaactacttcaagggcggcaagctgcggttcaagaagatcaaacctgaagccttcgaagccaacagattctacaccgtgatcaacaaaaagagcggcgagatcgtgcccatggaggtgaacttcaacttcgacgaccccaacctgatcatcctgcctctggcctttggcaagagacagggcagagaattcatctggaacgacctgctgtccctggaaaccggcagcctgaagctggccaacggaagagtgatcgagaagacactgtacaacagaagaacccggcaggatgagcctgccctgttcgtggccctgaccttcgagcggcgggaggtcctggactcctccaatatcaaaccaatgaacctgatcggcgtggcaagaggcgaaaacatccccgccgtgatcgccctgaccgaccccgagggctgcccactgagccggtttaaggatagcctgggaaacccaacccacatcctgagaatcggcgagagctataaggagaagcagcggaccatccaggccaagaaggaggtggagcagcggagagccggcggctacagccggaagtacgccagcaaagccaagaatctggcagacgatatggtgagaaacaccgctagagatctgctgtactacgccgtgacccaggatgccatgctgatcttcgccaacctgagccggggcttcggccggcagggcaagcggaccttcatggccgagagacagtacacacggatggaggactggctgaccgccaagctggcctacgagggcctgagcaagacctacctgtccaagacactggcccagtacacctccaagacatgcagcaactgtgggtttaccatcaccagcgccgactacgacagggtgctggagaagctgaagaagacagcaacaggctggatgaccacaattaacggcaaggagctgaaggtggagggccagattacctactacaacagatacaagagacagaacgtagtcaaggacctgtccgtcgagctggatagactgagcgaagaatctgtgaacaacgacatctcctcctggacaaagggcagaagcggagaagctctgagcctcctgaagaaaagattctcccatagacccgtgcaggagaagttcgtgtgcctgaactgcggcttcgagacacacgcagccgagcaagccgccctgaacatcgccagatcctggctgttcctgcggagccaggagtacaagaaataccagacaaacaagacaaccggcaacaccgataagagagccttcgtcgagacctggcagtccttttaccggaagaagcttaaggaggtgtggaaacctgccgtgcggtctggcggatctggcggaggctccaccagccccaagaaaaagagaaaagtctaagctgccttctgcggggcttgccttctggccatgcccttcttctctcccttgcacctgtacctcttggtctttgaataaagcctgagtaggaaggctagcaaaaaaaaaaaaaaaaaaaaaaaaaaaaaaaaaaaaaaaaaaaaaaaaaaaaaaaaaaaaaaaaaaaaaaaaaaaaaaaagcccagccggctccccaacctctaccgaggagggcacctctgagtccgccacccccgagagcggccctggcacctccaccgagcccagcgagggcagcgcacccggcagccctgccggcagccccacctccacagaggagggaaccagcaccgagcccagcgaaggcagcgccccaggcaccagcaccgagcctagtgagcaggagattaaacggatcaacaagatcagaagaagacttgtgaaagacagcaacaccaagaaggccggcaagacaggccccatgaaaaccctgctggttagagtgatgacacccgatctgagagagcggctggaaaacctgagaaagaagcctgaaaatatcccccagcccatcagcaatacatctagagccaacctgaataagctgctgaccgattacaccgaaatgaagaaggcgatcctgcatgtgtactgggaagagttccagaaggaccctgtgggcctgatgagccgggtggcccagcctgccagcaagaagatcgatcagaacaagctgaaacctgagatggacgagaagggcaacctgaccaccgccggctttgcctgctctcagtgtggccagcccctgttcgtgtacaagctggagcaggtgtctgagaagggcaaggcttacaccaactacttcggacggtgcaatgtggccgagcacgaaaagctgatcctgctggcccagctgaagcccgagaaggatagcgacgaagccgtgacatatagcctgggaaagtttgggcagagggccctggatttctacagcattcatgtgaccaaggagtccacccaccccgtgaagcccctggcccagatcgccggaaacagatacgcctccggacctgtgggaaaggccctgagcgacgcatgtatgggcacaatcgcctccttcctgtctaagtaccaggacatcatcatcgaacaccagaaggtggtgaagggcaaccagaagagactggagagcctgcgggagctggccggcaaggaaaacctggaataccctagcgtgaccctgccacctcagcctcacaccaaggagggcgttgatgcctacaacgaagtgatcgcccgggtgcgaatgtgggtgaacctgaacctgtggcagaagctgaagctaagcagagatgatgccaagcctctgctgagactgaagggattcccttcctttcctctggtcgagagacaggccaacgaagtggactggtgggacatggtgtgtaacgtgaagaagctgatcaacgagaaaaaggaggatggcaaggtgttttggcagaatctggctggctacaagagacaggaagccctgagaccatacctgagcagcgaggaagatcggaagaagggaaagaaattcgctcggtaccagctgggcgacctgctgctgcacctggaaaagaagcacggcgaggactggggaaaggtgtacgacgaggcctgggagcggattgacaagaaagtggaaggcctgagcaagcacatcaagctggaagaggaacggagaagcgaggacgcccagagcaaggccgccctgaccgactggctgcgggctaaggccagcttcgtgatcgagggcctgaaggaggccgacaaggacgagttctgcagatgcgagctgaagctgcagaagtggtacggggacctgcggggaaagcccttcgccatcgaagccgagaacagcatcctggacatcagcggcttcagcaagcagtacaactgtgccttcatctggcagaaggacggcgtgaagaagctgaacctgtacctgatcatcaactacttcaagggcggcaagctgcggttcaagaagatcaaacctgaagccttcgaagccaacagattctacaccgtgatcaacaaaaagagcggcgagatcgtgcccatggaggtgaacttcaacttcgacgaccccaacctgatcatcctgcctctggcctttggcaagagacagggcagagaattcatctggaacgacctgctgtccctggaaaccggcagcctgaagctggccaacggaagagtgatcgagaagacactgtacaacagaagaacccggcaggatgagcctgccctgttcgtggccctgaccttcgagcggcgggaggtcctggactcctccaatatcaaaccaatgaacctgatcggcgtggcaagaggcgaaaacatccccgccgtgatcgccctgaccgaccccgagggctgcccactgagccggtttaaggatagcctgggaaacccaacccacatcctgagaatcggcgagagctataaggagaagcagcggaccatccaggccaagaaggaggtggagcagcggagagccggcggctacagccggaagtacgccagcaaagccaagaatctggcagacgatatggtgagaaacaccgctagagatctgctgtactacgccgtgacccaggatgccatgctgatcttcgccaacctgagccggggcttcggccggcagggcaagcggaccttcatggccgagagacagtacacacggatggaggactggctgaccgccaagctggcctacgagggcctgagcaagacctacctgtccaagacactggcccagtacacctccaagacatgcagcaactgtgggtttaccatcaccagcgccgactacgacagggtgctggagaagctgaagaagacagcaacaggctggatgaccacaattaacggcaaggagctgaaggtggagggccagattacctactacaacagatacaagagacagaacgtagtcaaggacctgtccgtcgagctggatagactgagcgaagaatctgtgaacaacgacatctcctcctggacaaagggcagaagcggagaagctctgagcctcctgaagaaaagattctcccatagacccgtgcaggagaagttcgtgtgcctgaactgcggcttcgagacacacgcagccgagcaagccgccctgaacatcgccagatcctggctgttcctgcggagccaggagtacaagaaataccagacaaacaagacaaccggcaacaccgataagagagccttcgtcgagacctggcagtccttttaccggaagaagcttaaggaggtgtggaaacctgccgtgcggtctggcggatctggcggaggctccaccagccccaagaaaaagagaaaagtctaagctgccttctgcggggcttgccttctggccatgcccttcttctctcccttgcacctgtacctcttggtctttgaataaagcctgagtaggaaggctagcaaaaaaaaaaaaaaaaaaaaaaaaaaaaaaaaaaaaaaaaaaaaaaaaaaaaaaaaaaaaaaaaaaaaaaaaaaaaaaaa

SEQ ID NO: 9765 - RNA, 8787 nt, synthetic construct
  source 1..8787: mol_type = other RNA
aggaaataagagagaaaagaagagtaagaagaaatataagagccaccatggcccctaagaagaagcgtaaagtgagccggatgaaccacgaccaggagttcgacccccctaaggtgtaccctcccgtccccgccgagaagagaaagcccatccgggtcctgagcctgttcgatggcatcgccaccggtctgctggtgctgaaggacctgggcatccaggtggataggtacattgcctccgaggtgtgcgaggactccatcaccgtgggaatggtgcgtcatcagggcaagatcatgtacgtgggcgacgtgcggagcgtgacacagaagcatatccaggagtggggccctttcgacctggtgatcggcggcagcccttgcaatgacctgagcatcgtgaacccagcccggaagggcctgtacgagggaaccggcagactgttcttcgagttttacagactgctgcacgacgcccggcctaaggaaggcgacgaccggcccttcttttggctgttcgagaatgtggtggccatgggagtcagcgacaagcgggatattagccggttcctggagagcaaccccgtgatgatcgatgccaaggaagtgagcgccgcccaccgggccagatacttctggggcaatctgcctggcatgaacagacccctggccagcaccgtgaacgacaagctggagctgcaggagtgcctggagcacggccggatcgccaagttcagcaaggtgagaaccatcaccacccgaagcaacagcatcaaacaaggcaaggaccagcactttcctgtgttcatgaacgagaaggaggacatcctgtggtgtaccgagatggagagagtgttcgggttcccagtccactacacagatgtcagcaacatgtctagactggccagacagagactgctgggaagaagctggtccgtccctgtgatcagacacctgttcgcccctctgaaggagtacttcgcctgcgtgagcagcggcaacagcaacgccaacagccggggccccagcttctctagcggcctggtgccactgtccctgagagggagccacatgggccccatggagatctacaaaaccgtgagcgcctggaagcggcagcctgtgcgcgtgctgagcctgtttcggaatatcgataaagtcctgaaaagcctgggattcctggagagcggctctggctccggcggtggcaccctgaagtacgtggaggatgtgacaaacgtggtcagacgggatgtggagaagtggggccccttcgatctggtgtacggcagcacccaacccctgggcagctcttgtgaccggtgccctggctggtacatgtttcagttccaccggatcctgcagtacgccctgccgagacaggagtcccagcggccattcttttggattttcatggacaacttgctgctgaccgaggatgaccaggaaactaccactcggttcctgcagaccgaagccgtgaccctgcaggacgtgagaggccgggactaccagaacgccatgcgggtgtggtccaacatccctggactgaaaagcaagcacgcacctctgacccctaaagaagaggagtacctgcaggcccaggtgcggagcagaagcaagctggacgcccctaaggtggatctgctggtgaagaattgcctcctgcccctgagagagtacttcaagtatttcagccagaatagtctgcccctgggaggcagcggcggcggcatggagcccagggacgccttcgaggacgtggccgtgtacttcaccagggaggagtgggccctgctggacgacggcgacaagggcctgtacagggaccagatgctgaggaactaccaggccctggtgagcctgggctacaggggccccacccccgacctgatctgctgcatccagaggggcaaggtggagctgtgggtgagggacggcgaggaccacggcgagatcagcggcagcgaggacctgggcggcccaagcagcggcgcccctcctcccagcggcggcaggcggcccaagcagcggcgcccctcctcccagcggcggcagcccagccggctccccaacctctaccgaggagggcacctctgagtccgccacccccgagagcggccctggcacctccaccgagcccagcgagggcagcgcacccggcagccctgccggcagccccacctccacagaggagggaaccagcaccgagcccagcgaaggcagcgccccaggcaccagcaccgagcctagtgagcaggagattaaacggatcaacaagatcagaagaagacttgtgaaagacagcaacaccaagaaggccggcaagacaggccccatgaaaaccctgctggttagagtgatgacacccgatctgagagagcggctggaaaacctgagaaagaagcctgaaaatatcccccagcccatcagcaatacatctagagccaacctgaataagctgctgaccgattacaccgaaatgaagaaggcgatcctgcatgtgtactgggaagagttccagaaggaccctgtgggcctgatgagccgggtggcccagcctgccagcaagaagatcgatcagaacaagctgaaacctgagatggacgagaagggcaacctgaccaccgccggctttgcctgctctcagtgtggccagcccctgttcgtgtacaagctggagcaggtgtctgagaagggcaaggcttacaccaactacttcggacggtgcaatgtggccgagcacgaaaagctgatcctgctggcccagctgaagcccgagaaggatagcgacgaagccgtgacatatagcctgggaaagtttgggcagagggccctggatttctacagcattcatgtgaccaaggagtccacccaccccgtgaagcccctggcccagatcgccggaaacagatacgcctccggacctgtgggaaaggccctgagcgacgcatgtatgggcacaatcgcctccttcctgtctaagtaccaggacatcatcatcgaacaccagaaggtggtgaagggcaaccagaagagactggagagcctgcgggagctggccggcaaggaaaacctggaataccctagcgtgaccctgccacctcagcctcacaccaaggagggcgttgatgcctacaacgaagtgatcgcccgggtgcgaatgtgggtgaacctgaacctgtggcagaagctgaagctaagcagagatgatgccaagcctctgctgagactgaagggattcccttcctttcctctggtcgagagacaggccaacgaagtggactggtgggacatggtgtgtaacgtgaagaagctgatcaacgagaaaaaggaggatggcaaggtgttttggcagaatctggctggctacaagagacaggaagccctgagaccatacctgagcagcgaggaagatcggaagaagggaaagaaattcgctcggtaccagctgggcgacctgctgctgcacctggaaaagaagcacggcgaggactggggaaaggtgtacgacgaggcctgggagcggattgacaagaaagtggaaggcctgagcaagcacatcaagctggaagaggaacggagaagcgaggacgcccagagcaaggccgccctgaccgactggctgcgggctaaggccagcttcgtgatcgagggcctgaaggaggccgacaaggacgagttctgcagatgcgagctgaagctgcagaagtggtacggggacctgcggggaaagcccttcgccatcgaagccgagaacagcatcctggacatcagcggcttcagcaagcagtacaactgtgccttcatctggcagaaggacggcgtgaagaagctgaacctgtacctgatcatcaactacttcaagggcggcaagctgcggttcaagaagatcaaacctgaagccttcgaagccaacagattctacaccgtgatcaacaaaaagagcggcgagatcgtgcccatggaggtgaacttcaacttcgacgaccccaacctgatcatcctgcctctggcctttggcaagagacagggcagagaattcatctggaacgacctgctgtccctggaaaccggcagcctgaagctggccaacggaagagtgatcgagaagacactgtacaacagaagaacccggcaggatgagcctgccctgttcgtggccctgaccttcgagcggcgggaggtcctggactcctccaatatcaaaccaatgaacctgatcggcgtggcaagaggcgaaaacatccccgccgtgatcgccctgaccgaccccgagggctgcccactgagccggtttaaggatagcctgggaaacccaacccacatcctgagaatcggcgagagctataaggagaagcagcggaccatccaggccaagaaggaggtggagcagcggagagccggcggctacagccggaagtacgccagcaaagccaagaatctggcagacgatatggtgagaaacaccgctagagatctgctgtactacgccgtgacccaggatgccatgctgatcttcgccaacctgagccggggcttcggccggcagggcaagcggaccttcatggccgagagacagtacacacggatggaggactggctgaccgccaagctggcctacgagggcctgagcaagacctacctgtccaagacactggcccagtacacctccaagacatgcagcaactgtgggtttaccatcaccagcgccgactacgacagggtgctggagaagctgaagaagacagcaacaggctggatgaccacaattaacggcaaggagctgaaggtggagggccagattacctactacaacagatacaagagacagaacgtagtcaaggacctgtccgtcgagctggatagactgagcgaagaatctgtgaacaacgacatctcctcctggacaaagggcagaagcggagaagctctgagcctcctgaagaaaagattctcccatagacccgtgcaggagaagttcgtgtgcctgaactgcggcttcgagacacacgcagccgagcaagccgccctgaacatcgccagatcctggctgttcctgcggagccaggagtacaagaaataccagacaaacaagacaaccggcaacaccgataagagagccttcgtcgagacctggcagtccttttaccggaagaagcttaaggaggtgtggaaacctgccgtgcggtctggcggatctggcggaggctccaccagccccaagaaaaagagaaaagtctaagctgccttctgcggggcttgccttctggccatgcccttcttctctcccttgcacctgtacctcttggtctttgaataaagcctgagtaggaaggctagcaaaaaaaaaaaaaaaaaaaaaaaaaaaaaaaaaaaaaaaaaaaaaaaaaaaaaaaaaaaaaaaaaaaaaaaaaaaaaaaagcccagccggctccccaacctctaccgaggagggcacctctgagtccgccacccccgagagcggccctggcacctccaccgagcccagcgagggcagcgcacccggcagccctgccggcagccccacctccacagaggagggaaccagcaccgagcccagcgaaggcagcgccccaggcaccagcaccgagcctagtgagcaggagattaaacggatcaacaagatcagaagaagacttgtgaaagacagcaacaccaagaaggccggcaagacaggccccatgaaaaccctgctggttagagtgatgacacccgatctgagagagcggctggaaaacctgagaaagaagcctgaaaatatcccccagcccatcagcaatacatctagagccaacctgaataagctgctgaccgattacaccgaaatgaagaaggcgatcctgcatgtgtactgggaagagttccagaaggaccctgtgggcctgatgagccgggtggcccagcctgccagcaagaagatcgatcagaacaagctgaaacctgagatggacgagaagggcaacctgaccaccgccggctttgcctgctctcagtgtggccagcccctgttcgtgtacaagctggagcaggtgtctgagaagggcaaggcttacaccaactacttcggacggtgcaatgtggccgagcacgaaaagctgatcctgctggcccagctgaagcccgagaaggatagcgacgaagccgtgacatatagcctgggaaagtttgggcagagggccctggatttctacagcattcatgtgaccaaggagtccacccaccccgtgaagcccctggcccagatcgccggaaacagatacgcctccggacctgtgggaaaggccctgagcgacgcatgtatgggcacaatcgcctccttcctgtctaagtaccaggacatcatcatcgaacaccagaaggtggtgaagggcaaccagaagagactggagagcctgcgggagctggccggcaaggaaaacctggaataccctagcgtgaccctgccacctcagcctcacaccaaggagggcgttgatgcctacaacgaagtgatcgcccgggtgcgaatgtgggtgaacctgaacctgtggcagaagctgaagctaagcagagatgatgccaagcctctgctgagactgaagggattcccttcctttcctctggtcgagagacaggccaacgaagtggactggtgggacatggtgtgtaacgtgaagaagctgatcaacgagaaaaaggaggatggcaaggtgttttggcagaatctggctggctacaagagacaggaagccctgagaccatacctgagcagcgaggaagatcggaagaagggaaagaaattcgctcggtaccagctgggcgacctgctgctgcacctggaaaagaagcacggcgaggactggggaaaggtgtacgacgaggcctgggagcggattgacaagaaagtggaaggcctgagcaagcacatcaagctggaagaggaacggagaagcgaggacgcccagagcaaggccgccctgaccgactggctgcgggctaaggccagcttcgtgatcgagggcctgaaggaggccgacaaggacgagttctgcagatgcgagctgaagctgcagaagtggtacggggacctgcggggaaagcccttcgccatcgaagccgagaacagcatcctggacatcagcggcttcagcaagcagtacaactgtgccttcatctggcagaaggacggcgtgaagaagctgaacctgtacctgatcatcaactacttcaagggcggcaagctgcggttcaagaagatcaaacctgaagccttcgaagccaacagattctacaccgtgatcaacaaaaagagcggcgagatcgtgcccatggaggtgaacttcaacttcgacgaccccaacctgatcatcctgcctctggcctttggcaagagacagggcagagaattcatctggaacgacctgctgtccctggaaaccggcagcctgaagctggccaacggaagagtgatcgagaagacactgtacaacagaagaacccggcaggatgagcctgccctgttcgtggccctgaccttcgagcggcgggaggtcctggactcctccaatatcaaaccaatgaacctgatcggcgtggcaagaggcgaaaacatccccgccgtgatcgccctgaccgaccccgagggctgcccactgagccggtttaaggatagcctgggaaacccaacccacatcctgagaatcggcgagagctataaggagaagcagcggaccatccaggccaagaaggaggtggagcagcggagagccggcggctacagccggaagtacgccagcaaagccaagaatctggcagacgatatggtgagaaacaccgctagagatctgctgtactacgccgtgacccaggatgccatgctgatcttcgccaacctgagccggggcttcggccggcagggcaagcggaccttcatggccgagagacagtacacacggatggaggactggctgaccgccaagctggcctacgagggcctgagcaagacctacctgtccaagacactggcccagtacacctccaagacatgcagcaactgtgggtttaccatcaccagcgccgactacgacagggtgctggagaagctgaagaagacagcaacaggctggatgaccacaattaacggcaaggagctgaaggtggagggccagattacctactacaacagatacaagagacagaacgtagtcaaggacctgtccgtcgagctggatagactgagcgaagaatctgtgaacaacgacatctcctcctggacaaagggcagaagcggagaagctctgagcctcctgaagaaaagattctcccatagacccgtgcaggagaagttcgtgtgcctgaactgcggcttcgagacacacgcagccgagcaagccgccctgaacatcgccagatcctggctgttcctgcggagccaggagtacaagaaataccagacaaacaagacaaccggcaacaccgataagagagccttcgtcgagacctggcagtccttttaccggaagaagcttaaggaggtgtggaaacctgccgtgcggtctggcggatctggcggaggctccaccagccccaagaaaaagagaaaagtctaagctgccttctgcggggcttgccttctggccatgcccttcttctctcccttgcacctgtacctcttggtctttgaataaagcctgagtaggaaggctagcaaaaaaaaaaaaaaaaaaaaaaaaaaaaaaaaaaaaaaaaaaaaaaaaaaaaaaaaaaaaaaaaaaaaaaaaaaaaaaaa

SEQ ID NO: 9766 - RNA, 8787 nt, synthetic construct
  source 1..8787: mol_type = other RNA
aggaaataagagagaaaagaagagtaagaagaaatataagagccaccatggcccctaagaagaagcgtaaagtgagccggatgaaccacgaccaggagttcgacccccctaaggtgtaccctcccgtccccgccgagaagagaaagcccatccgggtcctgagcctgttcgatggcatcgccaccggtctgctggtgctgaaggacctgggcatccaggtggataggtacattgcctccgaggtgtgcgaggactccatcaccgtgggaatggtgcgtcatcagggcaagatcatgtacgtgggcgacgtgcggagcgtgacacagaagcatatccaggagtggggccctttcgacctggtgatcggcggcagcccttgcaatgacctgagcatcgtgaacccagcccggaagggcctgtacgagggaaccggcagactgttcttcgagttttacagactgctgcacgacgcccggcctaaggaaggcgacgaccggcccttcttttggctgttcgagaatgtggtggccatgggagtcagcgacaagcgggatattagccggttcctggagagcaaccccgtgatgatcgatgccaaggaagtgagcgccgcccaccgggccagatacttctggggcaatctgcctggcatgaacagacccctggccagcaccgtgaacgacaagctggagctgcaggagtgcctggagcacggccggatcgccaagttcagcaaggtgagaaccatcaccacccgaagcaacagcatcaaacaaggcaaggaccagcactttcctgtgttcatgaacgagaaggaggacatcctgtggtgtaccgagatggagagagtgttcgggttcccagtccactacacagatgtcagcaacatgtctagactggccagacagagactgctgggaagaagctggtccgtccctgtgatcagacacctgttcgcccctctgaaggagtacttcgcctgcgtgagcagcggcaacagcaacgccaacagccggggccccagcttctctagcggcctggtgccactgtccctgagagggagccacatgggccccatggagatctacaaaaccgtgagcgcctggaagcggcagcctgtgcgcgtgctgagcctgtttcggaatatcgataaagtcctgaaaagcctgggattcctggagagcggctctggctccggcggtggcaccctgaagtacgtggaggatgtgacaaacgtggtcagacgggatgtggagaagtggggccccttcgatctggtgtacggcagcacccaacccctgggcagctcttgtgaccggtgccctggctggtacatgtttcagttccaccggatcctgcagtacgccctgccgagacaggagtcccagcggccattcttttggattttcatggacaacttgctgctgaccgaggatgaccaggaaactaccactcggttcctgcagaccgaagccgtgaccctgcaggacgtgagaggccgggactaccagaacgccatgcgggtgtggtccaacatccctggactgaaaagcaagcacgcacctctgacccctaaagaagaggagtacctgcaggcccaggtgcggagcagaagcaagctggacgcccctaaggtggatctgctggtgaagaattgcctcctgcccctgagagagtacttcaagtatttcagccagaatagtctgcccctgggaggcagcggcggcggcgcccaggcccccctgagcttcgaggacgtggccgtgagcttcagcagggaggagtggaggctgctggtgcccgcccagaaggacctgtacagggacgtgatgctggagaactacaggaacctggtgagcgtgggctaccaggccagcgagcccgacagcctgttcaggctggagcacggcggccccctgtgggtggtggagggcgccgcccccaggcccccctgccccggcgagtacgtggccggcggcccaagcagcggcgcccctcctcccagcggcggcaggcggcccaagcagcggcgcccctcctcccagcggcggcagcccagccggctccccaacctctaccgaggagggcacctctgagtccgccacccccgagagcggccctggcacctccaccgagcccagcgagggcagcgcacccggcagccctgccggcagccccacctccacagaggagggaaccagcaccgagcccagcgaaggcagcgccccaggcaccagcaccgagcctagtgagcaggagattaaacggatcaacaagatcagaagaagacttgtgaaagacagcaacaccaagaaggccggcaagacaggccccatgaaaaccctgctggttagagtgatgacacccgatctgagagagcggctggaaaacctgagaaagaagcctgaaaatatcccccagcccatcagcaatacatctagagccaacctgaataagctgctgaccgattacaccgaaatgaagaaggcgatcctgcatgtgtactgggaagagttccagaaggaccctgtgggcctgatgagccgggtggcccagcctgccagcaagaagatcgatcagaacaagctgaaacctgagatggacgagaagggcaacctgaccaccgccggctttgcctgctctcagtgtggccagcccctgttcgtgtacaagctggagcaggtgtctgagaagggcaaggcttacaccaactacttcggacggtgcaatgtggccgagcacgaaaagctgatcctgctggcccagctgaagcccgagaaggatagcgacgaagccgtgacatatagcctgggaaagtttgggcagagggccctggatttctacagcattcatgtgaccaaggagtccacccaccccgtgaagcccctggcccagatcgccggaaacagatacgcctccggacctgtgggaaaggccctgagcgacgcatgtatgggcacaatcgcctccttcctgtctaagtaccaggacatcatcatcgaacaccagaaggtggtgaagggcaaccagaagagactggagagcctgcgggagctggccggcaaggaaaacctggaataccctagcgtgaccctgccacctcagcctcacaccaaggagggcgttgatgcctacaacgaagtgatcgcccgggtgcgaatgtgggtgaacctgaacctgtggcagaagctgaagctaagcagagatgatgccaagcctctgctgagactgaagggattcccttcctttcctctggtcgagagacaggccaacgaagtggactggtgggacatggtgtgtaacgtgaagaagctgatcaacgagaaaaaggaggatggcaaggtgttttggcagaatctggctggctacaagagacaggaagccctgagaccatacctgagcagcgaggaagatcggaagaagggaaagaaattcgctcggtaccagctgggcgacctgctgctgcacctggaaaagaagcacggcgaggactggggaaaggtgtacgacgaggcctgggagcggattgacaagaaagtggaaggcctgagcaagcacatcaagctggaagaggaacggagaagcgaggacgcccagagcaaggccgccctgaccgactggctgcgggctaaggccagcttcgtgatcgagggcctgaaggaggccgacaaggacgagttctgcagatgcgagctgaagctgcagaagtggtacggggacctgcggggaaagcccttcgccatcgaagccgagaacagcatcctggacatcagcggcttcagcaagcagtacaactgtgccttcatctggcagaaggacggcgtgaagaagctgaacctgtacctgatcatcaactacttcaagggcggcaagctgcggttcaagaagatcaaacctgaagccttcgaagccaacagattctacaccgtgatcaacaaaaagagcggcgagatcgtgcccatggaggtgaacttcaacttcgacgaccccaacctgatcatcctgcctctggcctttggcaagagacagggcagagaattcatctggaacgacctgctgtccctggaaaccggcagcctgaagctggccaacggaagagtgatcgagaagacactgtacaacagaagaacccggcaggatgagcctgccctgttcgtggccctgaccttcgagcggcgggaggtcctggactcctccaatatcaaaccaatgaacctgatcggcgtggcaagaggcgaaaacatccccgccgtgatcgccctgaccgaccccgagggctgcccactgagccggtttaaggatagcctgggaaacccaacccacatcctgagaatcggcgagagctataaggagaagcagcggaccatccaggccaagaaggaggtggagcagcggagagccggcggctacagccggaagtacgccagcaaagccaagaatctggcagacgatatggtgagaaacaccgctagagatctgctgtactacgccgtgacccaggatgccatgctgatcttcgccaacctgagccggggcttcggccggcagggcaagcggaccttcatggccgagagacagtacacacggatggaggactggctgaccgccaagctggcctacgagggcctgagcaagacctacctgtccaagacactggcccagtacacctccaagacatgcagcaactgtgggtttaccatcaccagcgccgactacgacagggtgctggagaagctgaagaagacagcaacaggctggatgaccacaattaacggcaaggagctgaaggtggagggccagattacctactacaacagatacaagagacagaacgtagtcaaggacctgtccgtcgagctggatagactgagcgaagaatctgtgaacaacgacatctcctcctggacaaagggcagaagcggagaagctctgagcctcctgaagaaaagattctcccatagacccgtgcaggagaagttcgtgtgcctgaactgcggcttcgagacacacgcagccgagcaagccgccctgaacatcgccagatcctggctgttcctgcggagccaggagtacaagaaataccagacaaacaagacaaccggcaacaccgataagagagccttcgtcgagacctggcagtccttttaccggaagaagcttaaggaggtgtggaaacctgccgtgcggtctggcggatctggcggaggctccaccagccccaagaaaaagagaaaagtctaagctgccttctgcggggcttgccttctggccatgcccttcttctctcccttgcacctgtacctcttggtctttgaataaagcctgagtaggaaggctagcaaaaaaaaaaaaaaaaaaaaaaaaaaaaaaaaaaaaaaaaaaaaaaaaaaaaaaaaaaaaaaaaaaaaaaaaaaaaaaaagcccagccggctccccaacctctaccgaggagggcacctctgagtccgccacccccgagagcggccctggcacctccaccgagcccagcgagggcagcgcacccggcagccctgccggcagccccacctccacagaggagggaaccagcaccgagcccagcgaaggcagcgccccaggcaccagcaccgagcctagtgagcaggagattaaacggatcaacaagatcagaagaagacttgtgaaagacagcaacaccaagaaggccggcaagacaggccccatgaaaaccctgctggttagagtgatgacacccgatctgagagagcggctggaaaacctgagaaagaagcctgaaaatatcccccagcccatcagcaatacatctagagccaacctgaataagctgctgaccgattacaccgaaatgaagaaggcgatcctgcatgtgtactgggaagagttccagaaggaccctgtgggcctgatgagccgggtggcccagcctgccagcaagaagatcgatcagaacaagctgaaacctgagatggacgagaagggcaacctgaccaccgccggctttgcctgctctcagtgtggccagcccctgttcgtgtacaagctggagcaggtgtctgagaagggcaaggcttacaccaactacttcggacggtgcaatgtggccgagcacgaaaagctgatcctgctggcccagctgaagcccgagaaggatagcgacgaagccgtgacatatagcctgggaaagtttgggcagagggccctggatttctacagcattcatgtgaccaaggagtccacccaccccgtgaagcccctggcccagatcgccggaaacagatacgcctccggacctgtgggaaaggccctgagcgacgcatgtatgggcacaatcgcctccttcctgtctaagtaccaggacatcatcatcgaacaccagaaggtggtgaagggcaaccagaagagactggagagcctgcgggagctggccggcaaggaaaacctggaataccctagcgtgaccctgccacctcagcctcacaccaaggagggcgttgatgcctacaacgaagtgatcgcccgggtgcgaatgtgggtgaacctgaacctgtggcagaagctgaagctaagcagagatgatgccaagcctctgctgagactgaagggattcccttcctttcctctggtcgagagacaggccaacgaagtggactggtgggacatggtgtgtaacgtgaagaagctgatcaacgagaaaaaggaggatggcaaggtgttttggcagaatctggctggctacaagagacaggaagccctgagaccatacctgagcagcgaggaagatcggaagaagggaaagaaattcgctcggtaccagctgggcgacctgctgctgcacctggaaaagaagcacggcgaggactggggaaaggtgtacgacgaggcctgggagcggattgacaagaaagtggaaggcctgagcaagcacatcaagctggaagaggaacggagaagcgaggacgcccagagcaaggccgccctgaccgactggctgcgggctaaggccagcttcgtgatcgagggcctgaaggaggccgacaaggacgagttctgcagatgcgagctgaagctgcagaagtggtacggggacctgcggggaaagcccttcgccatcgaagccgagaacagcatcctggacatcagcggcttcagcaagcagtacaactgtgccttcatctggcagaaggacggcgtgaagaagctgaacctgtacctgatcatcaactacttcaagggcggcaagctgcggttcaagaagatcaaacctgaagccttcgaagccaacagattctacaccgtgatcaacaaaaagagcggcgagatcgtgcccatggaggtgaacttcaacttcgacgaccccaacctgatcatcctgcctctggcctttggcaagagacagggcagagaattcatctggaacgacctgctgtccctggaaaccggcagcctgaagctggccaacggaagagtgatcgagaagacactgtacaacagaagaacccggcaggatgagcctgccctgttcgtggccctgaccttcgagcggcgggaggtcctggactcctccaatatcaaaccaatgaacctgatcggcgtggcaagaggcgaaaacatccccgccgtgatcgccctgaccgaccccgagggctgcccactgagccggtttaaggatagcctgggaaacccaacccacatcctgagaatcggcgagagctataaggagaagcagcggaccatccaggccaagaaggaggtggagcagcggagagccggcggctacagccggaagtacgccagcaaagccaagaatctggcagacgatatggtgagaaacaccgctagagatctgctgtactacgccgtgacccaggatgccatgctgatcttcgccaacctgagccggggcttcggccggcagggcaagcggaccttcatggccgagagacagtacacacggatggaggactggctgaccgccaagctggcctacgagggcctgagcaagacctacctgtccaagacactggcccagtacacctccaagacatgcagcaactgtgggtttaccatcaccagcgccgactacgacagggtgctggagaagctgaagaagacagcaacaggctggatgaccacaattaacggcaaggagctgaaggtggagggccagattacctactacaacagatacaagagacagaacgtagtcaaggacctgtccgtcgagctggatagactgagcgaagaatctgtgaacaacgacatctcctcctggacaaagggcagaagcggagaagctctgagcctcctgaagaaaagattctcccatagacccgtgcaggagaagttcgtgtgcctgaactgcggcttcgagacacacgcagccgagcaagccgccctgaacatcgccagatcctggctgttcctgcggagccaggagtacaagaaataccagacaaacaagacaaccggcaacaccgataagagagccttcgtcgagacctggcagtccttttaccggaagaagcttaaggaggtgtggaaacctgccgtgcggtctggcggatctggcggaggctccaccagccccaagaaaaagagaaaagtctaagctgccttctgcggggcttgccttctggccatgcccttcttctctcccttgcacctgtacctcttggtctttgaataaagcctgagtaggaaggctagcaaaaaaaaaaaaaaaaaaaaaaaaaaaaaaaaaaaaaaaaaaaaaaaaaaaaaaaaaaaaaaaaaaaaaaaaaaaaaaaa

SEQ ID NO: 9767 - RNA, 8787 nt, synthetic construct
  source 1..8787: mol_type = other RNA
aggaaataagagagaaaagaagagtaagaagaaatataagagccaccatggcccctaagaagaagcgtaaagtgagccggatgaaccacgaccaggagttcgacccccctaaggtgtaccctcccgtccccgccgagaagagaaagcccatccgggtcctgagcctgttcgatggcatcgccaccggtctgctggtgctgaaggacctgggcatccaggtggataggtacattgcctccgaggtgtgcgaggactccatcaccgtgggaatggtgcgtcatcagggcaagatcatgtacgtgggcgacgtgcggagcgtgacacagaagcatatccaggagtggggccctttcgacctggtgatcggcggcagcccttgcaatgacctgagcatcgtgaacccagcccggaagggcctgtacgagggaaccggcagactgttcttcgagttttacagactgctgcacgacgcccggcctaaggaaggcgacgaccggcccttcttttggctgttcgagaatgtggtggccatgggagtcagcgacaagcgggatattagccggttcctggagagcaaccccgtgatgatcgatgccaaggaagtgagcgccgcccaccgggccagatacttctggggcaatctgcctggcatgaacagacccctggccagcaccgtgaacgacaagctggagctgcaggagtgcctggagcacggccggatcgccaagttcagcaaggtgagaaccatcaccacccgaagcaacagcatcaaacaaggcaaggaccagcactttcctgtgttcatgaacgagaaggaggacatcctgtggtgtaccgagatggagagagtgttcgggttcccagtccactacacagatgtcagcaacatgtctagactggccagacagagactgctgggaagaagctggtccgtccctgtgatcagacacctgttcgcccctctgaaggagtacttcgcctgcgtgagcagcggcaacagcaacgccaacagccggggccccagcttctctagcggcctggtgccactgtccctgagagggagccacatgggccccatggagatctacaaaaccgtgagcgcctggaagcggcagcctgtgcgcgtgctgagcctgtttcggaatatcgataaagtcctgaaaagcctgggattcctggagagcggctctggctccggcggtggcaccctgaagtacgtggaggatgtgacaaacgtggtcagacgggatgtggagaagtggggccccttcgatctggtgtacggcagcacccaacccctgggcagctcttgtgaccggtgccctggctggtacatgtttcagttccaccggatcctgcagtacgccctgccgagacaggagtcccagcggccattcttttggattttcatggacaacttgctgctgaccgaggatgaccaggaaactaccactcggttcctgcagaccgaagccgtgaccctgcaggacgtgagaggccgggactaccagaacgccatgcgggtgtggtccaacatccctggactgaaaagcaagcacgcacctctgacccctaaagaagaggagtacctgcaggcccaggtgcggagcagaagcaagctggacgcccctaaggtggatctgctggtgaagaattgcctcctgcccctgagagagtacttcaagtatttcagccagaatagtctgcccctgggaggcagcggcggcggccaccagggcagcgtgaccttcggcgacgtggccgtggacttcagccaggacgagtggggccacctggaccccgcccagaaggagctgtacagggaggtgatgctggagaactacggcaacctggtgtgcctgggcctggccgtgagcaggccccacgtgatcgagcagctggagaggggcgaggccccctggctgcccaggggcgccgtgcccaggagctgcgacctggactggatgaccaggggcggcccaagcagcggcgcccctcctcccagcggcggcaggcggcccaagcagcggcgcccctcctcccagcggcggcagcccagccggctccccaacctctaccgaggagggcacctctgagtccgccacccccgagagcggccctggcacctccaccgagcccagcgagggcagcgcacccggcagccctgccggcagccccacctccacagaggagggaaccagcaccgagcccagcgaaggcagcgccccaggcaccagcaccgagcctagtgagcaggagattaaacggatcaacaagatcagaagaagacttgtgaaagacagcaacaccaagaaggccggcaagacaggccccatgaaaaccctgctggttagagtgatgacacccgatctgagagagcggctggaaaacctgagaaagaagcctgaaaatatcccccagcccatcagcaatacatctagagccaacctgaataagctgctgaccgattacaccgaaatgaagaaggcgatcctgcatgtgtactgggaagagttccagaaggaccctgtgggcctgatgagccgggtggcccagcctgccagcaagaagatcgatcagaacaagctgaaacctgagatggacgagaagggcaacctgaccaccgccggctttgcctgctctcagtgtggccagcccctgttcgtgtacaagctggagcaggtgtctgagaagggcaaggcttacaccaactacttcggacggtgcaatgtggccgagcacgaaaagctgatcctgctggcccagctgaagcccgagaaggatagcgacgaagccgtgacatatagcctgggaaagtttgggcagagggccctggatttctacagcattcatgtgaccaaggagtccacccaccccgtgaagcccctggcccagatcgccggaaacagatacgcctccggacctgtgggaaaggccctgagcgacgcatgtatgggcacaatcgcctccttcctgtctaagtaccaggacatcatcatcgaacaccagaaggtggtgaagggcaaccagaagagactggagagcctgcgggagctggccggcaaggaaaacctggaataccctagcgtgaccctgccacctcagcctcacaccaaggagggcgttgatgcctacaacgaagtgatcgcccgggtgcgaatgtgggtgaacctgaacctgtggcagaagctgaagctaagcagagatgatgccaagcctctgctgagactgaagggattcccttcctttcctctggtcgagagacaggccaacgaagtggactggtgggacatggtgtgtaacgtgaagaagctgatcaacgagaaaaaggaggatggcaaggtgttttggcagaatctggctggctacaagagacaggaagccctgagaccatacctgagcagcgaggaagatcggaagaagggaaagaaattcgctcggtaccagctgggcgacctgctgctgcacctggaaaagaagcacggcgaggactggggaaaggtgtacgacgaggcctgggagcggattgacaagaaagtggaaggcctgagcaagcacatcaagctggaagaggaacggagaagcgaggacgcccagagcaaggccgccctgaccgactggctgcgggctaaggccagcttcgtgatcgagggcctgaaggaggccgacaaggacgagttctgcagatgcgagctgaagctgcagaagtggtacggggacctgcggggaaagcccttcgccatcgaagccgagaacagcatcctggacatcagcggcttcagcaagcagtacaactgtgccttcatctggcagaaggacggcgtgaagaagctgaacctgtacctgatcatcaactacttcaagggcggcaagctgcggttcaagaagatcaaacctgaagccttcgaagccaacagattctacaccgtgatcaacaaaaagagcggcgagatcgtgcccatggaggtgaacttcaacttcgacgaccccaacctgatcatcctgcctctggcctttggcaagagacagggcagagaattcatctggaacgacctgctgtccctggaaaccggcagcctgaagctggccaacggaagagtgatcgagaagacactgtacaacagaagaacccggcaggatgagcctgccctgttcgtggccctgaccttcgagcggcgggaggtcctggactcctccaatatcaaaccaatgaacctgatcggcgtggcaagaggcgaaaacatccccgccgtgatcgccctgaccgaccccgagggctgcccactgagccggtttaaggatagcctgggaaacccaacccacatcctgagaatcggcgagagctataaggagaagcagcggaccatccaggccaagaaggaggtggagcagcggagagccggcggctacagccggaagtacgccagcaaagccaagaatctggcagacgatatggtgagaaacaccgctagagatctgctgtactacgccgtgacccaggatgccatgctgatcttcgccaacctgagccggggcttcggccggcagggcaagcggaccttcatggccgagagacagtacacacggatggaggactggctgaccgccaagctggcctacgagggcctgagcaagacctacctgtccaagacactggcccagtacacctccaagacatgcagcaactgtgggtttaccatcaccagcgccgactacgacagggtgctggagaagctgaagaagacagcaacaggctggatgaccacaattaacggcaaggagctgaaggtggagggccagattacctactacaacagatacaagagacagaacgtagtcaaggacctgtccgtcgagctggatagactgagcgaagaatctgtgaacaacgacatctcctcctggacaaagggcagaagcggagaagctctgagcctcctgaagaaaagattctcccatagacccgtgcaggagaagttcgtgtgcctgaactgcggcttcgagacacacgcagccgagcaagccgccctgaacatcgccagatcctggctgttcctgcggagccaggagtacaagaaataccagacaaacaagacaaccggcaacaccgataagagagccttcgtcgagacctggcagtccttttaccggaagaagcttaaggaggtgtggaaacctgccgtgcggtctggcggatctggcggaggctccaccagccccaagaaaaagagaaaagtctaagctgccttctgcggggcttgccttctggccatgcccttcttctctcccttgcacctgtacctcttggtctttgaataaagcctgagtaggaaggctagcaaaaaaaaaaaaaaaaaaaaaaaaaaaaaaaaaaaaaaaaaaaaaaaaaaaaaaaaaaaaaaaaaaaaaaaaaaaaaaaagcccagccggctccccaacctctaccgaggagggcacctctgagtccgccacccccgagagcggccctggcacctccaccgagcccagcgagggcagcgcacccggcagccctgccggcagccccacctccacagaggagggaaccagcaccgagcccagcgaaggcagcgccccaggcaccagcaccgagcctagtgagcaggagattaaacggatcaacaagatcagaagaagacttgtgaaagacagcaacaccaagaaggccggcaagacaggccccatgaaaaccctgctggttagagtgatgacacccgatctgagagagcggctggaaaacctgagaaagaagcctgaaaatatcccccagcccatcagcaatacatctagagccaacctgaataagctgctgaccgattacaccgaaatgaagaaggcgatcctgcatgtgtactgggaagagttccagaaggaccctgtgggcctgatgagccgggtggcccagcctgccagcaagaagatcgatcagaacaagctgaaacctgagatggacgagaagggcaacctgaccaccgccggctttgcctgctctcagtgtggccagcccctgttcgtgtacaagctggagcaggtgtctgagaagggcaaggcttacaccaactacttcggacggtgcaatgtggccgagcacgaaaagctgatcctgctggcccagctgaagcccgagaaggatagcgacgaagccgtgacatatagcctgggaaagtttgggcagagggccctggatttctacagcattcatgtgaccaaggagtccacccaccccgtgaagcccctggcccagatcgccggaaacagatacgcctccggacctgtgggaaaggccctgagcgacgcatgtatgggcacaatcgcctccttcctgtctaagtaccaggacatcatcatcgaacaccagaaggtggtgaagggcaaccagaagagactggagagcctgcgggagctggccggcaaggaaaacctggaataccctagcgtgaccctgccacctcagcctcacaccaaggagggcgttgatgcctacaacgaagtgatcgcccgggtgcgaatgtgggtgaacctgaacctgtggcagaagctgaagctaagcagagatgatgccaagcctctgctgagactgaagggattcccttcctttcctctggtcgagagacaggccaacgaagtggactggtgggacatggtgtgtaacgtgaagaagctgatcaacgagaaaaaggaggatggcaaggtgttttggcagaatctggctggctacaagagacaggaagccctgagaccatacctgagcagcgaggaagatcggaagaagggaaagaaattcgctcggtaccagctgggcgacctgctgctgcacctggaaaagaagcacggcgaggactggggaaaggtgtacgacgaggcctgggagcggattgacaagaaagtggaaggcctgagcaagcacatcaagctggaagaggaacggagaagcgaggacgcccagagcaaggccgccctgaccgactggctgcgggctaaggccagcttcgtgatcgagggcctgaaggaggccgacaaggacgagttctgcagatgcgagctgaagctgcagaagtggtacggggacctgcggggaaagcccttcgccatcgaagccgagaacagcatcctggacatcagcggcttcagcaagcagtacaactgtgccttcatctggcagaaggacggcgtgaagaagctgaacctgtacctgatcatcaactacttcaagggcggcaagctgcggttcaagaagatcaaacctgaagccttcgaagccaacagattctacaccgtgatcaacaaaaagagcggcgagatcgtgcccatggaggtgaacttcaacttcgacgaccccaacctgatcatcctgcctctggcctttggcaagagacagggcagagaattcatctggaacgacctgctgtccctggaaaccggcagcctgaagctggccaacggaagagtgatcgagaagacactgtacaacagaagaacccggcaggatgagcctgccctgttcgtggccctgaccttcgagcggcgggaggtcctggactcctccaatatcaaaccaatgaacctgatcggcgtggcaagaggcgaaaacatccccgccgtgatcgccctgaccgaccccgagggctgcccactgagccggtttaaggatagcctgggaaacccaacccacatcctgagaatcggcgagagctataaggagaagcagcggaccatccaggccaagaaggaggtggagcagcggagagccggcggctacagccggaagtacgccagcaaagccaagaatctggcagacgatatggtgagaaacaccgctagagatctgctgtactacgccgtgacccaggatgccatgctgatcttcgccaacctgagccggggcttcggccggcagggcaagcggaccttcatggccgagagacagtacacacggatggaggactggctgaccgccaagctggcctacgagggcctgagcaagacctacctgtccaagacactggcccagtacacctccaagacatgcagcaactgtgggtttaccatcaccagcgccgactacgacagggtgctggagaagctgaagaagacagcaacaggctggatgaccacaattaacggcaaggagctgaaggtggagggccagattacctactacaacagatacaagagacagaacgtagtcaaggacctgtccgtcgagctggatagactgagcgaagaatctgtgaacaacgacatctcctcctggacaaagggcagaagcggagaagctctgagcctcctgaagaaaagattctcccatagacccgtgcaggagaagttcgtgtgcctgaactgcggcttcgagacacacgcagccgagcaagccgccctgaacatcgccagatcctggctgttcctgcggagccaggagtacaagaaataccagacaaacaagacaaccggcaacaccgataagagagccttcgtcgagacctggcagtccttttaccggaagaagcttaaggaggtgtggaaacctgccgtgcggtctggcggatctggcggaggctccaccagccccaagaaaaagagaaaagtctaagctgccttctgcggggcttgccttctggccatgcccttcttctctcccttgcacctgtacctcttggtctttgaataaagcctgagtaggaaggctagcaaaaaaaaaaaaaaaaaaaaaaaaaaaaaaaaaaaaaaaaaaaaaaaaaaaaaaaaaaaaaaaaaaaaaaaaaaaaaaaa

SEQ ID NO: 9768 - RNA, 8787 nt, synthetic construct
  source 1..8787: mol_type = other RNA
aggaaataagagagaaaagaagagtaagaagaaatataagagccaccatggcccctaagaagaagcgtaaagtgagccggatgaaccacgaccaggagttcgacccccctaaggtgtaccctcccgtccccgccgagaagagaaagcccatccgggtcctgagcctgttcgatggcatcgccaccggtctgctggtgctgaaggacctgggcatccaggtggataggtacattgcctccgaggtgtgcgaggactccatcaccgtgggaatggtgcgtcatcagggcaagatcatgtacgtgggcgacgtgcggagcgtgacacagaagcatatccaggagtggggccctttcgacctggtgatcggcggcagcccttgcaatgacctgagcatcgtgaacccagcccggaagggcctgtacgagggaaccggcagactgttcttcgagttttacagactgctgcacgacgcccggcctaaggaaggcgacgaccggcccttcttttggctgttcgagaatgtggtggccatgggagtcagcgacaagcgggatattagccggttcctggagagcaaccccgtgatgatcgatgccaaggaagtgagcgccgcccaccgggccagatacttctggggcaatctgcctggcatgaacagacccctggccagcaccgtgaacgacaagctggagctgcaggagtgcctggagcacggccggatcgccaagttcagcaaggtgagaaccatcaccacccgaagcaacagcatcaaacaaggcaaggaccagcactttcctgtgttcatgaacgagaaggaggacatcctgtggtgtaccgagatggagagagtgttcgggttcccagtccactacacagatgtcagcaacatgtctagactggccagacagagactgctgggaagaagctggtccgtccctgtgatcagacacctgttcgcccctctgaaggagtacttcgcctgcgtgagcagcggcaacagcaacgccaacagccggggccccagcttctctagcggcctggtgccactgtccctgagagggagccacatgggccccatggagatctacaaaaccgtgagcgcctggaagcggcagcctgtgcgcgtgctgagcctgtttcggaatatcgataaagtcctgaaaagcctgggattcctggagagcggctctggctccggcggtggcaccctgaagtacgtggaggatgtgacaaacgtggtcagacgggatgtggagaagtggggccccttcgatctggtgtacggcagcacccaacccctgggcagctcttgtgaccggtgccctggctggtacatgtttcagttccaccggatcctgcagtacgccctgccgagacaggagtcccagcggccattcttttggattttcatggacaacttgctgctgaccgaggatgaccaggaaactaccactcggttcctgcagaccgaagccgtgaccctgcaggacgtgagaggccgggactaccagaacgccatgcgggtgtggtccaacatccctggactgaaaagcaagcacgcacctctgacccctaaagaagaggagtacctgcaggcccaggtgcggagcagaagcaagctggacgcccctaaggtggatctgctggtgaagaattgcctcctgcccctgagagagtacttcaagtatttcagccagaatagtctgcccctgggaggcagcggcggcggcagccaggtgaccgtgaccttcgaggacgtggccgtgctgttcagcagggacgagtggaggaagctgggccccagccagaagaacctgtaccaggacgtgatgctggagaactacagcaacctggtgagcctgggcctgcccttcagcaagcccaaggtgatcagcctgctgcagcagggcgaggacccctggaaggtggagaaggagagccccggcagcttcagccccggctggaagagcagcggcggcccaagcagcggcgcccctcctcccagcggcggcaggcggcccaagcagcggcgcccctcctcccagcggcggcagcccagccggctccccaacctctaccgaggagggcacctctgagtccgccacccccgagagcggccctggcacctccaccgagcccagcgagggcagcgcacccggcagccctgccggcagccccacctccacagaggagggaaccagcaccgagcccagcgaaggcagcgccccaggcaccagcaccgagcctagtgagcaggagattaaacggatcaacaagatcagaagaagacttgtgaaagacagcaacaccaagaaggccggcaagacaggccccatgaaaaccctgctggttagagtgatgacacccgatctgagagagcggctggaaaacctgagaaagaagcctgaaaatatcccccagcccatcagcaatacatctagagccaacctgaataagctgctgaccgattacaccgaaatgaagaaggcgatcctgcatgtgtactgggaagagttccagaaggaccctgtgggcctgatgagccgggtggcccagcctgccagcaagaagatcgatcagaacaagctgaaacctgagatggacgagaagggcaacctgaccaccgccggctttgcctgctctcagtgtggccagcccctgttcgtgtacaagctggagcaggtgtctgagaagggcaaggcttacaccaactacttcggacggtgcaatgtggccgagcacgaaaagctgatcctgctggcccagctgaagcccgagaaggatagcgacgaagccgtgacatatagcctgggaaagtttgggcagagggccctggatttctacagcattcatgtgaccaaggagtccacccaccccgtgaagcccctggcccagatcgccggaaacagatacgcctccggacctgtgggaaaggccctgagcgacgcatgtatgggcacaatcgcctccttcctgtctaagtaccaggacatcatcatcgaacaccagaaggtggtgaagggcaaccagaagagactggagagcctgcgggagctggccggcaaggaaaacctggaataccctagcgtgaccctgccacctcagcctcacaccaaggagggcgttgatgcctacaacgaagtgatcgcccgggtgcgaatgtgggtgaacctgaacctgtggcagaagctgaagctaagcagagatgatgccaagcctctgctgagactgaagggattcccttcctttcctctggtcgagagacaggccaacgaagtggactggtgggacatggtgtgtaacgtgaagaagctgatcaacgagaaaaaggaggatggcaaggtgttttggcagaatctggctggctacaagagacaggaagccctgagaccatacctgagcagcgaggaagatcggaagaagggaaagaaattcgctcggtaccagctgggcgacctgctgctgcacctggaaaagaagcacggcgaggactggggaaaggtgtacgacgaggcctgggagcggattgacaagaaagtggaaggcctgagcaagcacatcaagctggaagaggaacggagaagcgaggacgcccagagcaaggccgccctgaccgactggctgcgggctaaggccagcttcgtgatcgagggcctgaaggaggccgacaaggacgagttctgcagatgcgagctgaagctgcagaagtggtacggggacctgcggggaaagcccttcgccatcgaagccgagaacagcatcctggacatcagcggcttcagcaagcagtacaactgtgccttcatctggcagaaggacggcgtgaagaagctgaacctgtacctgatcatcaactacttcaagggcggcaagctgcggttcaagaagatcaaacctgaagccttcgaagccaacagattctacaccgtgatcaacaaaaagagcggcgagatcgtgcccatggaggtgaacttcaacttcgacgaccccaacctgatcatcctgcctctggcctttggcaagagacagggcagagaattcatctggaacgacctgctgtccctggaaaccggcagcctgaagctggccaacggaagagtgatcgagaagacactgtacaacagaagaacccggcaggatgagcctgccctgttcgtggccctgaccttcgagcggcgggaggtcctggactcctccaatatcaaaccaatgaacctgatcggcgtggcaagaggcgaaaacatccccgccgtgatcgccctgaccgaccccgagggctgcccactgagccggtttaaggatagcctgggaaacccaacccacatcctgagaatcggcgagagctataaggagaagcagcggaccatccaggccaagaaggaggtggagcagcggagagccggcggctacagccggaagtacgccagcaaagccaagaatctggcagacgatatggtgagaaacaccgctagagatctgctgtactacgccgtgacccaggatgccatgctgatcttcgccaacctgagccggggcttcggccggcagggcaagcggaccttcatggccgagagacagtacacacggatggaggactggctgaccgccaagctggcctacgagggcctgagcaagacctacctgtccaagacactggcccagtacacctccaagacatgcagcaactgtgggtttaccatcaccagcgccgactacgacagggtgctggagaagctgaagaagacagcaacaggctggatgaccacaattaacggcaaggagctgaaggtggagggccagattacctactacaacagatacaagagacagaacgtagtcaaggacctgtccgtcgagctggatagactgagcgaagaatctgtgaacaacgacatctcctcctggacaaagggcagaagcggagaagctctgagcctcctgaagaaaagattctcccatagacccgtgcaggagaagttcgtgtgcctgaactgcggcttcgagacacacgcagccgagcaagccgccctgaacatcgccagatcctggctgttcctgcggagccaggagtacaagaaataccagacaaacaagacaaccggcaacaccgataagagagccttcgtcgagacctggcagtccttttaccggaagaagcttaaggaggtgtggaaacctgccgtgcggtctggcggatctggcggaggctccaccagccccaagaaaaagagaaaagtctaagctgccttctgcggggcttgccttctggccatgcccttcttctctcccttgcacctgtacctcttggtctttgaataaagcctgagtaggaaggctagcaaaaaaaaaaaaaaaaaaaaaaaaaaaaaaaaaaaaaaaaaaaaaaaaaaaaaaaaaaaaaaaaaaaaaaaaaaaaaaaagcccagccggctccccaacctctaccgaggagggcacctctgagtccgccacccccgagagcggccctggcacctccaccgagcccagcgagggcagcgcacccggcagccctgccggcagccccacctccacagaggagggaaccagcaccgagcccagcgaaggcagcgccccaggcaccagcaccgagcctagtgagcaggagattaaacggatcaacaagatcagaagaagacttgtgaaagacagcaacaccaagaaggccggcaagacaggccccatgaaaaccctgctggttagagtgatgacacccgatctgagagagcggctggaaaacctgagaaagaagcctgaaaatatcccccagcccatcagcaatacatctagagccaacctgaataagctgctgaccgattacaccgaaatgaagaaggcgatcctgcatgtgtactgggaagagttccagaaggaccctgtgggcctgatgagccgggtggcccagcctgccagcaagaagatcgatcagaacaagctgaaacctgagatggacgagaagggcaacctgaccaccgccggctttgcctgctctcagtgtggccagcccctgttcgtgtacaagctggagcaggtgtctgagaagggcaaggcttacaccaactacttcggacggtgcaatgtggccgagcacgaaaagctgatcctgctggcccagctgaagcccgagaaggatagcgacgaagccgtgacatatagcctgggaaagtttgggcagagggccctggatttctacagcattcatgtgaccaaggagtccacccaccccgtgaagcccctggcccagatcgccggaaacagatacgcctccggacctgtgggaaaggccctgagcgacgcatgtatgggcacaatcgcctccttcctgtctaagtaccaggacatcatcatcgaacaccagaaggtggtgaagggcaaccagaagagactggagagcctgcgggagctggccggcaaggaaaacctggaataccctagcgtgaccctgccacctcagcctcacaccaaggagggcgttgatgcctacaacgaagtgatcgcccgggtgcgaatgtgggtgaacctgaacctgtggcagaagctgaagctaagcagagatgatgccaagcctctgctgagactgaagggattcccttcctttcctctggtcgagagacaggccaacgaagtggactggtgggacatggtgtgtaacgtgaagaagctgatcaacgagaaaaaggaggatggcaaggtgttttggcagaatctggctggctacaagagacaggaagccctgagaccatacctgagcagcgaggaagatcggaagaagggaaagaaattcgctcggtaccagctgggcgacctgctgctgcacctggaaaagaagcacggcgaggactggggaaaggtgtacgacgaggcctgggagcggattgacaagaaagtggaaggcctgagcaagcacatcaagctggaagaggaacggagaagcgaggacgcccagagcaaggccgccctgaccgactggctgcgggctaaggccagcttcgtgatcgagggcctgaaggaggccgacaaggacgagttctgcagatgcgagctgaagctgcagaagtggtacggggacctgcggggaaagcccttcgccatcgaagccgagaacagcatcctggacatcagcggcttcagcaagcagtacaactgtgccttcatctggcagaaggacggcgtgaagaagctgaacctgtacctgatcatcaactacttcaagggcggcaagctgcggttcaagaagatcaaacctgaagccttcgaagccaacagattctacaccgtgatcaacaaaaagagcggcgagatcgtgcccatggaggtgaacttcaacttcgacgaccccaacctgatcatcctgcctctggcctttggcaagagacagggcagagaattcatctggaacgacctgctgtccctggaaaccggcagcctgaagctggccaacggaagagtgatcgagaagacactgtacaacagaagaacccggcaggatgagcctgccctgttcgtggccctgaccttcgagcggcgggaggtcctggactcctccaatatcaaaccaatgaacctgatcggcgtggcaagaggcgaaaacatccccgccgtgatcgccctgaccgaccccgagggctgcccactgagccggtttaaggatagcctgggaaacccaacccacatcctgagaatcggcgagagctataaggagaagcagcggaccatccaggccaagaaggaggtggagcagcggagagccggcggctacagccggaagtacgccagcaaagccaagaatctggcagacgatatggtgagaaacaccgctagagatctgctgtactacgccgtgacccaggatgccatgctgatcttcgccaacctgagccggggcttcggccggcagggcaagcggaccttcatggccgagagacagtacacacggatggaggactggctgaccgccaagctggcctacgagggcctgagcaagacctacctgtccaagacactggcccagtacacctccaagacatgcagcaactgtgggtttaccatcaccagcgccgactacgacagggtgctggagaagctgaagaagacagcaacaggctggatgaccacaattaacggcaaggagctgaaggtggagggccagattacctactacaacagatacaagagacagaacgtagtcaaggacctgtccgtcgagctggatagactgagcgaagaatctgtgaacaacgacatctcctcctggacaaagggcagaagcggagaagctctgagcctcctgaagaaaagattctcccatagacccgtgcaggagaagttcgtgtgcctgaactgcggcttcgagacacacgcagccgagcaagccgccctgaacatcgccagatcctggctgttcctgcggagccaggagtacaagaaataccagacaaacaagacaaccggcaacaccgataagagagccttcgtcgagacctggcagtccttttaccggaagaagcttaaggaggtgtggaaacctgccgtgcggtctggcggatctggcggaggctccaccagccccaagaaaaagagaaaagtctaagctgccttctgcggggcttgccttctggccatgcccttcttctctcccttgcacctgtacctcttggtctttgaataaagcctgagtaggaaggctagcaaaaaaaaaaaaaaaaaaaaaaaaaaaaaaaaaaaaaaaaaaaaaaaaaaaaaaaaaaaaaaaaaaaaaaaaaaaaaaaa

SEQ ID NO: 9769 - RNA, 8787 nt, synthetic construct
  source 1..8787: mol_type = other RNA
aggaaataagagagaaaagaagagtaagaagaaatataagagccaccatggcccctaagaagaagcgtaaagtgagccggatgaaccacgaccaggagttcgacccccctaaggtgtaccctcccgtccccgccgagaagagaaagcccatccgggtcctgagcctgttcgatggcatcgccaccggtctgctggtgctgaaggacctgggcatccaggtggataggtacattgcctccgaggtgtgcgaggactccatcaccgtgggaatggtgcgtcatcagggcaagatcatgtacgtgggcgacgtgcggagcgtgacacagaagcatatccaggagtggggccctttcgacctggtgatcggcggcagcccttgcaatgacctgagcatcgtgaacccagcccggaagggcctgtacgagggaaccggcagactgttcttcgagttttacagactgctgcacgacgcccggcctaaggaaggcgacgaccggcccttcttttggctgttcgagaatgtggtggccatgggagtcagcgacaagcgggatattagccggttcctggagagcaaccccgtgatgatcgatgccaaggaagtgagcgccgcccaccgggccagatacttctggggcaatctgcctggcatgaacagacccctggccagcaccgtgaacgacaagctggagctgcaggagtgcctggagcacggccggatcgccaagttcagcaaggtgagaaccatcaccacccgaagcaacagcatcaaacaaggcaaggaccagcactttcctgtgttcatgaacgagaaggaggacatcctgtggtgtaccgagatggagagagtgttcgggttcccagtccactacacagatgtcagcaacatgtctagactggccagacagagactgctgggaagaagctggtccgtccctgtgatcagacacctgttcgcccctctgaaggagtacttcgcctgcgtgagcagcggcaacagcaacgccaacagccggggccccagcttctctagcggcctggtgccactgtccctgagagggagccacatgggccccatggagatctacaaaaccgtgagcgcctggaagcggcagcctgtgcgcgtgctgagcctgtttcggaatatcgataaagtcctgaaaagcctgggattcctggagagcggctctggctccggcggtggcaccctgaagtacgtggaggatgtgacaaacgtggtcagacgggatgtggagaagtggggccccttcgatctggtgtacggcagcacccaacccctgggcagctcttgtgaccggtgccctggctggtacatgtttcagttccaccggatcctgcagtacgccctgccgagacaggagtcccagcggccattcttttggattttcatggacaacttgctgctgaccgaggatgaccaggaaactaccactcggttcctgcagaccgaagccgtgaccctgcaggacgtgagaggccgggactaccagaacgccatgcgggtgtggtccaacatccctggactgaaaagcaagcacgcacctctgacccctaaagaagaggagtacctgcaggcccaggtgcggagcagaagcaagctggacgcccctaaggtggatctgctggtgaagaattgcctcctgcccctgagagagtacttcaagtatttcagccagaatagtctgcccctgggaggcagcggcggcggctgcaaggagagcgtgaccttcaaggacgtggccgtggagttcacctgggaggagtgggtgcacctgaacagcagccagaagaccctgtacagggacgtgatgctggagaactacaggaacctggtgagcctgggcttcgccgtgagcaagcccgacgtgatctaccagctggagaggaaggaggccagctggatccccggcgccgacatccccaggagcagctgccccgagagcaaggagttcggcggcccaagcagcggcgcccctcctcccagcggcggcaggcggcccaagcagcggcgcccctcctcccagcggcggcagcccagccggctccccaacctctaccgaggagggcacctctgagtccgccacccccgagagcggccctggcacctccaccgagcccagcgagggcagcgcacccggcagccctgccggcagccccacctccacagaggagggaaccagcaccgagcccagcgaaggcagcgccccaggcaccagcaccgagcctagtgagcaggagattaaacggatcaacaagatcagaagaagacttgtgaaagacagcaacaccaagaaggccggcaagacaggccccatgaaaaccctgctggttagagtgatgacacccgatctgagagagcggctggaaaacctgagaaagaagcctgaaaatatcccccagcccatcagcaatacatctagagccaacctgaataagctgctgaccgattacaccgaaatgaagaaggcgatcctgcatgtgtactgggaagagttccagaaggaccctgtgggcctgatgagccgggtggcccagcctgccagcaagaagatcgatcagaacaagctgaaacctgagatggacgagaagggcaacctgaccaccgccggctttgcctgctctcagtgtggccagcccctgttcgtgtacaagctggagcaggtgtctgagaagggcaaggcttacaccaactacttcggacggtgcaatgtggccgagcacgaaaagctgatcctgctggcccagctgaagcccgagaaggatagcgacgaagccgtgacatatagcctgggaaagtttgggcagagggccctggatttctacagcattcatgtgaccaaggagtccacccaccccgtgaagcccctggcccagatcgccggaaacagatacgcctccggacctgtgggaaaggccctgagcgacgcatgtatgggcacaatcgcctccttcctgtctaagtaccaggacatcatcatcgaacaccagaaggtggtgaagggcaaccagaagagactggagagcctgcgggagctggccggcaaggaaaacctggaataccctagcgtgaccctgccacctcagcctcacaccaaggagggcgttgatgcctacaacgaagtgatcgcccgggtgcgaatgtgggtgaacctgaacctgtggcagaagctgaagctaagcagagatgatgccaagcctctgctgagactgaagggattcccttcctttcctctggtcgagagacaggccaacgaagtggactggtgggacatggtgtgtaacgtgaagaagctgatcaacgagaaaaaggaggatggcaaggtgttttggcagaatctggctggctacaagagacaggaagccctgagaccatacctgagcagcgaggaagatcggaagaagggaaagaaattcgctcggtaccagctgggcgacctgctgctgcacctggaaaagaagcacggcgaggactggggaaaggtgtacgacgaggcctgggagcggattgacaagaaagtggaaggcctgagcaagcacatcaagctggaagaggaacggagaagcgaggacgcccagagcaaggccgccctgaccgactggctgcgggctaaggccagcttcgtgatcgagggcctgaaggaggccgacaaggacgagttctgcagatgcgagctgaagctgcagaagtggtacggggacctgcggggaaagcccttcgccatcgaagccgagaacagcatcctggacatcagcggcttcagcaagcagtacaactgtgccttcatctggcagaaggacggcgtgaagaagctgaacctgtacctgatcatcaactacttcaagggcggcaagctgcggttcaagaagatcaaacctgaagccttcgaagccaacagattctacaccgtgatcaacaaaaagagcggcgagatcgtgcccatggaggtgaacttcaacttcgacgaccccaacctgatcatcctgcctctggcctttggcaagagacagggcagagaattcatctggaacgacctgctgtccctggaaaccggcagcctgaagctggccaacggaagagtgatcgagaagacactgtacaacagaagaacccggcaggatgagcctgccctgttcgtggccctgaccttcgagcggcgggaggtcctggactcctccaatatcaaaccaatgaacctgatcggcgtggcaagaggcgaaaacatccccgccgtgatcgccctgaccgaccccgagggctgcccactgagccggtttaaggatagcctgggaaacccaacccacatcctgagaatcggcgagagctataaggagaagcagcggaccatccaggccaagaaggaggtggagcagcggagagccggcggctacagccggaagtacgccagcaaagccaagaatctggcagacgatatggtgagaaacaccgctagagatctgctgtactacgccgtgacccaggatgccatgctgatcttcgccaacctgagccggggcttcggccggcagggcaagcggaccttcatggccgagagacagtacacacggatggaggactggctgaccgccaagctggcctacgagggcctgagcaagacctacctgtccaagacactggcccagtacacctccaagacatgcagcaactgtgggtttaccatcaccagcgccgactacgacagggtgctggagaagctgaagaagacagcaacaggctggatgaccacaattaacggcaaggagctgaaggtggagggccagattacctactacaacagatacaagagacagaacgtagtcaaggacctgtccgtcgagctggatagactgagcgaagaatctgtgaacaacgacatctcctcctggacaaagggcagaagcggagaagctctgagcctcctgaagaaaagattctcccatagacccgtgcaggagaagttcgtgtgcctgaactgcggcttcgagacacacgcagccgagcaagccgccctgaacatcgccagatcctggctgttcctgcggagccaggagtacaagaaataccagacaaacaagacaaccggcaacaccgataagagagccttcgtcgagacctggcagtccttttaccggaagaagcttaaggaggtgtggaaacctgccgtgcggtctggcggatctggcggaggctccaccagccccaagaaaaagagaaaagtctaagctgccttctgcggggcttgccttctggccatgcccttcttctctcccttgcacctgtacctcttggtctttgaataaagcctgagtaggaaggctagcaaaaaaaaaaaaaaaaaaaaaaaaaaaaaaaaaaaaaaaaaaaaaaaaaaaaaaaaaaaaaaaaaaaaaaaaaaaaaaaagcccagccggctccccaacctctaccgaggagggcacctctgagtccgccacccccgagagcggccctggcacctccaccgagcccagcgagggcagcgcacccggcagccctgccggcagccccacctccacagaggagggaaccagcaccgagcccagcgaaggcagcgccccaggcaccagcaccgagcctagtgagcaggagattaaacggatcaacaagatcagaagaagacttgtgaaagacagcaacaccaagaaggccggcaagacaggccccatgaaaaccctgctggttagagtgatgacacccgatctgagagagcggctggaaaacctgagaaagaagcctgaaaatatcccccagcccatcagcaatacatctagagccaacctgaataagctgctgaccgattacaccgaaatgaagaaggcgatcctgcatgtgtactgggaagagttccagaaggaccctgtgggcctgatgagccgggtggcccagcctgccagcaagaagatcgatcagaacaagctgaaacctgagatggacgagaagggcaacctgaccaccgccggctttgcctgctctcagtgtggccagcccctgttcgtgtacaagctggagcaggtgtctgagaagggcaaggcttacaccaactacttcggacggtgcaatgtggccgagcacgaaaagctgatcctgctggcccagctgaagcccgagaaggatagcgacgaagccgtgacatatagcctgggaaagtttgggcagagggccctggatttctacagcattcatgtgaccaaggagtccacccaccccgtgaagcccctggcccagatcgccggaaacagatacgcctccggacctgtgggaaaggccctgagcgacgcatgtatgggcacaatcgcctccttcctgtctaagtaccaggacatcatcatcgaacaccagaaggtggtgaagggcaaccagaagagactggagagcctgcgggagctggccggcaaggaaaacctggaataccctagcgtgaccctgccacctcagcctcacaccaaggagggcgttgatgcctacaacgaagtgatcgcccgggtgcgaatgtgggtgaacctgaacctgtggcagaagctgaagctaagcagagatgatgccaagcctctgctgagactgaagggattcccttcctttcctctggtcgagagacaggccaacgaagtggactggtgggacatggtgtgtaacgtgaagaagctgatcaacgagaaaaaggaggatggcaaggtgttttggcagaatctggctggctacaagagacaggaagccctgagaccatacctgagcagcgaggaagatcggaagaagggaaagaaattcgctcggtaccagctgggcgacctgctgctgcacctggaaaagaagcacggcgaggactggggaaaggtgtacgacgaggcctgggagcggattgacaagaaagtggaaggcctgagcaagcacatcaagctggaagaggaacggagaagcgaggacgcccagagcaaggccgccctgaccgactggctgcgggctaaggccagcttcgtgatcgagggcctgaaggaggccgacaaggacgagttctgcagatgcgagctgaagctgcagaagtggtacggggacctgcggggaaagcccttcgccatcgaagccgagaacagcatcctggacatcagcggcttcagcaagcagtacaactgtgccttcatctggcagaaggacggcgtgaagaagctgaacctgtacctgatcatcaactacttcaagggcggcaagctgcggttcaagaagatcaaacctgaagccttcgaagccaacagattctacaccgtgatcaacaaaaagagcggcgagatcgtgcccatggaggtgaacttcaacttcgacgaccccaacctgatcatcctgcctctggcctttggcaagagacagggcagagaattcatctggaacgacctgctgtccctggaaaccggcagcctgaagctggccaacggaagagtgatcgagaagacactgtacaacagaagaacccggcaggatgagcctgccctgttcgtggccctgaccttcgagcggcgggaggtcctggactcctccaatatcaaaccaatgaacctgatcggcgtggcaagaggcgaaaacatccccgccgtgatcgccctgaccgaccccgagggctgcccactgagccggtttaaggatagcctgggaaacccaacccacatcctgagaatcggcgagagctataaggagaagcagcggaccatccaggccaagaaggaggtggagcagcggagagccggcggctacagccggaagtacgccagcaaagccaagaatctggcagacgatatggtgagaaacaccgctagagatctgctgtactacgccgtgacccaggatgccatgctgatcttcgccaacctgagccggggcttcggccggcagggcaagcggaccttcatggccgagagacagtacacacggatggaggactggctgaccgccaagctggcctacgagggcctgagcaagacctacctgtccaagacactggcccagtacacctccaagacatgcagcaactgtgggtttaccatcaccagcgccgactacgacagggtgctggagaagctgaagaagacagcaacaggctggatgaccacaattaacggcaaggagctgaaggtggagggccagattacctactacaacagatacaagagacagaacgtagtcaaggacctgtccgtcgagctggatagactgagcgaagaatctgtgaacaacgacatctcctcctggacaaagggcagaagcggagaagctctgagcctcctgaagaaaagattctcccatagacccgtgcaggagaagttcgtgtgcctgaactgcggcttcgagacacacgcagccgagcaagccgccctgaacatcgccagatcctggctgttcctgcggagccaggagtacaagaaataccagacaaacaagacaaccggcaacaccgataagagagccttcgtcgagacctggcagtccttttaccggaagaagcttaaggaggtgtggaaacctgccgtgcggtctggcggatctggcggaggctccaccagccccaagaaaaagagaaaagtctaagctgccttctgcggggcttgccttctggccatgcccttcttctctcccttgcacctgtacctcttggtctttgaataaagcctgagtaggaaggctagcaaaaaaaaaaaaaaaaaaaaaaaaaaaaaaaaaaaaaaaaaaaaaaaaaaaaaaaaaaaaaaaaaaaaaaaaaaaaaaaa

SEQ ID NO: 9770 - RNA, 8787 nt, synthetic construct
  source 1..8787: mol_type = other RNA
aggaaataagagagaaaagaagagtaagaagaaatataagagccaccatggcccctaagaagaagcgtaaagtgagccggatgaaccacgaccaggagttcgacccccctaaggtgtaccctcccgtccccgccgagaagagaaagcccatccgggtcctgagcctgttcgatggcatcgccaccggtctgctggtgctgaaggacctgggcatccaggtggataggtacattgcctccgaggtgtgcgaggactccatcaccgtgggaatggtgcgtcatcagggcaagatcatgtacgtgggcgacgtgcggagcgtgacacagaagcatatccaggagtggggccctttcgacctggtgatcggcggcagcccttgcaatgacctgagcatcgtgaacccagcccggaagggcctgtacgagggaaccggcagactgttcttcgagttttacagactgctgcacgacgcccggcctaaggaaggcgacgaccggcccttcttttggctgttcgagaatgtggtggccatgggagtcagcgacaagcgggatattagccggttcctggagagcaaccccgtgatgatcgatgccaaggaagtgagcgccgcccaccgggccagatacttctggggcaatctgcctggcatgaacagacccctggccagcaccgtgaacgacaagctggagctgcaggagtgcctggagcacggccggatcgccaagttcagcaaggtgagaaccatcaccacccgaagcaacagcatcaaacaaggcaaggaccagcactttcctgtgttcatgaacgagaaggaggacatcctgtggtgtaccgagatggagagagtgttcgggttcccagtccactacacagatgtcagcaacatgtctagactggccagacagagactgctgggaagaagctggtccgtccctgtgatcagacacctgttcgcccctctgaaggagtacttcgcctgcgtgagcagcggcaacagcaacgccaacagccggggccccagcttctctagcggcctggtgccactgtccctgagagggagccacatgggccccatggagatctacaaaaccgtgagcgcctggaagcggcagcctgtgcgcgtgctgagcctgtttcggaatatcgataaagtcctgaaaagcctgggattcctggagagcggctctggctccggcggtggcaccctgaagtacgtggaggatgtgacaaacgtggtcagacgggatgtggagaagtggggccccttcgatctggtgtacggcagcacccaacccctgggcagctcttgtgaccggtgccctggctggtacatgtttcagttccaccggatcctgcagtacgccctgccgagacaggagtcccagcggccattcttttggattttcatggacaacttgctgctgaccgaggatgaccaggaaactaccactcggttcctgcagaccgaagccgtgaccctgcaggacgtgagaggccgggactaccagaacgccatgcgggtgtggtccaacatccctggactgaaaagcaagcacgcacctctgacccctaaagaagaggagtacctgcaggcccaggtgcggagcagaagcaagctggacgcccctaaggtggatctgctggtgaagaattgcctcctgcccctgagagagtacttcaagtatttcagccagaatagtctgcccctgggaggcagcggcggcggccaccaggaggtggtgaccttcgaggacgtggccgtgtacttcaccaggaccgagtgggccggcctgagccccgcccagagggccctgtacaggagcgtgatgctggagatctacggcagcctgaccagcctgggctaccccgtgcccaagcccgccctgatcagcctgctggagaggggcgacctgcccgtgggcctggagacccaggacaacccccccgcccagggcaccagggacatctacggcggcccaagcagcggcgcccctcctcccagcggcggcaggcggcccaagcagcggcgcccctcctcccagcggcggcagcccagccggctccccaacctctaccgaggagggcacctctgagtccgccacccccgagagcggccctggcacctccaccgagcccagcgagggcagcgcacccggcagccctgccggcagccccacctccacagaggagggaaccagcaccgagcccagcgaaggcagcgccccaggcaccagcaccgagcctagtgagcaggagattaaacggatcaacaagatcagaagaagacttgtgaaagacagcaacaccaagaaggccggcaagacaggccccatgaaaaccctgctggttagagtgatgacacccgatctgagagagcggctggaaaacctgagaaagaagcctgaaaatatcccccagcccatcagcaatacatctagagccaacctgaataagctgctgaccgattacaccgaaatgaagaaggcgatcctgcatgtgtactgggaagagttccagaaggaccctgtgggcctgatgagccgggtggcccagcctgccagcaagaagatcgatcagaacaagctgaaacctgagatggacgagaagggcaacctgaccaccgccggctttgcctgctctcagtgtggccagcccctgttcgtgtacaagctggagcaggtgtctgagaagggcaaggcttacaccaactacttcggacggtgcaatgtggccgagcacgaaaagctgatcctgctggcccagctgaagcccgagaaggatagcgacgaagccgtgacatatagcctgggaaagtttgggcagagggccctggatttctacagcattcatgtgaccaaggagtccacccaccccgtgaagcccctggcccagatcgccggaaacagatacgcctccggacctgtgggaaaggccctgagcgacgcatgtatgggcacaatcgcctccttcctgtctaagtaccaggacatcatcatcgaacaccagaaggtggtgaagggcaaccagaagagactggagagcctgcgggagctggccggcaaggaaaacctggaataccctagcgtgaccctgccacctcagcctcacaccaaggagggcgttgatgcctacaacgaagtgatcgcccgggtgcgaatgtgggtgaacctgaacctgtggcagaagctgaagctaagcagagatgatgccaagcctctgctgagactgaagggattcccttcctttcctctggtcgagagacaggccaacgaagtggactggtgggacatggtgtgtaacgtgaagaagctgatcaacgagaaaaaggaggatggcaaggtgttttggcagaatctggctggctacaagagacaggaagccctgagaccatacctgagcagcgaggaagatcggaagaagggaaagaaattcgctcggtaccagctgggcgacctgctgctgcacctggaaaagaagcacggcgaggactggggaaaggtgtacgacgaggcctgggagcggattgacaagaaagtggaaggcctgagcaagcacatcaagctggaagaggaacggagaagcgaggacgcccagagcaaggccgccctgaccgactggctgcgggctaaggccagcttcgtgatcgagggcctgaaggaggccgacaaggacgagttctgcagatgcgagctgaagctgcagaagtggtacggggacctgcggggaaagcccttcgccatcgaagccgagaacagcatcctggacatcagcggcttcagcaagcagtacaactgtgccttcatctggcagaaggacggcgtgaagaagctgaacctgtacctgatcatcaactacttcaagggcggcaagctgcggttcaagaagatcaaacctgaagccttcgaagccaacagattctacaccgtgatcaacaaaaagagcggcgagatcgtgcccatggaggtgaacttcaacttcgacgaccccaacctgatcatcctgcctctggcctttggcaagagacagggcagagaattcatctggaacgacctgctgtccctggaaaccggcagcctgaagctggccaacggaagagtgatcgagaagacactgtacaacagaagaacccggcaggatgagcctgccctgttcgtggccctgaccttcgagcggcgggaggtcctggactcctccaatatcaaaccaatgaacctgatcggcgtggcaagaggcgaaaacatccccgccgtgatcgccctgaccgaccccgagggctgcccactgagccggtttaaggatagcctgggaaacccaacccacatcctgagaatcggcgagagctataaggagaagcagcggaccatccaggccaagaaggaggtggagcagcggagagccggcggctacagccggaagtacgccagcaaagccaagaatctggcagacgatatggtgagaaacaccgctagagatctgctgtactacgccgtgacccaggatgccatgctgatcttcgccaacctgagccggggcttcggccggcagggcaagcggaccttcatggccgagagacagtacacacggatggaggactggctgaccgccaagctggcctacgagggcctgagcaagacctacctgtccaagacactggcccagtacacctccaagacatgcagcaactgtgggtttaccatcaccagcgccgactacgacagggtgctggagaagctgaagaagacagcaacaggctggatgaccacaattaacggcaaggagctgaaggtggagggccagattacctactacaacagatacaagagacagaacgtagtcaaggacctgtccgtcgagctggatagactgagcgaagaatctgtgaacaacgacatctcctcctggacaaagggcagaagcggagaagctctgagcctcctgaagaaaagattctcccatagacccgtgcaggagaagttcgtgtgcctgaactgcggcttcgagacacacgcagccgagcaagccgccctgaacatcgccagatcctggctgttcctgcggagccaggagtacaagaaataccagacaaacaagacaaccggcaacaccgataagagagccttcgtcgagacctggcagtccttttaccggaagaagcttaaggaggtgtggaaacctgccgtgcggtctggcggatctggcggaggctccaccagccccaagaaaaagagaaaagtctaagctgccttctgcggggcttgccttctggccatgcccttcttctctcccttgcacctgtacctcttggtctttgaataaagcctgagtaggaaggctagcaaaaaaaaaaaaaaaaaaaaaaaaaaaaaaaaaaaaaaaaaaaaaaaaaaaaaaaaaaaaaaaaaaaaaaaaaaaaaaaagcccagccggctccccaacctctaccgaggagggcacctctgagtccgccacccccgagagcggccctggcacctccaccgagcccagcgagggcagcgcacccggcagccctgccggcagccccacctccacagaggagggaaccagcaccgagcccagcgaaggcagcgccccaggcaccagcaccgagcctagtgagcaggagattaaacggatcaacaagatcagaagaagacttgtgaaagacagcaacaccaagaaggccggcaagacaggccccatgaaaaccctgctggttagagtgatgacacccgatctgagagagcggctggaaaacctgagaaagaagcctgaaaatatcccccagcccatcagcaatacatctagagccaacctgaataagctgctgaccgattacaccgaaatgaagaaggcgatcctgcatgtgtactgggaagagttccagaaggaccctgtgggcctgatgagccgggtggcccagcctgccagcaagaagatcgatcagaacaagctgaaacctgagatggacgagaagggcaacctgaccaccgccggctttgcctgctctcagtgtggccagcccctgttcgtgtacaagctggagcaggtgtctgagaagggcaaggcttacaccaactacttcggacggtgcaatgtggccgagcacgaaaagctgatcctgctggcccagctgaagcccgagaaggatagcgacgaagccgtgacatatagcctgggaaagtttgggcagagggccctggatttctacagcattcatgtgaccaaggagtccacccaccccgtgaagcccctggcccagatcgccggaaacagatacgcctccggacctgtgggaaaggccctgagcgacgcatgtatgggcacaatcgcctccttcctgtctaagtaccaggacatcatcatcgaacaccagaaggtggtgaagggcaaccagaagagactggagagcctgcgggagctggccggcaaggaaaacctggaataccctagcgtgaccctgccacctcagcctcacaccaaggagggcgttgatgcctacaacgaagtgatcgcccgggtgcgaatgtgggtgaacctgaacctgtggcagaagctgaagctaagcagagatgatgccaagcctctgctgagactgaagggattcccttcctttcctctggtcgagagacaggccaacgaagtggactggtgggacatggtgtgtaacgtgaagaagctgatcaacgagaaaaaggaggatggcaaggtgttttggcagaatctggctggctacaagagacaggaagccctgagaccatacctgagcagcgaggaagatcggaagaagggaaagaaattcgctcggtaccagctgggcgacctgctgctgcacctggaaaagaagcacggcgaggactggggaaaggtgtacgacgaggcctgggagcggattgacaagaaagtggaaggcctgagcaagcacatcaagctggaagaggaacggagaagcgaggacgcccagagcaaggccgccctgaccgactggctgcgggctaaggccagcttcgtgatcgagggcctgaaggaggccgacaaggacgagttctgcagatgcgagctgaagctgcagaagtggtacggggacctgcggggaaagcccttcgccatcgaagccgagaacagcatcctggacatcagcggcttcagcaagcagtacaactgtgccttcatctggcagaaggacggcgtgaagaagctgaacctgtacctgatcatcaactacttcaagggcggcaagctgcggttcaagaagatcaaacctgaagccttcgaagccaacagattctacaccgtgatcaacaaaaagagcggcgagatcgtgcccatggaggtgaacttcaacttcgacgaccccaacctgatcatcctgcctctggcctttggcaagagacagggcagagaattcatctggaacgacctgctgtccctggaaaccggcagcctgaagctggccaacggaagagtgatcgagaagacactgtacaacagaagaacccggcaggatgagcctgccctgttcgtggccctgaccttcgagcggcgggaggtcctggactcctccaatatcaaaccaatgaacctgatcggcgtggcaagaggcgaaaacatccccgccgtgatcgccctgaccgaccccgagggctgcccactgagccggtttaaggatagcctgggaaacccaacccacatcctgagaatcggcgagagctataaggagaagcagcggaccatccaggccaagaaggaggtggagcagcggagagccggcggctacagccggaagtacgccagcaaagccaagaatctggcagacgatatggtgagaaacaccgctagagatctgctgtactacgccgtgacccaggatgccatgctgatcttcgccaacctgagccggggcttcggccggcagggcaagcggaccttcatggccgagagacagtacacacggatggaggactggctgaccgccaagctggcctacgagggcctgagcaagacctacctgtccaagacactggcccagtacacctccaagacatgcagcaactgtgggtttaccatcaccagcgccgactacgacagggtgctggagaagctgaagaagacagcaacaggctggatgaccacaattaacggcaaggagctgaaggtggagggccagattacctactacaacagatacaagagacagaacgtagtcaaggacctgtccgtcgagctggatagactgagcgaagaatctgtgaacaacgacatctcctcctggacaaagggcagaagcggagaagctctgagcctcctgaagaaaagattctcccatagacccgtgcaggagaagttcgtgtgcctgaactgcggcttcgagacacacgcagccgagcaagccgccctgaacatcgccagatcctggctgttcctgcggagccaggagtacaagaaataccagacaaacaagacaaccggcaacaccgataagagagccttcgtcgagacctggcagtccttttaccggaagaagcttaaggaggtgtggaaacctgccgtgcggtctggcggatctggcggaggctccaccagccccaagaaaaagagaaaagtctaagctgccttctgcggggcttgccttctggccatgcccttcttctctcccttgcacctgtacctcttggtctttgaataaagcctgagtaggaaggctagcaaaaaaaaaaaaaaaaaaaaaaaaaaaaaaaaaaaaaaaaaaaaaaaaaaaaaaaaaaaaaaaaaaaaaaaaaaaaaaaa

SEQ ID NO: 9771 - RNA, 8787 nt, synthetic construct
  source 1..8787: mol_type = other RNA
aggaaataagagagaaaagaagagtaagaagaaatataagagccaccatggcccctaagaagaagcgtaaagtgagccggatgaaccacgaccaggagttcgacccccctaaggtgtaccctcccgtccccgccgagaagagaaagcccatccgggtcctgagcctgttcgatggcatcgccaccggtctgctggtgctgaaggacctgggcatccaggtggataggtacattgcctccgaggtgtgcgaggactccatcaccgtgggaatggtgcgtcatcagggcaagatcatgtacgtgggcgacgtgcggagcgtgacacagaagcatatccaggagtggggccctttcgacctggtgatcggcggcagcccttgcaatgacctgagcatcgtgaacccagcccggaagggcctgtacgagggaaccggcagactgttcttcgagttttacagactgctgcacgacgcccggcctaaggaaggcgacgaccggcccttcttttggctgttcgagaatgtggtggccatgggagtcagcgacaagcgggatattagccggttcctggagagcaaccccgtgatgatcgatgccaaggaagtgagcgccgcccaccgggccagatacttctggggcaatctgcctggcatgaacagacccctggccagcaccgtgaacgacaagctggagctgcaggagtgcctggagcacggccggatcgccaagttcagcaaggtgagaaccatcaccacccgaagcaacagcatcaaacaaggcaaggaccagcactttcctgtgttcatgaacgagaaggaggacatcctgtggtgtaccgagatggagagagtgttcgggttcccagtccactacacagatgtcagcaacatgtctagactggccagacagagactgctgggaagaagctggtccgtccctgtgatcagacacctgttcgcccctctgaaggagtacttcgcctgcgtgagcagcggcaacagcaacgccaacagccggggccccagcttctctagcggcctggtgccactgtccctgagagggagccacatgggccccatggagatctacaaaaccgtgagcgcctggaagcggcagcctgtgcgcgtgctgagcctgtttcggaatatcgataaagtcctgaaaagcctgggattcctggagagcggctctggctccggcggtggcaccctgaagtacgtggaggatgtgacaaacgtggtcagacgggatgtggagaagtggggccccttcgatctggtgtacggcagcacccaacccctgggcagctcttgtgaccggtgccctggctggtacatgtttcagttccaccggatcctgcagtacgccctgccgagacaggagtcccagcggccattcttttggattttcatggacaacttgctgctgaccgaggatgaccaggaaactaccactcggttcctgcagaccgaagccgtgaccctgcaggacgtgagaggccgggactaccagaacgccatgcgggtgtggtccaacatccctggactgaaaagcaagcacgcacctctgacccctaaagaagaggagtacctgcaggcccaggtgcggagcagaagcaagctggacgcccctaaggtggatctgctggtgaagaattgcctcctgcccctgagagagtacttcaagtatttcagccagaatagtctgcccctgggaggcagcggcggcggcccccaggagcccgtgaccttcgaggacgtggccgtgtacttcacccagaaccagtgggccagcctggaccccatgcagagggccctgtacagggaggtgatgctggagaactacaccaacatggccagcctggccttccccttccccaagcccgtgctggtgagccacctggagaggggcgaggccccctggggccccgacccctgggaggccgaggtgctgaggggcatctgccccggcggcggcggcccaagcagcggcgcccctcctcccagcggcggcaggcggcccaagcagcggcgcccctcctcccagcggcggcagcccagccggctccccaacctctaccgaggagggcacctctgagtccgccacccccgagagcggccctggcacctccaccgagcccagcgagggcagcgcacccggcagccctgccggcagccccacctccacagaggagggaaccagcaccgagcccagcgaaggcagcgccccaggcaccagcaccgagcctagtgagcaggagattaaacggatcaacaagatcagaagaagacttgtgaaagacagcaacaccaagaaggccggcaagacaggccccatgaaaaccctgctggttagagtgatgacacccgatctgagagagcggctggaaaacctgagaaagaagcctgaaaatatcccccagcccatcagcaatacatctagagccaacctgaataagctgctgaccgattacaccgaaatgaagaaggcgatcctgcatgtgtactgggaagagttccagaaggaccctgtgggcctgatgagccgggtggcccagcctgccagcaagaagatcgatcagaacaagctgaaacctgagatggacgagaagggcaacctgaccaccgccggctttgcctgctctcagtgtggccagcccctgttcgtgtacaagctggagcaggtgtctgagaagggcaaggcttacaccaactacttcggacggtgcaatgtggccgagcacgaaaagctgatcctgctggcccagctgaagcccgagaaggatagcgacgaagccgtgacatatagcctgggaaagtttgggcagagggccctggatttctacagcattcatgtgaccaaggagtccacccaccccgtgaagcccctggcccagatcgccggaaacagatacgcctccggacctgtgggaaaggccctgagcgacgcatgtatgggcacaatcgcctccttcctgtctaagtaccaggacatcatcatcgaacaccagaaggtggtgaagggcaaccagaagagactggagagcctgcgggagctggccggcaaggaaaacctggaataccctagcgtgaccctgccacctcagcctcacaccaaggagggcgttgatgcctacaacgaagtgatcgcccgggtgcgaatgtgggtgaacctgaacctgtggcagaagctgaagctaagcagagatgatgccaagcctctgctgagactgaagggattcccttcctttcctctggtcgagagacaggccaacgaagtggactggtgggacatggtgtgtaacgtgaagaagctgatcaacgagaaaaaggaggatggcaaggtgttttggcagaatctggctggctacaagagacaggaagccctgagaccatacctgagcagcgaggaagatcggaagaagggaaagaaattcgctcggtaccagctgggcgacctgctgctgcacctggaaaagaagcacggcgaggactggggaaaggtgtacgacgaggcctgggagcggattgacaagaaagtggaaggcctgagcaagcacatcaagctggaagaggaacggagaagcgaggacgcccagagcaaggccgccctgaccgactggctgcgggctaaggccagcttcgtgatcgagggcctgaaggaggccgacaaggacgagttctgcagatgcgagctgaagctgcagaagtggtacggggacctgcggggaaagcccttcgccatcgaagccgagaacagcatcctggacatcagcggcttcagcaagcagtacaactgtgccttcatctggcagaaggacggcgtgaagaagctgaacctgtacctgatcatcaactacttcaagggcggcaagctgcggttcaagaagatcaaacctgaagccttcgaagccaacagattctacaccgtgatcaacaaaaagagcggcgagatcgtgcccatggaggtgaacttcaacttcgacgaccccaacctgatcatcctgcctctggcctttggcaagagacagggcagagaattcatctggaacgacctgctgtccctggaaaccggcagcctgaagctggccaacggaagagtgatcgagaagacactgtacaacagaagaacccggcaggatgagcctgccctgttcgtggccctgaccttcgagcggcgggaggtcctggactcctccaatatcaaaccaatgaacctgatcggcgtggcaagaggcgaaaacatccccgccgtgatcgccctgaccgaccccgagggctgcccactgagccggtttaaggatagcctgggaaacccaacccacatcctgagaatcggcgagagctataaggagaagcagcggaccatccaggccaagaaggaggtggagcagcggagagccggcggctacagccggaagtacgccagcaaagccaagaatctggcagacgatatggtgagaaacaccgctagagatctgctgtactacgccgtgacccaggatgccatgctgatcttcgccaacctgagccggggcttcggccggcagggcaagcggaccttcatggccgagagacagtacacacggatggaggactggctgaccgccaagctggcctacgagggcctgagcaagacctacctgtccaagacactggcccagtacacctccaagacatgcagcaactgtgggtttaccatcaccagcgccgactacgacagggtgctggagaagctgaagaagacagcaacaggctggatgaccacaattaacggcaaggagctgaaggtggagggccagattacctactacaacagatacaagagacagaacgtagtcaaggacctgtccgtcgagctggatagactgagcgaagaatctgtgaacaacgacatctcctcctggacaaagggcagaagcggagaagctctgagcctcctgaagaaaagattctcccatagacccgtgcaggagaagttcgtgtgcctgaactgcggcttcgagacacacgcagccgagcaagccgccctgaacatcgccagatcctggctgttcctgcggagccaggagtacaagaaataccagacaaacaagacaaccggcaacaccgataagagagccttcgtcgagacctggcagtccttttaccggaagaagcttaaggaggtgtggaaacctgccgtgcggtctggcggatctggcggaggctccaccagccccaagaaaaagagaaaagtctaagctgccttctgcggggcttgccttctggccatgcccttcttctctcccttgcacctgtacctcttggtctttgaataaagcctgagtaggaaggctagcaaaaaaaaaaaaaaaaaaaaaaaaaaaaaaaaaaaaaaaaaaaaaaaaaaaaaaaaaaaaaaaaaaaaaaaaaaaaaaaagcccagccggctccccaacctctaccgaggagggcacctctgagtccgccacccccgagagcggccctggcacctccaccgagcccagcgagggcagcgcacccggcagccctgccggcagccccacctccacagaggagggaaccagcaccgagcccagcgaaggcagcgccccaggcaccagcaccgagcctagtgagcaggagattaaacggatcaacaagatcagaagaagacttgtgaaagacagcaacaccaagaaggccggcaagacaggccccatgaaaaccctgctggttagagtgatgacacccgatctgagagagcggctggaaaacctgagaaagaagcctgaaaatatcccccagcccatcagcaatacatctagagccaacctgaataagctgctgaccgattacaccgaaatgaagaaggcgatcctgcatgtgtactgggaagagttccagaaggaccctgtgggcctgatgagccgggtggcccagcctgccagcaagaagatcgatcagaacaagctgaaacctgagatggacgagaagggcaacctgaccaccgccggctttgcctgctctcagtgtggccagcccctgttcgtgtacaagctggagcaggtgtctgagaagggcaaggcttacaccaactacttcggacggtgcaatgtggccgagcacgaaaagctgatcctgctggcccagctgaagcccgagaaggatagcgacgaagccgtgacatatagcctgggaaagtttgggcagagggccctggatttctacagcattcatgtgaccaaggagtccacccaccccgtgaagcccctggcccagatcgccggaaacagatacgcctccggacctgtgggaaaggccctgagcgacgcatgtatgggcacaatcgcctccttcctgtctaagtaccaggacatcatcatcgaacaccagaaggtggtgaagggcaaccagaagagactggagagcctgcgggagctggccggcaaggaaaacctggaataccctagcgtgaccctgccacctcagcctcacaccaaggagggcgttgatgcctacaacgaagtgatcgcccgggtgcgaatgtgggtgaacctgaacctgtggcagaagctgaagctaagcagagatgatgccaagcctctgctgagactgaagggattcccttcctttcctctggtcgagagacaggccaacgaagtggactggtgggacatggtgtgtaacgtgaagaagctgatcaacgagaaaaaggaggatggcaaggtgttttggcagaatctggctggctacaagagacaggaagccctgagaccatacctgagcagcgaggaagatcggaagaagggaaagaaattcgctcggtaccagctgggcgacctgctgctgcacctggaaaagaagcacggcgaggactggggaaaggtgtacgacgaggcctgggagcggattgacaagaaagtggaaggcctgagcaagcacatcaagctggaagaggaacggagaagcgaggacgcccagagcaaggccgccctgaccgactggctgcgggctaaggccagcttcgtgatcgagggcctgaaggaggccgacaaggacgagttctgcagatgcgagctgaagctgcagaagtggtacggggacctgcggggaaagcccttcgccatcgaagccgagaacagcatcctggacatcagcggcttcagcaagcagtacaactgtgccttcatctggcagaaggacggcgtgaagaagctgaacctgtacctgatcatcaactacttcaagggcggcaagctgcggttcaagaagatcaaacctgaagccttcgaagccaacagattctacaccgtgatcaacaaaaagagcggcgagatcgtgcccatggaggtgaacttcaacttcgacgaccccaacctgatcatcctgcctctggcctttggcaagagacagggcagagaattcatctggaacgacctgctgtccctggaaaccggcagcctgaagctggccaacggaagagtgatcgagaagacactgtacaacagaagaacccggcaggatgagcctgccctgttcgtggccctgaccttcgagcggcgggaggtcctggactcctccaatatcaaaccaatgaacctgatcggcgtggcaagaggcgaaaacatccccgccgtgatcgccctgaccgaccccgagggctgcccactgagccggtttaaggatagcctgggaaacccaacccacatcctgagaatcggcgagagctataaggagaagcagcggaccatccaggccaagaaggaggtggagcagcggagagccggcggctacagccggaagtacgccagcaaagccaagaatctggcagacgatatggtgagaaacaccgctagagatctgctgtactacgccgtgacccaggatgccatgctgatcttcgccaacctgagccggggcttcggccggcagggcaagcggaccttcatggccgagagacagtacacacggatggaggactggctgaccgccaagctggcctacgagggcctgagcaagacctacctgtccaagacactggcccagtacacctccaagacatgcagcaactgtgggtttaccatcaccagcgccgactacgacagggtgctggagaagctgaagaagacagcaacaggctggatgaccacaattaacggcaaggagctgaaggtggagggccagattacctactacaacagatacaagagacagaacgtagtcaaggacctgtccgtcgagctggatagactgagcgaagaatctgtgaacaacgacatctcctcctggacaaagggcagaagcggagaagctctgagcctcctgaagaaaagattctcccatagacccgtgcaggagaagttcgtgtgcctgaactgcggcttcgagacacacgcagccgagcaagccgccctgaacatcgccagatcctggctgttcctgcggagccaggagtacaagaaataccagacaaacaagacaaccggcaacaccgataagagagccttcgtcgagacctggcagtccttttaccggaagaagcttaaggaggtgtggaaacctgccgtgcggtctggcggatctggcggaggctccaccagccccaagaaaaagagaaaagtctaagctgccttctgcggggcttgccttctggccatgcccttcttctctcccttgcacctgtacctcttggtctttgaataaagcctgagtaggaaggctagcaaaaaaaaaaaaaaaaaaaaaaaaaaaaaaaaaaaaaaaaaaaaaaaaaaaaaaaaaaaaaaaaaaaaaaaaaaaaaaaa

SEQ ID NO: 9772 - RNA, 8787 nt, synthetic construct
  source 1..8787: mol_type = other RNA
aggaaataagagagaaaagaagagtaagaagaaatataagagccaccatggcccctaagaagaagcgtaaagtgagccggatgaaccacgaccaggagttcgacccccctaaggtgtaccctcccgtccccgccgagaagagaaagcccatccgggtcctgagcctgttcgatggcatcgccaccggtctgctggtgctgaaggacctgggcatccaggtggataggtacattgcctccgaggtgtgcgaggactccatcaccgtgggaatggtgcgtcatcagggcaagatcatgtacgtgggcgacgtgcggagcgtgacacagaagcatatccaggagtggggccctttcgacctggtgatcggcggcagcccttgcaatgacctgagcatcgtgaacccagcccggaagggcctgtacgagggaaccggcagactgttcttcgagttttacagactgctgcacgacgcccggcctaaggaaggcgacgaccggcccttcttttggctgttcgagaatgtggtggccatgggagtcagcgacaagcgggatattagccggttcctggagagcaaccccgtgatgatcgatgccaaggaagtgagcgccgcccaccgggccagatacttctggggcaatctgcctggcatgaacagacccctggccagcaccgtgaacgacaagctggagctgcaggagtgcctggagcacggccggatcgccaagttcagcaaggtgagaaccatcaccacccgaagcaacagcatcaaacaaggcaaggaccagcactttcctgtgttcatgaacgagaaggaggacatcctgtggtgtaccgagatggagagagtgttcgggttcccagtccactacacagatgtcagcaacatgtctagactggccagacagagactgctgggaagaagctggtccgtccctgtgatcagacacctgttcgcccctctgaaggagtacttcgcctgcgtgagcagcggcaacagcaacgccaacagccggggccccagcttctctagcggcctggtgccactgtccctgagagggagccacatgggccccatggagatctacaaaaccgtgagcgcctggaagcggcagcctgtgcgcgtgctgagcctgtttcggaatatcgataaagtcctgaaaagcctgggattcctggagagcggctctggctccggcggtggcaccctgaagtacgtggaggatgtgacaaacgtggtcagacgggatgtggagaagtggggccccttcgatctggtgtacggcagcacccaacccctgggcagctcttgtgaccggtgccctggctggtacatgtttcagttccaccggatcctgcagtacgccctgccgagacaggagtcccagcggccattcttttggattttcatggacaacttgctgctgaccgaggatgaccaggaaactaccactcggttcctgcagaccgaagccgtgaccctgcaggacgtgagaggccgggactaccagaacgccatgcgggtgtggtccaacatccctggactgaaaagcaagcacgcacctctgacccctaaagaagaggagtacctgcaggcccaggtgcggagcagaagcaagctggacgcccctaaggtggatctgctggtgaagaattgcctcctgcccctgagagagtacttcaagtatttcagccagaatagtctgcccctgggaggcagcggcggcggcagcaagctgagcgaggccttcgaggacgtggccgtgtacttcacctggaaggagtgggccctgctggaggccgccgacaagatgctgtacagggaccagatgctgaagaactaccaggccctgttcagcctgggctacaggggccccacccccgacctgatctgcaggatccagaggggcgagatggagctgtgggtgagcgacctggaggaggccggcgagagcagcctgagcgaggacagcggcggcccaagcagcggcgcccctcctcccagcggcggcaggcggcccaagcagcggcgcccctcctcccagcggcggcagcccagccggctccccaacctctaccgaggagggcacctctgagtccgccacccccgagagcggccctggcacctccaccgagcccagcgagggcagcgcacccggcagccctgccggcagccccacctccacagaggagggaaccagcaccgagcccagcgaaggcagcgccccaggcaccagcaccgagcctagtgagcaggagattaaacggatcaacaagatcagaagaagacttgtgaaagacagcaacaccaagaaggccggcaagacaggccccatgaaaaccctgctggttagagtgatgacacccgatctgagagagcggctggaaaacctgagaaagaagcctgaaaatatcccccagcccatcagcaatacatctagagccaacctgaataagctgctgaccgattacaccgaaatgaagaaggcgatcctgcatgtgtactgggaagagttccagaaggaccctgtgggcctgatgagccgggtggcccagcctgccagcaagaagatcgatcagaacaagctgaaacctgagatggacgagaagggcaacctgaccaccgccggctttgcctgctctcagtgtggccagcccctgttcgtgtacaagctggagcaggtgtctgagaagggcaaggcttacaccaactacttcggacggtgcaatgtggccgagcacgaaaagctgatcctgctggcccagctgaagcccgagaaggatagcgacgaagccgtgacatatagcctgggaaagtttgggcagagggccctggatttctacagcattcatgtgaccaaggagtccacccaccccgtgaagcccctggcccagatcgccggaaacagatacgcctccggacctgtgggaaaggccctgagcgacgcatgtatgggcacaatcgcctccttcctgtctaagtaccaggacatcatcatcgaacaccagaaggtggtgaagggcaaccagaagagactggagagcctgcgggagctggccggcaaggaaaacctggaataccctagcgtgaccctgccacctcagcctcacaccaaggagggcgttgatgcctacaacgaagtgatcgcccgggtgcgaatgtgggtgaacctgaacctgtggcagaagctgaagctaagcagagatgatgccaagcctctgctgagactgaagggattcccttcctttcctctggtcgagagacaggccaacgaagtggactggtgggacatggtgtgtaacgtgaagaagctgatcaacgagaaaaaggaggatggcaaggtgttttggcagaatctggctggctacaagagacaggaagccctgagaccatacctgagcagcgaggaagatcggaagaagggaaagaaattcgctcggtaccagctgggcgacctgctgctgcacctggaaaagaagcacggcgaggactggggaaaggtgtacgacgaggcctgggagcggattgacaagaaagtggaaggcctgagcaagcacatcaagctggaagaggaacggagaagcgaggacgcccagagcaaggccgccctgaccgactggctgcgggctaaggccagcttcgtgatcgagggcctgaaggaggccgacaaggacgagttctgcagatgcgagctgaagctgcagaagtggtacggggacctgcggggaaagcccttcgccatcgaagccgagaacagcatcctggacatcagcggcttcagcaagcagtacaactgtgccttcatctggcagaaggacggcgtgaagaagctgaacctgtacctgatcatcaactacttcaagggcggcaagctgcggttcaagaagatcaaacctgaagccttcgaagccaacagattctacaccgtgatcaacaaaaagagcggcgagatcgtgcccatggaggtgaacttcaacttcgacgaccccaacctgatcatcctgcctctggcctttggcaagagacagggcagagaattcatctggaacgacctgctgtccctggaaaccggcagcctgaagctggccaacggaagagtgatcgagaagacactgtacaacagaagaacccggcaggatgagcctgccctgttcgtggccctgaccttcgagcggcgggaggtcctggactcctccaatatcaaaccaatgaacctgatcggcgtggcaagaggcgaaaacatccccgccgtgatcgccctgaccgaccccgagggctgcccactgagccggtttaaggatagcctgggaaacccaacccacatcctgagaatcggcgagagctataaggagaagcagcggaccatccaggccaagaaggaggtggagcagcggagagccggcggctacagccggaagtacgccagcaaagccaagaatctggcagacgatatggtgagaaacaccgctagagatctgctgtactacgccgtgacccaggatgccatgctgatcttcgccaacctgagccggggcttcggccggcagggcaagcggaccttcatggccgagagacagtacacacggatggaggactggctgaccgccaagctggcctacgagggcctgagcaagacctacctgtccaagacactggcccagtacacctccaagacatgcagcaactgtgggtttaccatcaccagcgccgactacgacagggtgctggagaagctgaagaagacagcaacaggctggatgaccacaattaacggcaaggagctgaaggtggagggccagattacctactacaacagatacaagagacagaacgtagtcaaggacctgtccgtcgagctggatagactgagcgaagaatctgtgaacaacgacatctcctcctggacaaagggcagaagcggagaagctctgagcctcctgaagaaaagattctcccatagacccgtgcaggagaagttcgtgtgcctgaactgcggcttcgagacacacgcagccgagcaagccgccctgaacatcgccagatcctggctgttcctgcggagccaggagtacaagaaataccagacaaacaagacaaccggcaacaccgataagagagccttcgtcgagacctggcagtccttttaccggaagaagcttaaggaggtgtggaaacctgccgtgcggtctggcggatctggcggaggctccaccagccccaagaaaaagagaaaagtctaagctgccttctgcggggcttgccttctggccatgcccttcttctctcccttgcacctgtacctcttggtctttgaataaagcctgagtaggaaggctagcaaaaaaaaaaaaaaaaaaaaaaaaaaaaaaaaaaaaaaaaaaaaaaaaaaaaaaaaaaaaaaaaaaaaaaaaaaaaaaaagcccagccggctccccaacctctaccgaggagggcacctctgagtccgccacccccgagagcggccctggcacctccaccgagcccagcgagggcagcgcacccggcagccctgccggcagccccacctccacagaggagggaaccagcaccgagcccagcgaaggcagcgccccaggcaccagcaccgagcctagtgagcaggagattaaacggatcaacaagatcagaagaagacttgtgaaagacagcaacaccaagaaggccggcaagacaggccccatgaaaaccctgctggttagagtgatgacacccgatctgagagagcggctggaaaacctgagaaagaagcctgaaaatatcccccagcccatcagcaatacatctagagccaacctgaataagctgctgaccgattacaccgaaatgaagaaggcgatcctgcatgtgtactgggaagagttccagaaggaccctgtgggcctgatgagccgggtggcccagcctgccagcaagaagatcgatcagaacaagctgaaacctgagatggacgagaagggcaacctgaccaccgccggctttgcctgctctcagtgtggccagcccctgttcgtgtacaagctggagcaggtgtctgagaagggcaaggcttacaccaactacttcggacggtgcaatgtggccgagcacgaaaagctgatcctgctggcccagctgaagcccgagaaggatagcgacgaagccgtgacatatagcctgggaaagtttgggcagagggccctggatttctacagcattcatgtgaccaaggagtccacccaccccgtgaagcccctggcccagatcgccggaaacagatacgcctccggacctgtgggaaaggccctgagcgacgcatgtatgggcacaatcgcctccttcctgtctaagtaccaggacatcatcatcgaacaccagaaggtggtgaagggcaaccagaagagactggagagcctgcgggagctggccggcaaggaaaacctggaataccctagcgtgaccctgccacctcagcctcacaccaaggagggcgttgatgcctacaacgaagtgatcgcccgggtgcgaatgtgggtgaacctgaacctgtggcagaagctgaagctaagcagagatgatgccaagcctctgctgagactgaagggattcccttcctttcctctggtcgagagacaggccaacgaagtggactggtgggacatggtgtgtaacgtgaagaagctgatcaacgagaaaaaggaggatggcaaggtgttttggcagaatctggctggctacaagagacaggaagccctgagaccatacctgagcagcgaggaagatcggaagaagggaaagaaattcgctcggtaccagctgggcgacctgctgctgcacctggaaaagaagcacggcgaggactggggaaaggtgtacgacgaggcctgggagcggattgacaagaaagtggaaggcctgagcaagcacatcaagctggaagaggaacggagaagcgaggacgcccagagcaaggccgccctgaccgactggctgcgggctaaggccagcttcgtgatcgagggcctgaaggaggccgacaaggacgagttctgcagatgcgagctgaagctgcagaagtggtacggggacctgcggggaaagcccttcgccatcgaagccgagaacagcatcctggacatcagcggcttcagcaagcagtacaactgtgccttcatctggcagaaggacggcgtgaagaagctgaacctgtacctgatcatcaactacttcaagggcggcaagctgcggttcaagaagatcaaacctgaagccttcgaagccaacagattctacaccgtgatcaacaaaaagagcggcgagatcgtgcccatggaggtgaacttcaacttcgacgaccccaacctgatcatcctgcctctggcctttggcaagagacagggcagagaattcatctggaacgacctgctgtccctggaaaccggcagcctgaagctggccaacggaagagtgatcgagaagacactgtacaacagaagaacccggcaggatgagcctgccctgttcgtggccctgaccttcgagcggcgggaggtcctggactcctccaatatcaaaccaatgaacctgatcggcgtggcaagaggcgaaaacatccccgccgtgatcgccctgaccgaccccgagggctgcccactgagccggtttaaggatagcctgggaaacccaacccacatcctgagaatcggcgagagctataaggagaagcagcggaccatccaggccaagaaggaggtggagcagcggagagccggcggctacagccggaagtacgccagcaaagccaagaatctggcagacgatatggtgagaaacaccgctagagatctgctgtactacgccgtgacccaggatgccatgctgatcttcgccaacctgagccggggcttcggccggcagggcaagcggaccttcatggccgagagacagtacacacggatggaggactggctgaccgccaagctggcctacgagggcctgagcaagacctacctgtccaagacactggcccagtacacctccaagacatgcagcaactgtgggtttaccatcaccagcgccgactacgacagggtgctggagaagctgaagaagacagcaacaggctggatgaccacaattaacggcaaggagctgaaggtggagggccagattacctactacaacagatacaagagacagaacgtagtcaaggacctgtccgtcgagctggatagactgagcgaagaatctgtgaacaacgacatctcctcctggacaaagggcagaagcggagaagctctgagcctcctgaagaaaagattctcccatagacccgtgcaggagaagttcgtgtgcctgaactgcggcttcgagacacacgcagccgagcaagccgccctgaacatcgccagatcctggctgttcctgcggagccaggagtacaagaaataccagacaaacaagacaaccggcaacaccgataagagagccttcgtcgagacctggcagtccttttaccggaagaagcttaaggaggtgtggaaacctgccgtgcggtctggcggatctggcggaggctccaccagccccaagaaaaagagaaaagtctaagctgccttctgcggggcttgccttctggccatgcccttcttctctcccttgcacctgtacctcttggtctttgaataaagcctgagtaggaaggctagcaaaaaaaaaaaaaaaaaaaaaaaaaaaaaaaaaaaaaaaaaaaaaaaaaaaaaaaaaaaaaaaaaaaaaaaaaaaaaaaa

SEQ ID NO: 9773 - RNA, 8787 nt, synthetic construct
  source 1..8787: mol_type = other RNA
aggaaataagagagaaaagaagagtaagaagaaatataagagccaccatggcccctaagaagaagcgtaaagtgagccggatgaaccacgaccaggagttcgacccccctaaggtgtaccctcccgtccccgccgagaagagaaagcccatccgggtcctgagcctgttcgatggcatcgccaccggtctgctggtgctgaaggacctgggcatccaggtggataggtacattgcctccgaggtgtgcgaggactccatcaccgtgggaatggtgcgtcatcagggcaagatcatgtacgtgggcgacgtgcggagcgtgacacagaagcatatccaggagtggggccctttcgacctggtgatcggcggcagcccttgcaatgacctgagcatcgtgaacccagcccggaagggcctgtacgagggaaccggcagactgttcttcgagttttacagactgctgcacgacgcccggcctaaggaaggcgacgaccggcccttcttttggctgttcgagaatgtggtggccatgggagtcagcgacaagcgggatattagccggttcctggagagcaaccccgtgatgatcgatgccaaggaagtgagcgccgcccaccgggccagatacttctggggcaatctgcctggcatgaacagacccctggccagcaccgtgaacgacaagctggagctgcaggagtgcctggagcacggccggatcgccaagttcagcaaggtgagaaccatcaccacccgaagcaacagcatcaaacaaggcaaggaccagcactttcctgtgttcatgaacgagaaggaggacatcctgtggtgtaccgagatggagagagtgttcgggttcccagtccactacacagatgtcagcaacatgtctagactggccagacagagactgctgggaagaagctggtccgtccctgtgatcagacacctgttcgcccctctgaaggagtacttcgcctgcgtgagcagcggcaacagcaacgccaacagccggggccccagcttctctagcggcctggtgccactgtccctgagagggagccacatgggccccatggagatctacaaaaccgtgagcgcctggaagcggcagcctgtgcgcgtgctgagcctgtttcggaatatcgataaagtcctgaaaagcctgggattcctggagagcggctctggctccggcggtggcaccctgaagtacgtggaggatgtgacaaacgtggtcagacgggatgtggagaagtggggccccttcgatctggtgtacggcagcacccaacccctgggcagctcttgtgaccggtgccctggctggtacatgtttcagttccaccggatcctgcagtacgccctgccgagacaggagtcccagcggccattcttttggattttcatggacaacttgctgctgaccgaggatgaccaggaaactaccactcggttcctgcagaccgaagccgtgaccctgcaggacgtgagaggccgggactaccagaacgccatgcgggtgtggtccaacatccctggactgaaaagcaagcacgcacctctgacccctaaagaagaggagtacctgcaggcccaggtgcggagcagaagcaagctggacgcccctaaggtggatctgctggtgaagaattgcctcctgcccctgagagagtacttcaagtatttcagccagaatagtctgcccctgggaggcagcggcggcggcgtgaccttcgaggacgtggccgtgtacttcagctgggaggagtggggcctgctggacgaggcccagaggtgcctgtaccaggacgtgatgctggagaacctggccctgatcaacagcctgggcctgaggcacggcgccgaggacgaggacgcccccgagcacagggtgagcgtgcaggccgccagccaggtgggcaccaggaaggccgtggtgagcccccagaaggcccaccccagggaggtgggcggcccaagcagcggcgcccctcctcccagcggcggcaggcggcccaagcagcggcgcccctcctcccagcggcggcagcccagccggctccccaacctctaccgaggagggcacctctgagtccgccacccccgagagcggccctggcacctccaccgagcccagcgagggcagcgcacccggcagccctgccggcagccccacctccacagaggagggaaccagcaccgagcccagcgaaggcagcgccccaggcaccagcaccgagcctagtgagcaggagattaaacggatcaacaagatcagaagaagacttgtgaaagacagcaacaccaagaaggccggcaagacaggccccatgaaaaccctgctggttagagtgatgacacccgatctgagagagcggctggaaaacctgagaaagaagcctgaaaatatcccccagcccatcagcaatacatctagagccaacctgaataagctgctgaccgattacaccgaaatgaagaaggcgatcctgcatgtgtactgggaagagttccagaaggaccctgtgggcctgatgagccgggtggcccagcctgccagcaagaagatcgatcagaacaagctgaaacctgagatggacgagaagggcaacctgaccaccgccggctttgcctgctctcagtgtggccagcccctgttcgtgtacaagctggagcaggtgtctgagaagggcaaggcttacaccaactacttcggacggtgcaatgtggccgagcacgaaaagctgatcctgctggcccagctgaagcccgagaaggatagcgacgaagccgtgacatatagcctgggaaagtttgggcagagggccctggatttctacagcattcatgtgaccaaggagtccacccaccccgtgaagcccctggcccagatcgccggaaacagatacgcctccggacctgtgggaaaggccctgagcgacgcatgtatgggcacaatcgcctccttcctgtctaagtaccaggacatcatcatcgaacaccagaaggtggtgaagggcaaccagaagagactggagagcctgcgggagctggccggcaaggaaaacctggaataccctagcgtgaccctgccacctcagcctcacaccaaggagggcgttgatgcctacaacgaagtgatcgcccgggtgcgaatgtgggtgaacctgaacctgtggcagaagctgaagctaagcagagatgatgccaagcctctgctgagactgaagggattcccttcctttcctctggtcgagagacaggccaacgaagtggactggtgggacatggtgtgtaacgtgaagaagctgatcaacgagaaaaaggaggatggcaaggtgttttggcagaatctggctggctacaagagacaggaagccctgagaccatacctgagcagcgaggaagatcggaagaagggaaagaaattcgctcggtaccagctgggcgacctgctgctgcacctggaaaagaagcacggcgaggactggggaaaggtgtacgacgaggcctgggagcggattgacaagaaagtggaaggcctgagcaagcacatcaagctggaagaggaacggagaagcgaggacgcccagagcaaggccgccctgaccgactggctgcgggctaaggccagcttcgtgatcgagggcctgaaggaggccgacaaggacgagttctgcagatgcgagctgaagctgcagaagtggtacggggacctgcggggaaagcccttcgccatcgaagccgagaacagcatcctggacatcagcggcttcagcaagcagtacaactgtgccttcatctggcagaaggacggcgtgaagaagctgaacctgtacctgatcatcaactacttcaagggcggcaagctgcggttcaagaagatcaaacctgaagccttcgaagccaacagattctacaccgtgatcaacaaaaagagcggcgagatcgtgcccatggaggtgaacttcaacttcgacgaccccaacctgatcatcctgcctctggcctttggcaagagacagggcagagaattcatctggaacgacctgctgtccctggaaaccggcagcctgaagctggccaacggaagagtgatcgagaagacactgtacaacagaagaacccggcaggatgagcctgccctgttcgtggccctgaccttcgagcggcgggaggtcctggactcctccaatatcaaaccaatgaacctgatcggcgtggcaagaggcgaaaacatccccgccgtgatcgccctgaccgaccccgagggctgcccactgagccggtttaaggatagcctgggaaacccaacccacatcctgagaatcggcgagagctataaggagaagcagcggaccatccaggccaagaaggaggtggagcagcggagagccggcggctacagccggaagtacgccagcaaagccaagaatctggcagacgatatggtgagaaacaccgctagagatctgctgtactacgccgtgacccaggatgccatgctgatcttcgccaacctgagccggggcttcggccggcagggcaagcggaccttcatggccgagagacagtacacacggatggaggactggctgaccgccaagctggcctacgagggcctgagcaagacctacctgtccaagacactggcccagtacacctccaagacatgcagcaactgtgggtttaccatcaccagcgccgactacgacagggtgctggagaagctgaagaagacagcaacaggctggatgaccacaattaacggcaaggagctgaaggtggagggccagattacctactacaacagatacaagagacagaacgtagtcaaggacctgtccgtcgagctggatagactgagcgaagaatctgtgaacaacgacatctcctcctggacaaagggcagaagcggagaagctctgagcctcctgaagaaaagattctcccatagacccgtgcaggagaagttcgtgtgcctgaactgcggcttcgagacacacgcagccgagcaagccgccctgaacatcgccagatcctggctgttcctgcggagccaggagtacaagaaataccagacaaacaagacaaccggcaacaccgataagagagccttcgtcgagacctggcagtccttttaccggaagaagcttaaggaggtgtggaaacctgccgtgcggtctggcggatctggcggaggctccaccagccccaagaaaaagagaaaagtctaagctgccttctgcggggcttgccttctggccatgcccttcttctctcccttgcacctgtacctcttggtctttgaataaagcctgagtaggaaggctagcaaaaaaaaaaaaaaaaaaaaaaaaaaaaaaaaaaaaaaaaaaaaaaaaaaaaaaaaaaaaaaaaaaaaaaaaaaaaaaaagcccagccggctccccaacctctaccgaggagggcacctctgagtccgccacccccgagagcggccctggcacctccaccgagcccagcgagggcagcgcacccggcagccctgccggcagccccacctccacagaggagggaaccagcaccgagcccagcgaaggcagcgccccaggcaccagcaccgagcctagtgagcaggagattaaacggatcaacaagatcagaagaagacttgtgaaagacagcaacaccaagaaggccggcaagacaggccccatgaaaaccctgctggttagagtgatgacacccgatctgagagagcggctggaaaacctgagaaagaagcctgaaaatatcccccagcccatcagcaatacatctagagccaacctgaataagctgctgaccgattacaccgaaatgaagaaggcgatcctgcatgtgtactgggaagagttccagaaggaccctgtgggcctgatgagccgggtggcccagcctgccagcaagaagatcgatcagaacaagctgaaacctgagatggacgagaagggcaacctgaccaccgccggctttgcctgctctcagtgtggccagcccctgttcgtgtacaagctggagcaggtgtctgagaagggcaaggcttacaccaactacttcggacggtgcaatgtggccgagcacgaaaagctgatcctgctggcccagctgaagcccgagaaggatagcgacgaagccgtgacatatagcctgggaaagtttgggcagagggccctggatttctacagcattcatgtgaccaaggagtccacccaccccgtgaagcccctggcccagatcgccggaaacagatacgcctccggacctgtgggaaaggccctgagcgacgcatgtatgggcacaatcgcctccttcctgtctaagtaccaggacatcatcatcgaacaccagaaggtggtgaagggcaaccagaagagactggagagcctgcgggagctggccggcaaggaaaacctggaataccctagcgtgaccctgccacctcagcctcacaccaaggagggcgttgatgcctacaacgaagtgatcgcccgggtgcgaatgtgggtgaacctgaacctgtggcagaagctgaagctaagcagagatgatgccaagcctctgctgagactgaagggattcccttcctttcctctggtcgagagacaggccaacgaagtggactggtgggacatggtgtgtaacgtgaagaagctgatcaacgagaaaaaggaggatggcaaggtgttttggcagaatctggctggctacaagagacaggaagccctgagaccatacctgagcagcgaggaagatcggaagaagggaaagaaattcgctcggtaccagctgggcgacctgctgctgcacctggaaaagaagcacggcgaggactggggaaaggtgtacgacgaggcctgggagcggattgacaagaaagtggaaggcctgagcaagcacatcaagctggaagaggaacggagaagcgaggacgcccagagcaaggccgccctgaccgactggctgcgggctaaggccagcttcgtgatcgagggcctgaaggaggccgacaaggacgagttctgcagatgcgagctgaagctgcagaagtggtacggggacctgcggggaaagcccttcgccatcgaagccgagaacagcatcctggacatcagcggcttcagcaagcagtacaactgtgccttcatctggcagaaggacggcgtgaagaagctgaacctgtacctgatcatcaactacttcaagggcggcaagctgcggttcaagaagatcaaacctgaagccttcgaagccaacagattctacaccgtgatcaacaaaaagagcggcgagatcgtgcccatggaggtgaacttcaacttcgacgaccccaacctgatcatcctgcctctggcctttggcaagagacagggcagagaattcatctggaacgacctgctgtccctggaaaccggcagcctgaagctggccaacggaagagtgatcgagaagacactgtacaacagaagaacccggcaggatgagcctgccctgttcgtggccctgaccttcgagcggcgggaggtcctggactcctccaatatcaaaccaatgaacctgatcggcgtggcaagaggcgaaaacatccccgccgtgatcgccctgaccgaccccgagggctgcccactgagccggtttaaggatagcctgggaaacccaacccacatcctgagaatcggcgagagctataaggagaagcagcggaccatccaggccaagaaggaggtggagcagcggagagccggcggctacagccggaagtacgccagcaaagccaagaatctggcagacgatatggtgagaaacaccgctagagatctgctgtactacgccgtgacccaggatgccatgctgatcttcgccaacctgagccggggcttcggccggcagggcaagcggaccttcatggccgagagacagtacacacggatggaggactggctgaccgccaagctggcctacgagggcctgagcaagacctacctgtccaagacactggcccagtacacctccaagacatgcagcaactgtgggtttaccatcaccagcgccgactacgacagggtgctggagaagctgaagaagacagcaacaggctggatgaccacaattaacggcaaggagctgaaggtggagggccagattacctactacaacagatacaagagacagaacgtagtcaaggacctgtccgtcgagctggatagactgagcgaagaatctgtgaacaacgacatctcctcctggacaaagggcagaagcggagaagctctgagcctcctgaagaaaagattctcccatagacccgtgcaggagaagttcgtgtgcctgaactgcggcttcgagacacacgcagccgagcaagccgccctgaacatcgccagatcctggctgttcctgcggagccaggagtacaagaaataccagacaaacaagacaaccggcaacaccgataagagagccttcgtcgagacctggcagtccttttaccggaagaagcttaaggaggtgtggaaacctgccgtgcggtctggcggatctggcggaggctccaccagccccaagaaaaagagaaaagtctaagctgccttctgcggggcttgccttctggccatgcccttcttctctcccttgcacctgtacctcttggtctttgaataaagcctgagtaggaaggctagcaaaaaaaaaaaaaaaaaaaaaaaaaaaaaaaaaaaaaaaaaaaaaaaaaaaaaaaaaaaaaaaaaaaaaaaaaaaaaaaa

SEQ ID NO: 9774 - RNA, 8787 nt, synthetic construct
  source 1..8787: mol_type = other RNA
aggaaataagagagaaaagaagagtaagaagaaatataagagccaccatggcccctaagaagaagcgtaaagtgagccggatgaaccacgaccaggagttcgacccccctaaggtgtaccctcccgtccccgccgagaagagaaagcccatccgggtcctgagcctgttcgatggcatcgccaccggtctgctggtgctgaaggacctgggcatccaggtggataggtacattgcctccgaggtgtgcgaggactccatcaccgtgggaatggtgcgtcatcagggcaagatcatgtacgtgggcgacgtgcggagcgtgacacagaagcatatccaggagtggggccctttcgacctggtgatcggcggcagcccttgcaatgacctgagcatcgtgaacccagcccggaagggcctgtacgagggaaccggcagactgttcttcgagttttacagactgctgcacgacgcccggcctaaggaaggcgacgaccggcccttcttttggctgttcgagaatgtggtggccatgggagtcagcgacaagcgggatattagccggttcctggagagcaaccccgtgatgatcgatgccaaggaagtgagcgccgcccaccgggccagatacttctggggcaatctgcctggcatgaacagacccctggccagcaccgtgaacgacaagctggagctgcaggagtgcctggagcacggccggatcgccaagttcagcaaggtgagaaccatcaccacccgaagcaacagcatcaaacaaggcaaggaccagcactttcctgtgttcatgaacgagaaggaggacatcctgtggtgtaccgagatggagagagtgttcgggttcccagtccactacacagatgtcagcaacatgtctagactggccagacagagactgctgggaagaagctggtccgtccctgtgatcagacacctgttcgcccctctgaaggagtacttcgcctgcgtgagcagcggcaacagcaacgccaacagccggggccccagcttctctagcggcctggtgccactgtccctgagagggagccacatgggccccatggagatctacaaaaccgtgagcgcctggaagcggcagcctgtgcgcgtgctgagcctgtttcggaatatcgataaagtcctgaaaagcctgggattcctggagagcggctctggctccggcggtggcaccctgaagtacgtggaggatgtgacaaacgtggtcagacgggatgtggagaagtggggccccttcgatctggtgtacggcagcacccaacccctgggcagctcttgtgaccggtgccctggctggtacatgtttcagttccaccggatcctgcagtacgccctgccgagacaggagtcccagcggccattcttttggattttcatggacaacttgctgctgaccgaggatgaccaggaaactaccactcggttcctgcagaccgaagccgtgaccctgcaggacgtgagaggccgggactaccagaacgccatgcgggtgtggtccaacatccctggactgaaaagcaagcacgcacctctgacccctaaagaagaggagtacctgcaggcccaggtgcggagcagaagcaagctggacgcccctaaggtggatctgctggtgaagaattgcctcctgcccctgagagagtacttcaagtatttcagccagaatagtctgcccctgggaggcagcggcggcggcaagcccggcaccgtgagcttcgccgacgtggccgtgtacttcagccccgaggagtggggctgcctgaggcccgcccagagggccctgtacagggacgtgatgcaggagacctacggccacctgggcgccctgggcttccccggccccaagcccgccctgatcagctggatggagcaggagagcgaggcctggagccccgccgcccaggaccccgagaagggcgagaggctgggcggcgccaggggcggcccaagcagcggcgcccctcctcccagcggcggcaggcggcccaagcagcggcgcccctcctcccagcggcggcagcccagccggctccccaacctctaccgaggagggcacctctgagtccgccacccccgagagcggccctggcacctccaccgagcccagcgagggcagcgcacccggcagccctgccggcagccccacctccacagaggagggaaccagcaccgagcccagcgaaggcagcgccccaggcaccagcaccgagcctagtgagcaggagattaaacggatcaacaagatcagaagaagacttgtgaaagacagcaacaccaagaaggccggcaagacaggccccatgaaaaccctgctggttagagtgatgacacccgatctgagagagcggctggaaaacctgagaaagaagcctgaaaatatcccccagcccatcagcaatacatctagagccaacctgaataagctgctgaccgattacaccgaaatgaagaaggcgatcctgcatgtgtactgggaagagttccagaaggaccctgtgggcctgatgagccgggtggcccagcctgccagcaagaagatcgatcagaacaagctgaaacctgagatggacgagaagggcaacctgaccaccgccggctttgcctgctctcagtgtggccagcccctgttcgtgtacaagctggagcaggtgtctgagaagggcaaggcttacaccaactacttcggacggtgcaatgtggccgagcacgaaaagctgatcctgctggcccagctgaagcccgagaaggatagcgacgaagccgtgacatatagcctgggaaagtttgggcagagggccctggatttctacagcattcatgtgaccaaggagtccacccaccccgtgaagcccctggcccagatcgccggaaacagatacgcctccggacctgtgggaaaggccctgagcgacgcatgtatgggcacaatcgcctccttcctgtctaagtaccaggacatcatcatcgaacaccagaaggtggtgaagggcaaccagaagagactggagagcctgcgggagctggccggcaaggaaaacctggaataccctagcgtgaccctgccacctcagcctcacaccaaggagggcgttgatgcctacaacgaagtgatcgcccgggtgcgaatgtgggtgaacctgaacctgtggcagaagctgaagctaagcagagatgatgccaagcctctgctgagactgaagggattcccttcctttcctctggtcgagagacaggccaacgaagtggactggtgggacatggtgtgtaacgtgaagaagctgatcaacgagaaaaaggaggatggcaaggtgttttggcagaatctggctggctacaagagacaggaagccctgagaccatacctgagcagcgaggaagatcggaagaagggaaagaaattcgctcggtaccagctgggcgacctgctgctgcacctggaaaagaagcacggcgaggactggggaaaggtgtacgacgaggcctgggagcggattgacaagaaagtggaaggcctgagcaagcacatcaagctggaagaggaacggagaagcgaggacgcccagagcaaggccgccctgaccgactggctgcgggctaaggccagcttcgtgatcgagggcctgaaggaggccgacaaggacgagttctgcagatgcgagctgaagctgcagaagtggtacggggacctgcggggaaagcccttcgccatcgaagccgagaacagcatcctggacatcagcggcttcagcaagcagtacaactgtgccttcatctggcagaaggacggcgtgaagaagctgaacctgtacctgatcatcaactacttcaagggcggcaagctgcggttcaagaagatcaaacctgaagccttcgaagccaacagattctacaccgtgatcaacaaaaagagcggcgagatcgtgcccatggaggtgaacttcaacttcgacgaccccaacctgatcatcctgcctctggcctttggcaagagacagggcagagaattcatctggaacgacctgctgtccctggaaaccggcagcctgaagctggccaacggaagagtgatcgagaagacactgtacaacagaagaacccggcaggatgagcctgccctgttcgtggccctgaccttcgagcggcgggaggtcctggactcctccaatatcaaaccaatgaacctgatcggcgtggcaagaggcgaaaacatccccgccgtgatcgccctgaccgaccccgagggctgcccactgagccggtttaaggatagcctgggaaacccaacccacatcctgagaatcggcgagagctataaggagaagcagcggaccatccaggccaagaaggaggtggagcagcggagagccggcggctacagccggaagtacgccagcaaagccaagaatctggcagacgatatggtgagaaacaccgctagagatctgctgtactacgccgtgacccaggatgccatgctgatcttcgccaacctgagccggggcttcggccggcagggcaagcggaccttcatggccgagagacagtacacacggatggaggactggctgaccgccaagctggcctacgagggcctgagcaagacctacctgtccaagacactggcccagtacacctccaagacatgcagcaactgtgggtttaccatcaccagcgccgactacgacagggtgctggagaagctgaagaagacagcaacaggctggatgaccacaattaacggcaaggagctgaaggtggagggccagattacctactacaacagatacaagagacagaacgtagtcaaggacctgtccgtcgagctggatagactgagcgaagaatctgtgaacaacgacatctcctcctggacaaagggcagaagcggagaagctctgagcctcctgaagaaaagattctcccatagacccgtgcaggagaagttcgtgtgcctgaactgcggcttcgagacacacgcagccgagcaagccgccctgaacatcgccagatcctggctgttcctgcggagccaggagtacaagaaataccagacaaacaagacaaccggcaacaccgataagagagccttcgtcgagacctggcagtccttttaccggaagaagcttaaggaggtgtggaaacctgccgtgcggtctggcggatctggcggaggctccaccagccccaagaaaaagagaaaagtctaagctgccttctgcggggcttgccttctggccatgcccttcttctctcccttgcacctgtacctcttggtctttgaataaagcctgagtaggaaggctagcaaaaaaaaaaaaaaaaaaaaaaaaaaaaaaaaaaaaaaaaaaaaaaaaaaaaaaaaaaaaaaaaaaaaaaaaaaaaaaaagcccagccggctccccaacctctaccgaggagggcacctctgagtccgccacccccgagagcggccctggcacctccaccgagcccagcgagggcagcgcacccggcagccctgccggcagccccacctccacagaggagggaaccagcaccgagcccagcgaaggcagcgccccaggcaccagcaccgagcctagtgagcaggagattaaacggatcaacaagatcagaagaagacttgtgaaagacagcaacaccaagaaggccggcaagacaggccccatgaaaaccctgctggttagagtgatgacacccgatctgagagagcggctggaaaacctgagaaagaagcctgaaaatatcccccagcccatcagcaatacatctagagccaacctgaataagctgctgaccgattacaccgaaatgaagaaggcgatcctgcatgtgtactgggaagagttccagaaggaccctgtgggcctgatgagccgggtggcccagcctgccagcaagaagatcgatcagaacaagctgaaacctgagatggacgagaagggcaacctgaccaccgccggctttgcctgctctcagtgtggccagcccctgttcgtgtacaagctggagcaggtgtctgagaagggcaaggcttacaccaactacttcggacggtgcaatgtggccgagcacgaaaagctgatcctgctggcccagctgaagcccgagaaggatagcgacgaagccgtgacatatagcctgggaaagtttgggcagagggccctggatttctacagcattcatgtgaccaaggagtccacccaccccgtgaagcccctggcccagatcgccggaaacagatacgcctccggacctgtgggaaaggccctgagcgacgcatgtatgggcacaatcgcctccttcctgtctaagtaccaggacatcatcatcgaacaccagaaggtggtgaagggcaaccagaagagactggagagcctgcgggagctggccggcaaggaaaacctggaataccctagcgtgaccctgccacctcagcctcacaccaaggagggcgttgatgcctacaacgaagtgatcgcccgggtgcgaatgtgggtgaacctgaacctgtggcagaagctgaagctaagcagagatgatgccaagcctctgctgagactgaagggattcccttcctttcctctggtcgagagacaggccaacgaagtggactggtgggacatggtgtgtaacgtgaagaagctgatcaacgagaaaaaggaggatggcaaggtgttttggcagaatctggctggctacaagagacaggaagccctgagaccatacctgagcagcgaggaagatcggaagaagggaaagaaattcgctcggtaccagctgggcgacctgctgctgcacctggaaaagaagcacggcgaggactggggaaaggtgtacgacgaggcctgggagcggattgacaagaaagtggaaggcctgagcaagcacatcaagctggaagaggaacggagaagcgaggacgcccagagcaaggccgccctgaccgactggctgcgggctaaggccagcttcgtgatcgagggcctgaaggaggccgacaaggacgagttctgcagatgcgagctgaagctgcagaagtggtacggggacctgcggggaaagcccttcgccatcgaagccgagaacagcatcctggacatcagcggcttcagcaagcagtacaactgtgccttcatctggcagaaggacggcgtgaagaagctgaacctgtacctgatcatcaactacttcaagggcggcaagctgcggttcaagaagatcaaacctgaagccttcgaagccaacagattctacaccgtgatcaacaaaaagagcggcgagatcgtgcccatggaggtgaacttcaacttcgacgaccccaacctgatcatcctgcctctggcctttggcaagagacagggcagagaattcatctggaacgacctgctgtccctggaaaccggcagcctgaagctggccaacggaagagtgatcgagaagacactgtacaacagaagaacccggcaggatgagcctgccctgttcgtggccctgaccttcgagcggcgggaggtcctggactcctccaatatcaaaccaatgaacctgatcggcgtggcaagaggcgaaaacatccccgccgtgatcgccctgaccgaccccgagggctgcccactgagccggtttaaggatagcctgggaaacccaacccacatcctgagaatcggcgagagctataaggagaagcagcggaccatccaggccaagaaggaggtggagcagcggagagccggcggctacagccggaagtacgccagcaaagccaagaatctggcagacgatatggtgagaaacaccgctagagatctgctgtactacgccgtgacccaggatgccatgctgatcttcgccaacctgagccggggcttcggccggcagggcaagcggaccttcatggccgagagacagtacacacggatggaggactggctgaccgccaagctggcctacgagggcctgagcaagacctacctgtccaagacactggcccagtacacctccaagacatgcagcaactgtgggtttaccatcaccagcgccgactacgacagggtgctggagaagctgaagaagacagcaacaggctggatgaccacaattaacggcaaggagctgaaggtggagggccagattacctactacaacagatacaagagacagaacgtagtcaaggacctgtccgtcgagctggatagactgagcgaagaatctgtgaacaacgacatctcctcctggacaaagggcagaagcggagaagctctgagcctcctgaagaaaagattctcccatagacccgtgcaggagaagttcgtgtgcctgaactgcggcttcgagacacacgcagccgagcaagccgccctgaacatcgccagatcctggctgttcctgcggagccaggagtacaagaaataccagacaaacaagacaaccggcaacaccgataagagagccttcgtcgagacctggcagtccttttaccggaagaagcttaaggaggtgtggaaacctgccgtgcggtctggcggatctggcggaggctccaccagccccaagaaaaagagaaaagtctaagctgccttctgcggggcttgccttctggccatgcccttcttctctcccttgcacctgtacctcttggtctttgaataaagcctgagtaggaaggctagcaaaaaaaaaaaaaaaaaaaaaaaaaaaaaaaaaaaaaaaaaaaaaaaaaaaaaaaaaaaaaaaaaaaaaaaaaaaaaaaa

SEQ ID NO: 9775 - RNA, 8787 nt, synthetic construct
  source 1..8787: mol_type = other RNA
aggaaataagagagaaaagaagagtaagaagaaatataagagccaccatggcccctaagaagaagcgtaaagtgagccggatgaaccacgaccaggagttcgacccccctaaggtgtaccctcccgtccccgccgagaagagaaagcccatccgggtcctgagcctgttcgatggcatcgccaccggtctgctggtgctgaaggacctgggcatccaggtggataggtacattgcctccgaggtgtgcgaggactccatcaccgtgggaatggtgcgtcatcagggcaagatcatgtacgtgggcgacgtgcggagcgtgacacagaagcatatccaggagtggggccctttcgacctggtgatcggcggcagcccttgcaatgacctgagcatcgtgaacccagcccggaagggcctgtacgagggaaccggcagactgttcttcgagttttacagactgctgcacgacgcccggcctaaggaaggcgacgaccggcccttcttttggctgttcgagaatgtggtggccatgggagtcagcgacaagcgggatattagccggttcctggagagcaaccccgtgatgatcgatgccaaggaagtgagcgccgcccaccgggccagatacttctggggcaatctgcctggcatgaacagacccctggccagcaccgtgaacgacaagctggagctgcaggagtgcctggagcacggccggatcgccaagttcagcaaggtgagaaccatcaccacccgaagcaacagcatcaaacaaggcaaggaccagcactttcctgtgttcatgaacgagaaggaggacatcctgtggtgtaccgagatggagagagtgttcgggttcccagtccactacacagatgtcagcaacatgtctagactggccagacagagactgctgggaagaagctggtccgtccctgtgatcagacacctgttcgcccctctgaaggagtacttcgcctgcgtgagcagcggcaacagcaacgccaacagccggggccccagcttctctagcggcctggtgccactgtccctgagagggagccacatgggccccatggagatctacaaaaccgtgagcgcctggaagcggcagcctgtgcgcgtgctgagcctgtttcggaatatcgataaagtcctgaaaagcctgggattcctggagagcggctctggctccggcggtggcaccctgaagtacgtggaggatgtgacaaacgtggtcagacgggatgtggagaagtggggccccttcgatctggtgtacggcagcacccaacccctgggcagctcttgtgaccggtgccctggctggtacatgtttcagttccaccggatcctgcagtacgccctgccgagacaggagtcccagcggccattcttttggattttcatggacaacttgctgctgaccgaggatgaccaggaaactaccactcggttcctgcagaccgaagccgtgaccctgcaggacgtgagaggccgggactaccagaacgccatgcgggtgtggtccaacatccctggactgaaaagcaagcacgcacctctgacccctaaagaagaggagtacctgcaggcccaggtgcggagcagaagcaagctggacgcccctaaggtggatctgctggtgaagaattgcctcctgcccctgagagagtacttcaagtatttcagccagaatagtctgcccctgggaggcagcggcggcggcacccccgacgtggtgaccttcgaggacgtggccgtgtgcttcagcagcggcgagtggcagtgcctgaccagggcccagaggcacctgtacaccgacgtgatgctggagaactacggcaacatgctgagcgccggcctggcctgccccaagccccccctgatcagccacctggagcagggcgccgtgccctgcgccgaggacctgcaggactggggcttcctgacctgcagcttccccgtgagcggcggcccaagcagcggcgcccctcctcccagcggcggcaggcggcccaagcagcggcgcccctcctcccagcggcggcagcccagccggctccccaacctctaccgaggagggcacctctgagtccgccacccccgagagcggccctggcacctccaccgagcccagcgagggcagcgcacccggcagccctgccggcagccccacctccacagaggagggaaccagcaccgagcccagcgaaggcagcgccccaggcaccagcaccgagcctagtgagcaggagattaaacggatcaacaagatcagaagaagacttgtgaaagacagcaacaccaagaaggccggcaagacaggccccatgaaaaccctgctggttagagtgatgacacccgatctgagagagcggctggaaaacctgagaaagaagcctgaaaatatcccccagcccatcagcaatacatctagagccaacctgaataagctgctgaccgattacaccgaaatgaagaaggcgatcctgcatgtgtactgggaagagttccagaaggaccctgtgggcctgatgagccgggtggcccagcctgccagcaagaagatcgatcagaacaagctgaaacctgagatggacgagaagggcaacctgaccaccgccggctttgcctgctctcagtgtggccagcccctgttcgtgtacaagctggagcaggtgtctgagaagggcaaggcttacaccaactacttcggacggtgcaatgtggccgagcacgaaaagctgatcctgctggcccagctgaagcccgagaaggatagcgacgaagccgtgacatatagcctgggaaagtttgggcagagggccctggatttctacagcattcatgtgaccaaggagtccacccaccccgtgaagcccctggcccagatcgccggaaacagatacgcctccggacctgtgggaaaggccctgagcgacgcatgtatgggcacaatcgcctccttcctgtctaagtaccaggacatcatcatcgaacaccagaaggtggtgaagggcaaccagaagagactggagagcctgcgggagctggccggcaaggaaaacctggaataccctagcgtgaccctgccacctcagcctcacaccaaggagggcgttgatgcctacaacgaagtgatcgcccgggtgcgaatgtgggtgaacctgaacctgtggcagaagctgaagctaagcagagatgatgccaagcctctgctgagactgaagggattcccttcctttcctctggtcgagagacaggccaacgaagtggactggtgggacatggtgtgtaacgtgaagaagctgatcaacgagaaaaaggaggatggcaaggtgttttggcagaatctggctggctacaagagacaggaagccctgagaccatacctgagcagcgaggaagatcggaagaagggaaagaaattcgctcggtaccagctgggcgacctgctgctgcacctggaaaagaagcacggcgaggactggggaaaggtgtacgacgaggcctgggagcggattgacaagaaagtggaaggcctgagcaagcacatcaagctggaagaggaacggagaagcgaggacgcccagagcaaggccgccctgaccgactggctgcgggctaaggccagcttcgtgatcgagggcctgaaggaggccgacaaggacgagttctgcagatgcgagctgaagctgcagaagtggtacggggacctgcggggaaagcccttcgccatcgaagccgagaacagcatcctggacatcagcggcttcagcaagcagtacaactgtgccttcatctggcagaaggacggcgtgaagaagctgaacctgtacctgatcatcaactacttcaagggcggcaagctgcggttcaagaagatcaaacctgaagccttcgaagccaacagattctacaccgtgatcaacaaaaagagcggcgagatcgtgcccatggaggtgaacttcaacttcgacgaccccaacctgatcatcctgcctctggcctttggcaagagacagggcagagaattcatctggaacgacctgctgtccctggaaaccggcagcctgaagctggccaacggaagagtgatcgagaagacactgtacaacagaagaacccggcaggatgagcctgccctgttcgtggccctgaccttcgagcggcgggaggtcctggactcctccaatatcaaaccaatgaacctgatcggcgtggcaagaggcgaaaacatccccgccgtgatcgccctgaccgaccccgagggctgcccactgagccggtttaaggatagcctgggaaacccaacccacatcctgagaatcggcgagagctataaggagaagcagcggaccatccaggccaagaaggaggtggagcagcggagagccggcggctacagccggaagtacgccagcaaagccaagaatctggcagacgatatggtgagaaacaccgctagagatctgctgtactacgccgtgacccaggatgccatgctgatcttcgccaacctgagccggggcttcggccggcagggcaagcggaccttcatggccgagagacagtacacacggatggaggactggctgaccgccaagctggcctacgagggcctgagcaagacctacctgtccaagacactggcccagtacacctccaagacatgcagcaactgtgggtttaccatcaccagcgccgactacgacagggtgctggagaagctgaagaagacagcaacaggctggatgaccacaattaacggcaaggagctgaaggtggagggccagattacctactacaacagatacaagagacagaacgtagtcaaggacctgtccgtcgagctggatagactgagcgaagaatctgtgaacaacgacatctcctcctggacaaagggcagaagcggagaagctctgagcctcctgaagaaaagattctcccatagacccgtgcaggagaagttcgtgtgcctgaactgcggcttcgagacacacgcagccgagcaagccgccctgaacatcgccagatcctggctgttcctgcggagccaggagtacaagaaataccagacaaacaagacaaccggcaacaccgataagagagccttcgtcgagacctggcagtccttttaccggaagaagcttaaggaggtgtggaaacctgccgtgcggtctggcggatctggcggaggctccaccagccccaagaaaaagagaaaagtctaagctgccttctgcggggcttgccttctggccatgcccttcttctctcccttgcacctgtacctcttggtctttgaataaagcctgagtaggaaggctagcaaaaaaaaaaaaaaaaaaaaaaaaaaaaaaaaaaaaaaaaaaaaaaaaaaaaaaaaaaaaaaaaaaaaaaaaaaaaaaaagcccagccggctccccaacctctaccgaggagggcacctctgagtccgccacccccgagagcggccctggcacctccaccgagcccagcgagggcagcgcacccggcagccctgccggcagccccacctccacagaggagggaaccagcaccgagcccagcgaaggcagcgccccaggcaccagcaccgagcctagtgagcaggagattaaacggatcaacaagatcagaagaagacttgtgaaagacagcaacaccaagaaggccggcaagacaggccccatgaaaaccctgctggttagagtgatgacacccgatctgagagagcggctggaaaacctgagaaagaagcctgaaaatatcccccagcccatcagcaatacatctagagccaacctgaataagctgctgaccgattacaccgaaatgaagaaggcgatcctgcatgtgtactgggaagagttccagaaggaccctgtgggcctgatgagccgggtggcccagcctgccagcaagaagatcgatcagaacaagctgaaacctgagatggacgagaagggcaacctgaccaccgccggctttgcctgctctcagtgtggccagcccctgttcgtgtacaagctggagcaggtgtctgagaagggcaaggcttacaccaactacttcggacggtgcaatgtggccgagcacgaaaagctgatcctgctggcccagctgaagcccgagaaggatagcgacgaagccgtgacatatagcctgggaaagtttgggcagagggccctggatttctacagcattcatgtgaccaaggagtccacccaccccgtgaagcccctggcccagatcgccggaaacagatacgcctccggacctgtgggaaaggccctgagcgacgcatgtatgggcacaatcgcctccttcctgtctaagtaccaggacatcatcatcgaacaccagaaggtggtgaagggcaaccagaagagactggagagcctgcgggagctggccggcaaggaaaacctggaataccctagcgtgaccctgccacctcagcctcacaccaaggagggcgttgatgcctacaacgaagtgatcgcccgggtgcgaatgtgggtgaacctgaacctgtggcagaagctgaagctaagcagagatgatgccaagcctctgctgagactgaagggattcccttcctttcctctggtcgagagacaggccaacgaagtggactggtgggacatggtgtgtaacgtgaagaagctgatcaacgagaaaaaggaggatggcaaggtgttttggcagaatctggctggctacaagagacaggaagccctgagaccatacctgagcagcgaggaagatcggaagaagggaaagaaattcgctcggtaccagctgggcgacctgctgctgcacctggaaaagaagcacggcgaggactggggaaaggtgtacgacgaggcctgggagcggattgacaagaaagtggaaggcctgagcaagcacatcaagctggaagaggaacggagaagcgaggacgcccagagcaaggccgccctgaccgactggctgcgggctaaggccagcttcgtgatcgagggcctgaaggaggccgacaaggacgagttctgcagatgcgagctgaagctgcagaagtggtacggggacctgcggggaaagcccttcgccatcgaagccgagaacagcatcctggacatcagcggcttcagcaagcagtacaactgtgccttcatctggcagaaggacggcgtgaagaagctgaacctgtacctgatcatcaactacttcaagggcggcaagctgcggttcaagaagatcaaacctgaagccttcgaagccaacagattctacaccgtgatcaacaaaaagagcggcgagatcgtgcccatggaggtgaacttcaacttcgacgaccccaacctgatcatcctgcctctggcctttggcaagagacagggcagagaattcatctggaacgacctgctgtccctggaaaccggcagcctgaagctggccaacggaagagtgatcgagaagacactgtacaacagaagaacccggcaggatgagcctgccctgttcgtggccctgaccttcgagcggcgggaggtcctggactcctccaatatcaaaccaatgaacctgatcggcgtggcaagaggcgaaaacatccccgccgtgatcgccctgaccgaccccgagggctgcccactgagccggtttaaggatagcctgggaaacccaacccacatcctgagaatcggcgagagctataaggagaagcagcggaccatccaggccaagaaggaggtggagcagcggagagccggcggctacagccggaagtacgccagcaaagccaagaatctggcagacgatatggtgagaaacaccgctagagatctgctgtactacgccgtgacccaggatgccatgctgatcttcgccaacctgagccggggcttcggccggcagggcaagcggaccttcatggccgagagacagtacacacggatggaggactggctgaccgccaagctggcctacgagggcctgagcaagacctacctgtccaagacactggcccagtacacctccaagacatgcagcaactgtgggtttaccatcaccagcgccgactacgacagggtgctggagaagctgaagaagacagcaacaggctggatgaccacaattaacggcaaggagctgaaggtggagggccagattacctactacaacagatacaagagacagaacgtagtcaaggacctgtccgtcgagctggatagactgagcgaagaatctgtgaacaacgacatctcctcctggacaaagggcagaagcggagaagctctgagcctcctgaagaaaagattctcccatagacccgtgcaggagaagttcgtgtgcctgaactgcggcttcgagacacacgcagccgagcaagccgccctgaacatcgccagatcctggctgttcctgcggagccaggagtacaagaaataccagacaaacaagacaaccggcaacaccgataagagagccttcgtcgagacctggcagtccttttaccggaagaagcttaaggaggtgtggaaacctgccgtgcggtctggcggatctggcggaggctccaccagccccaagaaaaagagaaaagtctaagctgccttctgcggggcttgccttctggccatgcccttcttctctcccttgcacctgtacctcttggtctttgaataaagcctgagtaggaaggctagcaaaaaaaaaaaaaaaaaaaaaaaaaaaaaaaaaaaaaaaaaaaaaaaaaaaaaaaaaaaaaaaaaaaaaaaaaaaaaaaa

SEQ ID NO: 9776 - RNA, 8787 nt, synthetic construct
  source 1..8787: mol_type = other RNA
aggaaataagagagaaaagaagagtaagaagaaatataagagccaccatggcccctaagaagaagcgtaaagtgagccggatgaaccacgaccaggagttcgacccccctaaggtgtaccctcccgtccccgccgagaagagaaagcccatccgggtcctgagcctgttcgatggcatcgccaccggtctgctggtgctgaaggacctgggcatccaggtggataggtacattgcctccgaggtgtgcgaggactccatcaccgtgggaatggtgcgtcatcagggcaagatcatgtacgtgggcgacgtgcggagcgtgacacagaagcatatccaggagtggggccctttcgacctggtgatcggcggcagcccttgcaatgacctgagcatcgtgaacccagcccggaagggcctgtacgagggaaccggcagactgttcttcgagttttacagactgctgcacgacgcccggcctaaggaaggcgacgaccggcccttcttttggctgttcgagaatgtggtggccatgggagtcagcgacaagcgggatattagccggttcctggagagcaaccccgtgatgatcgatgccaaggaagtgagcgccgcccaccgggccagatacttctggggcaatctgcctggcatgaacagacccctggccagcaccgtgaacgacaagctggagctgcaggagtgcctggagcacggccggatcgccaagttcagcaaggtgagaaccatcaccacccgaagcaacagcatcaaacaaggcaaggaccagcactttcctgtgttcatgaacgagaaggaggacatcctgtggtgtaccgagatggagagagtgttcgggttcccagtccactacacagatgtcagcaacatgtctagactggccagacagagactgctgggaagaagctggtccgtccctgtgatcagacacctgttcgcccctctgaaggagtacttcgcctgcgtgagcagcggcaacagcaacgccaacagccggggccccagcttctctagcggcctggtgccactgtccctgagagggagccacatgggccccatggagatctacaaaaccgtgagcgcctggaagcggcagcctgtgcgcgtgctgagcctgtttcggaatatcgataaagtcctgaaaagcctgggattcctggagagcggctctggctccggcggtggcaccctgaagtacgtggaggatgtgacaaacgtggtcagacgggatgtggagaagtggggccccttcgatctggtgtacggcagcacccaacccctgggcagctcttgtgaccggtgccctggctggtacatgtttcagttccaccggatcctgcagtacgccctgccgagacaggagtcccagcggccattcttttggattttcatggacaacttgctgctgaccgaggatgaccaggaaactaccactcggttcctgcagaccgaagccgtgaccctgcaggacgtgagaggccgggactaccagaacgccatgcgggtgtggtccaacatccctggactgaaaagcaagcacgcacctctgacccctaaagaagaggagtacctgcaggcccaggtgcggagcagaagcaagctggacgcccctaaggtggatctgctggtgaagaattgcctcctgcccctgagagagtacttcaagtatttcagccagaatagtctgcccctgggaggcagcggcggcggcctgctgaccttcgaggacgtggccgtgagcttcagcgaggaggagtggaagctgctggaccccacccagaagatcctgtacaacgacgtgatgcaggagaactacgagaccgtgatcagcctgggcctgaagctgaagaacgacaccggcaacgaccagcccatcagcctgagcgccctggagatccaggccagcggctgcaaggtgctgaggaaggccaggatgaaggtggcccagaagaccggcggcccaagcagcggcgcccctcctcccagcggcggcaggcggcccaagcagcggcgcccctcctcccagcggcggcagcccagccggctccccaacctctaccgaggagggcacctctgagtccgccacccccgagagcggccctggcacctccaccgagcccagcgagggcagcgcacccggcagccctgccggcagccccacctccacagaggagggaaccagcaccgagcccagcgaaggcagcgccccaggcaccagcaccgagcctagtgagcaggagattaaacggatcaacaagatcagaagaagacttgtgaaagacagcaacaccaagaaggccggcaagacaggccccatgaaaaccctgctggttagagtgatgacacccgatctgagagagcggctggaaaacctgagaaagaagcctgaaaatatcccccagcccatcagcaatacatctagagccaacctgaataagctgctgaccgattacaccgaaatgaagaaggcgatcctgcatgtgtactgggaagagttccagaaggaccctgtgggcctgatgagccgggtggcccagcctgccagcaagaagatcgatcagaacaagctgaaacctgagatggacgagaagggcaacctgaccaccgccggctttgcctgctctcagtgtggccagcccctgttcgtgtacaagctggagcaggtgtctgagaagggcaaggcttacaccaactacttcggacggtgcaatgtggccgagcacgaaaagctgatcctgctggcccagctgaagcccgagaaggatagcgacgaagccgtgacatatagcctgggaaagtttgggcagagggccctggatttctacagcattcatgtgaccaaggagtccacccaccccgtgaagcccctggcccagatcgccggaaacagatacgcctccggacctgtgggaaaggccctgagcgacgcatgtatgggcacaatcgcctccttcctgtctaagtaccaggacatcatcatcgaacaccagaaggtggtgaagggcaaccagaagagactggagagcctgcgggagctggccggcaaggaaaacctggaataccctagcgtgaccctgccacctcagcctcacaccaaggagggcgttgatgcctacaacgaagtgatcgcccgggtgcgaatgtgggtgaacctgaacctgtggcagaagctgaagctaagcagagatgatgccaagcctctgctgagactgaagggattcccttcctttcctctggtcgagagacaggccaacgaagtggactggtgggacatggtgtgtaacgtgaagaagctgatcaacgagaaaaaggaggatggcaaggtgttttggcagaatctggctggctacaagagacaggaagccctgagaccatacctgagcagcgaggaagatcggaagaagggaaagaaattcgctcggtaccagctgggcgacctgctgctgcacctggaaaagaagcacggcgaggactggggaaaggtgtacgacgaggcctgggagcggattgacaagaaagtggaaggcctgagcaagcacatcaagctggaagaggaacggagaagcgaggacgcccagagcaaggccgccctgaccgactggctgcgggctaaggccagcttcgtgatcgagggcctgaaggaggccgacaaggacgagttctgcagatgcgagctgaagctgcagaagtggtacggggacctgcggggaaagcccttcgccatcgaagccgagaacagcatcctggacatcagcggcttcagcaagcagtacaactgtgccttcatctggcagaaggacggcgtgaagaagctgaacctgtacctgatcatcaactacttcaagggcggcaagctgcggttcaagaagatcaaacctgaagccttcgaagccaacagattctacaccgtgatcaacaaaaagagcggcgagatcgtgcccatggaggtgaacttcaacttcgacgaccccaacctgatcatcctgcctctggcctttggcaagagacagggcagagaattcatctggaacgacctgctgtccctggaaaccggcagcctgaagctggccaacggaagagtgatcgagaagacactgtacaacagaagaacccggcaggatgagcctgccctgttcgtggccctgaccttcgagcggcgggaggtcctggactcctccaatatcaaaccaatgaacctgatcggcgtggcaagaggcgaaaacatccccgccgtgatcgccctgaccgaccccgagggctgcccactgagccggtttaaggatagcctgggaaacccaacccacatcctgagaatcggcgagagctataaggagaagcagcggaccatccaggccaagaaggaggtggagcagcggagagccggcggctacagccggaagtacgccagcaaagccaagaatctggcagacgatatggtgagaaacaccgctagagatctgctgtactacgccgtgacccaggatgccatgctgatcttcgccaacctgagccggggcttcggccggcagggcaagcggaccttcatggccgagagacagtacacacggatggaggactggctgaccgccaagctggcctacgagggcctgagcaagacctacctgtccaagacactggcccagtacacctccaagacatgcagcaactgtgggtttaccatcaccagcgccgactacgacagggtgctggagaagctgaagaagacagcaacaggctggatgaccacaattaacggcaaggagctgaaggtggagggccagattacctactacaacagatacaagagacagaacgtagtcaaggacctgtccgtcgagctggatagactgagcgaagaatctgtgaacaacgacatctcctcctggacaaagggcagaagcggagaagctctgagcctcctgaagaaaagattctcccatagacccgtgcaggagaagttcgtgtgcctgaactgcggcttcgagacacacgcagccgagcaagccgccctgaacatcgccagatcctggctgttcctgcggagccaggagtacaagaaataccagacaaacaagacaaccggcaacaccgataagagagccttcgtcgagacctggcagtccttttaccggaagaagcttaaggaggtgtggaaacctgccgtgcggtctggcggatctggcggaggctccaccagccccaagaaaaagagaaaagtctaagctgccttctgcggggcttgccttctggccatgcccttcttctctcccttgcacctgtacctcttggtctttgaataaagcctgagtaggaaggctagcaaaaaaaaaaaaaaaaaaaaaaaaaaaaaaaaaaaaaaaaaaaaaaaaaaaaaaaaaaaaaaaaaaaaaaaaaaaaaaaagcccagccggctccccaacctctaccgaggagggcacctctgagtccgccacccccgagagcggccctggcacctccaccgagcccagcgagggcagcgcacccggcagccctgccggcagccccacctccacagaggagggaaccagcaccgagcccagcgaaggcagcgccccaggcaccagcaccgagcctagtgagcaggagattaaacggatcaacaagatcagaagaagacttgtgaaagacagcaacaccaagaaggccggcaagacaggccccatgaaaaccctgctggttagagtgatgacacccgatctgagagagcggctggaaaacctgagaaagaagcctgaaaatatcccccagcccatcagcaatacatctagagccaacctgaataagctgctgaccgattacaccgaaatgaagaaggcgatcctgcatgtgtactgggaagagttccagaaggaccctgtgggcctgatgagccgggtggcccagcctgccagcaagaagatcgatcagaacaagctgaaacctgagatggacgagaagggcaacctgaccaccgccggctttgcctgctctcagtgtggccagcccctgttcgtgtacaagctggagcaggtgtctgagaagggcaaggcttacaccaactacttcggacggtgcaatgtggccgagcacgaaaagctgatcctgctggcccagctgaagcccgagaaggatagcgacgaagccgtgacatatagcctgggaaagtttgggcagagggccctggatttctacagcattcatgtgaccaaggagtccacccaccccgtgaagcccctggcccagatcgccggaaacagatacgcctccggacctgtgggaaaggccctgagcgacgcatgtatgggcacaatcgcctccttcctgtctaagtaccaggacatcatcatcgaacaccagaaggtggtgaagggcaaccagaagagactggagagcctgcgggagctggccggcaaggaaaacctggaataccctagcgtgaccctgccacctcagcctcacaccaaggagggcgttgatgcctacaacgaagtgatcgcccgggtgcgaatgtgggtgaacctgaacctgtggcagaagctgaagctaagcagagatgatgccaagcctctgctgagactgaagggattcccttcctttcctctggtcgagagacaggccaacgaagtggactggtgggacatggtgtgtaacgtgaagaagctgatcaacgagaaaaaggaggatggcaaggtgttttggcagaatctggctggctacaagagacaggaagccctgagaccatacctgagcagcgaggaagatcggaagaagggaaagaaattcgctcggtaccagctgggcgacctgctgctgcacctggaaaagaagcacggcgaggactggggaaaggtgtacgacgaggcctgggagcggattgacaagaaagtggaaggcctgagcaagcacatcaagctggaagaggaacggagaagcgaggacgcccagagcaaggccgccctgaccgactggctgcgggctaaggccagcttcgtgatcgagggcctgaaggaggccgacaaggacgagttctgcagatgcgagctgaagctgcagaagtggtacggggacctgcggggaaagcccttcgccatcgaagccgagaacagcatcctggacatcagcggcttcagcaagcagtacaactgtgccttcatctggcagaaggacggcgtgaagaagctgaacctgtacctgatcatcaactacttcaagggcggcaagctgcggttcaagaagatcaaacctgaagccttcgaagccaacagattctacaccgtgatcaacaaaaagagcggcgagatcgtgcccatggaggtgaacttcaacttcgacgaccccaacctgatcatcctgcctctggcctttggcaagagacagggcagagaattcatctggaacgacctgctgtccctggaaaccggcagcctgaagctggccaacggaagagtgatcgagaagacactgtacaacagaagaacccggcaggatgagcctgccctgttcgtggccctgaccttcgagcggcgggaggtcctggactcctccaatatcaaaccaatgaacctgatcggcgtggcaagaggcgaaaacatccccgccgtgatcgccctgaccgaccccgagggctgcccactgagccggtttaaggatagcctgggaaacccaacccacatcctgagaatcggcgagagctataaggagaagcagcggaccatccaggccaagaaggaggtggagcagcggagagccggcggctacagccggaagtacgccagcaaagccaagaatctggcagacgatatggtgagaaacaccgctagagatctgctgtactacgccgtgacccaggatgccatgctgatcttcgccaacctgagccggggcttcggccggcagggcaagcggaccttcatggccgagagacagtacacacggatggaggactggctgaccgccaagctggcctacgagggcctgagcaagacctacctgtccaagacactggcccagtacacctccaagacatgcagcaactgtgggtttaccatcaccagcgccgactacgacagggtgctggagaagctgaagaagacagcaacaggctggatgaccacaattaacggcaaggagctgaaggtggagggccagattacctactacaacagatacaagagacagaacgtagtcaaggacctgtccgtcgagctggatagactgagcgaagaatctgtgaacaacgacatctcctcctggacaaagggcagaagcggagaagctctgagcctcctgaagaaaagattctcccatagacccgtgcaggagaagttcgtgtgcctgaactgcggcttcgagacacacgcagccgagcaagccgccctgaacatcgccagatcctggctgttcctgcggagccaggagtacaagaaataccagacaaacaagacaaccggcaacaccgataagagagccttcgtcgagacctggcagtccttttaccggaagaagcttaaggaggtgtggaaacctgccgtgcggtctggcggatctggcggaggctccaccagccccaagaaaaagagaaaagtctaagctgccttctgcggggcttgccttctggccatgcccttcttctctcccttgcacctgtacctcttggtctttgaataaagcctgagtaggaaggctagcaaaaaaaaaaaaaaaaaaaaaaaaaaaaaaaaaaaaaaaaaaaaaaaaaaaaaaaaaaaaaaaaaaaaaaaaaaaaaaaa

SEQ ID NO: 9777 - RNA, 8787 nt, synthetic construct
  source 1..8787: mol_type = other RNA
aggaaataagagagaaaagaagagtaagaagaaatataagagccaccatggcccctaagaagaagcgtaaagtgagccggatgaaccacgaccaggagttcgacccccctaaggtgtaccctcccgtccccgccgagaagagaaagcccatccgggtcctgagcctgttcgatggcatcgccaccggtctgctggtgctgaaggacctgggcatccaggtggataggtacattgcctccgaggtgtgcgaggactccatcaccgtgggaatggtgcgtcatcagggcaagatcatgtacgtgggcgacgtgcggagcgtgacacagaagcatatccaggagtggggccctttcgacctggtgatcggcggcagcccttgcaatgacctgagcatcgtgaacccagcccggaagggcctgtacgagggaaccggcagactgttcttcgagttttacagactgctgcacgacgcccggcctaaggaaggcgacgaccggcccttcttttggctgttcgagaatgtggtggccatgggagtcagcgacaagcgggatattagccggttcctggagagcaaccccgtgatgatcgatgccaaggaagtgagcgccgcccaccgggccagatacttctggggcaatctgcctggcatgaacagacccctggccagcaccgtgaacgacaagctggagctgcaggagtgcctggagcacggccggatcgccaagttcagcaaggtgagaaccatcaccacccgaagcaacagcatcaaacaaggcaaggaccagcactttcctgtgttcatgaacgagaaggaggacatcctgtggtgtaccgagatggagagagtgttcgggttcccagtccactacacagatgtcagcaacatgtctagactggccagacagagactgctgggaagaagctggtccgtccctgtgatcagacacctgttcgcccctctgaaggagtacttcgcctgcgtgagcagcggcaacagcaacgccaacagccggggccccagcttctctagcggcctggtgccactgtccctgagagggagccacatgggccccatggagatctacaaaaccgtgagcgcctggaagcggcagcctgtgcgcgtgctgagcctgtttcggaatatcgataaagtcctgaaaagcctgggattcctggagagcggctctggctccggcggtggcaccctgaagtacgtggaggatgtgacaaacgtggtcagacgggatgtggagaagtggggccccttcgatctggtgtacggcagcacccaacccctgggcagctcttgtgaccggtgccctggctggtacatgtttcagttccaccggatcctgcagtacgccctgccgagacaggagtcccagcggccattcttttggattttcatggacaacttgctgctgaccgaggatgaccaggaaactaccactcggttcctgcagaccgaagccgtgaccctgcaggacgtgagaggccgggactaccagaacgccatgcgggtgtggtccaacatccctggactgaaaagcaagcacgcacctctgacccctaaagaagaggagtacctgcaggcccaggtgcggagcagaagcaagctggacgcccctaaggtggatctgctggtgaagaattgcctcctgcccctgagagagtacttcaagtatttcagccagaatagtctgcccctgggaggcagcggcggcggccaggccagcgtgaccttcagggacgtggccgtggacttcaccggcgaggagtggaggtgcctggagcccgcccagagggccctgtacagggacgtgatgctggagacctacgagaacctggtgttcctgggcctgagcgtgcccatcagcaagctggacctgatcttcctgctggagaggggcggcgccctgagcaggcccatgggcagggtgcccagcgacagctgccccgacagcttcatcggcggcccaagcagcggcgcccctcctcccagcggcggcaggcggcccaagcagcggcgcccctcctcccagcggcggcagcccagccggctccccaacctctaccgaggagggcacctctgagtccgccacccccgagagcggccctggcacctccaccgagcccagcgagggcagcgcacccggcagccctgccggcagccccacctccacagaggagggaaccagcaccgagcccagcgaaggcagcgccccaggcaccagcaccgagcctagtgagcaggagattaaacggatcaacaagatcagaagaagacttgtgaaagacagcaacaccaagaaggccggcaagacaggccccatgaaaaccctgctggttagagtgatgacacccgatctgagagagcggctggaaaacctgagaaagaagcctgaaaatatcccccagcccatcagcaatacatctagagccaacctgaataagctgctgaccgattacaccgaaatgaagaaggcgatcctgcatgtgtactgggaagagttccagaaggaccctgtgggcctgatgagccgggtggcccagcctgccagcaagaagatcgatcagaacaagctgaaacctgagatggacgagaagggcaacctgaccaccgccggctttgcctgctctcagtgtggccagcccctgttcgtgtacaagctggagcaggtgtctgagaagggcaaggcttacaccaactacttcggacggtgcaatgtggccgagcacgaaaagctgatcctgctggcccagctgaagcccgagaaggatagcgacgaagccgtgacatatagcctgggaaagtttgggcagagggccctggatttctacagcattcatgtgaccaaggagtccacccaccccgtgaagcccctggcccagatcgccggaaacagatacgcctccggacctgtgggaaaggccctgagcgacgcatgtatgggcacaatcgcctccttcctgtctaagtaccaggacatcatcatcgaacaccagaaggtggtgaagggcaaccagaagagactggagagcctgcgggagctggccggcaaggaaaacctggaataccctagcgtgaccctgccacctcagcctcacaccaaggagggcgttgatgcctacaacgaagtgatcgcccgggtgcgaatgtgggtgaacctgaacctgtggcagaagctgaagctaagcagagatgatgccaagcctctgctgagactgaagggattcccttcctttcctctggtcgagagacaggccaacgaagtggactggtgggacatggtgtgtaacgtgaagaagctgatcaacgagaaaaaggaggatggcaaggtgttttggcagaatctggctggctacaagagacaggaagccctgagaccatacctgagcagcgaggaagatcggaagaagggaaagaaattcgctcggtaccagctgggcgacctgctgctgcacctggaaaagaagcacggcgaggactggggaaaggtgtacgacgaggcctgggagcggattgacaagaaagtggaaggcctgagcaagcacatcaagctggaagaggaacggagaagcgaggacgcccagagcaaggccgccctgaccgactggctgcgggctaaggccagcttcgtgatcgagggcctgaaggaggccgacaaggacgagttctgcagatgcgagctgaagctgcagaagtggtacggggacctgcggggaaagcccttcgccatcgaagccgagaacagcatcctggacatcagcggcttcagcaagcagtacaactgtgccttcatctggcagaaggacggcgtgaagaagctgaacctgtacctgatcatcaactacttcaagggcggcaagctgcggttcaagaagatcaaacctgaagccttcgaagccaacagattctacaccgtgatcaacaaaaagagcggcgagatcgtgcccatggaggtgaacttcaacttcgacgaccccaacctgatcatcctgcctctggcctttggcaagagacagggcagagaattcatctggaacgacctgctgtccctggaaaccggcagcctgaagctggccaacggaagagtgatcgagaagacactgtacaacagaagaacccggcaggatgagcctgccctgttcgtggccctgaccttcgagcggcgggaggtcctggactcctccaatatcaaaccaatgaacctgatcggcgtggcaagaggcgaaaacatccccgccgtgatcgccctgaccgaccccgagggctgcccactgagccggtttaaggatagcctgggaaacccaacccacatcctgagaatcggcgagagctataaggagaagcagcggaccatccaggccaagaaggaggtggagcagcggagagccggcggctacagccggaagtacgccagcaaagccaagaatctggcagacgatatggtgagaaacaccgctagagatctgctgtactacgccgtgacccaggatgccatgctgatcttcgccaacctgagccggggcttcggccggcagggcaagcggaccttcatggccgagagacagtacacacggatggaggactggctgaccgccaagctggcctacgagggcctgagcaagacctacctgtccaagacactggcccagtacacctccaagacatgcagcaactgtgggtttaccatcaccagcgccgactacgacagggtgctggagaagctgaagaagacagcaacaggctggatgaccacaattaacggcaaggagctgaaggtggagggccagattacctactacaacagatacaagagacagaacgtagtcaaggacctgtccgtcgagctggatagactgagcgaagaatctgtgaacaacgacatctcctcctggacaaagggcagaagcggagaagctctgagcctcctgaagaaaagattctcccatagacccgtgcaggagaagttcgtgtgcctgaactgcggcttcgagacacacgcagccgagcaagccgccctgaacatcgccagatcctggctgttcctgcggagccaggagtacaagaaataccagacaaacaagacaaccggcaacaccgataagagagccttcgtcgagacctggcagtccttttaccggaagaagcttaaggaggtgtggaaacctgccgtgcggtctggcggatctggcggaggctccaccagccccaagaaaaagagaaaagtctaagctgccttctgcggggcttgccttctggccatgcccttcttctctcccttgcacctgtacctcttggtctttgaataaagcctgagtaggaaggctagcaaaaaaaaaaaaaaaaaaaaaaaaaaaaaaaaaaaaaaaaaaaaaaaaaaaaaaaaaaaaaaaaaaaaaaaaaaaaaaaagcccagccggctccccaacctctaccgaggagggcacctctgagtccgccacccccgagagcggccctggcacctccaccgagcccagcgagggcagcgcacccggcagccctgccggcagccccacctccacagaggagggaaccagcaccgagcccagcgaaggcagcgccccaggcaccagcaccgagcctagtgagcaggagattaaacggatcaacaagatcagaagaagacttgtgaaagacagcaacaccaagaaggccggcaagacaggccccatgaaaaccctgctggttagagtgatgacacccgatctgagagagcggctggaaaacctgagaaagaagcctgaaaatatcccccagcccatcagcaatacatctagagccaacctgaataagctgctgaccgattacaccgaaatgaagaaggcgatcctgcatgtgtactgggaagagttccagaaggaccctgtgggcctgatgagccgggtggcccagcctgccagcaagaagatcgatcagaacaagctgaaacctgagatggacgagaagggcaacctgaccaccgccggctttgcctgctctcagtgtggccagcccctgttcgtgtacaagctggagcaggtgtctgagaagggcaaggcttacaccaactacttcggacggtgcaatgtggccgagcacgaaaagctgatcctgctggcccagctgaagcccgagaaggatagcgacgaagccgtgacatatagcctgggaaagtttgggcagagggccctggatttctacagcattcatgtgaccaaggagtccacccaccccgtgaagcccctggcccagatcgccggaaacagatacgcctccggacctgtgggaaaggccctgagcgacgcatgtatgggcacaatcgcctccttcctgtctaagtaccaggacatcatcatcgaacaccagaaggtggtgaagggcaaccagaagagactggagagcctgcgggagctggccggcaaggaaaacctggaataccctagcgtgaccctgccacctcagcctcacaccaaggagggcgttgatgcctacaacgaagtgatcgcccgggtgcgaatgtgggtgaacctgaacctgtggcagaagctgaagctaagcagagatgatgccaagcctctgctgagactgaagggattcccttcctttcctctggtcgagagacaggccaacgaagtggactggtgggacatggtgtgtaacgtgaagaagctgatcaacgagaaaaaggaggatggcaaggtgttttggcagaatctggctggctacaagagacaggaagccctgagaccatacctgagcagcgaggaagatcggaagaagggaaagaaattcgctcggtaccagctgggcgacctgctgctgcacctggaaaagaagcacggcgaggactggggaaaggtgtacgacgaggcctgggagcggattgacaagaaagtggaaggcctgagcaagcacatcaagctggaagaggaacggagaagcgaggacgcccagagcaaggccgccctgaccgactggctgcgggctaaggccagcttcgtgatcgagggcctgaaggaggccgacaaggacgagttctgcagatgcgagctgaagctgcagaagtggtacggggacctgcggggaaagcccttcgccatcgaagccgagaacagcatcctggacatcagcggcttcagcaagcagtacaactgtgccttcatctggcagaaggacggcgtgaagaagctgaacctgtacctgatcatcaactacttcaagggcggcaagctgcggttcaagaagatcaaacctgaagccttcgaagccaacagattctacaccgtgatcaacaaaaagagcggcgagatcgtgcccatggaggtgaacttcaacttcgacgaccccaacctgatcatcctgcctctggcctttggcaagagacagggcagagaattcatctggaacgacctgctgtccctggaaaccggcagcctgaagctggccaacggaagagtgatcgagaagacactgtacaacagaagaacccggcaggatgagcctgccctgttcgtggccctgaccttcgagcggcgggaggtcctggactcctccaatatcaaaccaatgaacctgatcggcgtggcaagaggcgaaaacatccccgccgtgatcgccctgaccgaccccgagggctgcccactgagccggtttaaggatagcctgggaaacccaacccacatcctgagaatcggcgagagctataaggagaagcagcggaccatccaggccaagaaggaggtggagcagcggagagccggcggctacagccggaagtacgccagcaaagccaagaatctggcagacgatatggtgagaaacaccgctagagatctgctgtactacgccgtgacccaggatgccatgctgatcttcgccaacctgagccggggcttcggccggcagggcaagcggaccttcatggccgagagacagtacacacggatggaggactggctgaccgccaagctggcctacgagggcctgagcaagacctacctgtccaagacactggcccagtacacctccaagacatgcagcaactgtgggtttaccatcaccagcgccgactacgacagggtgctggagaagctgaagaagacagcaacaggctggatgaccacaattaacggcaaggagctgaaggtggagggccagattacctactacaacagatacaagagacagaacgtagtcaaggacctgtccgtcgagctggatagactgagcgaagaatctgtgaacaacgacatctcctcctggacaaagggcagaagcggagaagctctgagcctcctgaagaaaagattctcccatagacccgtgcaggagaagttcgtgtgcctgaactgcggcttcgagacacacgcagccgagcaagccgccctgaacatcgccagatcctggctgttcctgcggagccaggagtacaagaaataccagacaaacaagacaaccggcaacaccgataagagagccttcgtcgagacctggcagtccttttaccggaagaagcttaaggaggtgtggaaacctgccgtgcggtctggcggatctggcggaggctccaccagccccaagaaaaagagaaaagtctaagctgccttctgcggggcttgccttctggccatgcccttcttctctcccttgcacctgtacctcttggtctttgaataaagcctgagtaggaaggctagcaaaaaaaaaaaaaaaaaaaaaaaaaaaaaaaaaaaaaaaaaaaaaaaaaaaaaaaaaaaaaaaaaaaaaaaaaaaaaaaa

SEQ ID NO: 9778 - RNA, 8787 nt, synthetic construct
  source 1..8787: mol_type = other RNA
aggaaataagagagaaaagaagagtaagaagaaatataagagccaccatggcccctaagaagaagcgtaaagtgagccggatgaaccacgaccaggagttcgacccccctaaggtgtaccctcccgtccccgccgagaagagaaagcccatccgggtcctgagcctgttcgatggcatcgccaccggtctgctggtgctgaaggacctgggcatccaggtggataggtacattgcctccgaggtgtgcgaggactccatcaccgtgggaatggtgcgtcatcagggcaagatcatgtacgtgggcgacgtgcggagcgtgacacagaagcatatccaggagtggggccctttcgacctggtgatcggcggcagcccttgcaatgacctgagcatcgtgaacccagcccggaagggcctgtacgagggaaccggcagactgttcttcgagttttacagactgctgcacgacgcccggcctaaggaaggcgacgaccggcccttcttttggctgttcgagaatgtggtggccatgggagtcagcgacaagcgggatattagccggttcctggagagcaaccccgtgatgatcgatgccaaggaagtgagcgccgcccaccgggccagatacttctggggcaatctgcctggcatgaacagacccctggccagcaccgtgaacgacaagctggagctgcaggagtgcctggagcacggccggatcgccaagttcagcaaggtgagaaccatcaccacccgaagcaacagcatcaaacaaggcaaggaccagcactttcctgtgttcatgaacgagaaggaggacatcctgtggtgtaccgagatggagagagtgttcgggttcccagtccactacacagatgtcagcaacatgtctagactggccagacagagactgctgggaagaagctggtccgtccctgtgatcagacacctgttcgcccctctgaaggagtacttcgcctgcgtgagcagcggcaacagcaacgccaacagccggggccccagcttctctagcggcctggtgccactgtccctgagagggagccacatgggccccatggagatctacaaaaccgtgagcgcctggaagcggcagcctgtgcgcgtgctgagcctgtttcggaatatcgataaagtcctgaaaagcctgggattcctggagagcggctctggctccggcggtggcaccctgaagtacgtggaggatgtgacaaacgtggtcagacgggatgtggagaagtggggccccttcgatctggtgtacggcagcacccaacccctgggcagctcttgtgaccggtgccctggctggtacatgtttcagttccaccggatcctgcagtacgccctgccgagacaggagtcccagcggccattcttttggattttcatggacaacttgctgctgaccgaggatgaccaggaaactaccactcggttcctgcagaccgaagccgtgaccctgcaggacgtgagaggccgggactaccagaacgccatgcgggtgtggtccaacatccctggactgaaaagcaagcacgcacctctgacccctaaagaagaggagtacctgcaggcccaggtgcggagcagaagcaagctggacgcccctaaggtggatctgctggtgaagaattgcctcctgcccctgagagagtacttcaagtatttcagccagaatagtctgcccctgggaggcagcggcggcggcatgagcggcccccccggcagcctggagatggagcccctgcagttcagggacgtggccgtggagttcagcctggaggagtggcactgcctggacaccgcccagcagaacctgtacagggacgtgatgctggagaactacaggcacctggtgttcctgggcatcgtggtgagcaagcccgacctgatcacctgcctggagcagggcaagaagcccctgaccatgaagaggcacgagatgatcgccggcggcccaagcagcggcgcccctcctcccagcggcggcaggcggcccaagcagcggcgcccctcctcccagcggcggcagcccagccggctccccaacctctaccgaggagggcacctctgagtccgccacccccgagagcggccctggcacctccaccgagcccagcgagggcagcgcacccggcagccctgccggcagccccacctccacagaggagggaaccagcaccgagcccagcgaaggcagcgccccaggcaccagcaccgagcctagtgagcaggagattaaacggatcaacaagatcagaagaagacttgtgaaagacagcaacaccaagaaggccggcaagacaggccccatgaaaaccctgctggttagagtgatgacacccgatctgagagagcggctggaaaacctgagaaagaagcctgaaaatatcccccagcccatcagcaatacatctagagccaacctgaataagctgctgaccgattacaccgaaatgaagaaggcgatcctgcatgtgtactgggaagagttccagaaggaccctgtgggcctgatgagccgggtggcccagcctgccagcaagaagatcgatcagaacaagctgaaacctgagatggacgagaagggcaacctgaccaccgccggctttgcctgctctcagtgtggccagcccctgttcgtgtacaagctggagcaggtgtctgagaagggcaaggcttacaccaactacttcggacggtgcaatgtggccgagcacgaaaagctgatcctgctggcccagctgaagcccgagaaggatagcgacgaagccgtgacatatagcctgggaaagtttgggcagagggccctggatttctacagcattcatgtgaccaaggagtccacccaccccgtgaagcccctggcccagatcgccggaaacagatacgcctccggacctgtgggaaaggccctgagcgacgcatgtatgggcacaatcgcctccttcctgtctaagtaccaggacatcatcatcgaacaccagaaggtggtgaagggcaaccagaagagactggagagcctgcgggagctggccggcaaggaaaacctggaataccctagcgtgaccctgccacctcagcctcacaccaaggagggcgttgatgcctacaacgaagtgatcgcccgggtgcgaatgtgggtgaacctgaacctgtggcagaagctgaagctaagcagagatgatgccaagcctctgctgagactgaagggattcccttcctttcctctggtcgagagacaggccaacgaagtggactggtgggacatggtgtgtaacgtgaagaagctgatcaacgagaaaaaggaggatggcaaggtgttttggcagaatctggctggctacaagagacaggaagccctgagaccatacctgagcagcgaggaagatcggaagaagggaaagaaattcgctcggtaccagctgggcgacctgctgctgcacctggaaaagaagcacggcgaggactggggaaaggtgtacgacgaggcctgggagcggattgacaagaaagtggaaggcctgagcaagcacatcaagctggaagaggaacggagaagcgaggacgcccagagcaaggccgccctgaccgactggctgcgggctaaggccagcttcgtgatcgagggcctgaaggaggccgacaaggacgagttctgcagatgcgagctgaagctgcagaagtggtacggggacctgcggggaaagcccttcgccatcgaagccgagaacagcatcctggacatcagcggcttcagcaagcagtacaactgtgccttcatctggcagaaggacggcgtgaagaagctgaacctgtacctgatcatcaactacttcaagggcggcaagctgcggttcaagaagatcaaacctgaagccttcgaagccaacagattctacaccgtgatcaacaaaaagagcggcgagatcgtgcccatggaggtgaacttcaacttcgacgaccccaacctgatcatcctgcctctggcctttggcaagagacagggcagagaattcatctggaacgacctgctgtccctggaaaccggcagcctgaagctggccaacggaagagtgatcgagaagacactgtacaacagaagaacccggcaggatgagcctgccctgttcgtggccctgaccttcgagcggcgggaggtcctggactcctccaatatcaaaccaatgaacctgatcggcgtggcaagaggcgaaaacatccccgccgtgatcgccctgaccgaccccgagggctgcccactgagccggtttaaggatagcctgggaaacccaacccacatcctgagaatcggcgagagctataaggagaagcagcggaccatccaggccaagaaggaggtggagcagcggagagccggcggctacagccggaagtacgccagcaaagccaagaatctggcagacgatatggtgagaaacaccgctagagatctgctgtactacgccgtgacccaggatgccatgctgatcttcgccaacctgagccggggcttcggccggcagggcaagcggaccttcatggccgagagacagtacacacggatggaggactggctgaccgccaagctggcctacgagggcctgagcaagacctacctgtccaagacactggcccagtacacctccaagacatgcagcaactgtgggtttaccatcaccagcgccgactacgacagggtgctggagaagctgaagaagacagcaacaggctggatgaccacaattaacggcaaggagctgaaggtggagggccagattacctactacaacagatacaagagacagaacgtagtcaaggacctgtccgtcgagctggatagactgagcgaagaatctgtgaacaacgacatctcctcctggacaaagggcagaagcggagaagctctgagcctcctgaagaaaagattctcccatagacccgtgcaggagaagttcgtgtgcctgaactgcggcttcgagacacacgcagccgagcaagccgccctgaacatcgccagatcctggctgttcctgcggagccaggagtacaagaaataccagacaaacaagacaaccggcaacaccgataagagagccttcgtcgagacctggcagtccttttaccggaagaagcttaaggaggtgtggaaacctgccgtgcggtctggcggatctggcggaggctccaccagccccaagaaaaagagaaaagtctaagctgccttctgcggggcttgccttctggccatgcccttcttctctcccttgcacctgtacctcttggtctttgaataaagcctgagtaggaaggctagcaaaaaaaaaaaaaaaaaaaaaaaaaaaaaaaaaaaaaaaaaaaaaaaaaaaaaaaaaaaaaaaaaaaaaaaaaaaaaaaagcccagccggctccccaacctctaccgaggagggcacctctgagtccgccacccccgagagcggccctggcacctccaccgagcccagcgagggcagcgcacccggcagccctgccggcagccccacctccacagaggagggaaccagcaccgagcccagcgaaggcagcgccccaggcaccagcaccgagcctagtgagcaggagattaaacggatcaacaagatcagaagaagacttgtgaaagacagcaacaccaagaaggccggcaagacaggccccatgaaaaccctgctggttagagtgatgacacccgatctgagagagcggctggaaaacctgagaaagaagcctgaaaatatcccccagcccatcagcaatacatctagagccaacctgaataagctgctgaccgattacaccgaaatgaagaaggcgatcctgcatgtgtactgggaagagttccagaaggaccctgtgggcctgatgagccgggtggcccagcctgccagcaagaagatcgatcagaacaagctgaaacctgagatggacgagaagggcaacctgaccaccgccggctttgcctgctctcagtgtggccagcccctgttcgtgtacaagctggagcaggtgtctgagaagggcaaggcttacaccaactacttcggacggtgcaatgtggccgagcacgaaaagctgatcctgctggcccagctgaagcccgagaaggatagcgacgaagccgtgacatatagcctgggaaagtttgggcagagggccctggatttctacagcattcatgtgaccaaggagtccacccaccccgtgaagcccctggcccagatcgccggaaacagatacgcctccggacctgtgggaaaggccctgagcgacgcatgtatgggcacaatcgcctccttcctgtctaagtaccaggacatcatcatcgaacaccagaaggtggtgaagggcaaccagaagagactggagagcctgcgggagctggccggcaaggaaaacctggaataccctagcgtgaccctgccacctcagcctcacaccaaggagggcgttgatgcctacaacgaagtgatcgcccgggtgcgaatgtgggtgaacctgaacctgtggcagaagctgaagctaagcagagatgatgccaagcctctgctgagactgaagggattcccttcctttcctctggtcgagagacaggccaacgaagtggactggtgggacatggtgtgtaacgtgaagaagctgatcaacgagaaaaaggaggatggcaaggtgttttggcagaatctggctggctacaagagacaggaagccctgagaccatacctgagcagcgaggaagatcggaagaagggaaagaaattcgctcggtaccagctgggcgacctgctgctgcacctggaaaagaagcacggcgaggactggggaaaggtgtacgacgaggcctgggagcggattgacaagaaagtggaaggcctgagcaagcacatcaagctggaagaggaacggagaagcgaggacgcccagagcaaggccgccctgaccgactggctgcgggctaaggccagcttcgtgatcgagggcctgaaggaggccgacaaggacgagttctgcagatgcgagctgaagctgcagaagtggtacggggacctgcggggaaagcccttcgccatcgaagccgagaacagcatcctggacatcagcggcttcagcaagcagtacaactgtgccttcatctggcagaaggacggcgtgaagaagctgaacctgtacctgatcatcaactacttcaagggcggcaagctgcggttcaagaagatcaaacctgaagccttcgaagccaacagattctacaccgtgatcaacaaaaagagcggcgagatcgtgcccatggaggtgaacttcaacttcgacgaccccaacctgatcatcctgcctctggcctttggcaagagacagggcagagaattcatctggaacgacctgctgtccctggaaaccggcagcctgaagctggccaacggaagagtgatcgagaagacactgtacaacagaagaacccggcaggatgagcctgccctgttcgtggccctgaccttcgagcggcgggaggtcctggactcctccaatatcaaaccaatgaacctgatcggcgtggcaagaggcgaaaacatccccgccgtgatcgccctgaccgaccccgagggctgcccactgagccggtttaaggatagcctgggaaacccaacccacatcctgagaatcggcgagagctataaggagaagcagcggaccatccaggccaagaaggaggtggagcagcggagagccggcggctacagccggaagtacgccagcaaagccaagaatctggcagacgatatggtgagaaacaccgctagagatctgctgtactacgccgtgacccaggatgccatgctgatcttcgccaacctgagccggggcttcggccggcagggcaagcggaccttcatggccgagagacagtacacacggatggaggactggctgaccgccaagctggcctacgagggcctgagcaagacctacctgtccaagacactggcccagtacacctccaagacatgcagcaactgtgggtttaccatcaccagcgccgactacgacagggtgctggagaagctgaagaagacagcaacaggctggatgaccacaattaacggcaaggagctgaaggtggagggccagattacctactacaacagatacaagagacagaacgtagtcaaggacctgtccgtcgagctggatagactgagcgaagaatctgtgaacaacgacatctcctcctggacaaagggcagaagcggagaagctctgagcctcctgaagaaaagattctcccatagacccgtgcaggagaagttcgtgtgcctgaactgcggcttcgagacacacgcagccgagcaagccgccctgaacatcgccagatcctggctgttcctgcggagccaggagtacaagaaataccagacaaacaagacaaccggcaacaccgataagagagccttcgtcgagacctggcagtccttttaccggaagaagcttaaggaggtgtggaaacctgccgtgcggtctggcggatctggcggaggctccaccagccccaagaaaaagagaaaagtctaagctgccttctgcggggcttgccttctggccatgcccttcttctctcccttgcacctgtacctcttggtctttgaataaagcctgagtaggaaggctagcaaaaaaaaaaaaaaaaaaaaaaaaaaaaaaaaaaaaaaaaaaaaaaaaaaaaaaaaaaaaaaaaaaaaaaaaaaaaaaaa

SEQ ID NO: 9779 - RNA, 8787 nt, synthetic construct
  source 1..8787: mol_type = other RNA
aggaaataagagagaaaagaagagtaagaagaaatataagagccaccatggcccctaagaagaagcgtaaagtgagccggatgaaccacgaccaggagttcgacccccctaaggtgtaccctcccgtccccgccgagaagagaaagcccatccgggtcctgagcctgttcgatggcatcgccaccggtctgctggtgctgaaggacctgggcatccaggtggataggtacattgcctccgaggtgtgcgaggactccatcaccgtgggaatggtgcgtcatcagggcaagatcatgtacgtgggcgacgtgcggagcgtgacacagaagcatatccaggagtggggccctttcgacctggtgatcggcggcagcccttgcaatgacctgagcatcgtgaacccagcccggaagggcctgtacgagggaaccggcagactgttcttcgagttttacagactgctgcacgacgcccggcctaaggaaggcgacgaccggcccttcttttggctgttcgagaatgtggtggccatgggagtcagcgacaagcgggatattagccggttcctggagagcaaccccgtgatgatcgatgccaaggaagtgagcgccgcccaccgggccagatacttctggggcaatctgcctggcatgaacagacccctggccagcaccgtgaacgacaagctggagctgcaggagtgcctggagcacggccggatcgccaagttcagcaaggtgagaaccatcaccacccgaagcaacagcatcaaacaaggcaaggaccagcactttcctgtgttcatgaacgagaaggaggacatcctgtggtgtaccgagatggagagagtgttcgggttcccagtccactacacagatgtcagcaacatgtctagactggccagacagagactgctgggaagaagctggtccgtccctgtgatcagacacctgttcgcccctctgaaggagtacttcgcctgcgtgagcagcggcaacagcaacgccaacagccggggccccagcttctctagcggcctggtgccactgtccctgagagggagccacatgggccccatggagatctacaaaaccgtgagcgcctggaagcggcagcctgtgcgcgtgctgagcctgtttcggaatatcgataaagtcctgaaaagcctgggattcctggagagcggctctggctccggcggtggcaccctgaagtacgtggaggatgtgacaaacgtggtcagacgggatgtggagaagtggggccccttcgatctggtgtacggcagcacccaacccctgggcagctcttgtgaccggtgccctggctggtacatgtttcagttccaccggatcctgcagtacgccctgccgagacaggagtcccagcggccattcttttggattttcatggacaacttgctgctgaccgaggatgaccaggaaactaccactcggttcctgcagaccgaagccgtgaccctgcaggacgtgagaggccgggactaccagaacgccatgcgggtgtggtccaacatccctggactgaaaagcaagcacgcacctctgacccctaaagaagaggagtacctgcaggcccaggtgcggagcagaagcaagctggacgcccctaaggtggatctgctggtgaagaattgcctcctgcccctgagagagtacttcaagtatttcagccagaatagtctgcccctgggaggcagcggcggcggccccgagaccgtggtgagcttcgaggacgtggccgtgaggttcagccccgacgagtggcacctgctggacgacggccagaggaggctgtacagggacgtgctgagggagaactacagccacgtgaggagcctgggcttccccgtgcccgacctggccgtgatcttcaggatggagaggggcgaggagccctggccccccggcctgcccgccggcgagtggccctggggccagggccaggcccccggcggcccaagcagcggcgcccctcctcccagcggcggcaggcggcccaagcagcggcgcccctcctcccagcggcggcagcccagccggctccccaacctctaccgaggagggcacctctgagtccgccacccccgagagcggccctggcacctccaccgagcccagcgagggcagcgcacccggcagccctgccggcagccccacctccacagaggagggaaccagcaccgagcccagcgaaggcagcgccccaggcaccagcaccgagcctagtgagcaggagattaaacggatcaacaagatcagaagaagacttgtgaaagacagcaacaccaagaaggccggcaagacaggccccatgaaaaccctgctggttagagtgatgacacccgatctgagagagcggctggaaaacctgagaaagaagcctgaaaatatcccccagcccatcagcaatacatctagagccaacctgaataagctgctgaccgattacaccgaaatgaagaaggcgatcctgcatgtgtactgggaagagttccagaaggaccctgtgggcctgatgagccgggtggcccagcctgccagcaagaagatcgatcagaacaagctgaaacctgagatggacgagaagggcaacctgaccaccgccggctttgcctgctctcagtgtggccagcccctgttcgtgtacaagctggagcaggtgtctgagaagggcaaggcttacaccaactacttcggacggtgcaatgtggccgagcacgaaaagctgatcctgctggcccagctgaagcccgagaaggatagcgacgaagccgtgacatatagcctgggaaagtttgggcagagggccctggatttctacagcattcatgtgaccaaggagtccacccaccccgtgaagcccctggcccagatcgccggaaacagatacgcctccggacctgtgggaaaggccctgagcgacgcatgtatgggcacaatcgcctccttcctgtctaagtaccaggacatcatcatcgaacaccagaaggtggtgaagggcaaccagaagagactggagagcctgcgggagctggccggcaaggaaaacctggaataccctagcgtgaccctgccacctcagcctcacaccaaggagggcgttgatgcctacaacgaagtgatcgcccgggtgcgaatgtgggtgaacctgaacctgtggcagaagctgaagctaagcagagatgatgccaagcctctgctgagactgaagggattcccttcctttcctctggtcgagagacaggccaacgaagtggactggtgggacatggtgtgtaacgtgaagaagctgatcaacgagaaaaaggaggatggcaaggtgttttggcagaatctggctggctacaagagacaggaagccctgagaccatacctgagcagcgaggaagatcggaagaagggaaagaaattcgctcggtaccagctgggcgacctgctgctgcacctggaaaagaagcacggcgaggactggggaaaggtgtacgacgaggcctgggagcggattgacaagaaagtggaaggcctgagcaagcacatcaagctggaagaggaacggagaagcgaggacgcccagagcaaggccgccctgaccgactggctgcgggctaaggccagcttcgtgatcgagggcctgaaggaggccgacaaggacgagttctgcagatgcgagctgaagctgcagaagtggtacggggacctgcggggaaagcccttcgccatcgaagccgagaacagcatcctggacatcagcggcttcagcaagcagtacaactgtgccttcatctggcagaaggacggcgtgaagaagctgaacctgtacctgatcatcaactacttcaagggcggcaagctgcggttcaagaagatcaaacctgaagccttcgaagccaacagattctacaccgtgatcaacaaaaagagcggcgagatcgtgcccatggaggtgaacttcaacttcgacgaccccaacctgatcatcctgcctctggcctttggcaagagacagggcagagaattcatctggaacgacctgctgtccctggaaaccggcagcctgaagctggccaacggaagagtgatcgagaagacactgtacaacagaagaacccggcaggatgagcctgccctgttcgtggccctgaccttcgagcggcgggaggtcctggactcctccaatatcaaaccaatgaacctgatcggcgtggcaagaggcgaaaacatccccgccgtgatcgccctgaccgaccccgagggctgcccactgagccggtttaaggatagcctgggaaacccaacccacatcctgagaatcggcgagagctataaggagaagcagcggaccatccaggccaagaaggaggtggagcagcggagagccggcggctacagccggaagtacgccagcaaagccaagaatctggcagacgatatggtgagaaacaccgctagagatctgctgtactacgccgtgacccaggatgccatgctgatcttcgccaacctgagccggggcttcggccggcagggcaagcggaccttcatggccgagagacagtacacacggatggaggactggctgaccgccaagctggcctacgagggcctgagcaagacctacctgtccaagacactggcccagtacacctccaagacatgcagcaactgtgggtttaccatcaccagcgccgactacgacagggtgctggagaagctgaagaagacagcaacaggctggatgaccacaattaacggcaaggagctgaaggtggagggccagattacctactacaacagatacaagagacagaacgtagtcaaggacctgtccgtcgagctggatagactgagcgaagaatctgtgaacaacgacatctcctcctggacaaagggcagaagcggagaagctctgagcctcctgaagaaaagattctcccatagacccgtgcaggagaagttcgtgtgcctgaactgcggcttcgagacacacgcagccgagcaagccgccctgaacatcgccagatcctggctgttcctgcggagccaggagtacaagaaataccagacaaacaagacaaccggcaacaccgataagagagccttcgtcgagacctggcagtccttttaccggaagaagcttaaggaggtgtggaaacctgccgtgcggtctggcggatctggcggaggctccaccagccccaagaaaaagagaaaagtctaagctgccttctgcggggcttgccttctggccatgcccttcttctctcccttgcacctgtacctcttggtctttgaataaagcctgagtaggaaggctagcaaaaaaaaaaaaaaaaaaaaaaaaaaaaaaaaaaaaaaaaaaaaaaaaaaaaaaaaaaaaaaaaaaaaaaaaaaaaaaaagcccagccggctccccaacctctaccgaggagggcacctctgagtccgccacccccgagagcggccctggcacctccaccgagcccagcgagggcagcgcacccggcagccctgccggcagccccacctccacagaggagggaaccagcaccgagcccagcgaaggcagcgccccaggcaccagcaccgagcctagtgagcaggagattaaacggatcaacaagatcagaagaagacttgtgaaagacagcaacaccaagaaggccggcaagacaggccccatgaaaaccctgctggttagagtgatgacacccgatctgagagagcggctggaaaacctgagaaagaagcctgaaaatatcccccagcccatcagcaatacatctagagccaacctgaataagctgctgaccgattacaccgaaatgaagaaggcgatcctgcatgtgtactgggaagagttccagaaggaccctgtgggcctgatgagccgggtggcccagcctgccagcaagaagatcgatcagaacaagctgaaacctgagatggacgagaagggcaacctgaccaccgccggctttgcctgctctcagtgtggccagcccctgttcgtgtacaagctggagcaggtgtctgagaagggcaaggcttacaccaactacttcggacggtgcaatgtggccgagcacgaaaagctgatcctgctggcccagctgaagcccgagaaggatagcgacgaagccgtgacatatagcctgggaaagtttgggcagagggccctggatttctacagcattcatgtgaccaaggagtccacccaccccgtgaagcccctggcccagatcgccggaaacagatacgcctccggacctgtgggaaaggccctgagcgacgcatgtatgggcacaatcgcctccttcctgtctaagtaccaggacatcatcatcgaacaccagaaggtggtgaagggcaaccagaagagactggagagcctgcgggagctggccggcaaggaaaacctggaataccctagcgtgaccctgccacctcagcctcacaccaaggagggcgttgatgcctacaacgaagtgatcgcccgggtgcgaatgtgggtgaacctgaacctgtggcagaagctgaagctaagcagagatgatgccaagcctctgctgagactgaagggattcccttcctttcctctggtcgagagacaggccaacgaagtggactggtgggacatggtgtgtaacgtgaagaagctgatcaacgagaaaaaggaggatggcaaggtgttttggcagaatctggctggctacaagagacaggaagccctgagaccatacctgagcagcgaggaagatcggaagaagggaaagaaattcgctcggtaccagctgggcgacctgctgctgcacctggaaaagaagcacggcgaggactggggaaaggtgtacgacgaggcctgggagcggattgacaagaaagtggaaggcctgagcaagcacatcaagctggaagaggaacggagaagcgaggacgcccagagcaaggccgccctgaccgactggctgcgggctaaggccagcttcgtgatcgagggcctgaaggaggccgacaaggacgagttctgcagatgcgagctgaagctgcagaagtggtacggggacctgcggggaaagcccttcgccatcgaagccgagaacagcatcctggacatcagcggcttcagcaagcagtacaactgtgccttcatctggcagaaggacggcgtgaagaagctgaacctgtacctgatcatcaactacttcaagggcggcaagctgcggttcaagaagatcaaacctgaagccttcgaagccaacagattctacaccgtgatcaacaaaaagagcggcgagatcgtgcccatggaggtgaacttcaacttcgacgaccccaacctgatcatcctgcctctggcctttggcaagagacagggcagagaattcatctggaacgacctgctgtccctggaaaccggcagcctgaagctggccaacggaagagtgatcgagaagacactgtacaacagaagaacccggcaggatgagcctgccctgttcgtggccctgaccttcgagcggcgggaggtcctggactcctccaatatcaaaccaatgaacctgatcggcgtggcaagaggcgaaaacatccccgccgtgatcgccctgaccgaccccgagggctgcccactgagccggtttaaggatagcctgggaaacccaacccacatcctgagaatcggcgagagctataaggagaagcagcggaccatccaggccaagaaggaggtggagcagcggagagccggcggctacagccggaagtacgccagcaaagccaagaatctggcagacgatatggtgagaaacaccgctagagatctgctgtactacgccgtgacccaggatgccatgctgatcttcgccaacctgagccggggcttcggccggcagggcaagcggaccttcatggccgagagacagtacacacggatggaggactggctgaccgccaagctggcctacgagggcctgagcaagacctacctgtccaagacactggcccagtacacctccaagacatgcagcaactgtgggtttaccatcaccagcgccgactacgacagggtgctggagaagctgaagaagacagcaacaggctggatgaccacaattaacggcaaggagctgaaggtggagggccagattacctactacaacagatacaagagacagaacgtagtcaaggacctgtccgtcgagctggatagactgagcgaagaatctgtgaacaacgacatctcctcctggacaaagggcagaagcggagaagctctgagcctcctgaagaaaagattctcccatagacccgtgcaggagaagttcgtgtgcctgaactgcggcttcgagacacacgcagccgagcaagccgccctgaacatcgccagatcctggctgttcctgcggagccaggagtacaagaaataccagacaaacaagacaaccggcaacaccgataagagagccttcgtcgagacctggcagtccttttaccggaagaagcttaaggaggtgtggaaacctgccgtgcggtctggcggatctggcggaggctccaccagccccaagaaaaagagaaaagtctaagctgccttctgcggggcttgccttctggccatgcccttcttctctcccttgcacctgtacctcttggtctttgaataaagcctgagtaggaaggctagcaaaaaaaaaaaaaaaaaaaaaaaaaaaaaaaaaaaaaaaaaaaaaaaaaaaaaaaaaaaaaaaaaaaaaaaaaaaaaaaa

SEQ ID NO: 9780 - RNA, 8787 nt, synthetic construct
  source 1..8787: mol_type = other RNA
aggaaataagagagaaaagaagagtaagaagaaatataagagccaccatggcccctaagaagaagcgtaaagtgagccggatgaaccacgaccaggagttcgacccccctaaggtgtaccctcccgtccccgccgagaagagaaagcccatccgggtcctgagcctgttcgatggcatcgccaccggtctgctggtgctgaaggacctgggcatccaggtggataggtacattgcctccgaggtgtgcgaggactccatcaccgtgggaatggtgcgtcatcagggcaagatcatgtacgtgggcgacgtgcggagcgtgacacagaagcatatccaggagtggggccctttcgacctggtgatcggcggcagcccttgcaatgacctgagcatcgtgaacccagcccggaagggcctgtacgagggaaccggcagactgttcttcgagttttacagactgctgcacgacgcccggcctaaggaaggcgacgaccggcccttcttttggctgttcgagaatgtggtggccatgggagtcagcgacaagcgggatattagccggttcctggagagcaaccccgtgatgatcgatgccaaggaagtgagcgccgcccaccgggccagatacttctggggcaatctgcctggcatgaacagacccctggccagcaccgtgaacgacaagctggagctgcaggagtgcctggagcacggccggatcgccaagttcagcaaggtgagaaccatcaccacccgaagcaacagcatcaaacaaggcaaggaccagcactttcctgtgttcatgaacgagaaggaggacatcctgtggtgtaccgagatggagagagtgttcgggttcccagtccactacacagatgtcagcaacatgtctagactggccagacagagactgctgggaagaagctggtccgtccctgtgatcagacacctgttcgcccctctgaaggagtacttcgcctgcgtgagcagcggcaacagcaacgccaacagccggggccccagcttctctagcggcctggtgccactgtccctgagagggagccacatgggccccatggagatctacaaaaccgtgagcgcctggaagcggcagcctgtgcgcgtgctgagcctgtttcggaatatcgataaagtcctgaaaagcctgggattcctggagagcggctctggctccggcggtggcaccctgaagtacgtggaggatgtgacaaacgtggtcagacgggatgtggagaagtggggccccttcgatctggtgtacggcagcacccaacccctgggcagctcttgtgaccggtgccctggctggtacatgtttcagttccaccggatcctgcagtacgccctgccgagacaggagtcccagcggccattcttttggattttcatggacaacttgctgctgaccgaggatgaccaggaaactaccactcggttcctgcagaccgaagccgtgaccctgcaggacgtgagaggccgggactaccagaacgccatgcgggtgtggtccaacatccctggactgaaaagcaagcacgcacctctgacccctaaagaagaggagtacctgcaggcccaggtgcggagcagaagcaagctggacgcccctaaggtggatctgctggtgaagaattgcctcctgcccctgagagagtacttcaagtatttcagccagaatagtctgcccctgggaggcagcggcggcggcctgcagggcctgctgaccttcagggacgtggccatcgagttcagcgaggaggagtggggctgcctgacccacacccagaggcagctgtacagggacgtgatgctggagaactacggccacctgcacttcctgggcctgctgctgagcaagcccgacctgatcatgttcctggagcaggagaagcagctgtgggacgtgaagaggaaggagagcaggggcttcagccccgagagccagtgcctgggcggcccaagcagcggcgcccctcctcccagcggcggcaggcggcccaagcagcggcgcccctcctcccagcggcggcagcccagccggctccccaacctctaccgaggagggcacctctgagtccgccacccccgagagcggccctggcacctccaccgagcccagcgagggcagcgcacccggcagccctgccggcagccccacctccacagaggagggaaccagcaccgagcccagcgaaggcagcgccccaggcaccagcaccgagcctagtgagcaggagattaaacggatcaacaagatcagaagaagacttgtgaaagacagcaacaccaagaaggccggcaagacaggccccatgaaaaccctgctggttagagtgatgacacccgatctgagagagcggctggaaaacctgagaaagaagcctgaaaatatcccccagcccatcagcaatacatctagagccaacctgaataagctgctgaccgattacaccgaaatgaagaaggcgatcctgcatgtgtactgggaagagttccagaaggaccctgtgggcctgatgagccgggtggcccagcctgccagcaagaagatcgatcagaacaagctgaaacctgagatggacgagaagggcaacctgaccaccgccggctttgcctgctctcagtgtggccagcccctgttcgtgtacaagctggagcaggtgtctgagaagggcaaggcttacaccaactacttcggacggtgcaatgtggccgagcacgaaaagctgatcctgctggcccagctgaagcccgagaaggatagcgacgaagccgtgacatatagcctgggaaagtttgggcagagggccctggatttctacagcattcatgtgaccaaggagtccacccaccccgtgaagcccctggcccagatcgccggaaacagatacgcctccggacctgtgggaaaggccctgagcgacgcatgtatgggcacaatcgcctccttcctgtctaagtaccaggacatcatcatcgaacaccagaaggtggtgaagggcaaccagaagagactggagagcctgcgggagctggccggcaaggaaaacctggaataccctagcgtgaccctgccacctcagcctcacaccaaggagggcgttgatgcctacaacgaagtgatcgcccgggtgcgaatgtgggtgaacctgaacctgtggcagaagctgaagctaagcagagatgatgccaagcctctgctgagactgaagggattcccttcctttcctctggtcgagagacaggccaacgaagtggactggtgggacatggtgtgtaacgtgaagaagctgatcaacgagaaaaaggaggatggcaaggtgttttggcagaatctggctggctacaagagacaggaagccctgagaccatacctgagcagcgaggaagatcggaagaagggaaagaaattcgctcggtaccagctgggcgacctgctgctgcacctggaaaagaagcacggcgaggactggggaaaggtgtacgacgaggcctgggagcggattgacaagaaagtggaaggcctgagcaagcacatcaagctggaagaggaacggagaagcgaggacgcccagagcaaggccgccctgaccgactggctgcgggctaaggccagcttcgtgatcgagggcctgaaggaggccgacaaggacgagttctgcagatgcgagctgaagctgcagaagtggtacggggacctgcggggaaagcccttcgccatcgaagccgagaacagcatcctggacatcagcggcttcagcaagcagtacaactgtgccttcatctggcagaaggacggcgtgaagaagctgaacctgtacctgatcatcaactacttcaagggcggcaagctgcggttcaagaagatcaaacctgaagccttcgaagccaacagattctacaccgtgatcaacaaaaagagcggcgagatcgtgcccatggaggtgaacttcaacttcgacgaccccaacctgatcatcctgcctctggcctttggcaagagacagggcagagaattcatctggaacgacctgctgtccctggaaaccggcagcctgaagctggccaacggaagagtgatcgagaagacactgtacaacagaagaacccggcaggatgagcctgccctgttcgtggccctgaccttcgagcggcgggaggtcctggactcctccaatatcaaaccaatgaacctgatcggcgtggcaagaggcgaaaacatccccgccgtgatcgccctgaccgaccccgagggctgcccactgagccggtttaaggatagcctgggaaacccaacccacatcctgagaatcggcgagagctataaggagaagcagcggaccatccaggccaagaaggaggtggagcagcggagagccggcggctacagccggaagtacgccagcaaagccaagaatctggcagacgatatggtgagaaacaccgctagagatctgctgtactacgccgtgacccaggatgccatgctgatcttcgccaacctgagccggggcttcggccggcagggcaagcggaccttcatggccgagagacagtacacacggatggaggactggctgaccgccaagctggcctacgagggcctgagcaagacctacctgtccaagacactggcccagtacacctccaagacatgcagcaactgtgggtttaccatcaccagcgccgactacgacagggtgctggagaagctgaagaagacagcaacaggctggatgaccacaattaacggcaaggagctgaaggtggagggccagattacctactacaacagatacaagagacagaacgtagtcaaggacctgtccgtcgagctggatagactgagcgaagaatctgtgaacaacgacatctcctcctggacaaagggcagaagcggagaagctctgagcctcctgaagaaaagattctcccatagacccgtgcaggagaagttcgtgtgcctgaactgcggcttcgagacacacgcagccgagcaagccgccctgaacatcgccagatcctggctgttcctgcggagccaggagtacaagaaataccagacaaacaagacaaccggcaacaccgataagagagccttcgtcgagacctggcagtccttttaccggaagaagcttaaggaggtgtggaaacctgccgtgcggtctggcggatctggcggaggctccaccagccccaagaaaaagagaaaagtctaagctgccttctgcggggcttgccttctggccatgcccttcttctctcccttgcacctgtacctcttggtctttgaataaagcctgagtaggaaggctagcaaaaaaaaaaaaaaaaaaaaaaaaaaaaaaaaaaaaaaaaaaaaaaaaaaaaaaaaaaaaaaaaaaaaaaaaaaaaaaaagcccagccggctccccaacctctaccgaggagggcacctctgagtccgccacccccgagagcggccctggcacctccaccgagcccagcgagggcagcgcacccggcagccctgccggcagccccacctccacagaggagggaaccagcaccgagcccagcgaaggcagcgccccaggcaccagcaccgagcctagtgagcaggagattaaacggatcaacaagatcagaagaagacttgtgaaagacagcaacaccaagaaggccggcaagacaggccccatgaaaaccctgctggttagagtgatgacacccgatctgagagagcggctggaaaacctgagaaagaagcctgaaaatatcccccagcccatcagcaatacatctagagccaacctgaataagctgctgaccgattacaccgaaatgaagaaggcgatcctgcatgtgtactgggaagagttccagaaggaccctgtgggcctgatgagccgggtggcccagcctgccagcaagaagatcgatcagaacaagctgaaacctgagatggacgagaagggcaacctgaccaccgccggctttgcctgctctcagtgtggccagcccctgttcgtgtacaagctggagcaggtgtctgagaagggcaaggcttacaccaactacttcggacggtgcaatgtggccgagcacgaaaagctgatcctgctggcccagctgaagcccgagaaggatagcgacgaagccgtgacatatagcctgggaaagtttgggcagagggccctggatttctacagcattcatgtgaccaaggagtccacccaccccgtgaagcccctggcccagatcgccggaaacagatacgcctccggacctgtgggaaaggccctgagcgacgcatgtatgggcacaatcgcctccttcctgtctaagtaccaggacatcatcatcgaacaccagaaggtggtgaagggcaaccagaagagactggagagcctgcgggagctggccggcaaggaaaacctggaataccctagcgtgaccctgccacctcagcctcacaccaaggagggcgttgatgcctacaacgaagtgatcgcccgggtgcgaatgtgggtgaacctgaacctgtggcagaagctgaagctaagcagagatgatgccaagcctctgctgagactgaagggattcccttcctttcctctggtcgagagacaggccaacgaagtggactggtgggacatggtgtgtaacgtgaagaagctgatcaacgagaaaaaggaggatggcaaggtgttttggcagaatctggctggctacaagagacaggaagccctgagaccatacctgagcagcgaggaagatcggaagaagggaaagaaattcgctcggtaccagctgggcgacctgctgctgcacctggaaaagaagcacggcgaggactggggaaaggtgtacgacgaggcctgggagcggattgacaagaaagtggaaggcctgagcaagcacatcaagctggaagaggaacggagaagcgaggacgcccagagcaaggccgccctgaccgactggctgcgggctaaggccagcttcgtgatcgagggcctgaaggaggccgacaaggacgagttctgcagatgcgagctgaagctgcagaagtggtacggggacctgcggggaaagcccttcgccatcgaagccgagaacagcatcctggacatcagcggcttcagcaagcagtacaactgtgccttcatctggcagaaggacggcgtgaagaagctgaacctgtacctgatcatcaactacttcaagggcggcaagctgcggttcaagaagatcaaacctgaagccttcgaagccaacagattctacaccgtgatcaacaaaaagagcggcgagatcgtgcccatggaggtgaacttcaacttcgacgaccccaacctgatcatcctgcctctggcctttggcaagagacagggcagagaattcatctggaacgacctgctgtccctggaaaccggcagcctgaagctggccaacggaagagtgatcgagaagacactgtacaacagaagaacccggcaggatgagcctgccctgttcgtggccctgaccttcgagcggcgggaggtcctggactcctccaatatcaaaccaatgaacctgatcggcgtggcaagaggcgaaaacatccccgccgtgatcgccctgaccgaccccgagggctgcccactgagccggtttaaggatagcctgggaaacccaacccacatcctgagaatcggcgagagctataaggagaagcagcggaccatccaggccaagaaggaggtggagcagcggagagccggcggctacagccggaagtacgccagcaaagccaagaatctggcagacgatatggtgagaaacaccgctagagatctgctgtactacgccgtgacccaggatgccatgctgatcttcgccaacctgagccggggcttcggccggcagggcaagcggaccttcatggccgagagacagtacacacggatggaggactggctgaccgccaagctggcctacgagggcctgagcaagacctacctgtccaagacactggcccagtacacctccaagacatgcagcaactgtgggtttaccatcaccagcgccgactacgacagggtgctggagaagctgaagaagacagcaacaggctggatgaccacaattaacggcaaggagctgaaggtggagggccagattacctactacaacagatacaagagacagaacgtagtcaaggacctgtccgtcgagctggatagactgagcgaagaatctgtgaacaacgacatctcctcctggacaaagggcagaagcggagaagctctgagcctcctgaagaaaagattctcccatagacccgtgcaggagaagttcgtgtgcctgaactgcggcttcgagacacacgcagccgagcaagccgccctgaacatcgccagatcctggctgttcctgcggagccaggagtacaagaaataccagacaaacaagacaaccggcaacaccgataagagagccttcgtcgagacctggcagtccttttaccggaagaagcttaaggaggtgtggaaacctgccgtgcggtctggcggatctggcggaggctccaccagccccaagaaaaagagaaaagtctaagctgccttctgcggggcttgccttctggccatgcccttcttctctcccttgcacctgtacctcttggtctttgaataaagcctgagtaggaaggctagcaaaaaaaaaaaaaaaaaaaaaaaaaaaaaaaaaaaaaaaaaaaaaaaaaaaaaaaaaaaaaaaaaaaaaaaaaaaaaaaa

SEQ ID NO: 9781 - RNA, 8787 nt, synthetic construct
  source 1..8787: mol_type = other RNA
aggaaataagagagaaaagaagagtaagaagaaatataagagccaccatggcccctaagaagaagcgtaaagtgagccggatgaaccacgaccaggagttcgacccccctaaggtgtaccctcccgtccccgccgagaagagaaagcccatccgggtcctgagcctgttcgatggcatcgccaccggtctgctggtgctgaaggacctgggcatccaggtggataggtacattgcctccgaggtgtgcgaggactccatcaccgtgggaatggtgcgtcatcagggcaagatcatgtacgtgggcgacgtgcggagcgtgacacagaagcatatccaggagtggggccctttcgacctggtgatcggcggcagcccttgcaatgacctgagcatcgtgaacccagcccggaagggcctgtacgagggaaccggcagactgttcttcgagttttacagactgctgcacgacgcccggcctaaggaaggcgacgaccggcccttcttttggctgttcgagaatgtggtggccatgggagtcagcgacaagcgggatattagccggttcctggagagcaaccccgtgatgatcgatgccaaggaagtgagcgccgcccaccgggccagatacttctggggcaatctgcctggcatgaacagacccctggccagcaccgtgaacgacaagctggagctgcaggagtgcctggagcacggccggatcgccaagttcagcaaggtgagaaccatcaccacccgaagcaacagcatcaaacaaggcaaggaccagcactttcctgtgttcatgaacgagaaggaggacatcctgtggtgtaccgagatggagagagtgttcgggttcccagtccactacacagatgtcagcaacatgtctagactggccagacagagactgctgggaagaagctggtccgtccctgtgatcagacacctgttcgcccctctgaaggagtacttcgcctgcgtgagcagcggcaacagcaacgccaacagccggggccccagcttctctagcggcctggtgccactgtccctgagagggagccacatgggccccatggagatctacaaaaccgtgagcgcctggaagcggcagcctgtgcgcgtgctgagcctgtttcggaatatcgataaagtcctgaaaagcctgggattcctggagagcggctctggctccggcggtggcaccctgaagtacgtggaggatgtgacaaacgtggtcagacgggatgtggagaagtggggccccttcgatctggtgtacggcagcacccaacccctgggcagctcttgtgaccggtgccctggctggtacatgtttcagttccaccggatcctgcagtacgccctgccgagacaggagtcccagcggccattcttttggattttcatggacaacttgctgctgaccgaggatgaccaggaaactaccactcggttcctgcagaccgaagccgtgaccctgcaggacgtgagaggccgggactaccagaacgccatgcgggtgtggtccaacatccctggactgaaaagcaagcacgcacctctgacccctaaagaagaggagtacctgcaggcccaggtgcggagcagaagcaagctggacgcccctaaggtggatctgctggtgaagaattgcctcctgcccctgagagagtacttcaagtatttcagccagaatagtctgcccctgggaggcagcggcggcggcttcagcctggaggacgtgagcgtgagcttcagccccgccgagtgggccctgctggaccccgcccagagggccctgtggagggaggtgatgagggagaacgccgagaacgtggccttcctggccaggagcatcggcgagaccctggtggaggccaacaacgaccccgtgagcgagggcaggctggagaggagcagcggcggcgccgaggagcagatcagcttccccaacggcctggccaagaggggcggcccaagcagcggcgcccctcctcccagcggcggcaggcggcccaagcagcggcgcccctcctcccagcggcggcagcccagccggctccccaacctctaccgaggagggcacctctgagtccgccacccccgagagcggccctggcacctccaccgagcccagcgagggcagcgcacccggcagccctgccggcagccccacctccacagaggagggaaccagcaccgagcccagcgaaggcagcgccccaggcaccagcaccgagcctagtgagcaggagattaaacggatcaacaagatcagaagaagacttgtgaaagacagcaacaccaagaaggccggcaagacaggccccatgaaaaccctgctggttagagtgatgacacccgatctgagagagcggctggaaaacctgagaaagaagcctgaaaatatcccccagcccatcagcaatacatctagagccaacctgaataagctgctgaccgattacaccgaaatgaagaaggcgatcctgcatgtgtactgggaagagttccagaaggaccctgtgggcctgatgagccgggtggcccagcctgccagcaagaagatcgatcagaacaagctgaaacctgagatggacgagaagggcaacctgaccaccgccggctttgcctgctctcagtgtggccagcccctgttcgtgtacaagctggagcaggtgtctgagaagggcaaggcttacaccaactacttcggacggtgcaatgtggccgagcacgaaaagctgatcctgctggcccagctgaagcccgagaaggatagcgacgaagccgtgacatatagcctgggaaagtttgggcagagggccctggatttctacagcattcatgtgaccaaggagtccacccaccccgtgaagcccctggcccagatcgccggaaacagatacgcctccggacctgtgggaaaggccctgagcgacgcatgtatgggcacaatcgcctccttcctgtctaagtaccaggacatcatcatcgaacaccagaaggtggtgaagggcaaccagaagagactggagagcctgcgggagctggccggcaaggaaaacctggaataccctagcgtgaccctgccacctcagcctcacaccaaggagggcgttgatgcctacaacgaagtgatcgcccgggtgcgaatgtgggtgaacctgaacctgtggcagaagctgaagctaagcagagatgatgccaagcctctgctgagactgaagggattcccttcctttcctctggtcgagagacaggccaacgaagtggactggtgggacatggtgtgtaacgtgaagaagctgatcaacgagaaaaaggaggatggcaaggtgttttggcagaatctggctggctacaagagacaggaagccctgagaccatacctgagcagcgaggaagatcggaagaagggaaagaaattcgctcggtaccagctgggcgacctgctgctgcacctggaaaagaagcacggcgaggactggggaaaggtgtacgacgaggcctgggagcggattgacaagaaagtggaaggcctgagcaagcacatcaagctggaagaggaacggagaagcgaggacgcccagagcaaggccgccctgaccgactggctgcgggctaaggccagcttcgtgatcgagggcctgaaggaggccgacaaggacgagttctgcagatgcgagctgaagctgcagaagtggtacggggacctgcggggaaagcccttcgccatcgaagccgagaacagcatcctggacatcagcggcttcagcaagcagtacaactgtgccttcatctggcagaaggacggcgtgaagaagctgaacctgtacctgatcatcaactacttcaagggcggcaagctgcggttcaagaagatcaaacctgaagccttcgaagccaacagattctacaccgtgatcaacaaaaagagcggcgagatcgtgcccatggaggtgaacttcaacttcgacgaccccaacctgatcatcctgcctctggcctttggcaagagacagggcagagaattcatctggaacgacctgctgtccctggaaaccggcagcctgaagctggccaacggaagagtgatcgagaagacactgtacaacagaagaacccggcaggatgagcctgccctgttcgtggccctgaccttcgagcggcgggaggtcctggactcctccaatatcaaaccaatgaacctgatcggcgtggcaagaggcgaaaacatccccgccgtgatcgccctgaccgaccccgagggctgcccactgagccggtttaaggatagcctgggaaacccaacccacatcctgagaatcggcgagagctataaggagaagcagcggaccatccaggccaagaaggaggtggagcagcggagagccggcggctacagccggaagtacgccagcaaagccaagaatctggcagacgatatggtgagaaacaccgctagagatctgctgtactacgccgtgacccaggatgccatgctgatcttcgccaacctgagccggggcttcggccggcagggcaagcggaccttcatggccgagagacagtacacacggatggaggactggctgaccgccaagctggcctacgagggcctgagcaagacctacctgtccaagacactggcccagtacacctccaagacatgcagcaactgtgggtttaccatcaccagcgccgactacgacagggtgctggagaagctgaagaagacagcaacaggctggatgaccacaattaacggcaaggagctgaaggtggagggccagattacctactacaacagatacaagagacagaacgtagtcaaggacctgtccgtcgagctggatagactgagcgaagaatctgtgaacaacgacatctcctcctggacaaagggcagaagcggagaagctctgagcctcctgaagaaaagattctcccatagacccgtgcaggagaagttcgtgtgcctgaactgcggcttcgagacacacgcagccgagcaagccgccctgaacatcgccagatcctggctgttcctgcggagccaggagtacaagaaataccagacaaacaagacaaccggcaacaccgataagagagccttcgtcgagacctggcagtccttttaccggaagaagcttaaggaggtgtggaaacctgccgtgcggtctggcggatctggcggaggctccaccagccccaagaaaaagagaaaagtctaagctgccttctgcggggcttgccttctggccatgcccttcttctctcccttgcacctgtacctcttggtctttgaataaagcctgagtaggaaggctagcaaaaaaaaaaaaaaaaaaaaaaaaaaaaaaaaaaaaaaaaaaaaaaaaaaaaaaaaaaaaaaaaaaaaaaaaaaaaaaaagcccagccggctccccaacctctaccgaggagggcacctctgagtccgccacccccgagagcggccctggcacctccaccgagcccagcgagggcagcgcacccggcagccctgccggcagccccacctccacagaggagggaaccagcaccgagcccagcgaaggcagcgccccaggcaccagcaccgagcctagtgagcaggagattaaacggatcaacaagatcagaagaagacttgtgaaagacagcaacaccaagaaggccggcaagacaggccccatgaaaaccctgctggttagagtgatgacacccgatctgagagagcggctggaaaacctgagaaagaagcctgaaaatatcccccagcccatcagcaatacatctagagccaacctgaataagctgctgaccgattacaccgaaatgaagaaggcgatcctgcatgtgtactgggaagagttccagaaggaccctgtgggcctgatgagccgggtggcccagcctgccagcaagaagatcgatcagaacaagctgaaacctgagatggacgagaagggcaacctgaccaccgccggctttgcctgctctcagtgtggccagcccctgttcgtgtacaagctggagcaggtgtctgagaagggcaaggcttacaccaactacttcggacggtgcaatgtggccgagcacgaaaagctgatcctgctggcccagctgaagcccgagaaggatagcgacgaagccgtgacatatagcctgggaaagtttgggcagagggccctggatttctacagcattcatgtgaccaaggagtccacccaccccgtgaagcccctggcccagatcgccggaaacagatacgcctccggacctgtgggaaaggccctgagcgacgcatgtatgggcacaatcgcctccttcctgtctaagtaccaggacatcatcatcgaacaccagaaggtggtgaagggcaaccagaagagactggagagcctgcgggagctggccggcaaggaaaacctggaataccctagcgtgaccctgccacctcagcctcacaccaaggagggcgttgatgcctacaacgaagtgatcgcccgggtgcgaatgtgggtgaacctgaacctgtggcagaagctgaagctaagcagagatgatgccaagcctctgctgagactgaagggattcccttcctttcctctggtcgagagacaggccaacgaagtggactggtgggacatggtgtgtaacgtgaagaagctgatcaacgagaaaaaggaggatggcaaggtgttttggcagaatctggctggctacaagagacaggaagccctgagaccatacctgagcagcgaggaagatcggaagaagggaaagaaattcgctcggtaccagctgggcgacctgctgctgcacctggaaaagaagcacggcgaggactggggaaaggtgtacgacgaggcctgggagcggattgacaagaaagtggaaggcctgagcaagcacatcaagctggaagaggaacggagaagcgaggacgcccagagcaaggccgccctgaccgactggctgcgggctaaggccagcttcgtgatcgagggcctgaaggaggccgacaaggacgagttctgcagatgcgagctgaagctgcagaagtggtacggggacctgcggggaaagcccttcgccatcgaagccgagaacagcatcctggacatcagcggcttcagcaagcagtacaactgtgccttcatctggcagaaggacggcgtgaagaagctgaacctgtacctgatcatcaactacttcaagggcggcaagctgcggttcaagaagatcaaacctgaagccttcgaagccaacagattctacaccgtgatcaacaaaaagagcggcgagatcgtgcccatggaggtgaacttcaacttcgacgaccccaacctgatcatcctgcctctggcctttggcaagagacagggcagagaattcatctggaacgacctgctgtccctggaaaccggcagcctgaagctggccaacggaagagtgatcgagaagacactgtacaacagaagaacccggcaggatgagcctgccctgttcgtggccctgaccttcgagcggcgggaggtcctggactcctccaatatcaaaccaatgaacctgatcggcgtggcaagaggcgaaaacatccccgccgtgatcgccctgaccgaccccgagggctgcccactgagccggtttaaggatagcctgggaaacccaacccacatcctgagaatcggcgagagctataaggagaagcagcggaccatccaggccaagaaggaggtggagcagcggagagccggcggctacagccggaagtacgccagcaaagccaagaatctggcagacgatatggtgagaaacaccgctagagatctgctgtactacgccgtgacccaggatgccatgctgatcttcgccaacctgagccggggcttcggccggcagggcaagcggaccttcatggccgagagacagtacacacggatggaggactggctgaccgccaagctggcctacgagggcctgagcaagacctacctgtccaagacactggcccagtacacctccaagacatgcagcaactgtgggtttaccatcaccagcgccgactacgacagggtgctggagaagctgaagaagacagcaacaggctggatgaccacaattaacggcaaggagctgaaggtggagggccagattacctactacaacagatacaagagacagaacgtagtcaaggacctgtccgtcgagctggatagactgagcgaagaatctgtgaacaacgacatctcctcctggacaaagggcagaagcggagaagctctgagcctcctgaagaaaagattctcccatagacccgtgcaggagaagttcgtgtgcctgaactgcggcttcgagacacacgcagccgagcaagccgccctgaacatcgccagatcctggctgttcctgcggagccaggagtacaagaaataccagacaaacaagacaaccggcaacaccgataagagagccttcgtcgagacctggcagtccttttaccggaagaagcttaaggaggtgtggaaacctgccgtgcggtctggcggatctggcggaggctccaccagccccaagaaaaagagaaaagtctaagctgccttctgcggggcttgccttctggccatgcccttcttctctcccttgcacctgtacctcttggtctttgaataaagcctgagtaggaaggctagcaaaaaaaaaaaaaaaaaaaaaaaaaaaaaaaaaaaaaaaaaaaaaaaaaaaaaaaaaaaaaaaaaaaaaaaaaaaaaaaa

SEQ ID NO: 9782 - RNA, 8787 nt, synthetic construct
  source 1..8787: mol_type = other RNA
aggaaataagagagaaaagaagagtaagaagaaatataagagccaccatggcccctaagaagaagcgtaaagtgagccggatgaaccacgaccaggagttcgacccccctaaggtgtaccctcccgtccccgccgagaagagaaagcccatccgggtcctgagcctgttcgatggcatcgccaccggtctgctggtgctgaaggacctgggcatccaggtggataggtacattgcctccgaggtgtgcgaggactccatcaccgtgggaatggtgcgtcatcagggcaagatcatgtacgtgggcgacgtgcggagcgtgacacagaagcatatccaggagtggggccctttcgacctggtgatcggcggcagcccttgcaatgacctgagcatcgtgaacccagcccggaagggcctgtacgagggaaccggcagactgttcttcgagttttacagactgctgcacgacgcccggcctaaggaaggcgacgaccggcccttcttttggctgttcgagaatgtggtggccatgggagtcagcgacaagcgggatattagccggttcctggagagcaaccccgtgatgatcgatgccaaggaagtgagcgccgcccaccgggccagatacttctggggcaatctgcctggcatgaacagacccctggccagcaccgtgaacgacaagctggagctgcaggagtgcctggagcacggccggatcgccaagttcagcaaggtgagaaccatcaccacccgaagcaacagcatcaaacaaggcaaggaccagcactttcctgtgttcatgaacgagaaggaggacatcctgtggtgtaccgagatggagagagtgttcgggttcccagtccactacacagatgtcagcaacatgtctagactggccagacagagactgctgggaagaagctggtccgtccctgtgatcagacacctgttcgcccctctgaaggagtacttcgcctgcgtgagcagcggcaacagcaacgccaacagccggggccccagcttctctagcggcctggtgccactgtccctgagagggagccacatgggccccatggagatctacaaaaccgtgagcgcctggaagcggcagcctgtgcgcgtgctgagcctgtttcggaatatcgataaagtcctgaaaagcctgggattcctggagagcggctctggctccggcggtggcaccctgaagtacgtggaggatgtgacaaacgtggtcagacgggatgtggagaagtggggccccttcgatctggtgtacggcagcacccaacccctgggcagctcttgtgaccggtgccctggctggtacatgtttcagttccaccggatcctgcagtacgccctgccgagacaggagtcccagcggccattcttttggattttcatggacaacttgctgctgaccgaggatgaccaggaaactaccactcggttcctgcagaccgaagccgtgaccctgcaggacgtgagaggccgggactaccagaacgccatgcgggtgtggtccaacatccctggactgaaaagcaagcacgcacctctgacccctaaagaagaggagtacctgcaggcccaggtgcggagcagaagcaagctggacgcccctaaggtggatctgctggtgaagaattgcctcctgcccctgagagagtacttcaagtatttcagccagaatagtctgcccctgggaggcagcggcggcggcatggcccacctgatgatgttcagggacgtggccgtggacttcagccaggaggagtgggagtgcctggacctggagcagaggggcctgtacagggacgtgatgctggagaactacagcaacatggtgagcctgggcctgtgcatctaccagcccgaggccttcagcctgctggagaagggcaaggagccctggaagatcctgagggacgagaccaggggcccctgccccgacatgcagagcaggggcggcccaagcagcggcgcccctcctcccagcggcggcaggcggcccaagcagcggcgcccctcctcccagcggcggcagcccagccggctccccaacctctaccgaggagggcacctctgagtccgccacccccgagagcggccctggcacctccaccgagcccagcgagggcagcgcacccggcagccctgccggcagccccacctccacagaggagggaaccagcaccgagcccagcgaaggcagcgccccaggcaccagcaccgagcctagtgagcaggagattaaacggatcaacaagatcagaagaagacttgtgaaagacagcaacaccaagaaggccggcaagacaggccccatgaaaaccctgctggttagagtgatgacacccgatctgagagagcggctggaaaacctgagaaagaagcctgaaaatatcccccagcccatcagcaatacatctagagccaacctgaataagctgctgaccgattacaccgaaatgaagaaggcgatcctgcatgtgtactgggaagagttccagaaggaccctgtgggcctgatgagccgggtggcccagcctgccagcaagaagatcgatcagaacaagctgaaacctgagatggacgagaagggcaacctgaccaccgccggctttgcctgctctcagtgtggccagcccctgttcgtgtacaagctggagcaggtgtctgagaagggcaaggcttacaccaactacttcggacggtgcaatgtggccgagcacgaaaagctgatcctgctggcccagctgaagcccgagaaggatagcgacgaagccgtgacatatagcctgggaaagtttgggcagagggccctggatttctacagcattcatgtgaccaaggagtccacccaccccgtgaagcccctggcccagatcgccggaaacagatacgcctccggacctgtgggaaaggccctgagcgacgcatgtatgggcacaatcgcctccttcctgtctaagtaccaggacatcatcatcgaacaccagaaggtggtgaagggcaaccagaagagactggagagcctgcgggagctggccggcaaggaaaacctggaataccctagcgtgaccctgccacctcagcctcacaccaaggagggcgttgatgcctacaacgaagtgatcgcccgggtgcgaatgtgggtgaacctgaacctgtggcagaagctgaagctaagcagagatgatgccaagcctctgctgagactgaagggattcccttcctttcctctggtcgagagacaggccaacgaagtggactggtgggacatggtgtgtaacgtgaagaagctgatcaacgagaaaaaggaggatggcaaggtgttttggcagaatctggctggctacaagagacaggaagccctgagaccatacctgagcagcgaggaagatcggaagaagggaaagaaattcgctcggtaccagctgggcgacctgctgctgcacctggaaaagaagcacggcgaggactggggaaaggtgtacgacgaggcctgggagcggattgacaagaaagtggaaggcctgagcaagcacatcaagctggaagaggaacggagaagcgaggacgcccagagcaaggccgccctgaccgactggctgcgggctaaggccagcttcgtgatcgagggcctgaaggaggccgacaaggacgagttctgcagatgcgagctgaagctgcagaagtggtacggggacctgcggggaaagcccttcgccatcgaagccgagaacagcatcctggacatcagcggcttcagcaagcagtacaactgtgccttcatctggcagaaggacggcgtgaagaagctgaacctgtacctgatcatcaactacttcaagggcggcaagctgcggttcaagaagatcaaacctgaagccttcgaagccaacagattctacaccgtgatcaacaaaaagagcggcgagatcgtgcccatggaggtgaacttcaacttcgacgaccccaacctgatcatcctgcctctggcctttggcaagagacagggcagagaattcatctggaacgacctgctgtccctggaaaccggcagcctgaagctggccaacggaagagtgatcgagaagacactgtacaacagaagaacccggcaggatgagcctgccctgttcgtggccctgaccttcgagcggcgggaggtcctggactcctccaatatcaaaccaatgaacctgatcggcgtggcaagaggcgaaaacatccccgccgtgatcgccctgaccgaccccgagggctgcccactgagccggtttaaggatagcctgggaaacccaacccacatcctgagaatcggcgagagctataaggagaagcagcggaccatccaggccaagaaggaggtggagcagcggagagccggcggctacagccggaagtacgccagcaaagccaagaatctggcagacgatatggtgagaaacaccgctagagatctgctgtactacgccgtgacccaggatgccatgctgatcttcgccaacctgagccggggcttcggccggcagggcaagcggaccttcatggccgagagacagtacacacggatggaggactggctgaccgccaagctggcctacgagggcctgagcaagacctacctgtccaagacactggcccagtacacctccaagacatgcagcaactgtgggtttaccatcaccagcgccgactacgacagggtgctggagaagctgaagaagacagcaacaggctggatgaccacaattaacggcaaggagctgaaggtggagggccagattacctactacaacagatacaagagacagaacgtagtcaaggacctgtccgtcgagctggatagactgagcgaagaatctgtgaacaacgacatctcctcctggacaaagggcagaagcggagaagctctgagcctcctgaagaaaagattctcccatagacccgtgcaggagaagttcgtgtgcctgaactgcggcttcgagacacacgcagccgagcaagccgccctgaacatcgccagatcctggctgttcctgcggagccaggagtacaagaaataccagacaaacaagacaaccggcaacaccgataagagagccttcgtcgagacctggcagtccttttaccggaagaagcttaaggaggtgtggaaacctgccgtgcggtctggcggatctggcggaggctccaccagccccaagaaaaagagaaaagtctaagctgccttctgcggggcttgccttctggccatgcccttcttctctcccttgcacctgtacctcttggtctttgaataaagcctgagtaggaaggctagcaaaaaaaaaaaaaaaaaaaaaaaaaaaaaaaaaaaaaaaaaaaaaaaaaaaaaaaaaaaaaaaaaaaaaaaaaaaaaaaagcccagccggctccccaacctctaccgaggagggcacctctgagtccgccacccccgagagcggccctggcacctccaccgagcccagcgagggcagcgcacccggcagccctgccggcagccccacctccacagaggagggaaccagcaccgagcccagcgaaggcagcgccccaggcaccagcaccgagcctagtgagcaggagattaaacggatcaacaagatcagaagaagacttgtgaaagacagcaacaccaagaaggccggcaagacaggccccatgaaaaccctgctggttagagtgatgacacccgatctgagagagcggctggaaaacctgagaaagaagcctgaaaatatcccccagcccatcagcaatacatctagagccaacctgaataagctgctgaccgattacaccgaaatgaagaaggcgatcctgcatgtgtactgggaagagttccagaaggaccctgtgggcctgatgagccgggtggcccagcctgccagcaagaagatcgatcagaacaagctgaaacctgagatggacgagaagggcaacctgaccaccgccggctttgcctgctctcagtgtggccagcccctgttcgtgtacaagctggagcaggtgtctgagaagggcaaggcttacaccaactacttcggacggtgcaatgtggccgagcacgaaaagctgatcctgctggcccagctgaagcccgagaaggatagcgacgaagccgtgacatatagcctgggaaagtttgggcagagggccctggatttctacagcattcatgtgaccaaggagtccacccaccccgtgaagcccctggcccagatcgccggaaacagatacgcctccggacctgtgggaaaggccctgagcgacgcatgtatgggcacaatcgcctccttcctgtctaagtaccaggacatcatcatcgaacaccagaaggtggtgaagggcaaccagaagagactggagagcctgcgggagctggccggcaaggaaaacctggaataccctagcgtgaccctgccacctcagcctcacaccaaggagggcgttgatgcctacaacgaagtgatcgcccgggtgcgaatgtgggtgaacctgaacctgtggcagaagctgaagctaagcagagatgatgccaagcctctgctgagactgaagggattcccttcctttcctctggtcgagagacaggccaacgaagtggactggtgggacatggtgtgtaacgtgaagaagctgatcaacgagaaaaaggaggatggcaaggtgttttggcagaatctggctggctacaagagacaggaagccctgagaccatacctgagcagcgaggaagatcggaagaagggaaagaaattcgctcggtaccagctgggcgacctgctgctgcacctggaaaagaagcacggcgaggactggggaaaggtgtacgacgaggcctgggagcggattgacaagaaagtggaaggcctgagcaagcacatcaagctggaagaggaacggagaagcgaggacgcccagagcaaggccgccctgaccgactggctgcgggctaaggccagcttcgtgatcgagggcctgaaggaggccgacaaggacgagttctgcagatgcgagctgaagctgcagaagtggtacggggacctgcggggaaagcccttcgccatcgaagccgagaacagcatcctggacatcagcggcttcagcaagcagtacaactgtgccttcatctggcagaaggacggcgtgaagaagctgaacctgtacctgatcatcaactacttcaagggcggcaagctgcggttcaagaagatcaaacctgaagccttcgaagccaacagattctacaccgtgatcaacaaaaagagcggcgagatcgtgcccatggaggtgaacttcaacttcgacgaccccaacctgatcatcctgcctctggcctttggcaagagacagggcagagaattcatctggaacgacctgctgtccctggaaaccggcagcctgaagctggccaacggaagagtgatcgagaagacactgtacaacagaagaacccggcaggatgagcctgccctgttcgtggccctgaccttcgagcggcgggaggtcctggactcctccaatatcaaaccaatgaacctgatcggcgtggcaagaggcgaaaacatccccgccgtgatcgccctgaccgaccccgagggctgcccactgagccggtttaaggatagcctgggaaacccaacccacatcctgagaatcggcgagagctataaggagaagcagcggaccatccaggccaagaaggaggtggagcagcggagagccggcggctacagccggaagtacgccagcaaagccaagaatctggcagacgatatggtgagaaacaccgctagagatctgctgtactacgccgtgacccaggatgccatgctgatcttcgccaacctgagccggggcttcggccggcagggcaagcggaccttcatggccgagagacagtacacacggatggaggactggctgaccgccaagctggcctacgagggcctgagcaagacctacctgtccaagacactggcccagtacacctccaagacatgcagcaactgtgggtttaccatcaccagcgccgactacgacagggtgctggagaagctgaagaagacagcaacaggctggatgaccacaattaacggcaaggagctgaaggtggagggccagattacctactacaacagatacaagagacagaacgtagtcaaggacctgtccgtcgagctggatagactgagcgaagaatctgtgaacaacgacatctcctcctggacaaagggcagaagcggagaagctctgagcctcctgaagaaaagattctcccatagacccgtgcaggagaagttcgtgtgcctgaactgcggcttcgagacacacgcagccgagcaagccgccctgaacatcgccagatcctggctgttcctgcggagccaggagtacaagaaataccagacaaacaagacaaccggcaacaccgataagagagccttcgtcgagacctggcagtccttttaccggaagaagcttaaggaggtgtggaaacctgccgtgcggtctggcggatctggcggaggctccaccagccccaagaaaaagagaaaagtctaagctgccttctgcggggcttgccttctggccatgcccttcttctctcccttgcacctgtacctcttggtctttgaataaagcctgagtaggaaggctagcaaaaaaaaaaaaaaaaaaaaaaaaaaaaaaaaaaaaaaaaaaaaaaaaaaaaaaaaaaaaaaaaaaaaaaaaaaaaaaaa

SEQ ID NO: 9783 - RNA, 8787 nt, synthetic construct
  source 1..8787: mol_type = other RNA
aggaaataagagagaaaagaagagtaagaagaaatataagagccaccatggcccctaagaagaagcgtaaagtgagccggatgaaccacgaccaggagttcgacccccctaaggtgtaccctcccgtccccgccgagaagagaaagcccatccgggtcctgagcctgttcgatggcatcgccaccggtctgctggtgctgaaggacctgggcatccaggtggataggtacattgcctccgaggtgtgcgaggactccatcaccgtgggaatggtgcgtcatcagggcaagatcatgtacgtgggcgacgtgcggagcgtgacacagaagcatatccaggagtggggccctttcgacctggtgatcggcggcagcccttgcaatgacctgagcatcgtgaacccagcccggaagggcctgtacgagggaaccggcagactgttcttcgagttttacagactgctgcacgacgcccggcctaaggaaggcgacgaccggcccttcttttggctgttcgagaatgtggtggccatgggagtcagcgacaagcgggatattagccggttcctggagagcaaccccgtgatgatcgatgccaaggaagtgagcgccgcccaccgggccagatacttctggggcaatctgcctggcatgaacagacccctggccagcaccgtgaacgacaagctggagctgcaggagtgcctggagcacggccggatcgccaagttcagcaaggtgagaaccatcaccacccgaagcaacagcatcaaacaaggcaaggaccagcactttcctgtgttcatgaacgagaaggaggacatcctgtggtgtaccgagatggagagagtgttcgggttcccagtccactacacagatgtcagcaacatgtctagactggccagacagagactgctgggaagaagctggtccgtccctgtgatcagacacctgttcgcccctctgaaggagtacttcgcctgcgtgagcagcggcaacagcaacgccaacagccggggccccagcttctctagcggcctggtgccactgtccctgagagggagccacatgggccccatggagatctacaaaaccgtgagcgcctggaagcggcagcctgtgcgcgtgctgagcctgtttcggaatatcgataaagtcctgaaaagcctgggattcctggagagcggctctggctccggcggtggcaccctgaagtacgtggaggatgtgacaaacgtggtcagacgggatgtggagaagtggggccccttcgatctggtgtacggcagcacccaacccctgggcagctcttgtgaccggtgccctggctggtacatgtttcagttccaccggatcctgcagtacgccctgccgagacaggagtcccagcggccattcttttggattttcatggacaacttgctgctgaccgaggatgaccaggaaactaccactcggttcctgcagaccgaagccgtgaccctgcaggacgtgagaggccgggactaccagaacgccatgcgggtgtggtccaacatccctggactgaaaagcaagcacgcacctctgacccctaaagaagaggagtacctgcaggcccaggtgcggagcagaagcaagctggacgcccctaaggtggatctgctggtgaagaattgcctcctgcccctgagagagtacttcaagtatttcagccagaatagtctgcccctgggaggcagcggcggcggcatggacgccgtgacctacgaggacgtgcaggtgagcttcaccagggaggagtggaccctgctggaccccagccagaagagcctgtacaaggacgtgatggtggagacctacaggaacctgaccgccatcggctacaagtgggaggaccagaacatcaagaagcaccaccagtgcagcaggaggcacggcaggcacgagaggagcaacagcgccgagaaggactacgagtgcgagcagtgcggcggcggcccaagcagcggcgcccctcctcccagcggcggcaggcggcccaagcagcggcgcccctcctcccagcggcggcagcccagccggctccccaacctctaccgaggagggcacctctgagtccgccacccccgagagcggccctggcacctccaccgagcccagcgagggcagcgcacccggcagccctgccggcagccccacctccacagaggagggaaccagcaccgagcccagcgaaggcagcgccccaggcaccagcaccgagcctagtgagcaggagattaaacggatcaacaagatcagaagaagacttgtgaaagacagcaacaccaagaaggccggcaagacaggccccatgaaaaccctgctggttagagtgatgacacccgatctgagagagcggctggaaaacctgagaaagaagcctgaaaatatcccccagcccatcagcaatacatctagagccaacctgaataagctgctgaccgattacaccgaaatgaagaaggcgatcctgcatgtgtactgggaagagttccagaaggaccctgtgggcctgatgagccgggtggcccagcctgccagcaagaagatcgatcagaacaagctgaaacctgagatggacgagaagggcaacctgaccaccgccggctttgcctgctctcagtgtggccagcccctgttcgtgtacaagctggagcaggtgtctgagaagggcaaggcttacaccaactacttcggacggtgcaatgtggccgagcacgaaaagctgatcctgctggcccagctgaagcccgagaaggatagcgacgaagccgtgacatatagcctgggaaagtttgggcagagggccctggatttctacagcattcatgtgaccaaggagtccacccaccccgtgaagcccctggcccagatcgccggaaacagatacgcctccggacctgtgggaaaggccctgagcgacgcatgtatgggcacaatcgcctccttcctgtctaagtaccaggacatcatcatcgaacaccagaaggtggtgaagggcaaccagaagagactggagagcctgcgggagctggccggcaaggaaaacctggaataccctagcgtgaccctgccacctcagcctcacaccaaggagggcgttgatgcctacaacgaagtgatcgcccgggtgcgaatgtgggtgaacctgaacctgtggcagaagctgaagctaagcagagatgatgccaagcctctgctgagactgaagggattcccttcctttcctctggtcgagagacaggccaacgaagtggactggtgggacatggtgtgtaacgtgaagaagctgatcaacgagaaaaaggaggatggcaaggtgttttggcagaatctggctggctacaagagacaggaagccctgagaccatacctgagcagcgaggaagatcggaagaagggaaagaaattcgctcggtaccagctgggcgacctgctgctgcacctggaaaagaagcacggcgaggactggggaaaggtgtacgacgaggcctgggagcggattgacaagaaagtggaaggcctgagcaagcacatcaagctggaagaggaacggagaagcgaggacgcccagagcaaggccgccctgaccgactggctgcgggctaaggccagcttcgtgatcgagggcctgaaggaggccgacaaggacgagttctgcagatgcgagctgaagctgcagaagtggtacggggacctgcggggaaagcccttcgccatcgaagccgagaacagcatcctggacatcagcggcttcagcaagcagtacaactgtgccttcatctggcagaaggacggcgtgaagaagctgaacctgtacctgatcatcaactacttcaagggcggcaagctgcggttcaagaagatcaaacctgaagccttcgaagccaacagattctacaccgtgatcaacaaaaagagcggcgagatcgtgcccatggaggtgaacttcaacttcgacgaccccaacctgatcatcctgcctctggcctttggcaagagacagggcagagaattcatctggaacgacctgctgtccctggaaaccggcagcctgaagctggccaacggaagagtgatcgagaagacactgtacaacagaagaacccggcaggatgagcctgccctgttcgtggccctgaccttcgagcggcgggaggtcctggactcctccaatatcaaaccaatgaacctgatcggcgtggcaagaggcgaaaacatccccgccgtgatcgccctgaccgaccccgagggctgcccactgagccggtttaaggatagcctgggaaacccaacccacatcctgagaatcggcgagagctataaggagaagcagcggaccatccaggccaagaaggaggtggagcagcggagagccggcggctacagccggaagtacgccagcaaagccaagaatctggcagacgatatggtgagaaacaccgctagagatctgctgtactacgccgtgacccaggatgccatgctgatcttcgccaacctgagccggggcttcggccggcagggcaagcggaccttcatggccgagagacagtacacacggatggaggactggctgaccgccaagctggcctacgagggcctgagcaagacctacctgtccaagacactggcccagtacacctccaagacatgcagcaactgtgggtttaccatcaccagcgccgactacgacagggtgctggagaagctgaagaagacagcaacaggctggatgaccacaattaacggcaaggagctgaaggtggagggccagattacctactacaacagatacaagagacagaacgtagtcaaggacctgtccgtcgagctggatagactgagcgaagaatctgtgaacaacgacatctcctcctggacaaagggcagaagcggagaagctctgagcctcctgaagaaaagattctcccatagacccgtgcaggagaagttcgtgtgcctgaactgcggcttcgagacacacgcagccgagcaagccgccctgaacatcgccagatcctggctgttcctgcggagccaggagtacaagaaataccagacaaacaagacaaccggcaacaccgataagagagccttcgtcgagacctggcagtccttttaccggaagaagcttaaggaggtgtggaaacctgccgtgcggtctggcggatctggcggaggctccaccagccccaagaaaaagagaaaagtctaagctgccttctgcggggcttgccttctggccatgcccttcttctctcccttgcacctgtacctcttggtctttgaataaagcctgagtaggaaggctagcaaaaaaaaaaaaaaaaaaaaaaaaaaaaaaaaaaaaaaaaaaaaaaaaaaaaaaaaaaaaaaaaaaaaaaaaaaaaaaaagcccagccggctccccaacctctaccgaggagggcacctctgagtccgccacccccgagagcggccctggcacctccaccgagcccagcgagggcagcgcacccggcagccctgccggcagccccacctccacagaggagggaaccagcaccgagcccagcgaaggcagcgccccaggcaccagcaccgagcctagtgagcaggagattaaacggatcaacaagatcagaagaagacttgtgaaagacagcaacaccaagaaggccggcaagacaggccccatgaaaaccctgctggttagagtgatgacacccgatctgagagagcggctggaaaacctgagaaagaagcctgaaaatatcccccagcccatcagcaatacatctagagccaacctgaataagctgctgaccgattacaccgaaatgaagaaggcgatcctgcatgtgtactgggaagagttccagaaggaccctgtgggcctgatgagccgggtggcccagcctgccagcaagaagatcgatcagaacaagctgaaacctgagatggacgagaagggcaacctgaccaccgccggctttgcctgctctcagtgtggccagcccctgttcgtgtacaagctggagcaggtgtctgagaagggcaaggcttacaccaactacttcggacggtgcaatgtggccgagcacgaaaagctgatcctgctggcccagctgaagcccgagaaggatagcgacgaagccgtgacatatagcctgggaaagtttgggcagagggccctggatttctacagcattcatgtgaccaaggagtccacccaccccgtgaagcccctggcccagatcgccggaaacagatacgcctccggacctgtgggaaaggccctgagcgacgcatgtatgggcacaatcgcctccttcctgtctaagtaccaggacatcatcatcgaacaccagaaggtggtgaagggcaaccagaagagactggagagcctgcgggagctggccggcaaggaaaacctggaataccctagcgtgaccctgccacctcagcctcacaccaaggagggcgttgatgcctacaacgaagtgatcgcccgggtgcgaatgtgggtgaacctgaacctgtggcagaagctgaagctaagcagagatgatgccaagcctctgctgagactgaagggattcccttcctttcctctggtcgagagacaggccaacgaagtggactggtgggacatggtgtgtaacgtgaagaagctgatcaacgagaaaaaggaggatggcaaggtgttttggcagaatctggctggctacaagagacaggaagccctgagaccatacctgagcagcgaggaagatcggaagaagggaaagaaattcgctcggtaccagctgggcgacctgctgctgcacctggaaaagaagcacggcgaggactggggaaaggtgtacgacgaggcctgggagcggattgacaagaaagtggaaggcctgagcaagcacatcaagctggaagaggaacggagaagcgaggacgcccagagcaaggccgccctgaccgactggctgcgggctaaggccagcttcgtgatcgagggcctgaaggaggccgacaaggacgagttctgcagatgcgagctgaagctgcagaagtggtacggggacctgcggggaaagcccttcgccatcgaagccgagaacagcatcctggacatcagcggcttcagcaagcagtacaactgtgccttcatctggcagaaggacggcgtgaagaagctgaacctgtacctgatcatcaactacttcaagggcggcaagctgcggttcaagaagatcaaacctgaagccttcgaagccaacagattctacaccgtgatcaacaaaaagagcggcgagatcgtgcccatggaggtgaacttcaacttcgacgaccccaacctgatcatcctgcctctggcctttggcaagagacagggcagagaattcatctggaacgacctgctgtccctggaaaccggcagcctgaagctggccaacggaagagtgatcgagaagacactgtacaacagaagaacccggcaggatgagcctgccctgttcgtggccctgaccttcgagcggcgggaggtcctggactcctccaatatcaaaccaatgaacctgatcggcgtggcaagaggcgaaaacatccccgccgtgatcgccctgaccgaccccgagggctgcccactgagccggtttaaggatagcctgggaaacccaacccacatcctgagaatcggcgagagctataaggagaagcagcggaccatccaggccaagaaggaggtggagcagcggagagccggcggctacagccggaagtacgccagcaaagccaagaatctggcagacgatatggtgagaaacaccgctagagatctgctgtactacgccgtgacccaggatgccatgctgatcttcgccaacctgagccggggcttcggccggcagggcaagcggaccttcatggccgagagacagtacacacggatggaggactggctgaccgccaagctggcctacgagggcctgagcaagacctacctgtccaagacactggcccagtacacctccaagacatgcagcaactgtgggtttaccatcaccagcgccgactacgacagggtgctggagaagctgaagaagacagcaacaggctggatgaccacaattaacggcaaggagctgaaggtggagggccagattacctactacaacagatacaagagacagaacgtagtcaaggacctgtccgtcgagctggatagactgagcgaagaatctgtgaacaacgacatctcctcctggacaaagggcagaagcggagaagctctgagcctcctgaagaaaagattctcccatagacccgtgcaggagaagttcgtgtgcctgaactgcggcttcgagacacacgcagccgagcaagccgccctgaacatcgccagatcctggctgttcctgcggagccaggagtacaagaaataccagacaaacaagacaaccggcaacaccgataagagagccttcgtcgagacctggcagtccttttaccggaagaagcttaaggaggtgtggaaacctgccgtgcggtctggcggatctggcggaggctccaccagccccaagaaaaagagaaaagtctaagctgccttctgcggggcttgccttctggccatgcccttcttctctcccttgcacctgtacctcttggtctttgaataaagcctgagtaggaaggctagcaaaaaaaaaaaaaaaaaaaaaaaaaaaaaaaaaaaaaaaaaaaaaaaaaaaaaaaaaaaaaaaaaaaaaaaaaaaaaaaa

SEQ ID NO: 9784 - RNA, 8787 nt, synthetic construct
  source 1..8787: mol_type = other RNA
aggaaataagagagaaaagaagagtaagaagaaatataagagccaccatggcccctaagaagaagcgtaaagtgagccggatgaaccacgaccaggagttcgacccccctaaggtgtaccctcccgtccccgccgagaagagaaagcccatccgggtcctgagcctgttcgatggcatcgccaccggtctgctggtgctgaaggacctgggcatccaggtggataggtacattgcctccgaggtgtgcgaggactccatcaccgtgggaatggtgcgtcatcagggcaagatcatgtacgtgggcgacgtgcggagcgtgacacagaagcatatccaggagtggggccctttcgacctggtgatcggcggcagcccttgcaatgacctgagcatcgtgaacccagcccggaagggcctgtacgagggaaccggcagactgttcttcgagttttacagactgctgcacgacgcccggcctaaggaaggcgacgaccggcccttcttttggctgttcgagaatgtggtggccatgggagtcagcgacaagcgggatattagccggttcctggagagcaaccccgtgatgatcgatgccaaggaagtgagcgccgcccaccgggccagatacttctggggcaatctgcctggcatgaacagacccctggccagcaccgtgaacgacaagctggagctgcaggagtgcctggagcacggccggatcgccaagttcagcaaggtgagaaccatcaccacccgaagcaacagcatcaaacaaggcaaggaccagcactttcctgtgttcatgaacgagaaggaggacatcctgtggtgtaccgagatggagagagtgttcgggttcccagtccactacacagatgtcagcaacatgtctagactggccagacagagactgctgggaagaagctggtccgtccctgtgatcagacacctgttcgcccctctgaaggagtacttcgcctgcgtgagcagcggcaacagcaacgccaacagccggggccccagcttctctagcggcctggtgccactgtccctgagagggagccacatgggccccatggagatctacaaaaccgtgagcgcctggaagcggcagcctgtgcgcgtgctgagcctgtttcggaatatcgataaagtcctgaaaagcctgggattcctggagagcggctctggctccggcggtggcaccctgaagtacgtggaggatgtgacaaacgtggtcagacgggatgtggagaagtggggccccttcgatctggtgtacggcagcacccaacccctgggcagctcttgtgaccggtgccctggctggtacatgtttcagttccaccggatcctgcagtacgccctgccgagacaggagtcccagcggccattcttttggattttcatggacaacttgctgctgaccgaggatgaccaggaaactaccactcggttcctgcagaccgaagccgtgaccctgcaggacgtgagaggccgggactaccagaacgccatgcgggtgtggtccaacatccctggactgaaaagcaagcacgcacctctgacccctaaagaagaggagtacctgcaggcccaggtgcggagcagaagcaagctggacgcccctaaggtggatctgctggtgaagaattgcctcctgcccctgagagagtacttcaagtatttcagccagaatagtctgcccctgggaggcagcggcggcggccaggagctgctgaccttcaaggacgtgagcgtggagttcagcatggacgagtgggcctgcctggaccccgcccagcagaccctgtaccaggacgtgatgctggagaactacaggcacctggtgttcctgggcctgaccctgagcaagcccgacctgatcacctgcctggagcagagcaaggagccctggaaggtgaagagccaccagaccgtggtgaagcaccccgccgtgagcgacccccccggcggcccaagcagcggcgcccctcctcccagcggcggcaggcggcccaagcagcggcgcccctcctcccagcggcggcagcccagccggctccccaacctctaccgaggagggcacctctgagtccgccacccccgagagcggccctggcacctccaccgagcccagcgagggcagcgcacccggcagccctgccggcagccccacctccacagaggagggaaccagcaccgagcccagcgaaggcagcgccccaggcaccagcaccgagcctagtgagcaggagattaaacggatcaacaagatcagaagaagacttgtgaaagacagcaacaccaagaaggccggcaagacaggccccatgaaaaccctgctggttagagtgatgacacccgatctgagagagcggctggaaaacctgagaaagaagcctgaaaatatcccccagcccatcagcaatacatctagagccaacctgaataagctgctgaccgattacaccgaaatgaagaaggcgatcctgcatgtgtactgggaagagttccagaaggaccctgtgggcctgatgagccgggtggcccagcctgccagcaagaagatcgatcagaacaagctgaaacctgagatggacgagaagggcaacctgaccaccgccggctttgcctgctctcagtgtggccagcccctgttcgtgtacaagctggagcaggtgtctgagaagggcaaggcttacaccaactacttcggacggtgcaatgtggccgagcacgaaaagctgatcctgctggcccagctgaagcccgagaaggatagcgacgaagccgtgacatatagcctgggaaagtttgggcagagggccctggatttctacagcattcatgtgaccaaggagtccacccaccccgtgaagcccctggcccagatcgccggaaacagatacgcctccggacctgtgggaaaggccctgagcgacgcatgtatgggcacaatcgcctccttcctgtctaagtaccaggacatcatcatcgaacaccagaaggtggtgaagggcaaccagaagagactggagagcctgcgggagctggccggcaaggaaaacctggaataccctagcgtgaccctgccacctcagcctcacaccaaggagggcgttgatgcctacaacgaagtgatcgcccgggtgcgaatgtgggtgaacctgaacctgtggcagaagctgaagctaagcagagatgatgccaagcctctgctgagactgaagggattcccttcctttcctctggtcgagagacaggccaacgaagtggactggtgggacatggtgtgtaacgtgaagaagctgatcaacgagaaaaaggaggatggcaaggtgttttggcagaatctggctggctacaagagacaggaagccctgagaccatacctgagcagcgaggaagatcggaagaagggaaagaaattcgctcggtaccagctgggcgacctgctgctgcacctggaaaagaagcacggcgaggactggggaaaggtgtacgacgaggcctgggagcggattgacaagaaagtggaaggcctgagcaagcacatcaagctggaagaggaacggagaagcgaggacgcccagagcaaggccgccctgaccgactggctgcgggctaaggccagcttcgtgatcgagggcctgaaggaggccgacaaggacgagttctgcagatgcgagctgaagctgcagaagtggtacggggacctgcggggaaagcccttcgccatcgaagccgagaacagcatcctggacatcagcggcttcagcaagcagtacaactgtgccttcatctggcagaaggacggcgtgaagaagctgaacctgtacctgatcatcaactacttcaagggcggcaagctgcggttcaagaagatcaaacctgaagccttcgaagccaacagattctacaccgtgatcaacaaaaagagcggcgagatcgtgcccatggaggtgaacttcaacttcgacgaccccaacctgatcatcctgcctctggcctttggcaagagacagggcagagaattcatctggaacgacctgctgtccctggaaaccggcagcctgaagctggccaacggaagagtgatcgagaagacactgtacaacagaagaacccggcaggatgagcctgccctgttcgtggccctgaccttcgagcggcgggaggtcctggactcctccaatatcaaaccaatgaacctgatcggcgtggcaagaggcgaaaacatccccgccgtgatcgccctgaccgaccccgagggctgcccactgagccggtttaaggatagcctgggaaacccaacccacatcctgagaatcggcgagagctataaggagaagcagcggaccatccaggccaagaaggaggtggagcagcggagagccggcggctacagccggaagtacgccagcaaagccaagaatctggcagacgatatggtgagaaacaccgctagagatctgctgtactacgccgtgacccaggatgccatgctgatcttcgccaacctgagccggggcttcggccggcagggcaagcggaccttcatggccgagagacagtacacacggatggaggactggctgaccgccaagctggcctacgagggcctgagcaagacctacctgtccaagacactggcccagtacacctccaagacatgcagcaactgtgggtttaccatcaccagcgccgactacgacagggtgctggagaagctgaagaagacagcaacaggctggatgaccacaattaacggcaaggagctgaaggtggagggccagattacctactacaacagatacaagagacagaacgtagtcaaggacctgtccgtcgagctggatagactgagcgaagaatctgtgaacaacgacatctcctcctggacaaagggcagaagcggagaagctctgagcctcctgaagaaaagattctcccatagacccgtgcaggagaagttcgtgtgcctgaactgcggcttcgagacacacgcagccgagcaagccgccctgaacatcgccagatcctggctgttcctgcggagccaggagtacaagaaataccagacaaacaagacaaccggcaacaccgataagagagccttcgtcgagacctggcagtccttttaccggaagaagcttaaggaggtgtggaaacctgccgtgcggtctggcggatctggcggaggctccaccagccccaagaaaaagagaaaagtctaagctgccttctgcggggcttgccttctggccatgcccttcttctctcccttgcacctgtacctcttggtctttgaataaagcctgagtaggaaggctagcaaaaaaaaaaaaaaaaaaaaaaaaaaaaaaaaaaaaaaaaaaaaaaaaaaaaaaaaaaaaaaaaaaaaaaaaaaaaaaaagcccagccggctccccaacctctaccgaggagggcacctctgagtccgccacccccgagagcggccctggcacctccaccgagcccagcgagggcagcgcacccggcagccctgccggcagccccacctccacagaggagggaaccagcaccgagcccagcgaaggcagcgccccaggcaccagcaccgagcctagtgagcaggagattaaacggatcaacaagatcagaagaagacttgtgaaagacagcaacaccaagaaggccggcaagacaggccccatgaaaaccctgctggttagagtgatgacacccgatctgagagagcggctggaaaacctgagaaagaagcctgaaaatatcccccagcccatcagcaatacatctagagccaacctgaataagctgctgaccgattacaccgaaatgaagaaggcgatcctgcatgtgtactgggaagagttccagaaggaccctgtgggcctgatgagccgggtggcccagcctgccagcaagaagatcgatcagaacaagctgaaacctgagatggacgagaagggcaacctgaccaccgccggctttgcctgctctcagtgtggccagcccctgttcgtgtacaagctggagcaggtgtctgagaagggcaaggcttacaccaactacttcggacggtgcaatgtggccgagcacgaaaagctgatcctgctggcccagctgaagcccgagaaggatagcgacgaagccgtgacatatagcctgggaaagtttgggcagagggccctggatttctacagcattcatgtgaccaaggagtccacccaccccgtgaagcccctggcccagatcgccggaaacagatacgcctccggacctgtgggaaaggccctgagcgacgcatgtatgggcacaatcgcctccttcctgtctaagtaccaggacatcatcatcgaacaccagaaggtggtgaagggcaaccagaagagactggagagcctgcgggagctggccggcaaggaaaacctggaataccctagcgtgaccctgccacctcagcctcacaccaaggagggcgttgatgcctacaacgaagtgatcgcccgggtgcgaatgtgggtgaacctgaacctgtggcagaagctgaagctaagcagagatgatgccaagcctctgctgagactgaagggattcccttcctttcctctggtcgagagacaggccaacgaagtggactggtgggacatggtgtgtaacgtgaagaagctgatcaacgagaaaaaggaggatggcaaggtgttttggcagaatctggctggctacaagagacaggaagccctgagaccatacctgagcagcgaggaagatcggaagaagggaaagaaattcgctcggtaccagctgggcgacctgctgctgcacctggaaaagaagcacggcgaggactggggaaaggtgtacgacgaggcctgggagcggattgacaagaaagtggaaggcctgagcaagcacatcaagctggaagaggaacggagaagcgaggacgcccagagcaaggccgccctgaccgactggctgcgggctaaggccagcttcgtgatcgagggcctgaaggaggccgacaaggacgagttctgcagatgcgagctgaagctgcagaagtggtacggggacctgcggggaaagcccttcgccatcgaagccgagaacagcatcctggacatcagcggcttcagcaagcagtacaactgtgccttcatctggcagaaggacggcgtgaagaagctgaacctgtacctgatcatcaactacttcaagggcggcaagctgcggttcaagaagatcaaacctgaagccttcgaagccaacagattctacaccgtgatcaacaaaaagagcggcgagatcgtgcccatggaggtgaacttcaacttcgacgaccccaacctgatcatcctgcctctggcctttggcaagagacagggcagagaattcatctggaacgacctgctgtccctggaaaccggcagcctgaagctggccaacggaagagtgatcgagaagacactgtacaacagaagaacccggcaggatgagcctgccctgttcgtggccctgaccttcgagcggcgggaggtcctggactcctccaatatcaaaccaatgaacctgatcggcgtggcaagaggcgaaaacatccccgccgtgatcgccctgaccgaccccgagggctgcccactgagccggtttaaggatagcctgggaaacccaacccacatcctgagaatcggcgagagctataaggagaagcagcggaccatccaggccaagaaggaggtggagcagcggagagccggcggctacagccggaagtacgccagcaaagccaagaatctggcagacgatatggtgagaaacaccgctagagatctgctgtactacgccgtgacccaggatgccatgctgatcttcgccaacctgagccggggcttcggccggcagggcaagcggaccttcatggccgagagacagtacacacggatggaggactggctgaccgccaagctggcctacgagggcctgagcaagacctacctgtccaagacactggcccagtacacctccaagacatgcagcaactgtgggtttaccatcaccagcgccgactacgacagggtgctggagaagctgaagaagacagcaacaggctggatgaccacaattaacggcaaggagctgaaggtggagggccagattacctactacaacagatacaagagacagaacgtagtcaaggacctgtccgtcgagctggatagactgagcgaagaatctgtgaacaacgacatctcctcctggacaaagggcagaagcggagaagctctgagcctcctgaagaaaagattctcccatagacccgtgcaggagaagttcgtgtgcctgaactgcggcttcgagacacacgcagccgagcaagccgccctgaacatcgccagatcctggctgttcctgcggagccaggagtacaagaaataccagacaaacaagacaaccggcaacaccgataagagagccttcgtcgagacctggcagtccttttaccggaagaagcttaaggaggtgtggaaacctgccgtgcggtctggcggatctggcggaggctccaccagccccaagaaaaagagaaaagtctaagctgccttctgcggggcttgccttctggccatgcccttcttctctcccttgcacctgtacctcttggtctttgaataaagcctgagtaggaaggctagcaaaaaaaaaaaaaaaaaaaaaaaaaaaaaaaaaaaaaaaaaaaaaaaaaaaaaaaaaaaaaaaaaaaaaaaaaaaaaaaa

SEQ ID NO: 9785 - RNA, 8820 nt, synthetic construct
  source 1..8820: mol_type = other RNA
aggaaataagagagaaaagaagagtaagaagaaatataagagccaccatggcccctaagaagaagcgtaaagtgagccggatgaaccacgaccaggagttcgacccccctaaggtgtaccctcccgtccccgccgagaagagaaagcccatccgggtcctgagcctgttcgatggcatcgccaccggtctgctggtgctgaaggacctgggcatccaggtggataggtacattgcctccgaggtgtgcgaggactccatcaccgtgggaatggtgcgtcatcagggcaagatcatgtacgtgggcgacgtgcggagcgtgacacagaagcatatccaggagtggggccctttcgacctggtgatcggcggcagcccttgcaatgacctgagcatcgtgaacccagcccggaagggcctgtacgagggaaccggcagactgttcttcgagttttacagactgctgcacgacgcccggcctaaggaaggcgacgaccggcccttcttttggctgttcgagaatgtggtggccatgggagtcagcgacaagcgggatattagccggttcctggagagcaaccccgtgatgatcgatgccaaggaagtgagcgccgcccaccgggccagatacttctggggcaatctgcctggcatgaacagacccctggccagcaccgtgaacgacaagctggagctgcaggagtgcctggagcacggccggatcgccaagttcagcaaggtgagaaccatcaccacccgaagcaacagcatcaaacaaggcaaggaccagcactttcctgtgttcatgaacgagaaggaggacatcctgtggtgtaccgagatggagagagtgttcgggttcccagtccactacacagatgtcagcaacatgtctagactggccagacagagactgctgggaagaagctggtccgtccctgtgatcagacacctgttcgcccctctgaaggagtacttcgcctgcgtgagcagcggcaacagcaacgccaacagccggggccccagcttctctagcggcctggtgccactgtccctgagagggagccacatgggccccatggagatctacaaaaccgtgagcgcctggaagcggcagcctgtgcgcgtgctgagcctgtttcggaatatcgataaagtcctgaaaagcctgggattcctggagagcggctctggctccggcggtggcaccctgaagtacgtggaggatgtgacaaacgtggtcagacgggatgtggagaagtggggccccttcgatctggtgtacggcagcacccaacccctgggcagctcttgtgaccggtgccctggctggtacatgtttcagttccaccggatcctgcagtacgccctgccgagacaggagtcccagcggccattcttttggattttcatggacaacttgctgctgaccgaggatgaccaggaaactaccactcggttcctgcagaccgaagccgtgaccctgcaggacgtgagaggccgggactaccagaacgccatgcgggtgtggtccaacatccctggactgaaaagcaagcacgcacctctgacccctaaagaagaggagtacctgcaggcccaggtgcggagcagaagcaagctggacgcccctaaggtggatctgctggtgaagaattgcctcctgcccctgagagagtacttcaagtatttcagccagaatagtctgcccctgggaggcagcggcggcggcgtgacctacgaggacgtgaccgtgaccttcacccaggaggagtgggccctgctgaaccccagcgagaagaagctgtacagggacgtgatgtgggagaacctgaggaacatcttcagcaccggcaagatccagggcgacaactacaacgaggagcagcacaaccaccagggcagcaagcagagctgcagggtggtgaagatcagcggcggccagaagaggagccagaacgacgagaagcagaggatgcagagcgagggcaagagctacgagtgcgagggcggcccaagcagcggcgcccctcctcccagcggcggcaggcggcccaagcagcggcgcccctcctcccagcggcggcagcccagccggctccccaacctctaccgaggagggcacctctgagtccgccacccccgagagcggccctggcacctccaccgagcccagcgagggcagcgcacccggcagccctgccggcagccccacctccacagaggagggaaccagcaccgagcccagcgaaggcagcgccccaggcaccagcaccgagcctagtgagcaggagattaaacggatcaacaagatcagaagaagacttgtgaaagacagcaacaccaagaaggccggcaagacaggccccatgaaaaccctgctggttagagtgatgacacccgatctgagagagcggctggaaaacctgagaaagaagcctgaaaatatcccccagcccatcagcaatacatctagagccaacctgaataagctgctgaccgattacaccgaaatgaagaaggcgatcctgcatgtgtactgggaagagttccagaaggaccctgtgggcctgatgagccgggtggcccagcctgccagcaagaagatcgatcagaacaagctgaaacctgagatggacgagaagggcaacctgaccaccgccggctttgcctgctctcagtgtggccagcccctgttcgtgtacaagctggagcaggtgtctgagaagggcaaggcttacaccaactacttcggacggtgcaatgtggccgagcacgaaaagctgatcctgctggcccagctgaagcccgagaaggatagcgacgaagccgtgacatatagcctgggaaagtttgggcagagggccctggatttctacagcattcatgtgaccaaggagtccacccaccccgtgaagcccctggcccagatcgccggaaacagatacgcctccggacctgtgggaaaggccctgagcgacgcatgtatgggcacaatcgcctccttcctgtctaagtaccaggacatcatcatcgaacaccagaaggtggtgaagggcaaccagaagagactggagagcctgcgggagctggccggcaaggaaaacctggaataccctagcgtgaccctgccacctcagcctcacaccaaggagggcgttgatgcctacaacgaagtgatcgcccgggtgcgaatgtgggtgaacctgaacctgtggcagaagctgaagctaagcagagatgatgccaagcctctgctgagactgaagggattcccttcctttcctctggtcgagagacaggccaacgaagtggactggtgggacatggtgtgtaacgtgaagaagctgatcaacgagaaaaaggaggatggcaaggtgttttggcagaatctggctggctacaagagacaggaagccctgagaccatacctgagcagcgaggaagatcggaagaagggaaagaaattcgctcggtaccagctgggcgacctgctgctgcacctggaaaagaagcacggcgaggactggggaaaggtgtacgacgaggcctgggagcggattgacaagaaagtggaaggcctgagcaagcacatcaagctggaagaggaacggagaagcgaggacgcccagagcaaggccgccctgaccgactggctgcgggctaaggccagcttcgtgatcgagggcctgaaggaggccgacaaggacgagttctgcagatgcgagctgaagctgcagaagtggtacggggacctgcggggaaagcccttcgccatcgaagccgagaacagcatcctggacatcagcggcttcagcaagcagtacaactgtgccttcatctggcagaaggacggcgtgaagaagctgaacctgtacctgatcatcaactacttcaagggcggcaagctgcggttcaagaagatcaaacctgaagccttcgaagccaacagattctacaccgtgatcaacaaaaagagcggcgagatcgtgcccatggaggtgaacttcaacttcgacgaccccaacctgatcatcctgcctctggcctttggcaagagacagggcagagaattcatctggaacgacctgctgtccctggaaaccggcagcctgaagctggccaacggaagagtgatcgagaagacactgtacaacagaagaacccggcaggatgagcctgccctgttcgtggccctgaccttcgagcggcgggaggtcctggactcctccaatatcaaaccaatgaacctgatcggcgtggcaagaggcgaaaacatccccgccgtgatcgccctgaccgaccccgagggctgcccactgagccggtttaaggatagcctgggaaacccaacccacatcctgagaatcggcgagagctataaggagaagcagcggaccatccaggccaagaaggaggtggagcagcggagagccggcggctacagccggaagtacgccagcaaagccaagaatctggcagacgatatggtgagaaacaccgctagagatctgctgtactacgccgtgacccaggatgccatgctgatcttcgccaacctgagccggggcttcggccggcagggcaagcggaccttcatggccgagagacagtacacacggatggaggactggctgaccgccaagctggcctacgagggcctgagcaagacctacctgtccaagacactggcccagtacacctccaagacatgcagcaactgtgggtttaccatcaccagcgccgactacgacagggtgctggagaagctgaagaagacagcaacaggctggatgaccacaattaacggcaaggagctgaaggtggagggccagattacctactacaacagatacaagagacagaacgtagtcaaggacctgtccgtcgagctggatagactgagcgaagaatctgtgaacaacgacatctcctcctggacaaagggcagaagcggagaagctctgagcctcctgaagaaaagattctcccatagacccgtgcaggagaagttcgtgtgcctgaactgcggcttcgagacacacgcagccgagcaagccgccctgaacatcgccagatcctggctgttcctgcggagccaggagtacaagaaataccagacaaacaagacaaccggcaacaccgataagagagccttcgtcgagacctggcagtccttttaccggaagaagcttaaggaggtgtggaaacctgccgtgcggtctggcggatctggcggaggctccaccagccccaagaaaaagagaaaagtctaagctgccttctgcggggcttgccttctggccatgcccttcttctctcccttgcacctgtacctcttggtctttgaataaagcctgagtaggaaggctagcaaaaaaaaaaaaaaaaaaaaaaaaaaaaaaaaaaaaaaaaaaaaaaaaaaaaaaaaaaaaaaaaaaaaaaaaaaaaaaaagcccagccggctccccaacctctaccgaggagggcacctctgagtccgccacccccgagagcggccctggcacctccaccgagcccagcgagggcagcgcacccggcagccctgccggcagccccacctccacagaggagggaaccagcaccgagcccagcgaaggcagcgccccaggcaccagcaccgagcctagtgagcaggagattaaacggatcaacaagatcagaagaagacttgtgaaagacagcaacaccaagaaggccggcaagacaggccccatgaaaaccctgctggttagagtgatgacacccgatctgagagagcggctggaaaacctgagaaagaagcctgaaaatatcccccagcccatcagcaatacatctagagccaacctgaataagctgctgaccgattacaccgaaatgaagaaggcgatcctgcatgtgtactgggaagagttccagaaggaccctgtgggcctgatgagccgggtggcccagcctgccagcaagaagatcgatcagaacaagctgaaacctgagatggacgagaagggcaacctgaccaccgccggctttgcctgctctcagtgtggccagcccctgttcgtgtacaagctggagcaggtgtctgagaagggcaaggcttacaccaactacttcggacggtgcaatgtggccgagcacgaaaagctgatcctgctggcccagctgaagcccgagaaggatagcgacgaagccgtgacatatagcctgggaaagtttgggcagagggccctggatttctacagcattcatgtgaccaaggagtccacccaccccgtgaagcccctggcccagatcgccggaaacagatacgcctccggacctgtgggaaaggccctgagcgacgcatgtatgggcacaatcgcctccttcctgtctaagtaccaggacatcatcatcgaacaccagaaggtggtgaagggcaaccagaagagactggagagcctgcgggagctggccggcaaggaaaacctggaataccctagcgtgaccctgccacctcagcctcacaccaaggagggcgttgatgcctacaacgaagtgatcgcccgggtgcgaatgtgggtgaacctgaacctgtggcagaagctgaagctaagcagagatgatgccaagcctctgctgagactgaagggattcccttcctttcctctggtcgagagacaggccaacgaagtggactggtgggacatggtgtgtaacgtgaagaagctgatcaacgagaaaaaggaggatggcaaggtgttttggcagaatctggctggctacaagagacaggaagccctgagaccatacctgagcagcgaggaagatcggaagaagggaaagaaattcgctcggtaccagctgggcgacctgctgctgcacctggaaaagaagcacggcgaggactggggaaaggtgtacgacgaggcctgggagcggattgacaagaaagtggaaggcctgagcaagcacatcaagctggaagaggaacggagaagcgaggacgcccagagcaaggccgccctgaccgactggctgcgggctaaggccagcttcgtgatcgagggcctgaaggaggccgacaaggacgagttctgcagatgcgagctgaagctgcagaagtggtacggggacctgcggggaaagcccttcgccatcgaagccgagaacagcatcctggacatcagcggcttcagcaagcagtacaactgtgccttcatctggcagaaggacggcgtgaagaagctgaacctgtacctgatcatcaactacttcaagggcggcaagctgcggttcaagaagatcaaacctgaagccttcgaagccaacagattctacaccgtgatcaacaaaaagagcggcgagatcgtgcccatggaggtgaacttcaacttcgacgaccccaacctgatcatcctgcctctggcctttggcaagagacagggcagagaattcatctggaacgacctgctgtccctggaaaccggcagcctgaagctggccaacggaagagtgatcgagaagacactgtacaacagaagaacccggcaggatgagcctgccctgttcgtggccctgaccttcgagcggcgggaggtcctggactcctccaatatcaaaccaatgaacctgatcggcgtggcaagaggcgaaaacatccccgccgtgatcgccctgaccgaccccgagggctgcccactgagccggtttaaggatagcctgggaaacccaacccacatcctgagaatcggcgagagctataaggagaagcagcggaccatccaggccaagaaggaggtggagcagcggagagccggcggctacagccggaagtacgccagcaaagccaagaatctggcagacgatatggtgagaaacaccgctagagatctgctgtactacgccgtgacccaggatgccatgctgatcttcgccaacctgagccggggcttcggccggcagggcaagcggaccttcatggccgagagacagtacacacggatggaggactggctgaccgccaagctggcctacgagggcctgagcaagacctacctgtccaagacactggcccagtacacctccaagacatgcagcaactgtgggtttaccatcaccagcgccgactacgacagggtgctggagaagctgaagaagacagcaacaggctggatgaccacaattaacggcaaggagctgaaggtggagggccagattacctactacaacagatacaagagacagaacgtagtcaaggacctgtccgtcgagctggatagactgagcgaagaatctgtgaacaacgacatctcctcctggacaaagggcagaagcggagaagctctgagcctcctgaagaaaagattctcccatagacccgtgcaggagaagttcgtgtgcctgaactgcggcttcgagacacacgcagccgagcaagccgccctgaacatcgccagatcctggctgttcctgcggagccaggagtacaagaaataccagacaaacaagacaaccggcaacaccgataagagagccttcgtcgagacctggcagtccttttaccggaagaagcttaaggaggtgtggaaacctgccgtgcggtctggcggatctggcggaggctccaccagccccaagaaaaagagaaaagtctaagctgccttctgcggggcttgccttctggccatgcccttcttctctcccttgcacctgtacctcttggtctttgaataaagcctgagtaggaaggctagcaaaaaaaaaaaaaaaaaaaaaaaaaaaaaaaaaaaaaaaaaaaaaaaaaaaaaaaaaaaaaaaaaaaaaaaaaaaaaaaa

SEQ ID NO: 9786 - RNA, 8787 nt, synthetic construct
  source 1..8787: mol_type = other RNA
aggaaataagagagaaaagaagagtaagaagaaatataagagccaccatggcccctaagaagaagcgtaaagtgagccggatgaaccacgaccaggagttcgacccccctaaggtgtaccctcccgtccccgccgagaagagaaagcccatccgggtcctgagcctgttcgatggcatcgccaccggtctgctggtgctgaaggacctgggcatccaggtggataggtacattgcctccgaggtgtgcgaggactccatcaccgtgggaatggtgcgtcatcagggcaagatcatgtacgtgggcgacgtgcggagcgtgacacagaagcatatccaggagtggggccctttcgacctggtgatcggcggcagcccttgcaatgacctgagcatcgtgaacccagcccggaagggcctgtacgagggaaccggcagactgttcttcgagttttacagactgctgcacgacgcccggcctaaggaaggcgacgaccggcccttcttttggctgttcgagaatgtggtggccatgggagtcagcgacaagcgggatattagccggttcctggagagcaaccccgtgatgatcgatgccaaggaagtgagcgccgcccaccgggccagatacttctggggcaatctgcctggcatgaacagacccctggccagcaccgtgaacgacaagctggagctgcaggagtgcctggagcacggccggatcgccaagttcagcaaggtgagaaccatcaccacccgaagcaacagcatcaaacaaggcaaggaccagcactttcctgtgttcatgaacgagaaggaggacatcctgtggtgtaccgagatggagagagtgttcgggttcccagtccactacacagatgtcagcaacatgtctagactggccagacagagactgctgggaagaagctggtccgtccctgtgatcagacacctgttcgcccctctgaaggagtacttcgcctgcgtgagcagcggcaacagcaacgccaacagccggggccccagcttctctagcggcctggtgccactgtccctgagagggagccacatgggccccatggagatctacaaaaccgtgagcgcctggaagcggcagcctgtgcgcgtgctgagcctgtttcggaatatcgataaagtcctgaaaagcctgggattcctggagagcggctctggctccggcggtggcaccctgaagtacgtggaggatgtgacaaacgtggtcagacgggatgtggagaagtggggccccttcgatctggtgtacggcagcacccaacccctgggcagctcttgtgaccggtgccctggctggtacatgtttcagttccaccggatcctgcagtacgccctgccgagacaggagtcccagcggccattcttttggattttcatggacaacttgctgctgaccgaggatgaccaggaaactaccactcggttcctgcagaccgaagccgtgaccctgcaggacgtgagaggccgggactaccagaacgccatgcgggtgtggtccaacatccctggactgaaaagcaagcacgcacctctgacccctaaagaagaggagtacctgcaggcccaggtgcggagcagaagcaagctggacgcccctaaggtggatctgctggtgaagaattgcctcctgcccctgagagagtacttcaagtatttcagccagaatagtctgcccctgggaggcagcggcggcggcgcccaggcccccctgagcttcgaggacgtggccgtgagcttcagcagggaggagtggaggctgctggtgcccgcccagaaggacctgtacagggacgtgatgctggagaactacaggaacctggtgagcgtgggctaccaggccagcgagcccgacagcctgttccagctggagcacggcggccccctgtgggtggtggagggcgccgcccccaggcccccctgccccgaggagatctgggagggcggcccaagcagcggcgcccctcctcccagcggcggcaggcggcccaagcagcggcgcccctcctcccagcggcggcagcccagccggctccccaacctctaccgaggagggcacctctgagtccgccacccccgagagcggccctggcacctccaccgagcccagcgagggcagcgcacccggcagccctgccggcagccccacctccacagaggagggaaccagcaccgagcccagcgaaggcagcgccccaggcaccagcaccgagcctagtgagcaggagattaaacggatcaacaagatcagaagaagacttgtgaaagacagcaacaccaagaaggccggcaagacaggccccatgaaaaccctgctggttagagtgatgacacccgatctgagagagcggctggaaaacctgagaaagaagcctgaaaatatcccccagcccatcagcaatacatctagagccaacctgaataagctgctgaccgattacaccgaaatgaagaaggcgatcctgcatgtgtactgggaagagttccagaaggaccctgtgggcctgatgagccgggtggcccagcctgccagcaagaagatcgatcagaacaagctgaaacctgagatggacgagaagggcaacctgaccaccgccggctttgcctgctctcagtgtggccagcccctgttcgtgtacaagctggagcaggtgtctgagaagggcaaggcttacaccaactacttcggacggtgcaatgtggccgagcacgaaaagctgatcctgctggcccagctgaagcccgagaaggatagcgacgaagccgtgacatatagcctgggaaagtttgggcagagggccctggatttctacagcattcatgtgaccaaggagtccacccaccccgtgaagcccctggcccagatcgccggaaacagatacgcctccggacctgtgggaaaggccctgagcgacgcatgtatgggcacaatcgcctccttcctgtctaagtaccaggacatcatcatcgaacaccagaaggtggtgaagggcaaccagaagagactggagagcctgcgggagctggccggcaaggaaaacctggaataccctagcgtgaccctgccacctcagcctcacaccaaggagggcgttgatgcctacaacgaagtgatcgcccgggtgcgaatgtgggtgaacctgaacctgtggcagaagctgaagctaagcagagatgatgccaagcctctgctgagactgaagggattcccttcctttcctctggtcgagagacaggccaacgaagtggactggtgggacatggtgtgtaacgtgaagaagctgatcaacgagaaaaaggaggatggcaaggtgttttggcagaatctggctggctacaagagacaggaagccctgagaccatacctgagcagcgaggaagatcggaagaagggaaagaaattcgctcggtaccagctgggcgacctgctgctgcacctggaaaagaagcacggcgaggactggggaaaggtgtacgacgaggcctgggagcggattgacaagaaagtggaaggcctgagcaagcacatcaagctggaagaggaacggagaagcgaggacgcccagagcaaggccgccctgaccgactggctgcgggctaaggccagcttcgtgatcgagggcctgaaggaggccgacaaggacgagttctgcagatgcgagctgaagctgcagaagtggtacggggacctgcggggaaagcccttcgccatcgaagccgagaacagcatcctggacatcagcggcttcagcaagcagtacaactgtgccttcatctggcagaaggacggcgtgaagaagctgaacctgtacctgatcatcaactacttcaagggcggcaagctgcggttcaagaagatcaaacctgaagccttcgaagccaacagattctacaccgtgatcaacaaaaagagcggcgagatcgtgcccatggaggtgaacttcaacttcgacgaccccaacctgatcatcctgcctctggcctttggcaagagacagggcagagaattcatctggaacgacctgctgtccctggaaaccggcagcctgaagctggccaacggaagagtgatcgagaagacactgtacaacagaagaacccggcaggatgagcctgccctgttcgtggccctgaccttcgagcggcgggaggtcctggactcctccaatatcaaaccaatgaacctgatcggcgtggcaagaggcgaaaacatccccgccgtgatcgccctgaccgaccccgagggctgcccactgagccggtttaaggatagcctgggaaacccaacccacatcctgagaatcggcgagagctataaggagaagcagcggaccatccaggccaagaaggaggtggagcagcggagagccggcggctacagccggaagtacgccagcaaagccaagaatctggcagacgatatggtgagaaacaccgctagagatctgctgtactacgccgtgacccaggatgccatgctgatcttcgccaacctgagccggggcttcggccggcagggcaagcggaccttcatggccgagagacagtacacacggatggaggactggctgaccgccaagctggcctacgagggcctgagcaagacctacctgtccaagacactggcccagtacacctccaagacatgcagcaactgtgggtttaccatcaccagcgccgactacgacagggtgctggagaagctgaagaagacagcaacaggctggatgaccacaattaacggcaaggagctgaaggtggagggccagattacctactacaacagatacaagagacagaacgtagtcaaggacctgtccgtcgagctggatagactgagcgaagaatctgtgaacaacgacatctcctcctggacaaagggcagaagcggagaagctctgagcctcctgaagaaaagattctcccatagacccgtgcaggagaagttcgtgtgcctgaactgcggcttcgagacacacgcagccgagcaagccgccctgaacatcgccagatcctggctgttcctgcggagccaggagtacaagaaataccagacaaacaagacaaccggcaacaccgataagagagccttcgtcgagacctggcagtccttttaccggaagaagcttaaggaggtgtggaaacctgccgtgcggtctggcggatctggcggaggctccaccagccccaagaaaaagagaaaagtctaagctgccttctgcggggcttgccttctggccatgcccttcttctctcccttgcacctgtacctcttggtctttgaataaagcctgagtaggaaggctagcaaaaaaaaaaaaaaaaaaaaaaaaaaaaaaaaaaaaaaaaaaaaaaaaaaaaaaaaaaaaaaaaaaaaaaaaaaaaaaaagcccagccggctccccaacctctaccgaggagggcacctctgagtccgccacccccgagagcggccctggcacctccaccgagcccagcgagggcagcgcacccggcagccctgccggcagccccacctccacagaggagggaaccagcaccgagcccagcgaaggcagcgccccaggcaccagcaccgagcctagtgagcaggagattaaacggatcaacaagatcagaagaagacttgtgaaagacagcaacaccaagaaggccggcaagacaggccccatgaaaaccctgctggttagagtgatgacacccgatctgagagagcggctggaaaacctgagaaagaagcctgaaaatatcccccagcccatcagcaatacatctagagccaacctgaataagctgctgaccgattacaccgaaatgaagaaggcgatcctgcatgtgtactgggaagagttccagaaggaccctgtgggcctgatgagccgggtggcccagcctgccagcaagaagatcgatcagaacaagctgaaacctgagatggacgagaagggcaacctgaccaccgccggctttgcctgctctcagtgtggccagcccctgttcgtgtacaagctggagcaggtgtctgagaagggcaaggcttacaccaactacttcggacggtgcaatgtggccgagcacgaaaagctgatcctgctggcccagctgaagcccgagaaggatagcgacgaagccgtgacatatagcctgggaaagtttgggcagagggccctggatttctacagcattcatgtgaccaaggagtccacccaccccgtgaagcccctggcccagatcgccggaaacagatacgcctccggacctgtgggaaaggccctgagcgacgcatgtatgggcacaatcgcctccttcctgtctaagtaccaggacatcatcatcgaacaccagaaggtggtgaagggcaaccagaagagactggagagcctgcgggagctggccggcaaggaaaacctggaataccctagcgtgaccctgccacctcagcctcacaccaaggagggcgttgatgcctacaacgaagtgatcgcccgggtgcgaatgtgggtgaacctgaacctgtggcagaagctgaagctaagcagagatgatgccaagcctctgctgagactgaagggattcccttcctttcctctggtcgagagacaggccaacgaagtggactggtgggacatggtgtgtaacgtgaagaagctgatcaacgagaaaaaggaggatggcaaggtgttttggcagaatctggctggctacaagagacaggaagccctgagaccatacctgagcagcgaggaagatcggaagaagggaaagaaattcgctcggtaccagctgggcgacctgctgctgcacctggaaaagaagcacggcgaggactggggaaaggtgtacgacgaggcctgggagcggattgacaagaaagtggaaggcctgagcaagcacatcaagctggaagaggaacggagaagcgaggacgcccagagcaaggccgccctgaccgactggctgcgggctaaggccagcttcgtgatcgagggcctgaaggaggccgacaaggacgagttctgcagatgcgagctgaagctgcagaagtggtacggggacctgcggggaaagcccttcgccatcgaagccgagaacagcatcctggacatcagcggcttcagcaagcagtacaactgtgccttcatctggcagaaggacggcgtgaagaagctgaacctgtacctgatcatcaactacttcaagggcggcaagctgcggttcaagaagatcaaacctgaagccttcgaagccaacagattctacaccgtgatcaacaaaaagagcggcgagatcgtgcccatggaggtgaacttcaacttcgacgaccccaacctgatcatcctgcctctggcctttggcaagagacagggcagagaattcatctggaacgacctgctgtccctggaaaccggcagcctgaagctggccaacggaagagtgatcgagaagacactgtacaacagaagaacccggcaggatgagcctgccctgttcgtggccctgaccttcgagcggcgggaggtcctggactcctccaatatcaaaccaatgaacctgatcggcgtggcaagaggcgaaaacatccccgccgtgatcgccctgaccgaccccgagggctgcccactgagccggtttaaggatagcctgggaaacccaacccacatcctgagaatcggcgagagctataaggagaagcagcggaccatccaggccaagaaggaggtggagcagcggagagccggcggctacagccggaagtacgccagcaaagccaagaatctggcagacgatatggtgagaaacaccgctagagatctgctgtactacgccgtgacccaggatgccatgctgatcttcgccaacctgagccggggcttcggccggcagggcaagcggaccttcatggccgagagacagtacacacggatggaggactggctgaccgccaagctggcctacgagggcctgagcaagacctacctgtccaagacactggcccagtacacctccaagacatgcagcaactgtgggtttaccatcaccagcgccgactacgacagggtgctggagaagctgaagaagacagcaacaggctggatgaccacaattaacggcaaggagctgaaggtggagggccagattacctactacaacagatacaagagacagaacgtagtcaaggacctgtccgtcgagctggatagactgagcgaagaatctgtgaacaacgacatctcctcctggacaaagggcagaagcggagaagctctgagcctcctgaagaaaagattctcccatagacccgtgcaggagaagttcgtgtgcctgaactgcggcttcgagacacacgcagccgagcaagccgccctgaacatcgccagatcctggctgttcctgcggagccaggagtacaagaaataccagacaaacaagacaaccggcaacaccgataagagagccttcgtcgagacctggcagtccttttaccggaagaagcttaaggaggtgtggaaacctgccgtgcggtctggcggatctggcggaggctccaccagccccaagaaaaagagaaaagtctaagctgccttctgcggggcttgccttctggccatgcccttcttctctcccttgcacctgtacctcttggtctttgaataaagcctgagtaggaaggctagcaaaaaaaaaaaaaaaaaaaaaaaaaaaaaaaaaaaaaaaaaaaaaaaaaaaaaaaaaaaaaaaaaaaaaaaaaaaaaaaa

SEQ ID NO: 9787 - RNA, 8787 nt, synthetic construct
  source 1..8787: mol_type = other RNA
aggaaataagagagaaaagaagagtaagaagaaatataagagccaccatggcccctaagaagaagcgtaaagtgagccggatgaaccacgaccaggagttcgacccccctaaggtgtaccctcccgtccccgccgagaagagaaagcccatccgggtcctgagcctgttcgatggcatcgccaccggtctgctggtgctgaaggacctgggcatccaggtggataggtacattgcctccgaggtgtgcgaggactccatcaccgtgggaatggtgcgtcatcagggcaagatcatgtacgtgggcgacgtgcggagcgtgacacagaagcatatccaggagtggggccctttcgacctggtgatcggcggcagcccttgcaatgacctgagcatcgtgaacccagcccggaagggcctgtacgagggaaccggcagactgttcttcgagttttacagactgctgcacgacgcccggcctaaggaaggcgacgaccggcccttcttttggctgttcgagaatgtggtggccatgggagtcagcgacaagcgggatattagccggttcctggagagcaaccccgtgatgatcgatgccaaggaagtgagcgccgcccaccgggccagatacttctggggcaatctgcctggcatgaacagacccctggccagcaccgtgaacgacaagctggagctgcaggagtgcctggagcacggccggatcgccaagttcagcaaggtgagaaccatcaccacccgaagcaacagcatcaaacaaggcaaggaccagcactttcctgtgttcatgaacgagaaggaggacatcctgtggtgtaccgagatggagagagtgttcgggttcccagtccactacacagatgtcagcaacatgtctagactggccagacagagactgctgggaagaagctggtccgtccctgtgatcagacacctgttcgcccctctgaaggagtacttcgcctgcgtgagcagcggcaacagcaacgccaacagccggggccccagcttctctagcggcctggtgccactgtccctgagagggagccacatgggccccatggagatctacaaaaccgtgagcgcctggaagcggcagcctgtgcgcgtgctgagcctgtttcggaatatcgataaagtcctgaaaagcctgggattcctggagagcggctctggctccggcggtggcaccctgaagtacgtggaggatgtgacaaacgtggtcagacgggatgtggagaagtggggccccttcgatctggtgtacggcagcacccaacccctgggcagctcttgtgaccggtgccctggctggtacatgtttcagttccaccggatcctgcagtacgccctgccgagacaggagtcccagcggccattcttttggattttcatggacaacttgctgctgaccgaggatgaccaggaaactaccactcggttcctgcagaccgaagccgtgaccctgcaggacgtgagaggccgggactaccagaacgccatgcgggtgtggtccaacatccctggactgaaaagcaagcacgcacctctgacccctaaagaagaggagtacctgcaggcccaggtgcggagcagaagcaagctggacgcccctaaggtggatctgctggtgaagaattgcctcctgcccctgagagagtacttcaagtatttcagccagaatagtctgcccctgggaggcagcggcggcggcgcccagaagagcctgaccctggaggacgtggccgtggacttcagcagggaggagtggaggctgctggcccccgcccagaaggacctgtacagggacgtgatgctggagaactacaggaacctggtgagcgtgggccaccaggccagcaagcccgacgtgctggccaagctggagaggggcgaggagccctgggccatcgaggaggaggtgaggagcggcaccagccccgagaccggcaaggtgggcggcccaagcagcggcgcccctcctcccagcggcggcaggcggcccaagcagcggcgcccctcctcccagcggcggcagcccagccggctccccaacctctaccgaggagggcacctctgagtccgccacccccgagagcggccctggcacctccaccgagcccagcgagggcagcgcacccggcagccctgccggcagccccacctccacagaggagggaaccagcaccgagcccagcgaaggcagcgccccaggcaccagcaccgagcctagtgagcaggagattaaacggatcaacaagatcagaagaagacttgtgaaagacagcaacaccaagaaggccggcaagacaggccccatgaaaaccctgctggttagagtgatgacacccgatctgagagagcggctggaaaacctgagaaagaagcctgaaaatatcccccagcccatcagcaatacatctagagccaacctgaataagctgctgaccgattacaccgaaatgaagaaggcgatcctgcatgtgtactgggaagagttccagaaggaccctgtgggcctgatgagccgggtggcccagcctgccagcaagaagatcgatcagaacaagctgaaacctgagatggacgagaagggcaacctgaccaccgccggctttgcctgctctcagtgtggccagcccctgttcgtgtacaagctggagcaggtgtctgagaagggcaaggcttacaccaactacttcggacggtgcaatgtggccgagcacgaaaagctgatcctgctggcccagctgaagcccgagaaggatagcgacgaagccgtgacatatagcctgggaaagtttgggcagagggccctggatttctacagcattcatgtgaccaaggagtccacccaccccgtgaagcccctggcccagatcgccggaaacagatacgcctccggacctgtgggaaaggccctgagcgacgcatgtatgggcacaatcgcctccttcctgtctaagtaccaggacatcatcatcgaacaccagaaggtggtgaagggcaaccagaagagactggagagcctgcgggagctggccggcaaggaaaacctggaataccctagcgtgaccctgccacctcagcctcacaccaaggagggcgttgatgcctacaacgaagtgatcgcccgggtgcgaatgtgggtgaacctgaacctgtggcagaagctgaagctaagcagagatgatgccaagcctctgctgagactgaagggattcccttcctttcctctggtcgagagacaggccaacgaagtggactggtgggacatggtgtgtaacgtgaagaagctgatcaacgagaaaaaggaggatggcaaggtgttttggcagaatctggctggctacaagagacaggaagccctgagaccatacctgagcagcgaggaagatcggaagaagggaaagaaattcgctcggtaccagctgggcgacctgctgctgcacctggaaaagaagcacggcgaggactggggaaaggtgtacgacgaggcctgggagcggattgacaagaaagtggaaggcctgagcaagcacatcaagctggaagaggaacggagaagcgaggacgcccagagcaaggccgccctgaccgactggctgcgggctaaggccagcttcgtgatcgagggcctgaaggaggccgacaaggacgagttctgcagatgcgagctgaagctgcagaagtggtacggggacctgcggggaaagcccttcgccatcgaagccgagaacagcatcctggacatcagcggcttcagcaagcagtacaactgtgccttcatctggcagaaggacggcgtgaagaagctgaacctgtacctgatcatcaactacttcaagggcggcaagctgcggttcaagaagatcaaacctgaagccttcgaagccaacagattctacaccgtgatcaacaaaaagagcggcgagatcgtgcccatggaggtgaacttcaacttcgacgaccccaacctgatcatcctgcctctggcctttggcaagagacagggcagagaattcatctggaacgacctgctgtccctggaaaccggcagcctgaagctggccaacggaagagtgatcgagaagacactgtacaacagaagaacccggcaggatgagcctgccctgttcgtggccctgaccttcgagcggcgggaggtcctggactcctccaatatcaaaccaatgaacctgatcggcgtggcaagaggcgaaaacatccccgccgtgatcgccctgaccgaccccgagggctgcccactgagccggtttaaggatagcctgggaaacccaacccacatcctgagaatcggcgagagctataaggagaagcagcggaccatccaggccaagaaggaggtggagcagcggagagccggcggctacagccggaagtacgccagcaaagccaagaatctggcagacgatatggtgagaaacaccgctagagatctgctgtactacgccgtgacccaggatgccatgctgatcttcgccaacctgagccggggcttcggccggcagggcaagcggaccttcatggccgagagacagtacacacggatggaggactggctgaccgccaagctggcctacgagggcctgagcaagacctacctgtccaagacactggcccagtacacctccaagacatgcagcaactgtgggtttaccatcaccagcgccgactacgacagggtgctggagaagctgaagaagacagcaacaggctggatgaccacaattaacggcaaggagctgaaggtggagggccagattacctactacaacagatacaagagacagaacgtagtcaaggacctgtccgtcgagctggatagactgagcgaagaatctgtgaacaacgacatctcctcctggacaaagggcagaagcggagaagctctgagcctcctgaagaaaagattctcccatagacccgtgcaggagaagttcgtgtgcctgaactgcggcttcgagacacacgcagccgagcaagccgccctgaacatcgccagatcctggctgttcctgcggagccaggagtacaagaaataccagacaaacaagacaaccggcaacaccgataagagagccttcgtcgagacctggcagtccttttaccggaagaagcttaaggaggtgtggaaacctgccgtgcggtctggcggatctggcggaggctccaccagccccaagaaaaagagaaaagtctaagctgccttctgcggggcttgccttctggccatgcccttcttctctcccttgcacctgtacctcttggtctttgaataaagcctgagtaggaaggctagcaaaaaaaaaaaaaaaaaaaaaaaaaaaaaaaaaaaaaaaaaaaaaaaaaaaaaaaaaaaaaaaaaaaaaaaaaaaaaaaagcccagccggctccccaacctctaccgaggagggcacctctgagtccgccacccccgagagcggccctggcacctccaccgagcccagcgagggcagcgcacccggcagccctgccggcagccccacctccacagaggagggaaccagcaccgagcccagcgaaggcagcgccccaggcaccagcaccgagcctagtgagcaggagattaaacggatcaacaagatcagaagaagacttgtgaaagacagcaacaccaagaaggccggcaagacaggccccatgaaaaccctgctggttagagtgatgacacccgatctgagagagcggctggaaaacctgagaaagaagcctgaaaatatcccccagcccatcagcaatacatctagagccaacctgaataagctgctgaccgattacaccgaaatgaagaaggcgatcctgcatgtgtactgggaagagttccagaaggaccctgtgggcctgatgagccgggtggcccagcctgccagcaagaagatcgatcagaacaagctgaaacctgagatggacgagaagggcaacctgaccaccgccggctttgcctgctctcagtgtggccagcccctgttcgtgtacaagctggagcaggtgtctgagaagggcaaggcttacaccaactacttcggacggtgcaatgtggccgagcacgaaaagctgatcctgctggcccagctgaagcccgagaaggatagcgacgaagccgtgacatatagcctgggaaagtttgggcagagggccctggatttctacagcattcatgtgaccaaggagtccacccaccccgtgaagcccctggcccagatcgccggaaacagatacgcctccggacctgtgggaaaggccctgagcgacgcatgtatgggcacaatcgcctccttcctgtctaagtaccaggacatcatcatcgaacaccagaaggtggtgaagggcaaccagaagagactggagagcctgcgggagctggccggcaaggaaaacctggaataccctagcgtgaccctgccacctcagcctcacaccaaggagggcgttgatgcctacaacgaagtgatcgcccgggtgcgaatgtgggtgaacctgaacctgtggcagaagctgaagctaagcagagatgatgccaagcctctgctgagactgaagggattcccttcctttcctctggtcgagagacaggccaacgaagtggactggtgggacatggtgtgtaacgtgaagaagctgatcaacgagaaaaaggaggatggcaaggtgttttggcagaatctggctggctacaagagacaggaagccctgagaccatacctgagcagcgaggaagatcggaagaagggaaagaaattcgctcggtaccagctgggcgacctgctgctgcacctggaaaagaagcacggcgaggactggggaaaggtgtacgacgaggcctgggagcggattgacaagaaagtggaaggcctgagcaagcacatcaagctggaagaggaacggagaagcgaggacgcccagagcaaggccgccctgaccgactggctgcgggctaaggccagcttcgtgatcgagggcctgaaggaggccgacaaggacgagttctgcagatgcgagctgaagctgcagaagtggtacggggacctgcggggaaagcccttcgccatcgaagccgagaacagcatcctggacatcagcggcttcagcaagcagtacaactgtgccttcatctggcagaaggacggcgtgaagaagctgaacctgtacctgatcatcaactacttcaagggcggcaagctgcggttcaagaagatcaaacctgaagccttcgaagccaacagattctacaccgtgatcaacaaaaagagcggcgagatcgtgcccatggaggtgaacttcaacttcgacgaccccaacctgatcatcctgcctctggcctttggcaagagacagggcagagaattcatctggaacgacctgctgtccctggaaaccggcagcctgaagctggccaacggaagagtgatcgagaagacactgtacaacagaagaacccggcaggatgagcctgccctgttcgtggccctgaccttcgagcggcgggaggtcctggactcctccaatatcaaaccaatgaacctgatcggcgtggcaagaggcgaaaacatccccgccgtgatcgccctgaccgaccccgagggctgcccactgagccggtttaaggatagcctgggaaacccaacccacatcctgagaatcggcgagagctataaggagaagcagcggaccatccaggccaagaaggaggtggagcagcggagagccggcggctacagccggaagtacgccagcaaagccaagaatctggcagacgatatggtgagaaacaccgctagagatctgctgtactacgccgtgacccaggatgccatgctgatcttcgccaacctgagccggggcttcggccggcagggcaagcggaccttcatggccgagagacagtacacacggatggaggactggctgaccgccaagctggcctacgagggcctgagcaagacctacctgtccaagacactggcccagtacacctccaagacatgcagcaactgtgggtttaccatcaccagcgccgactacgacagggtgctggagaagctgaagaagacagcaacaggctggatgaccacaattaacggcaaggagctgaaggtggagggccagattacctactacaacagatacaagagacagaacgtagtcaaggacctgtccgtcgagctggatagactgagcgaagaatctgtgaacaacgacatctcctcctggacaaagggcagaagcggagaagctctgagcctcctgaagaaaagattctcccatagacccgtgcaggagaagttcgtgtgcctgaactgcggcttcgagacacacgcagccgagcaagccgccctgaacatcgccagatcctggctgttcctgcggagccaggagtacaagaaataccagacaaacaagacaaccggcaacaccgataagagagccttcgtcgagacctggcagtccttttaccggaagaagcttaaggaggtgtggaaacctgccgtgcggtctggcggatctggcggaggctccaccagccccaagaaaaagagaaaagtctaagctgccttctgcggggcttgccttctggccatgcccttcttctctcccttgcacctgtacctcttggtctttgaataaagcctgagtaggaaggctagcaaaaaaaaaaaaaaaaaaaaaaaaaaaaaaaaaaaaaaaaaaaaaaaaaaaaaaaaaaaaaaaaaaaaaaaaaaaaaaaa

SEQ ID NO: 9788 - RNA, 8787 nt, synthetic construct
  source 1..8787: mol_type = other RNA
aggaaataagagagaaaagaagagtaagaagaaatataagagccaccatggcccctaagaagaagcgtaaagtgagccggatgaaccacgaccaggagttcgacccccctaaggtgtaccctcccgtccccgccgagaagagaaagcccatccgggtcctgagcctgttcgatggcatcgccaccggtctgctggtgctgaaggacctgggcatccaggtggataggtacattgcctccgaggtgtgcgaggactccatcaccgtgggaatggtgcgtcatcagggcaagatcatgtacgtgggcgacgtgcggagcgtgacacagaagcatatccaggagtggggccctttcgacctggtgatcggcggcagcccttgcaatgacctgagcatcgtgaacccagcccggaagggcctgtacgagggaaccggcagactgttcttcgagttttacagactgctgcacgacgcccggcctaaggaaggcgacgaccggcccttcttttggctgttcgagaatgtggtggccatgggagtcagcgacaagcgggatattagccggttcctggagagcaaccccgtgatgatcgatgccaaggaagtgagcgccgcccaccgggccagatacttctggggcaatctgcctggcatgaacagacccctggccagcaccgtgaacgacaagctggagctgcaggagtgcctggagcacggccggatcgccaagttcagcaaggtgagaaccatcaccacccgaagcaacagcatcaaacaaggcaaggaccagcactttcctgtgttcatgaacgagaaggaggacatcctgtggtgtaccgagatggagagagtgttcgggttcccagtccactacacagatgtcagcaacatgtctagactggccagacagagactgctgggaagaagctggtccgtccctgtgatcagacacctgttcgcccctctgaaggagtacttcgcctgcgtgagcagcggcaacagcaacgccaacagccggggccccagcttctctagcggcctggtgccactgtccctgagagggagccacatgggccccatggagatctacaaaaccgtgagcgcctggaagcggcagcctgtgcgcgtgctgagcctgtttcggaatatcgataaagtcctgaaaagcctgggattcctggagagcggctctggctccggcggtggcaccctgaagtacgtggaggatgtgacaaacgtggtcagacgggatgtggagaagtggggccccttcgatctggtgtacggcagcacccaacccctgggcagctcttgtgaccggtgccctggctggtacatgtttcagttccaccggatcctgcagtacgccctgccgagacaggagtcccagcggccattcttttggattttcatggacaacttgctgctgaccgaggatgaccaggaaactaccactcggttcctgcagaccgaagccgtgaccctgcaggacgtgagaggccgggactaccagaacgccatgcgggtgtggtccaacatccctggactgaaaagcaagcacgcacctctgacccctaaagaagaggagtacctgcaggcccaggtgcggagcagaagcaagctggacgcccctaaggtggatctgctggtgaagaattgcctcctgcccctgagagagtacttcaagtatttcagccagaatagtctgcccctgggaggcagcggcggcggcgcccaggagcccgtgaccttcaacgacgtggccgtggacttcacccaggaggagtggggccagctggacctggtgcagaggaccctgtacagggacgtgatgctggagacctacggccacctgctgagcgtgggcaaccagatcaccaagcccgaggtgatcagcctgctggagcagggcgaggagccctggagcatggagcccgcctaccccctgcagggcacctgccccgcccccgagatcggcggcccaagcagcggcgcccctcctcccagcggcggcaggcggcccaagcagcggcgcccctcctcccagcggcggcagcccagccggctccccaacctctaccgaggagggcacctctgagtccgccacccccgagagcggccctggcacctccaccgagcccagcgagggcagcgcacccggcagccctgccggcagccccacctccacagaggagggaaccagcaccgagcccagcgaaggcagcgccccaggcaccagcaccgagcctagtgagcaggagattaaacggatcaacaagatcagaagaagacttgtgaaagacagcaacaccaagaaggccggcaagacaggccccatgaaaaccctgctggttagagtgatgacacccgatctgagagagcggctggaaaacctgagaaagaagcctgaaaatatcccccagcccatcagcaatacatctagagccaacctgaataagctgctgaccgattacaccgaaatgaagaaggcgatcctgcatgtgtactgggaagagttccagaaggaccctgtgggcctgatgagccgggtggcccagcctgccagcaagaagatcgatcagaacaagctgaaacctgagatggacgagaagggcaacctgaccaccgccggctttgcctgctctcagtgtggccagcccctgttcgtgtacaagctggagcaggtgtctgagaagggcaaggcttacaccaactacttcggacggtgcaatgtggccgagcacgaaaagctgatcctgctggcccagctgaagcccgagaaggatagcgacgaagccgtgacatatagcctgggaaagtttgggcagagggccctggatttctacagcattcatgtgaccaaggagtccacccaccccgtgaagcccctggcccagatcgccggaaacagatacgcctccggacctgtgggaaaggccctgagcgacgcatgtatgggcacaatcgcctccttcctgtctaagtaccaggacatcatcatcgaacaccagaaggtggtgaagggcaaccagaagagactggagagcctgcgggagctggccggcaaggaaaacctggaataccctagcgtgaccctgccacctcagcctcacaccaaggagggcgttgatgcctacaacgaagtgatcgcccgggtgcgaatgtgggtgaacctgaacctgtggcagaagctgaagctaagcagagatgatgccaagcctctgctgagactgaagggattcccttcctttcctctggtcgagagacaggccaacgaagtggactggtgggacatggtgtgtaacgtgaagaagctgatcaacgagaaaaaggaggatggcaaggtgttttggcagaatctggctggctacaagagacaggaagccctgagaccatacctgagcagcgaggaagatcggaagaagggaaagaaattcgctcggtaccagctgggcgacctgctgctgcacctggaaaagaagcacggcgaggactggggaaaggtgtacgacgaggcctgggagcggattgacaagaaagtggaaggcctgagcaagcacatcaagctggaagaggaacggagaagcgaggacgcccagagcaaggccgccctgaccgactggctgcgggctaaggccagcttcgtgatcgagggcctgaaggaggccgacaaggacgagttctgcagatgcgagctgaagctgcagaagtggtacggggacctgcggggaaagcccttcgccatcgaagccgagaacagcatcctggacatcagcggcttcagcaagcagtacaactgtgccttcatctggcagaaggacggcgtgaagaagctgaacctgtacctgatcatcaactacttcaagggcggcaagctgcggttcaagaagatcaaacctgaagccttcgaagccaacagattctacaccgtgatcaacaaaaagagcggcgagatcgtgcccatggaggtgaacttcaacttcgacgaccccaacctgatcatcctgcctctggcctttggcaagagacagggcagagaattcatctggaacgacctgctgtccctggaaaccggcagcctgaagctggccaacggaagagtgatcgagaagacactgtacaacagaagaacccggcaggatgagcctgccctgttcgtggccctgaccttcgagcggcgggaggtcctggactcctccaatatcaaaccaatgaacctgatcggcgtggcaagaggcgaaaacatccccgccgtgatcgccctgaccgaccccgagggctgcccactgagccggtttaaggatagcctgggaaacccaacccacatcctgagaatcggcgagagctataaggagaagcagcggaccatccaggccaagaaggaggtggagcagcggagagccggcggctacagccggaagtacgccagcaaagccaagaatctggcagacgatatggtgagaaacaccgctagagatctgctgtactacgccgtgacccaggatgccatgctgatcttcgccaacctgagccggggcttcggccggcagggcaagcggaccttcatggccgagagacagtacacacggatggaggactggctgaccgccaagctggcctacgagggcctgagcaagacctacctgtccaagacactggcccagtacacctccaagacatgcagcaactgtgggtttaccatcaccagcgccgactacgacagggtgctggagaagctgaagaagacagcaacaggctggatgaccacaattaacggcaaggagctgaaggtggagggccagattacctactacaacagatacaagagacagaacgtagtcaaggacctgtccgtcgagctggatagactgagcgaagaatctgtgaacaacgacatctcctcctggacaaagggcagaagcggagaagctctgagcctcctgaagaaaagattctcccatagacccgtgcaggagaagttcgtgtgcctgaactgcggcttcgagacacacgcagccgagcaagccgccctgaacatcgccagatcctggctgttcctgcggagccaggagtacaagaaataccagacaaacaagacaaccggcaacaccgataagagagccttcgtcgagacctggcagtccttttaccggaagaagcttaaggaggtgtggaaacctgccgtgcggtctggcggatctggcggaggctccaccagccccaagaaaaagagaaaagtctaagctgccttctgcggggcttgccttctggccatgcccttcttctctcccttgcacctgtacctcttggtctttgaataaagcctgagtaggaaggctagcaaaaaaaaaaaaaaaaaaaaaaaaaaaaaaaaaaaaaaaaaaaaaaaaaaaaaaaaaaaaaaaaaaaaaaaaaaaaaaaagcccagccggctccccaacctctaccgaggagggcacctctgagtccgccacccccgagagcggccctggcacctccaccgagcccagcgagggcagcgcacccggcagccctgccggcagccccacctccacagaggagggaaccagcaccgagcccagcgaaggcagcgccccaggcaccagcaccgagcctagtgagcaggagattaaacggatcaacaagatcagaagaagacttgtgaaagacagcaacaccaagaaggccggcaagacaggccccatgaaaaccctgctggttagagtgatgacacccgatctgagagagcggctggaaaacctgagaaagaagcctgaaaatatcccccagcccatcagcaatacatctagagccaacctgaataagctgctgaccgattacaccgaaatgaagaaggcgatcctgcatgtgtactgggaagagttccagaaggaccctgtgggcctgatgagccgggtggcccagcctgccagcaagaagatcgatcagaacaagctgaaacctgagatggacgagaagggcaacctgaccaccgccggctttgcctgctctcagtgtggccagcccctgttcgtgtacaagctggagcaggtgtctgagaagggcaaggcttacaccaactacttcggacggtgcaatgtggccgagcacgaaaagctgatcctgctggcccagctgaagcccgagaaggatagcgacgaagccgtgacatatagcctgggaaagtttgggcagagggccctggatttctacagcattcatgtgaccaaggagtccacccaccccgtgaagcccctggcccagatcgccggaaacagatacgcctccggacctgtgggaaaggccctgagcgacgcatgtatgggcacaatcgcctccttcctgtctaagtaccaggacatcatcatcgaacaccagaaggtggtgaagggcaaccagaagagactggagagcctgcgggagctggccggcaaggaaaacctggaataccctagcgtgaccctgccacctcagcctcacaccaaggagggcgttgatgcctacaacgaagtgatcgcccgggtgcgaatgtgggtgaacctgaacctgtggcagaagctgaagctaagcagagatgatgccaagcctctgctgagactgaagggattcccttcctttcctctggtcgagagacaggccaacgaagtggactggtgggacatggtgtgtaacgtgaagaagctgatcaacgagaaaaaggaggatggcaaggtgttttggcagaatctggctggctacaagagacaggaagccctgagaccatacctgagcagcgaggaagatcggaagaagggaaagaaattcgctcggtaccagctgggcgacctgctgctgcacctggaaaagaagcacggcgaggactggggaaaggtgtacgacgaggcctgggagcggattgacaagaaagtggaaggcctgagcaagcacatcaagctggaagaggaacggagaagcgaggacgcccagagcaaggccgccctgaccgactggctgcgggctaaggccagcttcgtgatcgagggcctgaaggaggccgacaaggacgagttctgcagatgcgagctgaagctgcagaagtggtacggggacctgcggggaaagcccttcgccatcgaagccgagaacagcatcctggacatcagcggcttcagcaagcagtacaactgtgccttcatctggcagaaggacggcgtgaagaagctgaacctgtacctgatcatcaactacttcaagggcggcaagctgcggttcaagaagatcaaacctgaagccttcgaagccaacagattctacaccgtgatcaacaaaaagagcggcgagatcgtgcccatggaggtgaacttcaacttcgacgaccccaacctgatcatcctgcctctggcctttggcaagagacagggcagagaattcatctggaacgacctgctgtccctggaaaccggcagcctgaagctggccaacggaagagtgatcgagaagacactgtacaacagaagaacccggcaggatgagcctgccctgttcgtggccctgaccttcgagcggcgggaggtcctggactcctccaatatcaaaccaatgaacctgatcggcgtggcaagaggcgaaaacatccccgccgtgatcgccctgaccgaccccgagggctgcccactgagccggtttaaggatagcctgggaaacccaacccacatcctgagaatcggcgagagctataaggagaagcagcggaccatccaggccaagaaggaggtggagcagcggagagccggcggctacagccggaagtacgccagcaaagccaagaatctggcagacgatatggtgagaaacaccgctagagatctgctgtactacgccgtgacccaggatgccatgctgatcttcgccaacctgagccggggcttcggccggcagggcaagcggaccttcatggccgagagacagtacacacggatggaggactggctgaccgccaagctggcctacgagggcctgagcaagacctacctgtccaagacactggcccagtacacctccaagacatgcagcaactgtgggtttaccatcaccagcgccgactacgacagggtgctggagaagctgaagaagacagcaacaggctggatgaccacaattaacggcaaggagctgaaggtggagggccagattacctactacaacagatacaagagacagaacgtagtcaaggacctgtccgtcgagctggatagactgagcgaagaatctgtgaacaacgacatctcctcctggacaaagggcagaagcggagaagctctgagcctcctgaagaaaagattctcccatagacccgtgcaggagaagttcgtgtgcctgaactgcggcttcgagacacacgcagccgagcaagccgccctgaacatcgccagatcctggctgttcctgcggagccaggagtacaagaaataccagacaaacaagacaaccggcaacaccgataagagagccttcgtcgagacctggcagtccttttaccggaagaagcttaaggaggtgtggaaacctgccgtgcggtctggcggatctggcggaggctccaccagccccaagaaaaagagaaaagtctaagctgccttctgcggggcttgccttctggccatgcccttcttctctcccttgcacctgtacctcttggtctttgaataaagcctgagtaggaaggctagcaaaaaaaaaaaaaaaaaaaaaaaaaaaaaaaaaaaaaaaaaaaaaaaaaaaaaaaaaaaaaaaaaaaaaaaaaaaaaaaa

SEQ ID NO: 9789 - RNA, 8787 nt, synthetic construct
  source 1..8787: mol_type = other RNA
aggaaataagagagaaaagaagagtaagaagaaatataagagccaccatggcccctaagaagaagcgtaaagtgagccggatgaaccacgaccaggagttcgacccccctaaggtgtaccctcccgtccccgccgagaagagaaagcccatccgggtcctgagcctgttcgatggcatcgccaccggtctgctggtgctgaaggacctgggcatccaggtggataggtacattgcctccgaggtgtgcgaggactccatcaccgtgggaatggtgcgtcatcagggcaagatcatgtacgtgggcgacgtgcggagcgtgacacagaagcatatccaggagtggggccctttcgacctggtgatcggcggcagcccttgcaatgacctgagcatcgtgaacccagcccggaagggcctgtacgagggaaccggcagactgttcttcgagttttacagactgctgcacgacgcccggcctaaggaaggcgacgaccggcccttcttttggctgttcgagaatgtggtggccatgggagtcagcgacaagcgggatattagccggttcctggagagcaaccccgtgatgatcgatgccaaggaagtgagcgccgcccaccgggccagatacttctggggcaatctgcctggcatgaacagacccctggccagcaccgtgaacgacaagctggagctgcaggagtgcctggagcacggccggatcgccaagttcagcaaggtgagaaccatcaccacccgaagcaacagcatcaaacaaggcaaggaccagcactttcctgtgttcatgaacgagaaggaggacatcctgtggtgtaccgagatggagagagtgttcgggttcccagtccactacacagatgtcagcaacatgtctagactggccagacagagactgctgggaagaagctggtccgtccctgtgatcagacacctgttcgcccctctgaaggagtacttcgcctgcgtgagcagcggcaacagcaacgccaacagccggggccccagcttctctagcggcctggtgccactgtccctgagagggagccacatgggccccatggagatctacaaaaccgtgagcgcctggaagcggcagcctgtgcgcgtgctgagcctgtttcggaatatcgataaagtcctgaaaagcctgggattcctggagagcggctctggctccggcggtggcaccctgaagtacgtggaggatgtgacaaacgtggtcagacgggatgtggagaagtggggccccttcgatctggtgtacggcagcacccaacccctgggcagctcttgtgaccggtgccctggctggtacatgtttcagttccaccggatcctgcagtacgccctgccgagacaggagtcccagcggccattcttttggattttcatggacaacttgctgctgaccgaggatgaccaggaaactaccactcggttcctgcagaccgaagccgtgaccctgcaggacgtgagaggccgggactaccagaacgccatgcgggtgtggtccaacatccctggactgaaaagcaagcacgcacctctgacccctaaagaagaggagtacctgcaggcccaggtgcggagcagaagcaagctggacgcccctaaggtggatctgctggtgaagaattgcctcctgcccctgagagagtacttcaagtatttcagccagaatagtctgcccctgggaggcagcggcggcggcaggcccagggccctgaagttcgccgacgtggccgtgtacttcagccccgaggagtggggctgcctgaggcccgcccagaggaccctgtacagggacgtgatgagggagacctacggccacctgggcgccctgggctgcgccggccccaagcccgccctgatcagctggctggagaggaacaccgacgactgggagcccgccgccctggacccccaggagtaccccaggggcgtgaccgtgcagggcggcccaagcagcggcgcccctcctcccagcggcggcaggcggcccaagcagcggcgcccctcctcccagcggcggcagcccagccggctccccaacctctaccgaggagggcacctctgagtccgccacccccgagagcggccctggcacctccaccgagcccagcgagggcagcgcacccggcagccctgccggcagccccacctccacagaggagggaaccagcaccgagcccagcgaaggcagcgccccaggcaccagcaccgagcctagtgagcaggagattaaacggatcaacaagatcagaagaagacttgtgaaagacagcaacaccaagaaggccggcaagacaggccccatgaaaaccctgctggttagagtgatgacacccgatctgagagagcggctggaaaacctgagaaagaagcctgaaaatatcccccagcccatcagcaatacatctagagccaacctgaataagctgctgaccgattacaccgaaatgaagaaggcgatcctgcatgtgtactgggaagagttccagaaggaccctgtgggcctgatgagccgggtggcccagcctgccagcaagaagatcgatcagaacaagctgaaacctgagatggacgagaagggcaacctgaccaccgccggctttgcctgctctcagtgtggccagcccctgttcgtgtacaagctggagcaggtgtctgagaagggcaaggcttacaccaactacttcggacggtgcaatgtggccgagcacgaaaagctgatcctgctggcccagctgaagcccgagaaggatagcgacgaagccgtgacatatagcctgggaaagtttgggcagagggccctggatttctacagcattcatgtgaccaaggagtccacccaccccgtgaagcccctggcccagatcgccggaaacagatacgcctccggacctgtgggaaaggccctgagcgacgcatgtatgggcacaatcgcctccttcctgtctaagtaccaggacatcatcatcgaacaccagaaggtggtgaagggcaaccagaagagactggagagcctgcgggagctggccggcaaggaaaacctggaataccctagcgtgaccctgccacctcagcctcacaccaaggagggcgttgatgcctacaacgaagtgatcgcccgggtgcgaatgtgggtgaacctgaacctgtggcagaagctgaagctaagcagagatgatgccaagcctctgctgagactgaagggattcccttcctttcctctggtcgagagacaggccaacgaagtggactggtgggacatggtgtgtaacgtgaagaagctgatcaacgagaaaaaggaggatggcaaggtgttttggcagaatctggctggctacaagagacaggaagccctgagaccatacctgagcagcgaggaagatcggaagaagggaaagaaattcgctcggtaccagctgggcgacctgctgctgcacctggaaaagaagcacggcgaggactggggaaaggtgtacgacgaggcctgggagcggattgacaagaaagtggaaggcctgagcaagcacatcaagctggaagaggaacggagaagcgaggacgcccagagcaaggccgccctgaccgactggctgcgggctaaggccagcttcgtgatcgagggcctgaaggaggccgacaaggacgagttctgcagatgcgagctgaagctgcagaagtggtacggggacctgcggggaaagcccttcgccatcgaagccgagaacagcatcctggacatcagcggcttcagcaagcagtacaactgtgccttcatctggcagaaggacggcgtgaagaagctgaacctgtacctgatcatcaactacttcaagggcggcaagctgcggttcaagaagatcaaacctgaagccttcgaagccaacagattctacaccgtgatcaacaaaaagagcggcgagatcgtgcccatggaggtgaacttcaacttcgacgaccccaacctgatcatcctgcctctggcctttggcaagagacagggcagagaattcatctggaacgacctgctgtccctggaaaccggcagcctgaagctggccaacggaagagtgatcgagaagacactgtacaacagaagaacccggcaggatgagcctgccctgttcgtggccctgaccttcgagcggcgggaggtcctggactcctccaatatcaaaccaatgaacctgatcggcgtggcaagaggcgaaaacatccccgccgtgatcgccctgaccgaccccgagggctgcccactgagccggtttaaggatagcctgggaaacccaacccacatcctgagaatcggcgagagctataaggagaagcagcggaccatccaggccaagaaggaggtggagcagcggagagccggcggctacagccggaagtacgccagcaaagccaagaatctggcagacgatatggtgagaaacaccgctagagatctgctgtactacgccgtgacccaggatgccatgctgatcttcgccaacctgagccggggcttcggccggcagggcaagcggaccttcatggccgagagacagtacacacggatggaggactggctgaccgccaagctggcctacgagggcctgagcaagacctacctgtccaagacactggcccagtacacctccaagacatgcagcaactgtgggtttaccatcaccagcgccgactacgacagggtgctggagaagctgaagaagacagcaacaggctggatgaccacaattaacggcaaggagctgaaggtggagggccagattacctactacaacagatacaagagacagaacgtagtcaaggacctgtccgtcgagctggatagactgagcgaagaatctgtgaacaacgacatctcctcctggacaaagggcagaagcggagaagctctgagcctcctgaagaaaagattctcccatagacccgtgcaggagaagttcgtgtgcctgaactgcggcttcgagacacacgcagccgagcaagccgccctgaacatcgccagatcctggctgttcctgcggagccaggagtacaagaaataccagacaaacaagacaaccggcaacaccgataagagagccttcgtcgagacctggcagtccttttaccggaagaagcttaaggaggtgtggaaacctgccgtgcggtctggcggatctggcggaggctccaccagccccaagaaaaagagaaaagtctaagctgccttctgcggggcttgccttctggccatgcccttcttctctcccttgcacctgtacctcttggtctttgaataaagcctgagtaggaaggctagcaaaaaaaaaaaaaaaaaaaaaaaaaaaaaaaaaaaaaaaaaaaaaaaaaaaaaaaaaaaaaaaaaaaaaaaaaaaaaaaagcccagccggctccccaacctctaccgaggagggcacctctgagtccgccacccccgagagcggccctggcacctccaccgagcccagcgagggcagcgcacccggcagccctgccggcagccccacctccacagaggagggaaccagcaccgagcccagcgaaggcagcgccccaggcaccagcaccgagcctagtgagcaggagattaaacggatcaacaagatcagaagaagacttgtgaaagacagcaacaccaagaaggccggcaagacaggccccatgaaaaccctgctggttagagtgatgacacccgatctgagagagcggctggaaaacctgagaaagaagcctgaaaatatcccccagcccatcagcaatacatctagagccaacctgaataagctgctgaccgattacaccgaaatgaagaaggcgatcctgcatgtgtactgggaagagttccagaaggaccctgtgggcctgatgagccgggtggcccagcctgccagcaagaagatcgatcagaacaagctgaaacctgagatggacgagaagggcaacctgaccaccgccggctttgcctgctctcagtgtggccagcccctgttcgtgtacaagctggagcaggtgtctgagaagggcaaggcttacaccaactacttcggacggtgcaatgtggccgagcacgaaaagctgatcctgctggcccagctgaagcccgagaaggatagcgacgaagccgtgacatatagcctgggaaagtttgggcagagggccctggatttctacagcattcatgtgaccaaggagtccacccaccccgtgaagcccctggcccagatcgccggaaacagatacgcctccggacctgtgggaaaggccctgagcgacgcatgtatgggcacaatcgcctccttcctgtctaagtaccaggacatcatcatcgaacaccagaaggtggtgaagggcaaccagaagagactggagagcctgcgggagctggccggcaaggaaaacctggaataccctagcgtgaccctgccacctcagcctcacaccaaggagggcgttgatgcctacaacgaagtgatcgcccgggtgcgaatgtgggtgaacctgaacctgtggcagaagctgaagctaagcagagatgatgccaagcctctgctgagactgaagggattcccttcctttcctctggtcgagagacaggccaacgaagtggactggtgggacatggtgtgtaacgtgaagaagctgatcaacgagaaaaaggaggatggcaaggtgttttggcagaatctggctggctacaagagacaggaagccctgagaccatacctgagcagcgaggaagatcggaagaagggaaagaaattcgctcggtaccagctgggcgacctgctgctgcacctggaaaagaagcacggcgaggactggggaaaggtgtacgacgaggcctgggagcggattgacaagaaagtggaaggcctgagcaagcacatcaagctggaagaggaacggagaagcgaggacgcccagagcaaggccgccctgaccgactggctgcgggctaaggccagcttcgtgatcgagggcctgaaggaggccgacaaggacgagttctgcagatgcgagctgaagctgcagaagtggtacggggacctgcggggaaagcccttcgccatcgaagccgagaacagcatcctggacatcagcggcttcagcaagcagtacaactgtgccttcatctggcagaaggacggcgtgaagaagctgaacctgtacctgatcatcaactacttcaagggcggcaagctgcggttcaagaagatcaaacctgaagccttcgaagccaacagattctacaccgtgatcaacaaaaagagcggcgagatcgtgcccatggaggtgaacttcaacttcgacgaccccaacctgatcatcctgcctctggcctttggcaagagacagggcagagaattcatctggaacgacctgctgtccctggaaaccggcagcctgaagctggccaacggaagagtgatcgagaagacactgtacaacagaagaacccggcaggatgagcctgccctgttcgtggccctgaccttcgagcggcgggaggtcctggactcctccaatatcaaaccaatgaacctgatcggcgtggcaagaggcgaaaacatccccgccgtgatcgccctgaccgaccccgagggctgcccactgagccggtttaaggatagcctgggaaacccaacccacatcctgagaatcggcgagagctataaggagaagcagcggaccatccaggccaagaaggaggtggagcagcggagagccggcggctacagccggaagtacgccagcaaagccaagaatctggcagacgatatggtgagaaacaccgctagagatctgctgtactacgccgtgacccaggatgccatgctgatcttcgccaacctgagccggggcttcggccggcagggcaagcggaccttcatggccgagagacagtacacacggatggaggactggctgaccgccaagctggcctacgagggcctgagcaagacctacctgtccaagacactggcccagtacacctccaagacatgcagcaactgtgggtttaccatcaccagcgccgactacgacagggtgctggagaagctgaagaagacagcaacaggctggatgaccacaattaacggcaaggagctgaaggtggagggccagattacctactacaacagatacaagagacagaacgtagtcaaggacctgtccgtcgagctggatagactgagcgaagaatctgtgaacaacgacatctcctcctggacaaagggcagaagcggagaagctctgagcctcctgaagaaaagattctcccatagacccgtgcaggagaagttcgtgtgcctgaactgcggcttcgagacacacgcagccgagcaagccgccctgaacatcgccagatcctggctgttcctgcggagccaggagtacaagaaataccagacaaacaagacaaccggcaacaccgataagagagccttcgtcgagacctggcagtccttttaccggaagaagcttaaggaggtgtggaaacctgccgtgcggtctggcggatctggcggaggctccaccagccccaagaaaaagagaaaagtctaagctgccttctgcggggcttgccttctggccatgcccttcttctctcccttgcacctgtacctcttggtctttgaataaagcctgagtaggaaggctagcaaaaaaaaaaaaaaaaaaaaaaaaaaaaaaaaaaaaaaaaaaaaaaaaaaaaaaaaaaaaaaaaaaaaaaaaaaaaaaaa

SEQ ID NO: 9790 - RNA, 8787 nt, synthetic construct
  source 1..8787: mol_type = other RNA
aggaaataagagagaaaagaagagtaagaagaaatataagagccaccatggcccctaagaagaagcgtaaagtgagccggatgaaccacgaccaggagttcgacccccctaaggtgtaccctcccgtccccgccgagaagagaaagcccatccgggtcctgagcctgttcgatggcatcgccaccggtctgctggtgctgaaggacctgggcatccaggtggataggtacattgcctccgaggtgtgcgaggactccatcaccgtgggaatggtgcgtcatcagggcaagatcatgtacgtgggcgacgtgcggagcgtgacacagaagcatatccaggagtggggccctttcgacctggtgatcggcggcagcccttgcaatgacctgagcatcgtgaacccagcccggaagggcctgtacgagggaaccggcagactgttcttcgagttttacagactgctgcacgacgcccggcctaaggaaggcgacgaccggcccttcttttggctgttcgagaatgtggtggccatgggagtcagcgacaagcgggatattagccggttcctggagagcaaccccgtgatgatcgatgccaaggaagtgagcgccgcccaccgggccagatacttctggggcaatctgcctggcatgaacagacccctggccagcaccgtgaacgacaagctggagctgcaggagtgcctggagcacggccggatcgccaagttcagcaaggtgagaaccatcaccacccgaagcaacagcatcaaacaaggcaaggaccagcactttcctgtgttcatgaacgagaaggaggacatcctgtggtgtaccgagatggagagagtgttcgggttcccagtccactacacagatgtcagcaacatgtctagactggccagacagagactgctgggaagaagctggtccgtccctgtgatcagacacctgttcgcccctctgaaggagtacttcgcctgcgtgagcagcggcaacagcaacgccaacagccggggccccagcttctctagcggcctggtgccactgtccctgagagggagccacatgggccccatggagatctacaaaaccgtgagcgcctggaagcggcagcctgtgcgcgtgctgagcctgtttcggaatatcgataaagtcctgaaaagcctgggattcctggagagcggctctggctccggcggtggcaccctgaagtacgtggaggatgtgacaaacgtggtcagacgggatgtggagaagtggggccccttcgatctggtgtacggcagcacccaacccctgggcagctcttgtgaccggtgccctggctggtacatgtttcagttccaccggatcctgcagtacgccctgccgagacaggagtcccagcggccattcttttggattttcatggacaacttgctgctgaccgaggatgaccaggaaactaccactcggttcctgcagaccgaagccgtgaccctgcaggacgtgagaggccgggactaccagaacgccatgcgggtgtggtccaacatccctggactgaaaagcaagcacgcacctctgacccctaaagaagaggagtacctgcaggcccaggtgcggagcagaagcaagctggacgcccctaaggtggatctgctggtgaagaattgcctcctgcccctgagagagtacttcaagtatttcagccagaatagtctgcccctgggaggcagcggcggcggcagccaggtgagcgtgaccttcgaggacgtggccgtgctgttcaccagggacgagtggaggaagctggcccccccccagaggaacctgtaccaggacgtgatgctggagaactacagcaacctggtgagcctgggcctgctgttccccaagcccaaggtgatcagcctgctgcagcagggcgaggacccctggaaggtggagaaggagaacctgggcggcagcagcctgggctggaagaacagcggcggcccaagcagcggcgcccctcctcccagcggcggcaggcggcccaagcagcggcgcccctcctcccagcggcggcagcccagccggctccccaacctctaccgaggagggcacctctgagtccgccacccccgagagcggccctggcacctccaccgagcccagcgagggcagcgcacccggcagccctgccggcagccccacctccacagaggagggaaccagcaccgagcccagcgaaggcagcgccccaggcaccagcaccgagcctagtgagcaggagattaaacggatcaacaagatcagaagaagacttgtgaaagacagcaacaccaagaaggccggcaagacaggccccatgaaaaccctgctggttagagtgatgacacccgatctgagagagcggctggaaaacctgagaaagaagcctgaaaatatcccccagcccatcagcaatacatctagagccaacctgaataagctgctgaccgattacaccgaaatgaagaaggcgatcctgcatgtgtactgggaagagttccagaaggaccctgtgggcctgatgagccgggtggcccagcctgccagcaagaagatcgatcagaacaagctgaaacctgagatggacgagaagggcaacctgaccaccgccggctttgcctgctctcagtgtggccagcccctgttcgtgtacaagctggagcaggtgtctgagaagggcaaggcttacaccaactacttcggacggtgcaatgtggccgagcacgaaaagctgatcctgctggcccagctgaagcccgagaaggatagcgacgaagccgtgacatatagcctgggaaagtttgggcagagggccctggatttctacagcattcatgtgaccaaggagtccacccaccccgtgaagcccctggcccagatcgccggaaacagatacgcctccggacctgtgggaaaggccctgagcgacgcatgtatgggcacaatcgcctccttcctgtctaagtaccaggacatcatcatcgaacaccagaaggtggtgaagggcaaccagaagagactggagagcctgcgggagctggccggcaaggaaaacctggaataccctagcgtgaccctgccacctcagcctcacaccaaggagggcgttgatgcctacaacgaagtgatcgcccgggtgcgaatgtgggtgaacctgaacctgtggcagaagctgaagctaagcagagatgatgccaagcctctgctgagactgaagggattcccttcctttcctctggtcgagagacaggccaacgaagtggactggtgggacatggtgtgtaacgtgaagaagctgatcaacgagaaaaaggaggatggcaaggtgttttggcagaatctggctggctacaagagacaggaagccctgagaccatacctgagcagcgaggaagatcggaagaagggaaagaaattcgctcggtaccagctgggcgacctgctgctgcacctggaaaagaagcacggcgaggactggggaaaggtgtacgacgaggcctgggagcggattgacaagaaagtggaaggcctgagcaagcacatcaagctggaagaggaacggagaagcgaggacgcccagagcaaggccgccctgaccgactggctgcgggctaaggccagcttcgtgatcgagggcctgaaggaggccgacaaggacgagttctgcagatgcgagctgaagctgcagaagtggtacggggacctgcggggaaagcccttcgccatcgaagccgagaacagcatcctggacatcagcggcttcagcaagcagtacaactgtgccttcatctggcagaaggacggcgtgaagaagctgaacctgtacctgatcatcaactacttcaagggcggcaagctgcggttcaagaagatcaaacctgaagccttcgaagccaacagattctacaccgtgatcaacaaaaagagcggcgagatcgtgcccatggaggtgaacttcaacttcgacgaccccaacctgatcatcctgcctctggcctttggcaagagacagggcagagaattcatctggaacgacctgctgtccctggaaaccggcagcctgaagctggccaacggaagagtgatcgagaagacactgtacaacagaagaacccggcaggatgagcctgccctgttcgtggccctgaccttcgagcggcgggaggtcctggactcctccaatatcaaaccaatgaacctgatcggcgtggcaagaggcgaaaacatccccgccgtgatcgccctgaccgaccccgagggctgcccactgagccggtttaaggatagcctgggaaacccaacccacatcctgagaatcggcgagagctataaggagaagcagcggaccatccaggccaagaaggaggtggagcagcggagagccggcggctacagccggaagtacgccagcaaagccaagaatctggcagacgatatggtgagaaacaccgctagagatctgctgtactacgccgtgacccaggatgccatgctgatcttcgccaacctgagccggggcttcggccggcagggcaagcggaccttcatggccgagagacagtacacacggatggaggactggctgaccgccaagctggcctacgagggcctgagcaagacctacctgtccaagacactggcccagtacacctccaagacatgcagcaactgtgggtttaccatcaccagcgccgactacgacagggtgctggagaagctgaagaagacagcaacaggctggatgaccacaattaacggcaaggagctgaaggtggagggccagattacctactacaacagatacaagagacagaacgtagtcaaggacctgtccgtcgagctggatagactgagcgaagaatctgtgaacaacgacatctcctcctggacaaagggcagaagcggagaagctctgagcctcctgaagaaaagattctcccatagacccgtgcaggagaagttcgtgtgcctgaactgcggcttcgagacacacgcagccgagcaagccgccctgaacatcgccagatcctggctgttcctgcggagccaggagtacaagaaataccagacaaacaagacaaccggcaacaccgataagagagccttcgtcgagacctggcagtccttttaccggaagaagcttaaggaggtgtggaaacctgccgtgcggtctggcggatctggcggaggctccaccagccccaagaaaaagagaaaagtctaagctgccttctgcggggcttgccttctggccatgcccttcttctctcccttgcacctgtacctcttggtctttgaataaagcctgagtaggaaggctagcaaaaaaaaaaaaaaaaaaaaaaaaaaaaaaaaaaaaaaaaaaaaaaaaaaaaaaaaaaaaaaaaaaaaaaaaaaaaaaaagcccagccggctccccaacctctaccgaggagggcacctctgagtccgccacccccgagagcggccctggcacctccaccgagcccagcgagggcagcgcacccggcagccctgccggcagccccacctccacagaggagggaaccagcaccgagcccagcgaaggcagcgccccaggcaccagcaccgagcctagtgagcaggagattaaacggatcaacaagatcagaagaagacttgtgaaagacagcaacaccaagaaggccggcaagacaggccccatgaaaaccctgctggttagagtgatgacacccgatctgagagagcggctggaaaacctgagaaagaagcctgaaaatatcccccagcccatcagcaatacatctagagccaacctgaataagctgctgaccgattacaccgaaatgaagaaggcgatcctgcatgtgtactgggaagagttccagaaggaccctgtgggcctgatgagccgggtggcccagcctgccagcaagaagatcgatcagaacaagctgaaacctgagatggacgagaagggcaacctgaccaccgccggctttgcctgctctcagtgtggccagcccctgttcgtgtacaagctggagcaggtgtctgagaagggcaaggcttacaccaactacttcggacggtgcaatgtggccgagcacgaaaagctgatcctgctggcccagctgaagcccgagaaggatagcgacgaagccgtgacatatagcctgggaaagtttgggcagagggccctggatttctacagcattcatgtgaccaaggagtccacccaccccgtgaagcccctggcccagatcgccggaaacagatacgcctccggacctgtgggaaaggccctgagcgacgcatgtatgggcacaatcgcctccttcctgtctaagtaccaggacatcatcatcgaacaccagaaggtggtgaagggcaaccagaagagactggagagcctgcgggagctggccggcaaggaaaacctggaataccctagcgtgaccctgccacctcagcctcacaccaaggagggcgttgatgcctacaacgaagtgatcgcccgggtgcgaatgtgggtgaacctgaacctgtggcagaagctgaagctaagcagagatgatgccaagcctctgctgagactgaagggattcccttcctttcctctggtcgagagacaggccaacgaagtggactggtgggacatggtgtgtaacgtgaagaagctgatcaacgagaaaaaggaggatggcaaggtgttttggcagaatctggctggctacaagagacaggaagccctgagaccatacctgagcagcgaggaagatcggaagaagggaaagaaattcgctcggtaccagctgggcgacctgctgctgcacctggaaaagaagcacggcgaggactggggaaaggtgtacgacgaggcctgggagcggattgacaagaaagtggaaggcctgagcaagcacatcaagctggaagaggaacggagaagcgaggacgcccagagcaaggccgccctgaccgactggctgcgggctaaggccagcttcgtgatcgagggcctgaaggaggccgacaaggacgagttctgcagatgcgagctgaagctgcagaagtggtacggggacctgcggggaaagcccttcgccatcgaagccgagaacagcatcctggacatcagcggcttcagcaagcagtacaactgtgccttcatctggcagaaggacggcgtgaagaagctgaacctgtacctgatcatcaactacttcaagggcggcaagctgcggttcaagaagatcaaacctgaagccttcgaagccaacagattctacaccgtgatcaacaaaaagagcggcgagatcgtgcccatggaggtgaacttcaacttcgacgaccccaacctgatcatcctgcctctggcctttggcaagagacagggcagagaattcatctggaacgacctgctgtccctggaaaccggcagcctgaagctggccaacggaagagtgatcgagaagacactgtacaacagaagaacccggcaggatgagcctgccctgttcgtggccctgaccttcgagcggcgggaggtcctggactcctccaatatcaaaccaatgaacctgatcggcgtggcaagaggcgaaaacatccccgccgtgatcgccctgaccgaccccgagggctgcccactgagccggtttaaggatagcctgggaaacccaacccacatcctgagaatcggcgagagctataaggagaagcagcggaccatccaggccaagaaggaggtggagcagcggagagccggcggctacagccggaagtacgccagcaaagccaagaatctggcagacgatatggtgagaaacaccgctagagatctgctgtactacgccgtgacccaggatgccatgctgatcttcgccaacctgagccggggcttcggccggcagggcaagcggaccttcatggccgagagacagtacacacggatggaggactggctgaccgccaagctggcctacgagggcctgagcaagacctacctgtccaagacactggcccagtacacctccaagacatgcagcaactgtgggtttaccatcaccagcgccgactacgacagggtgctggagaagctgaagaagacagcaacaggctggatgaccacaattaacggcaaggagctgaaggtggagggccagattacctactacaacagatacaagagacagaacgtagtcaaggacctgtccgtcgagctggatagactgagcgaagaatctgtgaacaacgacatctcctcctggacaaagggcagaagcggagaagctctgagcctcctgaagaaaagattctcccatagacccgtgcaggagaagttcgtgtgcctgaactgcggcttcgagacacacgcagccgagcaagccgccctgaacatcgccagatcctggctgttcctgcggagccaggagtacaagaaataccagacaaacaagacaaccggcaacaccgataagagagccttcgtcgagacctggcagtccttttaccggaagaagcttaaggaggtgtggaaacctgccgtgcggtctggcggatctggcggaggctccaccagccccaagaaaaagagaaaagtctaagctgccttctgcggggcttgccttctggccatgcccttcttctctcccttgcacctgtacctcttggtctttgaataaagcctgagtaggaaggctagcaaaaaaaaaaaaaaaaaaaaaaaaaaaaaaaaaaaaaaaaaaaaaaaaaaaaaaaaaaaaaaaaaaaaaaaaaaaaaaaa

SEQ ID NO: 9791 - RNA, 8787 nt, synthetic construct
  source 1..8787: mol_type = other RNA
aggaaataagagagaaaagaagagtaagaagaaatataagagccaccatggcccctaagaagaagcgtaaagtgagccggatgaaccacgaccaggagttcgacccccctaaggtgtaccctcccgtccccgccgagaagagaaagcccatccgggtcctgagcctgttcgatggcatcgccaccggtctgctggtgctgaaggacctgggcatccaggtggataggtacattgcctccgaggtgtgcgaggactccatcaccgtgggaatggtgcgtcatcagggcaagatcatgtacgtgggcgacgtgcggagcgtgacacagaagcatatccaggagtggggccctttcgacctggtgatcggcggcagcccttgcaatgacctgagcatcgtgaacccagcccggaagggcctgtacgagggaaccggcagactgttcttcgagttttacagactgctgcacgacgcccggcctaaggaaggcgacgaccggcccttcttttggctgttcgagaatgtggtggccatgggagtcagcgacaagcgggatattagccggttcctggagagcaaccccgtgatgatcgatgccaaggaagtgagcgccgcccaccgggccagatacttctggggcaatctgcctggcatgaacagacccctggccagcaccgtgaacgacaagctggagctgcaggagtgcctggagcacggccggatcgccaagttcagcaaggtgagaaccatcaccacccgaagcaacagcatcaaacaaggcaaggaccagcactttcctgtgttcatgaacgagaaggaggacatcctgtggtgtaccgagatggagagagtgttcgggttcccagtccactacacagatgtcagcaacatgtctagactggccagacagagactgctgggaagaagctggtccgtccctgtgatcagacacctgttcgcccctctgaaggagtacttcgcctgcgtgagcagcggcaacagcaacgccaacagccggggccccagcttctctagcggcctggtgccactgtccctgagagggagccacatgggccccatggagatctacaaaaccgtgagcgcctggaagcggcagcctgtgcgcgtgctgagcctgtttcggaatatcgataaagtcctgaaaagcctgggattcctggagagcggctctggctccggcggtggcaccctgaagtacgtggaggatgtgacaaacgtggtcagacgggatgtggagaagtggggccccttcgatctggtgtacggcagcacccaacccctgggcagctcttgtgaccggtgccctggctggtacatgtttcagttccaccggatcctgcagtacgccctgccgagacaggagtcccagcggccattcttttggattttcatggacaacttgctgctgaccgaggatgaccaggaaactaccactcggttcctgcagaccgaagccgtgaccctgcaggacgtgagaggccgggactaccagaacgccatgcgggtgtggtccaacatccctggactgaaaagcaagcacgcacctctgacccctaaagaagaggagtacctgcaggcccaggtgcggagcagaagcaagctggacgcccctaaggtggatctgctggtgaagaattgcctcctgcccctgagagagtacttcaagtatttcagccagaatagtctgcccctgggaggcagcggcggcggcatggaggagatgctgagcttcagggacgtggccatcgacttcagcgccgaggagtgggagtgcctggacctggcccagtggaacctgtacagggacgtgatgctggagaactacagcaacctggtgttcctgggcctggccagctgcaagccctacctggtgaccttcctggagcagaggcagggccccagcgacgtgaagaggcaggccgccgcccccgtgcaccccggcggcaccccctacggcggcccaagcagcggcgcccctcctcccagcggcggcaggcggcccaagcagcggcgcccctcctcccagcggcggcagcccagccggctccccaacctctaccgaggagggcacctctgagtccgccacccccgagagcggccctggcacctccaccgagcccagcgagggcagcgcacccggcagccctgccggcagccccacctccacagaggagggaaccagcaccgagcccagcgaaggcagcgccccaggcaccagcaccgagcctagtgagcaggagattaaacggatcaacaagatcagaagaagacttgtgaaagacagcaacaccaagaaggccggcaagacaggccccatgaaaaccctgctggttagagtgatgacacccgatctgagagagcggctggaaaacctgagaaagaagcctgaaaatatcccccagcccatcagcaatacatctagagccaacctgaataagctgctgaccgattacaccgaaatgaagaaggcgatcctgcatgtgtactgggaagagttccagaaggaccctgtgggcctgatgagccgggtggcccagcctgccagcaagaagatcgatcagaacaagctgaaacctgagatggacgagaagggcaacctgaccaccgccggctttgcctgctctcagtgtggccagcccctgttcgtgtacaagctggagcaggtgtctgagaagggcaaggcttacaccaactacttcggacggtgcaatgtggccgagcacgaaaagctgatcctgctggcccagctgaagcccgagaaggatagcgacgaagccgtgacatatagcctgggaaagtttgggcagagggccctggatttctacagcattcatgtgaccaaggagtccacccaccccgtgaagcccctggcccagatcgccggaaacagatacgcctccggacctgtgggaaaggccctgagcgacgcatgtatgggcacaatcgcctccttcctgtctaagtaccaggacatcatcatcgaacaccagaaggtggtgaagggcaaccagaagagactggagagcctgcgggagctggccggcaaggaaaacctggaataccctagcgtgaccctgccacctcagcctcacaccaaggagggcgttgatgcctacaacgaagtgatcgcccgggtgcgaatgtgggtgaacctgaacctgtggcagaagctgaagctaagcagagatgatgccaagcctctgctgagactgaagggattcccttcctttcctctggtcgagagacaggccaacgaagtggactggtgggacatggtgtgtaacgtgaagaagctgatcaacgagaaaaaggaggatggcaaggtgttttggcagaatctggctggctacaagagacaggaagccctgagaccatacctgagcagcgaggaagatcggaagaagggaaagaaattcgctcggtaccagctgggcgacctgctgctgcacctggaaaagaagcacggcgaggactggggaaaggtgtacgacgaggcctgggagcggattgacaagaaagtggaaggcctgagcaagcacatcaagctggaagaggaacggagaagcgaggacgcccagagcaaggccgccctgaccgactggctgcgggctaaggccagcttcgtgatcgagggcctgaaggaggccgacaaggacgagttctgcagatgcgagctgaagctgcagaagtggtacggggacctgcggggaaagcccttcgccatcgaagccgagaacagcatcctggacatcagcggcttcagcaagcagtacaactgtgccttcatctggcagaaggacggcgtgaagaagctgaacctgtacctgatcatcaactacttcaagggcggcaagctgcggttcaagaagatcaaacctgaagccttcgaagccaacagattctacaccgtgatcaacaaaaagagcggcgagatcgtgcccatggaggtgaacttcaacttcgacgaccccaacctgatcatcctgcctctggcctttggcaagagacagggcagagaattcatctggaacgacctgctgtccctggaaaccggcagcctgaagctggccaacggaagagtgatcgagaagacactgtacaacagaagaacccggcaggatgagcctgccctgttcgtggccctgaccttcgagcggcgggaggtcctggactcctccaatatcaaaccaatgaacctgatcggcgtggcaagaggcgaaaacatccccgccgtgatcgccctgaccgaccccgagggctgcccactgagccggtttaaggatagcctgggaaacccaacccacatcctgagaatcggcgagagctataaggagaagcagcggaccatccaggccaagaaggaggtggagcagcggagagccggcggctacagccggaagtacgccagcaaagccaagaatctggcagacgatatggtgagaaacaccgctagagatctgctgtactacgccgtgacccaggatgccatgctgatcttcgccaacctgagccggggcttcggccggcagggcaagcggaccttcatggccgagagacagtacacacggatggaggactggctgaccgccaagctggcctacgagggcctgagcaagacctacctgtccaagacactggcccagtacacctccaagacatgcagcaactgtgggtttaccatcaccagcgccgactacgacagggtgctggagaagctgaagaagacagcaacaggctggatgaccacaattaacggcaaggagctgaaggtggagggccagattacctactacaacagatacaagagacagaacgtagtcaaggacctgtccgtcgagctggatagactgagcgaagaatctgtgaacaacgacatctcctcctggacaaagggcagaagcggagaagctctgagcctcctgaagaaaagattctcccatagacccgtgcaggagaagttcgtgtgcctgaactgcggcttcgagacacacgcagccgagcaagccgccctgaacatcgccagatcctggctgttcctgcggagccaggagtacaagaaataccagacaaacaagacaaccggcaacaccgataagagagccttcgtcgagacctggcagtccttttaccggaagaagcttaaggaggtgtggaaacctgccgtgcggtctggcggatctggcggaggctccaccagccccaagaaaaagagaaaagtctaagctgccttctgcggggcttgccttctggccatgcccttcttctctcccttgcacctgtacctcttggtctttgaataaagcctgagtaggaaggctagcaaaaaaaaaaaaaaaaaaaaaaaaaaaaaaaaaaaaaaaaaaaaaaaaaaaaaaaaaaaaaaaaaaaaaaaaaaaaaaaagcccagccggctccccaacctctaccgaggagggcacctctgagtccgccacccccgagagcggccctggcacctccaccgagcccagcgagggcagcgcacccggcagccctgccggcagccccacctccacagaggagggaaccagcaccgagcccagcgaaggcagcgccccaggcaccagcaccgagcctagtgagcaggagattaaacggatcaacaagatcagaagaagacttgtgaaagacagcaacaccaagaaggccggcaagacaggccccatgaaaaccctgctggttagagtgatgacacccgatctgagagagcggctggaaaacctgagaaagaagcctgaaaatatcccccagcccatcagcaatacatctagagccaacctgaataagctgctgaccgattacaccgaaatgaagaaggcgatcctgcatgtgtactgggaagagttccagaaggaccctgtgggcctgatgagccgggtggcccagcctgccagcaagaagatcgatcagaacaagctgaaacctgagatggacgagaagggcaacctgaccaccgccggctttgcctgctctcagtgtggccagcccctgttcgtgtacaagctggagcaggtgtctgagaagggcaaggcttacaccaactacttcggacggtgcaatgtggccgagcacgaaaagctgatcctgctggcccagctgaagcccgagaaggatagcgacgaagccgtgacatatagcctgggaaagtttgggcagagggccctggatttctacagcattcatgtgaccaaggagtccacccaccccgtgaagcccctggcccagatcgccggaaacagatacgcctccggacctgtgggaaaggccctgagcgacgcatgtatgggcacaatcgcctccttcctgtctaagtaccaggacatcatcatcgaacaccagaaggtggtgaagggcaaccagaagagactggagagcctgcgggagctggccggcaaggaaaacctggaataccctagcgtgaccctgccacctcagcctcacaccaaggagggcgttgatgcctacaacgaagtgatcgcccgggtgcgaatgtgggtgaacctgaacctgtggcagaagctgaagctaagcagagatgatgccaagcctctgctgagactgaagggattcccttcctttcctctggtcgagagacaggccaacgaagtggactggtgggacatggtgtgtaacgtgaagaagctgatcaacgagaaaaaggaggatggcaaggtgttttggcagaatctggctggctacaagagacaggaagccctgagaccatacctgagcagcgaggaagatcggaagaagggaaagaaattcgctcggtaccagctgggcgacctgctgctgcacctggaaaagaagcacggcgaggactggggaaaggtgtacgacgaggcctgggagcggattgacaagaaagtggaaggcctgagcaagcacatcaagctggaagaggaacggagaagcgaggacgcccagagcaaggccgccctgaccgactggctgcgggctaaggccagcttcgtgatcgagggcctgaaggaggccgacaaggacgagttctgcagatgcgagctgaagctgcagaagtggtacggggacctgcggggaaagcccttcgccatcgaagccgagaacagcatcctggacatcagcggcttcagcaagcagtacaactgtgccttcatctggcagaaggacggcgtgaagaagctgaacctgtacctgatcatcaactacttcaagggcggcaagctgcggttcaagaagatcaaacctgaagccttcgaagccaacagattctacaccgtgatcaacaaaaagagcggcgagatcgtgcccatggaggtgaacttcaacttcgacgaccccaacctgatcatcctgcctctggcctttggcaagagacagggcagagaattcatctggaacgacctgctgtccctggaaaccggcagcctgaagctggccaacggaagagtgatcgagaagacactgtacaacagaagaacccggcaggatgagcctgccctgttcgtggccctgaccttcgagcggcgggaggtcctggactcctccaatatcaaaccaatgaacctgatcggcgtggcaagaggcgaaaacatccccgccgtgatcgccctgaccgaccccgagggctgcccactgagccggtttaaggatagcctgggaaacccaacccacatcctgagaatcggcgagagctataaggagaagcagcggaccatccaggccaagaaggaggtggagcagcggagagccggcggctacagccggaagtacgccagcaaagccaagaatctggcagacgatatggtgagaaacaccgctagagatctgctgtactacgccgtgacccaggatgccatgctgatcttcgccaacctgagccggggcttcggccggcagggcaagcggaccttcatggccgagagacagtacacacggatggaggactggctgaccgccaagctggcctacgagggcctgagcaagacctacctgtccaagacactggcccagtacacctccaagacatgcagcaactgtgggtttaccatcaccagcgccgactacgacagggtgctggagaagctgaagaagacagcaacaggctggatgaccacaattaacggcaaggagctgaaggtggagggccagattacctactacaacagatacaagagacagaacgtagtcaaggacctgtccgtcgagctggatagactgagcgaagaatctgtgaacaacgacatctcctcctggacaaagggcagaagcggagaagctctgagcctcctgaagaaaagattctcccatagacccgtgcaggagaagttcgtgtgcctgaactgcggcttcgagacacacgcagccgagcaagccgccctgaacatcgccagatcctggctgttcctgcggagccaggagtacaagaaataccagacaaacaagacaaccggcaacaccgataagagagccttcgtcgagacctggcagtccttttaccggaagaagcttaaggaggtgtggaaacctgccgtgcggtctggcggatctggcggaggctccaccagccccaagaaaaagagaaaagtctaagctgccttctgcggggcttgccttctggccatgcccttcttctctcccttgcacctgtacctcttggtctttgaataaagcctgagtaggaaggctagcaaaaaaaaaaaaaaaaaaaaaaaaaaaaaaaaaaaaaaaaaaaaaaaaaaaaaaaaaaaaaaaaaaaaaaaaaaaaaaaa

SEQ ID NO: 9792 - RNA, 8787 nt, synthetic construct
  source 1..8787: mol_type = other RNA
aggaaataagagagaaaagaagagtaagaagaaatataagagccaccatggcccctaagaagaagcgtaaagtgagccggatgaaccacgaccaggagttcgacccccctaaggtgtaccctcccgtccccgccgagaagagaaagcccatccgggtcctgagcctgttcgatggcatcgccaccggtctgctggtgctgaaggacctgggcatccaggtggataggtacattgcctccgaggtgtgcgaggactccatcaccgtgggaatggtgcgtcatcagggcaagatcatgtacgtgggcgacgtgcggagcgtgacacagaagcatatccaggagtggggccctttcgacctggtgatcggcggcagcccttgcaatgacctgagcatcgtgaacccagcccggaagggcctgtacgagggaaccggcagactgttcttcgagttttacagactgctgcacgacgcccggcctaaggaaggcgacgaccggcccttcttttggctgttcgagaatgtggtggccatgggagtcagcgacaagcgggatattagccggttcctggagagcaaccccgtgatgatcgatgccaaggaagtgagcgccgcccaccgggccagatacttctggggcaatctgcctggcatgaacagacccctggccagcaccgtgaacgacaagctggagctgcaggagtgcctggagcacggccggatcgccaagttcagcaaggtgagaaccatcaccacccgaagcaacagcatcaaacaaggcaaggaccagcactttcctgtgttcatgaacgagaaggaggacatcctgtggtgtaccgagatggagagagtgttcgggttcccagtccactacacagatgtcagcaacatgtctagactggccagacagagactgctgggaagaagctggtccgtccctgtgatcagacacctgttcgcccctctgaaggagtacttcgcctgcgtgagcagcggcaacagcaacgccaacagccggggccccagcttctctagcggcctggtgccactgtccctgagagggagccacatgggccccatggagatctacaaaaccgtgagcgcctggaagcggcagcctgtgcgcgtgctgagcctgtttcggaatatcgataaagtcctgaaaagcctgggattcctggagagcggctctggctccggcggtggcaccctgaagtacgtggaggatgtgacaaacgtggtcagacgggatgtggagaagtggggccccttcgatctggtgtacggcagcacccaacccctgggcagctcttgtgaccggtgccctggctggtacatgtttcagttccaccggatcctgcagtacgccctgccgagacaggagtcccagcggccattcttttggattttcatggacaacttgctgctgaccgaggatgaccaggaaactaccactcggttcctgcagaccgaagccgtgaccctgcaggacgtgagaggccgggactaccagaacgccatgcgggtgtggtccaacatccctggactgaaaagcaagcacgcacctctgacccctaaagaagaggagtacctgcaggcccaggtgcggagcagaagcaagctggacgcccctaaggtggatctgctggtgaagaattgcctcctgcccctgagagagtacttcaagtatttcagccagaatagtctgcccctgggaggcagcggcggcggcgcccagggctacgtgaccttcgaggacgtggccgtgtacttcagccaggaggagtggaggctgctggacgaggcccagaagctgctgtacaggaacgtgatgctggagaacttcagcctgctggccagcctgggcctggccagcagcaagacccacgagatcacccagctggagagctgggaggagcccttcatgcccgcctgggaggtggtgaccagcgccacccccaggggcacctggtggggcggcccaagcagcggcgcccctcctcccagcggcggcaggcggcccaagcagcggcgcccctcctcccagcggcggcagcccagccggctccccaacctctaccgaggagggcacctctgagtccgccacccccgagagcggccctggcacctccaccgagcccagcgagggcagcgcacccggcagccctgccggcagccccacctccacagaggagggaaccagcaccgagcccagcgaaggcagcgccccaggcaccagcaccgagcctagtgagcaggagattaaacggatcaacaagatcagaagaagacttgtgaaagacagcaacaccaagaaggccggcaagacaggccccatgaaaaccctgctggttagagtgatgacacccgatctgagagagcggctggaaaacctgagaaagaagcctgaaaatatcccccagcccatcagcaatacatctagagccaacctgaataagctgctgaccgattacaccgaaatgaagaaggcgatcctgcatgtgtactgggaagagttccagaaggaccctgtgggcctgatgagccgggtggcccagcctgccagcaagaagatcgatcagaacaagctgaaacctgagatggacgagaagggcaacctgaccaccgccggctttgcctgctctcagtgtggccagcccctgttcgtgtacaagctggagcaggtgtctgagaagggcaaggcttacaccaactacttcggacggtgcaatgtggccgagcacgaaaagctgatcctgctggcccagctgaagcccgagaaggatagcgacgaagccgtgacatatagcctgggaaagtttgggcagagggccctggatttctacagcattcatgtgaccaaggagtccacccaccccgtgaagcccctggcccagatcgccggaaacagatacgcctccggacctgtgggaaaggccctgagcgacgcatgtatgggcacaatcgcctccttcctgtctaagtaccaggacatcatcatcgaacaccagaaggtggtgaagggcaaccagaagagactggagagcctgcgggagctggccggcaaggaaaacctggaataccctagcgtgaccctgccacctcagcctcacaccaaggagggcgttgatgcctacaacgaagtgatcgcccgggtgcgaatgtgggtgaacctgaacctgtggcagaagctgaagctaagcagagatgatgccaagcctctgctgagactgaagggattcccttcctttcctctggtcgagagacaggccaacgaagtggactggtgggacatggtgtgtaacgtgaagaagctgatcaacgagaaaaaggaggatggcaaggtgttttggcagaatctggctggctacaagagacaggaagccctgagaccatacctgagcagcgaggaagatcggaagaagggaaagaaattcgctcggtaccagctgggcgacctgctgctgcacctggaaaagaagcacggcgaggactggggaaaggtgtacgacgaggcctgggagcggattgacaagaaagtggaaggcctgagcaagcacatcaagctggaagaggaacggagaagcgaggacgcccagagcaaggccgccctgaccgactggctgcgggctaaggccagcttcgtgatcgagggcctgaaggaggccgacaaggacgagttctgcagatgcgagctgaagctgcagaagtggtacggggacctgcggggaaagcccttcgccatcgaagccgagaacagcatcctggacatcagcggcttcagcaagcagtacaactgtgccttcatctggcagaaggacggcgtgaagaagctgaacctgtacctgatcatcaactacttcaagggcggcaagctgcggttcaagaagatcaaacctgaagccttcgaagccaacagattctacaccgtgatcaacaaaaagagcggcgagatcgtgcccatggaggtgaacttcaacttcgacgaccccaacctgatcatcctgcctctggcctttggcaagagacagggcagagaattcatctggaacgacctgctgtccctggaaaccggcagcctgaagctggccaacggaagagtgatcgagaagacactgtacaacagaagaacccggcaggatgagcctgccctgttcgtggccctgaccttcgagcggcgggaggtcctggactcctccaatatcaaaccaatgaacctgatcggcgtggcaagaggcgaaaacatccccgccgtgatcgccctgaccgaccccgagggctgcccactgagccggtttaaggatagcctgggaaacccaacccacatcctgagaatcggcgagagctataaggagaagcagcggaccatccaggccaagaaggaggtggagcagcggagagccggcggctacagccggaagtacgccagcaaagccaagaatctggcagacgatatggtgagaaacaccgctagagatctgctgtactacgccgtgacccaggatgccatgctgatcttcgccaacctgagccggggcttcggccggcagggcaagcggaccttcatggccgagagacagtacacacggatggaggactggctgaccgccaagctggcctacgagggcctgagcaagacctacctgtccaagacactggcccagtacacctccaagacatgcagcaactgtgggtttaccatcaccagcgccgactacgacagggtgctggagaagctgaagaagacagcaacaggctggatgaccacaattaacggcaaggagctgaaggtggagggccagattacctactacaacagatacaagagacagaacgtagtcaaggacctgtccgtcgagctggatagactgagcgaagaatctgtgaacaacgacatctcctcctggacaaagggcagaagcggagaagctctgagcctcctgaagaaaagattctcccatagacccgtgcaggagaagttcgtgtgcctgaactgcggcttcgagacacacgcagccgagcaagccgccctgaacatcgccagatcctggctgttcctgcggagccaggagtacaagaaataccagacaaacaagacaaccggcaacaccgataagagagccttcgtcgagacctggcagtccttttaccggaagaagcttaaggaggtgtggaaacctgccgtgcggtctggcggatctggcggaggctccaccagccccaagaaaaagagaaaagtctaagctgccttctgcggggcttgccttctggccatgcccttcttctctcccttgcacctgtacctcttggtctttgaataaagcctgagtaggaaggctagcaaaaaaaaaaaaaaaaaaaaaaaaaaaaaaaaaaaaaaaaaaaaaaaaaaaaaaaaaaaaaaaaaaaaaaaaaaaaaaaagcccagccggctccccaacctctaccgaggagggcacctctgagtccgccacccccgagagcggccctggcacctccaccgagcccagcgagggcagcgcacccggcagccctgccggcagccccacctccacagaggagggaaccagcaccgagcccagcgaaggcagcgccccaggcaccagcaccgagcctagtgagcaggagattaaacggatcaacaagatcagaagaagacttgtgaaagacagcaacaccaagaaggccggcaagacaggccccatgaaaaccctgctggttagagtgatgacacccgatctgagagagcggctggaaaacctgagaaagaagcctgaaaatatcccccagcccatcagcaatacatctagagccaacctgaataagctgctgaccgattacaccgaaatgaagaaggcgatcctgcatgtgtactgggaagagttccagaaggaccctgtgggcctgatgagccgggtggcccagcctgccagcaagaagatcgatcagaacaagctgaaacctgagatggacgagaagggcaacctgaccaccgccggctttgcctgctctcagtgtggccagcccctgttcgtgtacaagctggagcaggtgtctgagaagggcaaggcttacaccaactacttcggacggtgcaatgtggccgagcacgaaaagctgatcctgctggcccagctgaagcccgagaaggatagcgacgaagccgtgacatatagcctgggaaagtttgggcagagggccctggatttctacagcattcatgtgaccaaggagtccacccaccccgtgaagcccctggcccagatcgccggaaacagatacgcctccggacctgtgggaaaggccctgagcgacgcatgtatgggcacaatcgcctccttcctgtctaagtaccaggacatcatcatcgaacaccagaaggtggtgaagggcaaccagaagagactggagagcctgcgggagctggccggcaaggaaaacctggaataccctagcgtgaccctgccacctcagcctcacaccaaggagggcgttgatgcctacaacgaagtgatcgcccgggtgcgaatgtgggtgaacctgaacctgtggcagaagctgaagctaagcagagatgatgccaagcctctgctgagactgaagggattcccttcctttcctctggtcgagagacaggccaacgaagtggactggtgggacatggtgtgtaacgtgaagaagctgatcaacgagaaaaaggaggatggcaaggtgttttggcagaatctggctggctacaagagacaggaagccctgagaccatacctgagcagcgaggaagatcggaagaagggaaagaaattcgctcggtaccagctgggcgacctgctgctgcacctggaaaagaagcacggcgaggactggggaaaggtgtacgacgaggcctgggagcggattgacaagaaagtggaaggcctgagcaagcacatcaagctggaagaggaacggagaagcgaggacgcccagagcaaggccgccctgaccgactggctgcgggctaaggccagcttcgtgatcgagggcctgaaggaggccgacaaggacgagttctgcagatgcgagctgaagctgcagaagtggtacggggacctgcggggaaagcccttcgccatcgaagccgagaacagcatcctggacatcagcggcttcagcaagcagtacaactgtgccttcatctggcagaaggacggcgtgaagaagctgaacctgtacctgatcatcaactacttcaagggcggcaagctgcggttcaagaagatcaaacctgaagccttcgaagccaacagattctacaccgtgatcaacaaaaagagcggcgagatcgtgcccatggaggtgaacttcaacttcgacgaccccaacctgatcatcctgcctctggcctttggcaagagacagggcagagaattcatctggaacgacctgctgtccctggaaaccggcagcctgaagctggccaacggaagagtgatcgagaagacactgtacaacagaagaacccggcaggatgagcctgccctgttcgtggccctgaccttcgagcggcgggaggtcctggactcctccaatatcaaaccaatgaacctgatcggcgtggcaagaggcgaaaacatccccgccgtgatcgccctgaccgaccccgagggctgcccactgagccggtttaaggatagcctgggaaacccaacccacatcctgagaatcggcgagagctataaggagaagcagcggaccatccaggccaagaaggaggtggagcagcggagagccggcggctacagccggaagtacgccagcaaagccaagaatctggcagacgatatggtgagaaacaccgctagagatctgctgtactacgccgtgacccaggatgccatgctgatcttcgccaacctgagccggggcttcggccggcagggcaagcggaccttcatggccgagagacagtacacacggatggaggactggctgaccgccaagctggcctacgagggcctgagcaagacctacctgtccaagacactggcccagtacacctccaagacatgcagcaactgtgggtttaccatcaccagcgccgactacgacagggtgctggagaagctgaagaagacagcaacaggctggatgaccacaattaacggcaaggagctgaaggtggagggccagattacctactacaacagatacaagagacagaacgtagtcaaggacctgtccgtcgagctggatagactgagcgaagaatctgtgaacaacgacatctcctcctggacaaagggcagaagcggagaagctctgagcctcctgaagaaaagattctcccatagacccgtgcaggagaagttcgtgtgcctgaactgcggcttcgagacacacgcagccgagcaagccgccctgaacatcgccagatcctggctgttcctgcggagccaggagtacaagaaataccagacaaacaagacaaccggcaacaccgataagagagccttcgtcgagacctggcagtccttttaccggaagaagcttaaggaggtgtggaaacctgccgtgcggtctggcggatctggcggaggctccaccagccccaagaaaaagagaaaagtctaagctgccttctgcggggcttgccttctggccatgcccttcttctctcccttgcacctgtacctcttggtctttgaataaagcctgagtaggaaggctagcaaaaaaaaaaaaaaaaaaaaaaaaaaaaaaaaaaaaaaaaaaaaaaaaaaaaaaaaaaaaaaaaaaaaaaaaaaaaaaaa

SEQ ID NO: 9793 - RNA, 8787 nt, synthetic construct
  source 1..8787: mol_type = other RNA
aggaaataagagagaaaagaagagtaagaagaaatataagagccaccatggcccctaagaagaagcgtaaagtgagccggatgaaccacgaccaggagttcgacccccctaaggtgtaccctcccgtccccgccgagaagagaaagcccatccgggtcctgagcctgttcgatggcatcgccaccggtctgctggtgctgaaggacctgggcatccaggtggataggtacattgcctccgaggtgtgcgaggactccatcaccgtgggaatggtgcgtcatcagggcaagatcatgtacgtgggcgacgtgcggagcgtgacacagaagcatatccaggagtggggccctttcgacctggtgatcggcggcagcccttgcaatgacctgagcatcgtgaacccagcccggaagggcctgtacgagggaaccggcagactgttcttcgagttttacagactgctgcacgacgcccggcctaaggaaggcgacgaccggcccttcttttggctgttcgagaatgtggtggccatgggagtcagcgacaagcgggatattagccggttcctggagagcaaccccgtgatgatcgatgccaaggaagtgagcgccgcccaccgggccagatacttctggggcaatctgcctggcatgaacagacccctggccagcaccgtgaacgacaagctggagctgcaggagtgcctggagcacggccggatcgccaagttcagcaaggtgagaaccatcaccacccgaagcaacagcatcaaacaaggcaaggaccagcactttcctgtgttcatgaacgagaaggaggacatcctgtggtgtaccgagatggagagagtgttcgggttcccagtccactacacagatgtcagcaacatgtctagactggccagacagagactgctgggaagaagctggtccgtccctgtgatcagacacctgttcgcccctctgaaggagtacttcgcctgcgtgagcagcggcaacagcaacgccaacagccggggccccagcttctctagcggcctggtgccactgtccctgagagggagccacatgggccccatggagatctacaaaaccgtgagcgcctggaagcggcagcctgtgcgcgtgctgagcctgtttcggaatatcgataaagtcctgaaaagcctgggattcctggagagcggctctggctccggcggtggcaccctgaagtacgtggaggatgtgacaaacgtggtcagacgggatgtggagaagtggggccccttcgatctggtgtacggcagcacccaacccctgggcagctcttgtgaccggtgccctggctggtacatgtttcagttccaccggatcctgcagtacgccctgccgagacaggagtcccagcggccattcttttggattttcatggacaacttgctgctgaccgaggatgaccaggaaactaccactcggttcctgcagaccgaagccgtgaccctgcaggacgtgagaggccgggactaccagaacgccatgcgggtgtggtccaacatccctggactgaaaagcaagcacgcacctctgacccctaaagaagaggagtacctgcaggcccaggtgcggagcagaagcaagctggacgcccctaaggtggatctgctggtgaagaattgcctcctgcccctgagagagtacttcaagtatttcagccagaatagtctgcccctgggaggcagcggcggcggcgagcccgtgagcttcgccgaggtggccgtgtacttcagcagggaggagtgggccctgctggaccccgcccagagggccctgtacagggacgtgatgctggagacctaccagtgcgtggccagcctggtgaccgagacccccgtgcccgcccccaagcccgtgctgatcagcctgctggagggcaggaaggagccctggatccccgacatgaggagccccgaggccatgcccggcgacctgagcggcggcccaagcagcggcgcccctcctcccagcggcggcaggcggcccaagcagcggcgcccctcctcccagcggcggcagcccagccggctccccaacctctaccgaggagggcacctctgagtccgccacccccgagagcggccctggcacctccaccgagcccagcgagggcagcgcacccggcagccctgccggcagccccacctccacagaggagggaaccagcaccgagcccagcgaaggcagcgccccaggcaccagcaccgagcctagtgagcaggagattaaacggatcaacaagatcagaagaagacttgtgaaagacagcaacaccaagaaggccggcaagacaggccccatgaaaaccctgctggttagagtgatgacacccgatctgagagagcggctggaaaacctgagaaagaagcctgaaaatatcccccagcccatcagcaatacatctagagccaacctgaataagctgctgaccgattacaccgaaatgaagaaggcgatcctgcatgtgtactgggaagagttccagaaggaccctgtgggcctgatgagccgggtggcccagcctgccagcaagaagatcgatcagaacaagctgaaacctgagatggacgagaagggcaacctgaccaccgccggctttgcctgctctcagtgtggccagcccctgttcgtgtacaagctggagcaggtgtctgagaagggcaaggcttacaccaactacttcggacggtgcaatgtggccgagcacgaaaagctgatcctgctggcccagctgaagcccgagaaggatagcgacgaagccgtgacatatagcctgggaaagtttgggcagagggccctggatttctacagcattcatgtgaccaaggagtccacccaccccgtgaagcccctggcccagatcgccggaaacagatacgcctccggacctgtgggaaaggccctgagcgacgcatgtatgggcacaatcgcctccttcctgtctaagtaccaggacatcatcatcgaacaccagaaggtggtgaagggcaaccagaagagactggagagcctgcgggagctggccggcaaggaaaacctggaataccctagcgtgaccctgccacctcagcctcacaccaaggagggcgttgatgcctacaacgaagtgatcgcccgggtgcgaatgtgggtgaacctgaacctgtggcagaagctgaagctaagcagagatgatgccaagcctctgctgagactgaagggattcccttcctttcctctggtcgagagacaggccaacgaagtggactggtgggacatggtgtgtaacgtgaagaagctgatcaacgagaaaaaggaggatggcaaggtgttttggcagaatctggctggctacaagagacaggaagccctgagaccatacctgagcagcgaggaagatcggaagaagggaaagaaattcgctcggtaccagctgggcgacctgctgctgcacctggaaaagaagcacggcgaggactggggaaaggtgtacgacgaggcctgggagcggattgacaagaaagtggaaggcctgagcaagcacatcaagctggaagaggaacggagaagcgaggacgcccagagcaaggccgccctgaccgactggctgcgggctaaggccagcttcgtgatcgagggcctgaaggaggccgacaaggacgagttctgcagatgcgagctgaagctgcagaagtggtacggggacctgcggggaaagcccttcgccatcgaagccgagaacagcatcctggacatcagcggcttcagcaagcagtacaactgtgccttcatctggcagaaggacggcgtgaagaagctgaacctgtacctgatcatcaactacttcaagggcggcaagctgcggttcaagaagatcaaacctgaagccttcgaagccaacagattctacaccgtgatcaacaaaaagagcggcgagatcgtgcccatggaggtgaacttcaacttcgacgaccccaacctgatcatcctgcctctggcctttggcaagagacagggcagagaattcatctggaacgacctgctgtccctggaaaccggcagcctgaagctggccaacggaagagtgatcgagaagacactgtacaacagaagaacccggcaggatgagcctgccctgttcgtggccctgaccttcgagcggcgggaggtcctggactcctccaatatcaaaccaatgaacctgatcggcgtggcaagaggcgaaaacatccccgccgtgatcgccctgaccgaccccgagggctgcccactgagccggtttaaggatagcctgggaaacccaacccacatcctgagaatcggcgagagctataaggagaagcagcggaccatccaggccaagaaggaggtggagcagcggagagccggcggctacagccggaagtacgccagcaaagccaagaatctggcagacgatatggtgagaaacaccgctagagatctgctgtactacgccgtgacccaggatgccatgctgatcttcgccaacctgagccggggcttcggccggcagggcaagcggaccttcatggccgagagacagtacacacggatggaggactggctgaccgccaagctggcctacgagggcctgagcaagacctacctgtccaagacactggcccagtacacctccaagacatgcagcaactgtgggtttaccatcaccagcgccgactacgacagggtgctggagaagctgaagaagacagcaacaggctggatgaccacaattaacggcaaggagctgaaggtggagggccagattacctactacaacagatacaagagacagaacgtagtcaaggacctgtccgtcgagctggatagactgagcgaagaatctgtgaacaacgacatctcctcctggacaaagggcagaagcggagaagctctgagcctcctgaagaaaagattctcccatagacccgtgcaggagaagttcgtgtgcctgaactgcggcttcgagacacacgcagccgagcaagccgccctgaacatcgccagatcctggctgttcctgcggagccaggagtacaagaaataccagacaaacaagacaaccggcaacaccgataagagagccttcgtcgagacctggcagtccttttaccggaagaagcttaaggaggtgtggaaacctgccgtgcggtctggcggatctggcggaggctccaccagccccaagaaaaagagaaaagtctaagctgccttctgcggggcttgccttctggccatgcccttcttctctcccttgcacctgtacctcttggtctttgaataaagcctgagtaggaaggctagcaaaaaaaaaaaaaaaaaaaaaaaaaaaaaaaaaaaaaaaaaaaaaaaaaaaaaaaaaaaaaaaaaaaaaaaaaaaaaaaagcccagccggctccccaacctctaccgaggagggcacctctgagtccgccacccccgagagcggccctggcacctccaccgagcccagcgagggcagcgcacccggcagccctgccggcagccccacctccacagaggagggaaccagcaccgagcccagcgaaggcagcgccccaggcaccagcaccgagcctagtgagcaggagattaaacggatcaacaagatcagaagaagacttgtgaaagacagcaacaccaagaaggccggcaagacaggccccatgaaaaccctgctggttagagtgatgacacccgatctgagagagcggctggaaaacctgagaaagaagcctgaaaatatcccccagcccatcagcaatacatctagagccaacctgaataagctgctgaccgattacaccgaaatgaagaaggcgatcctgcatgtgtactgggaagagttccagaaggaccctgtgggcctgatgagccgggtggcccagcctgccagcaagaagatcgatcagaacaagctgaaacctgagatggacgagaagggcaacctgaccaccgccggctttgcctgctctcagtgtggccagcccctgttcgtgtacaagctggagcaggtgtctgagaagggcaaggcttacaccaactacttcggacggtgcaatgtggccgagcacgaaaagctgatcctgctggcccagctgaagcccgagaaggatagcgacgaagccgtgacatatagcctgggaaagtttgggcagagggccctggatttctacagcattcatgtgaccaaggagtccacccaccccgtgaagcccctggcccagatcgccggaaacagatacgcctccggacctgtgggaaaggccctgagcgacgcatgtatgggcacaatcgcctccttcctgtctaagtaccaggacatcatcatcgaacaccagaaggtggtgaagggcaaccagaagagactggagagcctgcgggagctggccggcaaggaaaacctggaataccctagcgtgaccctgccacctcagcctcacaccaaggagggcgttgatgcctacaacgaagtgatcgcccgggtgcgaatgtgggtgaacctgaacctgtggcagaagctgaagctaagcagagatgatgccaagcctctgctgagactgaagggattcccttcctttcctctggtcgagagacaggccaacgaagtggactggtgggacatggtgtgtaacgtgaagaagctgatcaacgagaaaaaggaggatggcaaggtgttttggcagaatctggctggctacaagagacaggaagccctgagaccatacctgagcagcgaggaagatcggaagaagggaaagaaattcgctcggtaccagctgggcgacctgctgctgcacctggaaaagaagcacggcgaggactggggaaaggtgtacgacgaggcctgggagcggattgacaagaaagtggaaggcctgagcaagcacatcaagctggaagaggaacggagaagcgaggacgcccagagcaaggccgccctgaccgactggctgcgggctaaggccagcttcgtgatcgagggcctgaaggaggccgacaaggacgagttctgcagatgcgagctgaagctgcagaagtggtacggggacctgcggggaaagcccttcgccatcgaagccgagaacagcatcctggacatcagcggcttcagcaagcagtacaactgtgccttcatctggcagaaggacggcgtgaagaagctgaacctgtacctgatcatcaactacttcaagggcggcaagctgcggttcaagaagatcaaacctgaagccttcgaagccaacagattctacaccgtgatcaacaaaaagagcggcgagatcgtgcccatggaggtgaacttcaacttcgacgaccccaacctgatcatcctgcctctggcctttggcaagagacagggcagagaattcatctggaacgacctgctgtccctggaaaccggcagcctgaagctggccaacggaagagtgatcgagaagacactgtacaacagaagaacccggcaggatgagcctgccctgttcgtggccctgaccttcgagcggcgggaggtcctggactcctccaatatcaaaccaatgaacctgatcggcgtggcaagaggcgaaaacatccccgccgtgatcgccctgaccgaccccgagggctgcccactgagccggtttaaggatagcctgggaaacccaacccacatcctgagaatcggcgagagctataaggagaagcagcggaccatccaggccaagaaggaggtggagcagcggagagccggcggctacagccggaagtacgccagcaaagccaagaatctggcagacgatatggtgagaaacaccgctagagatctgctgtactacgccgtgacccaggatgccatgctgatcttcgccaacctgagccggggcttcggccggcagggcaagcggaccttcatggccgagagacagtacacacggatggaggactggctgaccgccaagctggcctacgagggcctgagcaagacctacctgtccaagacactggcccagtacacctccaagacatgcagcaactgtgggtttaccatcaccagcgccgactacgacagggtgctggagaagctgaagaagacagcaacaggctggatgaccacaattaacggcaaggagctgaaggtggagggccagattacctactacaacagatacaagagacagaacgtagtcaaggacctgtccgtcgagctggatagactgagcgaagaatctgtgaacaacgacatctcctcctggacaaagggcagaagcggagaagctctgagcctcctgaagaaaagattctcccatagacccgtgcaggagaagttcgtgtgcctgaactgcggcttcgagacacacgcagccgagcaagccgccctgaacatcgccagatcctggctgttcctgcggagccaggagtacaagaaataccagacaaacaagacaaccggcaacaccgataagagagccttcgtcgagacctggcagtccttttaccggaagaagcttaaggaggtgtggaaacctgccgtgcggtctggcggatctggcggaggctccaccagccccaagaaaaagagaaaagtctaagctgccttctgcggggcttgccttctggccatgcccttcttctctcccttgcacctgtacctcttggtctttgaataaagcctgagtaggaaggctagcaaaaaaaaaaaaaaaaaaaaaaaaaaaaaaaaaaaaaaaaaaaaaaaaaaaaaaaaaaaaaaaaaaaaaaaaaaaaaaaa

SEQ ID NO: 9794 - RNA, 8787 nt, synthetic construct
  source 1..8787: mol_type = other RNA
aggaaataagagagaaaagaagagtaagaagaaatataagagccaccatggcccctaagaagaagcgtaaagtgagccggatgaaccacgaccaggagttcgacccccctaaggtgtaccctcccgtccccgccgagaagagaaagcccatccgggtcctgagcctgttcgatggcatcgccaccggtctgctggtgctgaaggacctgggcatccaggtggataggtacattgcctccgaggtgtgcgaggactccatcaccgtgggaatggtgcgtcatcagggcaagatcatgtacgtgggcgacgtgcggagcgtgacacagaagcatatccaggagtggggccctttcgacctggtgatcggcggcagcccttgcaatgacctgagcatcgtgaacccagcccggaagggcctgtacgagggaaccggcagactgttcttcgagttttacagactgctgcacgacgcccggcctaaggaaggcgacgaccggcccttcttttggctgttcgagaatgtggtggccatgggagtcagcgacaagcgggatattagccggttcctggagagcaaccccgtgatgatcgatgccaaggaagtgagcgccgcccaccgggccagatacttctggggcaatctgcctggcatgaacagacccctggccagcaccgtgaacgacaagctggagctgcaggagtgcctggagcacggccggatcgccaagttcagcaaggtgagaaccatcaccacccgaagcaacagcatcaaacaaggcaaggaccagcactttcctgtgttcatgaacgagaaggaggacatcctgtggtgtaccgagatggagagagtgttcgggttcccagtccactacacagatgtcagcaacatgtctagactggccagacagagactgctgggaagaagctggtccgtccctgtgatcagacacctgttcgcccctctgaaggagtacttcgcctgcgtgagcagcggcaacagcaacgccaacagccggggccccagcttctctagcggcctggtgccactgtccctgagagggagccacatgggccccatggagatctacaaaaccgtgagcgcctggaagcggcagcctgtgcgcgtgctgagcctgtttcggaatatcgataaagtcctgaaaagcctgggattcctggagagcggctctggctccggcggtggcaccctgaagtacgtggaggatgtgacaaacgtggtcagacgggatgtggagaagtggggccccttcgatctggtgtacggcagcacccaacccctgggcagctcttgtgaccggtgccctggctggtacatgtttcagttccaccggatcctgcagtacgccctgccgagacaggagtcccagcggccattcttttggattttcatggacaacttgctgctgaccgaggatgaccaggaaactaccactcggttcctgcagaccgaagccgtgaccctgcaggacgtgagaggccgggactaccagaacgccatgcgggtgtggtccaacatccctggactgaaaagcaagcacgcacctctgacccctaaagaagaggagtacctgcaggcccaggtgcggagcagaagcaagctggacgcccctaaggtggatctgctggtgaagaattgcctcctgcccctgagagagtacttcaagtatttcagccagaatagtctgcccctgggaggcagcggcggcggcgtggccaggatgcagaccagggtgaccttcgacgacatcgccgtgagcttcagccaggaggagtgggagtacctggacgagggccagaaggagctgtacagggaggtgatggaggagaacctggagctgctgaccagcctgggcagcctggtggcccagcccgagcagatggaggagctgtacatgatggaccaccacgacatgggcctgaggggcaccctgctgagcctgtgcaccgaggacggcggcccaagcagcggcgcccctcctcccagcggcggcaggcggcccaagcagcggcgcccctcctcccagcggcggcagcccagccggctccccaacctctaccgaggagggcacctctgagtccgccacccccgagagcggccctggcacctccaccgagcccagcgagggcagcgcacccggcagccctgccggcagccccacctccacagaggagggaaccagcaccgagcccagcgaaggcagcgccccaggcaccagcaccgagcctagtgagcaggagattaaacggatcaacaagatcagaagaagacttgtgaaagacagcaacaccaagaaggccggcaagacaggccccatgaaaaccctgctggttagagtgatgacacccgatctgagagagcggctggaaaacctgagaaagaagcctgaaaatatcccccagcccatcagcaatacatctagagccaacctgaataagctgctgaccgattacaccgaaatgaagaaggcgatcctgcatgtgtactgggaagagttccagaaggaccctgtgggcctgatgagccgggtggcccagcctgccagcaagaagatcgatcagaacaagctgaaacctgagatggacgagaagggcaacctgaccaccgccggctttgcctgctctcagtgtggccagcccctgttcgtgtacaagctggagcaggtgtctgagaagggcaaggcttacaccaactacttcggacggtgcaatgtggccgagcacgaaaagctgatcctgctggcccagctgaagcccgagaaggatagcgacgaagccgtgacatatagcctgggaaagtttgggcagagggccctggatttctacagcattcatgtgaccaaggagtccacccaccccgtgaagcccctggcccagatcgccggaaacagatacgcctccggacctgtgggaaaggccctgagcgacgcatgtatgggcacaatcgcctccttcctgtctaagtaccaggacatcatcatcgaacaccagaaggtggtgaagggcaaccagaagagactggagagcctgcgggagctggccggcaaggaaaacctggaataccctagcgtgaccctgccacctcagcctcacaccaaggagggcgttgatgcctacaacgaagtgatcgcccgggtgcgaatgtgggtgaacctgaacctgtggcagaagctgaagctaagcagagatgatgccaagcctctgctgagactgaagggattcccttcctttcctctggtcgagagacaggccaacgaagtggactggtgggacatggtgtgtaacgtgaagaagctgatcaacgagaaaaaggaggatggcaaggtgttttggcagaatctggctggctacaagagacaggaagccctgagaccatacctgagcagcgaggaagatcggaagaagggaaagaaattcgctcggtaccagctgggcgacctgctgctgcacctggaaaagaagcacggcgaggactggggaaaggtgtacgacgaggcctgggagcggattgacaagaaagtggaaggcctgagcaagcacatcaagctggaagaggaacggagaagcgaggacgcccagagcaaggccgccctgaccgactggctgcgggctaaggccagcttcgtgatcgagggcctgaaggaggccgacaaggacgagttctgcagatgcgagctgaagctgcagaagtggtacggggacctgcggggaaagcccttcgccatcgaagccgagaacagcatcctggacatcagcggcttcagcaagcagtacaactgtgccttcatctggcagaaggacggcgtgaagaagctgaacctgtacctgatcatcaactacttcaagggcggcaagctgcggttcaagaagatcaaacctgaagccttcgaagccaacagattctacaccgtgatcaacaaaaagagcggcgagatcgtgcccatggaggtgaacttcaacttcgacgaccccaacctgatcatcctgcctctggcctttggcaagagacagggcagagaattcatctggaacgacctgctgtccctggaaaccggcagcctgaagctggccaacggaagagtgatcgagaagacactgtacaacagaagaacccggcaggatgagcctgccctgttcgtggccctgaccttcgagcggcgggaggtcctggactcctccaatatcaaaccaatgaacctgatcggcgtggcaagaggcgaaaacatccccgccgtgatcgccctgaccgaccccgagggctgcccactgagccggtttaaggatagcctgggaaacccaacccacatcctgagaatcggcgagagctataaggagaagcagcggaccatccaggccaagaaggaggtggagcagcggagagccggcggctacagccggaagtacgccagcaaagccaagaatctggcagacgatatggtgagaaacaccgctagagatctgctgtactacgccgtgacccaggatgccatgctgatcttcgccaacctgagccggggcttcggccggcagggcaagcggaccttcatggccgagagacagtacacacggatggaggactggctgaccgccaagctggcctacgagggcctgagcaagacctacctgtccaagacactggcccagtacacctccaagacatgcagcaactgtgggtttaccatcaccagcgccgactacgacagggtgctggagaagctgaagaagacagcaacaggctggatgaccacaattaacggcaaggagctgaaggtggagggccagattacctactacaacagatacaagagacagaacgtagtcaaggacctgtccgtcgagctggatagactgagcgaagaatctgtgaacaacgacatctcctcctggacaaagggcagaagcggagaagctctgagcctcctgaagaaaagattctcccatagacccgtgcaggagaagttcgtgtgcctgaactgcggcttcgagacacacgcagccgagcaagccgccctgaacatcgccagatcctggctgttcctgcggagccaggagtacaagaaataccagacaaacaagacaaccggcaacaccgataagagagccttcgtcgagacctggcagtccttttaccggaagaagcttaaggaggtgtggaaacctgccgtgcggtctggcggatctggcggaggctccaccagccccaagaaaaagagaaaagtctaagctgccttctgcggggcttgccttctggccatgcccttcttctctcccttgcacctgtacctcttggtctttgaataaagcctgagtaggaaggctagcaaaaaaaaaaaaaaaaaaaaaaaaaaaaaaaaaaaaaaaaaaaaaaaaaaaaaaaaaaaaaaaaaaaaaaaaaaaaaaaagcccagccggctccccaacctctaccgaggagggcacctctgagtccgccacccccgagagcggccctggcacctccaccgagcccagcgagggcagcgcacccggcagccctgccggcagccccacctccacagaggagggaaccagcaccgagcccagcgaaggcagcgccccaggcaccagcaccgagcctagtgagcaggagattaaacggatcaacaagatcagaagaagacttgtgaaagacagcaacaccaagaaggccggcaagacaggccccatgaaaaccctgctggttagagtgatgacacccgatctgagagagcggctggaaaacctgagaaagaagcctgaaaatatcccccagcccatcagcaatacatctagagccaacctgaataagctgctgaccgattacaccgaaatgaagaaggcgatcctgcatgtgtactgggaagagttccagaaggaccctgtgggcctgatgagccgggtggcccagcctgccagcaagaagatcgatcagaacaagctgaaacctgagatggacgagaagggcaacctgaccaccgccggctttgcctgctctcagtgtggccagcccctgttcgtgtacaagctggagcaggtgtctgagaagggcaaggcttacaccaactacttcggacggtgcaatgtggccgagcacgaaaagctgatcctgctggcccagctgaagcccgagaaggatagcgacgaagccgtgacatatagcctgggaaagtttgggcagagggccctggatttctacagcattcatgtgaccaaggagtccacccaccccgtgaagcccctggcccagatcgccggaaacagatacgcctccggacctgtgggaaaggccctgagcgacgcatgtatgggcacaatcgcctccttcctgtctaagtaccaggacatcatcatcgaacaccagaaggtggtgaagggcaaccagaagagactggagagcctgcgggagctggccggcaaggaaaacctggaataccctagcgtgaccctgccacctcagcctcacaccaaggagggcgttgatgcctacaacgaagtgatcgcccgggtgcgaatgtgggtgaacctgaacctgtggcagaagctgaagctaagcagagatgatgccaagcctctgctgagactgaagggattcccttcctttcctctggtcgagagacaggccaacgaagtggactggtgggacatggtgtgtaacgtgaagaagctgatcaacgagaaaaaggaggatggcaaggtgttttggcagaatctggctggctacaagagacaggaagccctgagaccatacctgagcagcgaggaagatcggaagaagggaaagaaattcgctcggtaccagctgggcgacctgctgctgcacctggaaaagaagcacggcgaggactggggaaaggtgtacgacgaggcctgggagcggattgacaagaaagtggaaggcctgagcaagcacatcaagctggaagaggaacggagaagcgaggacgcccagagcaaggccgccctgaccgactggctgcgggctaaggccagcttcgtgatcgagggcctgaaggaggccgacaaggacgagttctgcagatgcgagctgaagctgcagaagtggtacggggacctgcggggaaagcccttcgccatcgaagccgagaacagcatcctggacatcagcggcttcagcaagcagtacaactgtgccttcatctggcagaaggacggcgtgaagaagctgaacctgtacctgatcatcaactacttcaagggcggcaagctgcggttcaagaagatcaaacctgaagccttcgaagccaacagattctacaccgtgatcaacaaaaagagcggcgagatcgtgcccatggaggtgaacttcaacttcgacgaccccaacctgatcatcctgcctctggcctttggcaagagacagggcagagaattcatctggaacgacctgctgtccctggaaaccggcagcctgaagctggccaacggaagagtgatcgagaagacactgtacaacagaagaacccggcaggatgagcctgccctgttcgtggccctgaccttcgagcggcgggaggtcctggactcctccaatatcaaaccaatgaacctgatcggcgtggcaagaggcgaaaacatccccgccgtgatcgccctgaccgaccccgagggctgcccactgagccggtttaaggatagcctgggaaacccaacccacatcctgagaatcggcgagagctataaggagaagcagcggaccatccaggccaagaaggaggtggagcagcggagagccggcggctacagccggaagtacgccagcaaagccaagaatctggcagacgatatggtgagaaacaccgctagagatctgctgtactacgccgtgacccaggatgccatgctgatcttcgccaacctgagccggggcttcggccggcagggcaagcggaccttcatggccgagagacagtacacacggatggaggactggctgaccgccaagctggcctacgagggcctgagcaagacctacctgtccaagacactggcccagtacacctccaagacatgcagcaactgtgggtttaccatcaccagcgccgactacgacagggtgctggagaagctgaagaagacagcaacaggctggatgaccacaattaacggcaaggagctgaaggtggagggccagattacctactacaacagatacaagagacagaacgtagtcaaggacctgtccgtcgagctggatagactgagcgaagaatctgtgaacaacgacatctcctcctggacaaagggcagaagcggagaagctctgagcctcctgaagaaaagattctcccatagacccgtgcaggagaagttcgtgtgcctgaactgcggcttcgagacacacgcagccgagcaagccgccctgaacatcgccagatcctggctgttcctgcggagccaggagtacaagaaataccagacaaacaagacaaccggcaacaccgataagagagccttcgtcgagacctggcagtccttttaccggaagaagcttaaggaggtgtggaaacctgccgtgcggtctggcggatctggcggaggctccaccagccccaagaaaaagagaaaagtctaagctgccttctgcggggcttgccttctggccatgcccttcttctctcccttgcacctgtacctcttggtctttgaataaagcctgagtaggaaggctagcaaaaaaaaaaaaaaaaaaaaaaaaaaaaaaaaaaaaaaaaaaaaaaaaaaaaaaaaaaaaaaaaaaaaaaaaaaaaaaaa

SEQ ID NO: 9795 - RNA, 8787 nt, synthetic construct
  source 1..8787: mol_type = other RNA
aggaaataagagagaaaagaagagtaagaagaaatataagagccaccatggcccctaagaagaagcgtaaagtgagccggatgaaccacgaccaggagttcgacccccctaaggtgtaccctcccgtccccgccgagaagagaaagcccatccgggtcctgagcctgttcgatggcatcgccaccggtctgctggtgctgaaggacctgggcatccaggtggataggtacattgcctccgaggtgtgcgaggactccatcaccgtgggaatggtgcgtcatcagggcaagatcatgtacgtgggcgacgtgcggagcgtgacacagaagcatatccaggagtggggccctttcgacctggtgatcggcggcagcccttgcaatgacctgagcatcgtgaacccagcccggaagggcctgtacgagggaaccggcagactgttcttcgagttttacagactgctgcacgacgcccggcctaaggaaggcgacgaccggcccttcttttggctgttcgagaatgtggtggccatgggagtcagcgacaagcgggatattagccggttcctggagagcaaccccgtgatgatcgatgccaaggaagtgagcgccgcccaccgggccagatacttctggggcaatctgcctggcatgaacagacccctggccagcaccgtgaacgacaagctggagctgcaggagtgcctggagcacggccggatcgccaagttcagcaaggtgagaaccatcaccacccgaagcaacagcatcaaacaaggcaaggaccagcactttcctgtgttcatgaacgagaaggaggacatcctgtggtgtaccgagatggagagagtgttcgggttcccagtccactacacagatgtcagcaacatgtctagactggccagacagagactgctgggaagaagctggtccgtccctgtgatcagacacctgttcgcccctctgaaggagtacttcgcctgcgtgagcagcggcaacagcaacgccaacagccggggccccagcttctctagcggcctggtgccactgtccctgagagggagccacatgggccccatggagatctacaaaaccgtgagcgcctggaagcggcagcctgtgcgcgtgctgagcctgtttcggaatatcgataaagtcctgaaaagcctgggattcctggagagcggctctggctccggcggtggcaccctgaagtacgtggaggatgtgacaaacgtggtcagacgggatgtggagaagtggggccccttcgatctggtgtacggcagcacccaacccctgggcagctcttgtgaccggtgccctggctggtacatgtttcagttccaccggatcctgcagtacgccctgccgagacaggagtcccagcggccattcttttggattttcatggacaacttgctgctgaccgaggatgaccaggaaactaccactcggttcctgcagaccgaagccgtgaccctgcaggacgtgagaggccgggactaccagaacgccatgcgggtgtggtccaacatccctggactgaaaagcaagcacgcacctctgacccctaaagaagaggagtacctgcaggcccaggtgcggagcagaagcaagctggacgcccctaaggtggatctgctggtgaagaattgcctcctgcccctgagagagtacttcaagtatttcagccagaatagtctgcccctgggaggcagcggcggcggcttccaggaggccgtgaccttcaaggacgtggccgtggccttcaccgaggaggagctgggcctgctggacagcgcccagaggaagctgtacagggacgtgatgctggagaacttcaggaacctggtgagcgtgggcaggcagagcttcaagcccgacatgatcagccagctggagagggaggagaagctgtggatgaaggagttccagacccagaggggcaggcacagcggcgacaggaaccagggcggcccaagcagcggcgcccctcctcccagcggcggcaggcggcccaagcagcggcgcccctcctcccagcggcggcagcccagccggctccccaacctctaccgaggagggcacctctgagtccgccacccccgagagcggccctggcacctccaccgagcccagcgagggcagcgcacccggcagccctgccggcagccccacctccacagaggagggaaccagcaccgagcccagcgaaggcagcgccccaggcaccagcaccgagcctagtgagcaggagattaaacggatcaacaagatcagaagaagacttgtgaaagacagcaacaccaagaaggccggcaagacaggccccatgaaaaccctgctggttagagtgatgacacccgatctgagagagcggctggaaaacctgagaaagaagcctgaaaatatcccccagcccatcagcaatacatctagagccaacctgaataagctgctgaccgattacaccgaaatgaagaaggcgatcctgcatgtgtactgggaagagttccagaaggaccctgtgggcctgatgagccgggtggcccagcctgccagcaagaagatcgatcagaacaagctgaaacctgagatggacgagaagggcaacctgaccaccgccggctttgcctgctctcagtgtggccagcccctgttcgtgtacaagctggagcaggtgtctgagaagggcaaggcttacaccaactacttcggacggtgcaatgtggccgagcacgaaaagctgatcctgctggcccagctgaagcccgagaaggatagcgacgaagccgtgacatatagcctgggaaagtttgggcagagggccctggatttctacagcattcatgtgaccaaggagtccacccaccccgtgaagcccctggcccagatcgccggaaacagatacgcctccggacctgtgggaaaggccctgagcgacgcatgtatgggcacaatcgcctccttcctgtctaagtaccaggacatcatcatcgaacaccagaaggtggtgaagggcaaccagaagagactggagagcctgcgggagctggccggcaaggaaaacctggaataccctagcgtgaccctgccacctcagcctcacaccaaggagggcgttgatgcctacaacgaagtgatcgcccgggtgcgaatgtgggtgaacctgaacctgtggcagaagctgaagctaagcagagatgatgccaagcctctgctgagactgaagggattcccttcctttcctctggtcgagagacaggccaacgaagtggactggtgggacatggtgtgtaacgtgaagaagctgatcaacgagaaaaaggaggatggcaaggtgttttggcagaatctggctggctacaagagacaggaagccctgagaccatacctgagcagcgaggaagatcggaagaagggaaagaaattcgctcggtaccagctgggcgacctgctgctgcacctggaaaagaagcacggcgaggactggggaaaggtgtacgacgaggcctgggagcggattgacaagaaagtggaaggcctgagcaagcacatcaagctggaagaggaacggagaagcgaggacgcccagagcaaggccgccctgaccgactggctgcgggctaaggccagcttcgtgatcgagggcctgaaggaggccgacaaggacgagttctgcagatgcgagctgaagctgcagaagtggtacggggacctgcggggaaagcccttcgccatcgaagccgagaacagcatcctggacatcagcggcttcagcaagcagtacaactgtgccttcatctggcagaaggacggcgtgaagaagctgaacctgtacctgatcatcaactacttcaagggcggcaagctgcggttcaagaagatcaaacctgaagccttcgaagccaacagattctacaccgtgatcaacaaaaagagcggcgagatcgtgcccatggaggtgaacttcaacttcgacgaccccaacctgatcatcctgcctctggcctttggcaagagacagggcagagaattcatctggaacgacctgctgtccctggaaaccggcagcctgaagctggccaacggaagagtgatcgagaagacactgtacaacagaagaacccggcaggatgagcctgccctgttcgtggccctgaccttcgagcggcgggaggtcctggactcctccaatatcaaaccaatgaacctgatcggcgtggcaagaggcgaaaacatccccgccgtgatcgccctgaccgaccccgagggctgcccactgagccggtttaaggatagcctgggaaacccaacccacatcctgagaatcggcgagagctataaggagaagcagcggaccatccaggccaagaaggaggtggagcagcggagagccggcggctacagccggaagtacgccagcaaagccaagaatctggcagacgatatggtgagaaacaccgctagagatctgctgtactacgccgtgacccaggatgccatgctgatcttcgccaacctgagccggggcttcggccggcagggcaagcggaccttcatggccgagagacagtacacacggatggaggactggctgaccgccaagctggcctacgagggcctgagcaagacctacctgtccaagacactggcccagtacacctccaagacatgcagcaactgtgggtttaccatcaccagcgccgactacgacagggtgctggagaagctgaagaagacagcaacaggctggatgaccacaattaacggcaaggagctgaaggtggagggccagattacctactacaacagatacaagagacagaacgtagtcaaggacctgtccgtcgagctggatagactgagcgaagaatctgtgaacaacgacatctcctcctggacaaagggcagaagcggagaagctctgagcctcctgaagaaaagattctcccatagacccgtgcaggagaagttcgtgtgcctgaactgcggcttcgagacacacgcagccgagcaagccgccctgaacatcgccagatcctggctgttcctgcggagccaggagtacaagaaataccagacaaacaagacaaccggcaacaccgataagagagccttcgtcgagacctggcagtccttttaccggaagaagcttaaggaggtgtggaaacctgccgtgcggtctggcggatctggcggaggctccaccagccccaagaaaaagagaaaagtctaagctgccttctgcggggcttgccttctggccatgcccttcttctctcccttgcacctgtacctcttggtctttgaataaagcctgagtaggaaggctagcaaaaaaaaaaaaaaaaaaaaaaaaaaaaaaaaaaaaaaaaaaaaaaaaaaaaaaaaaaaaaaaaaaaaaaaaaaaaaaaagcccagccggctccccaacctctaccgaggagggcacctctgagtccgccacccccgagagcggccctggcacctccaccgagcccagcgagggcagcgcacccggcagccctgccggcagccccacctccacagaggagggaaccagcaccgagcccagcgaaggcagcgccccaggcaccagcaccgagcctagtgagcaggagattaaacggatcaacaagatcagaagaagacttgtgaaagacagcaacaccaagaaggccggcaagacaggccccatgaaaaccctgctggttagagtgatgacacccgatctgagagagcggctggaaaacctgagaaagaagcctgaaaatatcccccagcccatcagcaatacatctagagccaacctgaataagctgctgaccgattacaccgaaatgaagaaggcgatcctgcatgtgtactgggaagagttccagaaggaccctgtgggcctgatgagccgggtggcccagcctgccagcaagaagatcgatcagaacaagctgaaacctgagatggacgagaagggcaacctgaccaccgccggctttgcctgctctcagtgtggccagcccctgttcgtgtacaagctggagcaggtgtctgagaagggcaaggcttacaccaactacttcggacggtgcaatgtggccgagcacgaaaagctgatcctgctggcccagctgaagcccgagaaggatagcgacgaagccgtgacatatagcctgggaaagtttgggcagagggccctggatttctacagcattcatgtgaccaaggagtccacccaccccgtgaagcccctggcccagatcgccggaaacagatacgcctccggacctgtgggaaaggccctgagcgacgcatgtatgggcacaatcgcctccttcctgtctaagtaccaggacatcatcatcgaacaccagaaggtggtgaagggcaaccagaagagactggagagcctgcgggagctggccggcaaggaaaacctggaataccctagcgtgaccctgccacctcagcctcacaccaaggagggcgttgatgcctacaacgaagtgatcgcccgggtgcgaatgtgggtgaacctgaacctgtggcagaagctgaagctaagcagagatgatgccaagcctctgctgagactgaagggattcccttcctttcctctggtcgagagacaggccaacgaagtggactggtgggacatggtgtgtaacgtgaagaagctgatcaacgagaaaaaggaggatggcaaggtgttttggcagaatctggctggctacaagagacaggaagccctgagaccatacctgagcagcgaggaagatcggaagaagggaaagaaattcgctcggtaccagctgggcgacctgctgctgcacctggaaaagaagcacggcgaggactggggaaaggtgtacgacgaggcctgggagcggattgacaagaaagtggaaggcctgagcaagcacatcaagctggaagaggaacggagaagcgaggacgcccagagcaaggccgccctgaccgactggctgcgggctaaggccagcttcgtgatcgagggcctgaaggaggccgacaaggacgagttctgcagatgcgagctgaagctgcagaagtggtacggggacctgcggggaaagcccttcgccatcgaagccgagaacagcatcctggacatcagcggcttcagcaagcagtacaactgtgccttcatctggcagaaggacggcgtgaagaagctgaacctgtacctgatcatcaactacttcaagggcggcaagctgcggttcaagaagatcaaacctgaagccttcgaagccaacagattctacaccgtgatcaacaaaaagagcggcgagatcgtgcccatggaggtgaacttcaacttcgacgaccccaacctgatcatcctgcctctggcctttggcaagagacagggcagagaattcatctggaacgacctgctgtccctggaaaccggcagcctgaagctggccaacggaagagtgatcgagaagacactgtacaacagaagaacccggcaggatgagcctgccctgttcgtggccctgaccttcgagcggcgggaggtcctggactcctccaatatcaaaccaatgaacctgatcggcgtggcaagaggcgaaaacatccccgccgtgatcgccctgaccgaccccgagggctgcccactgagccggtttaaggatagcctgggaaacccaacccacatcctgagaatcggcgagagctataaggagaagcagcggaccatccaggccaagaaggaggtggagcagcggagagccggcggctacagccggaagtacgccagcaaagccaagaatctggcagacgatatggtgagaaacaccgctagagatctgctgtactacgccgtgacccaggatgccatgctgatcttcgccaacctgagccggggcttcggccggcagggcaagcggaccttcatggccgagagacagtacacacggatggaggactggctgaccgccaagctggcctacgagggcctgagcaagacctacctgtccaagacactggcccagtacacctccaagacatgcagcaactgtgggtttaccatcaccagcgccgactacgacagggtgctggagaagctgaagaagacagcaacaggctggatgaccacaattaacggcaaggagctgaaggtggagggccagattacctactacaacagatacaagagacagaacgtagtcaaggacctgtccgtcgagctggatagactgagcgaagaatctgtgaacaacgacatctcctcctggacaaagggcagaagcggagaagctctgagcctcctgaagaaaagattctcccatagacccgtgcaggagaagttcgtgtgcctgaactgcggcttcgagacacacgcagccgagcaagccgccctgaacatcgccagatcctggctgttcctgcggagccaggagtacaagaaataccagacaaacaagacaaccggcaacaccgataagagagccttcgtcgagacctggcagtccttttaccggaagaagcttaaggaggtgtggaaacctgccgtgcggtctggcggatctggcggaggctccaccagccccaagaaaaagagaaaagtctaagctgccttctgcggggcttgccttctggccatgcccttcttctctcccttgcacctgtacctcttggtctttgaataaagcctgagtaggaaggctagcaaaaaaaaaaaaaaaaaaaaaaaaaaaaaaaaaaaaaaaaaaaaaaaaaaaaaaaaaaaaaaaaaaaaaaaaaaaaaaaa

SEQ ID NO: 9796 - RNA, 8787 nt, synthetic construct
  source 1..8787: mol_type = other RNA
aggaaataagagagaaaagaagagtaagaagaaatataagagccaccatggcccctaagaagaagcgtaaagtgagccggatgaaccacgaccaggagttcgacccccctaaggtgtaccctcccgtccccgccgagaagagaaagcccatccgggtcctgagcctgttcgatggcatcgccaccggtctgctggtgctgaaggacctgggcatccaggtggataggtacattgcctccgaggtgtgcgaggactccatcaccgtgggaatggtgcgtcatcagggcaagatcatgtacgtgggcgacgtgcggagcgtgacacagaagcatatccaggagtggggccctttcgacctggtgatcggcggcagcccttgcaatgacctgagcatcgtgaacccagcccggaagggcctgtacgagggaaccggcagactgttcttcgagttttacagactgctgcacgacgcccggcctaaggaaggcgacgaccggcccttcttttggctgttcgagaatgtggtggccatgggagtcagcgacaagcgggatattagccggttcctggagagcaaccccgtgatgatcgatgccaaggaagtgagcgccgcccaccgggccagatacttctggggcaatctgcctggcatgaacagacccctggccagcaccgtgaacgacaagctggagctgcaggagtgcctggagcacggccggatcgccaagttcagcaaggtgagaaccatcaccacccgaagcaacagcatcaaacaaggcaaggaccagcactttcctgtgttcatgaacgagaaggaggacatcctgtggtgtaccgagatggagagagtgttcgggttcccagtccactacacagatgtcagcaacatgtctagactggccagacagagactgctgggaagaagctggtccgtccctgtgatcagacacctgttcgcccctctgaaggagtacttcgcctgcgtgagcagcggcaacagcaacgccaacagccggggccccagcttctctagcggcctggtgccactgtccctgagagggagccacatgggccccatggagatctacaaaaccgtgagcgcctggaagcggcagcctgtgcgcgtgctgagcctgtttcggaatatcgataaagtcctgaaaagcctgggattcctggagagcggctctggctccggcggtggcaccctgaagtacgtggaggatgtgacaaacgtggtcagacgggatgtggagaagtggggccccttcgatctggtgtacggcagcacccaacccctgggcagctcttgtgaccggtgccctggctggtacatgtttcagttccaccggatcctgcagtacgccctgccgagacaggagtcccagcggccattcttttggattttcatggacaacttgctgctgaccgaggatgaccaggaaactaccactcggttcctgcagaccgaagccgtgaccctgcaggacgtgagaggccgggactaccagaacgccatgcgggtgtggtccaacatccctggactgaaaagcaagcacgcacctctgacccctaaagaagaggagtacctgcaggcccaggtgcggagcagaagcaagctggacgcccctaaggtggatctgctggtgaagaattgcctcctgcccctgagagagtacttcaagtatttcagccagaatagtctgcccctgggaggcagcggcggcggcagcaagctgcccgaggccttcgaggacgtggccgtgtacttcaccaggaaggagtgggagctgctggaggccggcgacaagggcctgtaccaggaccagatgctgaggaactaccaggccctggtgagcctgggcctgcagggccccgcccccgacctgatctgcaggatgcagctgggcgagatggagctgtgggtgtgcgacgacgaggaggccggcgagagcagcctgagcgaggacttcggcggcccaagcagcggcgcccctcctcccagcggcggcaggcggcccaagcagcggcgcccctcctcccagcggcggcagcccagccggctccccaacctctaccgaggagggcacctctgagtccgccacccccgagagcggccctggcacctccaccgagcccagcgagggcagcgcacccggcagccctgccggcagccccacctccacagaggagggaaccagcaccgagcccagcgaaggcagcgccccaggcaccagcaccgagcctagtgagcaggagattaaacggatcaacaagatcagaagaagacttgtgaaagacagcaacaccaagaaggccggcaagacaggccccatgaaaaccctgctggttagagtgatgacacccgatctgagagagcggctggaaaacctgagaaagaagcctgaaaatatcccccagcccatcagcaatacatctagagccaacctgaataagctgctgaccgattacaccgaaatgaagaaggcgatcctgcatgtgtactgggaagagttccagaaggaccctgtgggcctgatgagccgggtggcccagcctgccagcaagaagatcgatcagaacaagctgaaacctgagatggacgagaagggcaacctgaccaccgccggctttgcctgctctcagtgtggccagcccctgttcgtgtacaagctggagcaggtgtctgagaagggcaaggcttacaccaactacttcggacggtgcaatgtggccgagcacgaaaagctgatcctgctggcccagctgaagcccgagaaggatagcgacgaagccgtgacatatagcctgggaaagtttgggcagagggccctggatttctacagcattcatgtgaccaaggagtccacccaccccgtgaagcccctggcccagatcgccggaaacagatacgcctccggacctgtgggaaaggccctgagcgacgcatgtatgggcacaatcgcctccttcctgtctaagtaccaggacatcatcatcgaacaccagaaggtggtgaagggcaaccagaagagactggagagcctgcgggagctggccggcaaggaaaacctggaataccctagcgtgaccctgccacctcagcctcacaccaaggagggcgttgatgcctacaacgaagtgatcgcccgggtgcgaatgtgggtgaacctgaacctgtggcagaagctgaagctaagcagagatgatgccaagcctctgctgagactgaagggattcccttcctttcctctggtcgagagacaggccaacgaagtggactggtgggacatggtgtgtaacgtgaagaagctgatcaacgagaaaaaggaggatggcaaggtgttttggcagaatctggctggctacaagagacaggaagccctgagaccatacctgagcagcgaggaagatcggaagaagggaaagaaattcgctcggtaccagctgggcgacctgctgctgcacctggaaaagaagcacggcgaggactggggaaaggtgtacgacgaggcctgggagcggattgacaagaaagtggaaggcctgagcaagcacatcaagctggaagaggaacggagaagcgaggacgcccagagcaaggccgccctgaccgactggctgcgggctaaggccagcttcgtgatcgagggcctgaaggaggccgacaaggacgagttctgcagatgcgagctgaagctgcagaagtggtacggggacctgcggggaaagcccttcgccatcgaagccgagaacagcatcctggacatcagcggcttcagcaagcagtacaactgtgccttcatctggcagaaggacggcgtgaagaagctgaacctgtacctgatcatcaactacttcaagggcggcaagctgcggttcaagaagatcaaacctgaagccttcgaagccaacagattctacaccgtgatcaacaaaaagagcggcgagatcgtgcccatggaggtgaacttcaacttcgacgaccccaacctgatcatcctgcctctggcctttggcaagagacagggcagagaattcatctggaacgacctgctgtccctggaaaccggcagcctgaagctggccaacggaagagtgatcgagaagacactgtacaacagaagaacccggcaggatgagcctgccctgttcgtggccctgaccttcgagcggcgggaggtcctggactcctccaatatcaaaccaatgaacctgatcggcgtggcaagaggcgaaaacatccccgccgtgatcgccctgaccgaccccgagggctgcccactgagccggtttaaggatagcctgggaaacccaacccacatcctgagaatcggcgagagctataaggagaagcagcggaccatccaggccaagaaggaggtggagcagcggagagccggcggctacagccggaagtacgccagcaaagccaagaatctggcagacgatatggtgagaaacaccgctagagatctgctgtactacgccgtgacccaggatgccatgctgatcttcgccaacctgagccggggcttcggccggcagggcaagcggaccttcatggccgagagacagtacacacggatggaggactggctgaccgccaagctggcctacgagggcctgagcaagacctacctgtccaagacactggcccagtacacctccaagacatgcagcaactgtgggtttaccatcaccagcgccgactacgacagggtgctggagaagctgaagaagacagcaacaggctggatgaccacaattaacggcaaggagctgaaggtggagggccagattacctactacaacagatacaagagacagaacgtagtcaaggacctgtccgtcgagctggatagactgagcgaagaatctgtgaacaacgacatctcctcctggacaaagggcagaagcggagaagctctgagcctcctgaagaaaagattctcccatagacccgtgcaggagaagttcgtgtgcctgaactgcggcttcgagacacacgcagccgagcaagccgccctgaacatcgccagatcctggctgttcctgcggagccaggagtacaagaaataccagacaaacaagacaaccggcaacaccgataagagagccttcgtcgagacctggcagtccttttaccggaagaagcttaaggaggtgtggaaacctgccgtgcggtctggcggatctggcggaggctccaccagccccaagaaaaagagaaaagtctaagctgccttctgcggggcttgccttctggccatgcccttcttctctcccttgcacctgtacctcttggtctttgaataaagcctgagtaggaaggctagcaaaaaaaaaaaaaaaaaaaaaaaaaaaaaaaaaaaaaaaaaaaaaaaaaaaaaaaaaaaaaaaaaaaaaaaaaaaaaaaagcccagccggctccccaacctctaccgaggagggcacctctgagtccgccacccccgagagcggccctggcacctccaccgagcccagcgagggcagcgcacccggcagccctgccggcagccccacctccacagaggagggaaccagcaccgagcccagcgaaggcagcgccccaggcaccagcaccgagcctagtgagcaggagattaaacggatcaacaagatcagaagaagacttgtgaaagacagcaacaccaagaaggccggcaagacaggccccatgaaaaccctgctggttagagtgatgacacccgatctgagagagcggctggaaaacctgagaaagaagcctgaaaatatcccccagcccatcagcaatacatctagagccaacctgaataagctgctgaccgattacaccgaaatgaagaaggcgatcctgcatgtgtactgggaagagttccagaaggaccctgtgggcctgatgagccgggtggcccagcctgccagcaagaagatcgatcagaacaagctgaaacctgagatggacgagaagggcaacctgaccaccgccggctttgcctgctctcagtgtggccagcccctgttcgtgtacaagctggagcaggtgtctgagaagggcaaggcttacaccaactacttcggacggtgcaatgtggccgagcacgaaaagctgatcctgctggcccagctgaagcccgagaaggatagcgacgaagccgtgacatatagcctgggaaagtttgggcagagggccctggatttctacagcattcatgtgaccaaggagtccacccaccccgtgaagcccctggcccagatcgccggaaacagatacgcctccggacctgtgggaaaggccctgagcgacgcatgtatgggcacaatcgcctccttcctgtctaagtaccaggacatcatcatcgaacaccagaaggtggtgaagggcaaccagaagagactggagagcctgcgggagctggccggcaaggaaaacctggaataccctagcgtgaccctgccacctcagcctcacaccaaggagggcgttgatgcctacaacgaagtgatcgcccgggtgcgaatgtgggtgaacctgaacctgtggcagaagctgaagctaagcagagatgatgccaagcctctgctgagactgaagggattcccttcctttcctctggtcgagagacaggccaacgaagtggactggtgggacatggtgtgtaacgtgaagaagctgatcaacgagaaaaaggaggatggcaaggtgttttggcagaatctggctggctacaagagacaggaagccctgagaccatacctgagcagcgaggaagatcggaagaagggaaagaaattcgctcggtaccagctgggcgacctgctgctgcacctggaaaagaagcacggcgaggactggggaaaggtgtacgacgaggcctgggagcggattgacaagaaagtggaaggcctgagcaagcacatcaagctggaagaggaacggagaagcgaggacgcccagagcaaggccgccctgaccgactggctgcgggctaaggccagcttcgtgatcgagggcctgaaggaggccgacaaggacgagttctgcagatgcgagctgaagctgcagaagtggtacggggacctgcggggaaagcccttcgccatcgaagccgagaacagcatcctggacatcagcggcttcagcaagcagtacaactgtgccttcatctggcagaaggacggcgtgaagaagctgaacctgtacctgatcatcaactacttcaagggcggcaagctgcggttcaagaagatcaaacctgaagccttcgaagccaacagattctacaccgtgatcaacaaaaagagcggcgagatcgtgcccatggaggtgaacttcaacttcgacgaccccaacctgatcatcctgcctctggcctttggcaagagacagggcagagaattcatctggaacgacctgctgtccctggaaaccggcagcctgaagctggccaacggaagagtgatcgagaagacactgtacaacagaagaacccggcaggatgagcctgccctgttcgtggccctgaccttcgagcggcgggaggtcctggactcctccaatatcaaaccaatgaacctgatcggcgtggcaagaggcgaaaacatccccgccgtgatcgccctgaccgaccccgagggctgcccactgagccggtttaaggatagcctgggaaacccaacccacatcctgagaatcggcgagagctataaggagaagcagcggaccatccaggccaagaaggaggtggagcagcggagagccggcggctacagccggaagtacgccagcaaagccaagaatctggcagacgatatggtgagaaacaccgctagagatctgctgtactacgccgtgacccaggatgccatgctgatcttcgccaacctgagccggggcttcggccggcagggcaagcggaccttcatggccgagagacagtacacacggatggaggactggctgaccgccaagctggcctacgagggcctgagcaagacctacctgtccaagacactggcccagtacacctccaagacatgcagcaactgtgggtttaccatcaccagcgccgactacgacagggtgctggagaagctgaagaagacagcaacaggctggatgaccacaattaacggcaaggagctgaaggtggagggccagattacctactacaacagatacaagagacagaacgtagtcaaggacctgtccgtcgagctggatagactgagcgaagaatctgtgaacaacgacatctcctcctggacaaagggcagaagcggagaagctctgagcctcctgaagaaaagattctcccatagacccgtgcaggagaagttcgtgtgcctgaactgcggcttcgagacacacgcagccgagcaagccgccctgaacatcgccagatcctggctgttcctgcggagccaggagtacaagaaataccagacaaacaagacaaccggcaacaccgataagagagccttcgtcgagacctggcagtccttttaccggaagaagcttaaggaggtgtggaaacctgccgtgcggtctggcggatctggcggaggctccaccagccccaagaaaaagagaaaagtctaagctgccttctgcggggcttgccttctggccatgcccttcttctctcccttgcacctgtacctcttggtctttgaataaagcctgagtaggaaggctagcaaaaaaaaaaaaaaaaaaaaaaaaaaaaaaaaaaaaaaaaaaaaaaaaaaaaaaaaaaaaaaaaaaaaaaaaaaaaaaaa

SEQ ID NO: 9797 - RNA, 8787 nt, synthetic construct
  source 1..8787: mol_type = other RNA
aggaaataagagagaaaagaagagtaagaagaaatataagagccaccatggcccctaagaagaagcgtaaagtgagccggatgaaccacgaccaggagttcgacccccctaaggtgtaccctcccgtccccgccgagaagagaaagcccatccgggtcctgagcctgttcgatggcatcgccaccggtctgctggtgctgaaggacctgggcatccaggtggataggtacattgcctccgaggtgtgcgaggactccatcaccgtgggaatggtgcgtcatcagggcaagatcatgtacgtgggcgacgtgcggagcgtgacacagaagcatatccaggagtggggccctttcgacctggtgatcggcggcagcccttgcaatgacctgagcatcgtgaacccagcccggaagggcctgtacgagggaaccggcagactgttcttcgagttttacagactgctgcacgacgcccggcctaaggaaggcgacgaccggcccttcttttggctgttcgagaatgtggtggccatgggagtcagcgacaagcgggatattagccggttcctggagagcaaccccgtgatgatcgatgccaaggaagtgagcgccgcccaccgggccagatacttctggggcaatctgcctggcatgaacagacccctggccagcaccgtgaacgacaagctggagctgcaggagtgcctggagcacggccggatcgccaagttcagcaaggtgagaaccatcaccacccgaagcaacagcatcaaacaaggcaaggaccagcactttcctgtgttcatgaacgagaaggaggacatcctgtggtgtaccgagatggagagagtgttcgggttcccagtccactacacagatgtcagcaacatgtctagactggccagacagagactgctgggaagaagctggtccgtccctgtgatcagacacctgttcgcccctctgaaggagtacttcgcctgcgtgagcagcggcaacagcaacgccaacagccggggccccagcttctctagcggcctggtgccactgtccctgagagggagccacatgggccccatggagatctacaaaaccgtgagcgcctggaagcggcagcctgtgcgcgtgctgagcctgtttcggaatatcgataaagtcctgaaaagcctgggattcctggagagcggctctggctccggcggtggcaccctgaagtacgtggaggatgtgacaaacgtggtcagacgggatgtggagaagtggggccccttcgatctggtgtacggcagcacccaacccctgggcagctcttgtgaccggtgccctggctggtacatgtttcagttccaccggatcctgcagtacgccctgccgagacaggagtcccagcggccattcttttggattttcatggacaacttgctgctgaccgaggatgaccaggaaactaccactcggttcctgcagaccgaagccgtgaccctgcaggacgtgagaggccgggactaccagaacgccatgcgggtgtggtccaacatccctggactgaaaagcaagcacgcacctctgacccctaaagaagaggagtacctgcaggcccaggtgcggagcagaagcaagctggacgcccctaaggtggatctgctggtgaagaattgcctcctgcccctgagagagtacttcaagtatttcagccagaatagtctgcccctgggaggcagcggcggcggcttccaggagcccgtgaccttcaaggacgtggccgtggagttcacctgggaggagtggaggcagctggaccccacccagagggccctgttcagggacgtgatgctggagaactacaggaacctggtgagcctgggcctggccgtgaccaagcccgacgtgatcttccagctggagagcggcgaggtgccctggatgctggagagggaggtgcccaggagcagccccaccgagtgcctgaacctgggcggcccaagcagcggcgcccctcctcccagcggcggcaggcggcccaagcagcggcgcccctcctcccagcggcggcagcccagccggctccccaacctctaccgaggagggcacctctgagtccgccacccccgagagcggccctggcacctccaccgagcccagcgagggcagcgcacccggcagccctgccggcagccccacctccacagaggagggaaccagcaccgagcccagcgaaggcagcgccccaggcaccagcaccgagcctagtgagcaggagattaaacggatcaacaagatcagaagaagacttgtgaaagacagcaacaccaagaaggccggcaagacaggccccatgaaaaccctgctggttagagtgatgacacccgatctgagagagcggctggaaaacctgagaaagaagcctgaaaatatcccccagcccatcagcaatacatctagagccaacctgaataagctgctgaccgattacaccgaaatgaagaaggcgatcctgcatgtgtactgggaagagttccagaaggaccctgtgggcctgatgagccgggtggcccagcctgccagcaagaagatcgatcagaacaagctgaaacctgagatggacgagaagggcaacctgaccaccgccggctttgcctgctctcagtgtggccagcccctgttcgtgtacaagctggagcaggtgtctgagaagggcaaggcttacaccaactacttcggacggtgcaatgtggccgagcacgaaaagctgatcctgctggcccagctgaagcccgagaaggatagcgacgaagccgtgacatatagcctgggaaagtttgggcagagggccctggatttctacagcattcatgtgaccaaggagtccacccaccccgtgaagcccctggcccagatcgccggaaacagatacgcctccggacctgtgggaaaggccctgagcgacgcatgtatgggcacaatcgcctccttcctgtctaagtaccaggacatcatcatcgaacaccagaaggtggtgaagggcaaccagaagagactggagagcctgcgggagctggccggcaaggaaaacctggaataccctagcgtgaccctgccacctcagcctcacaccaaggagggcgttgatgcctacaacgaagtgatcgcccgggtgcgaatgtgggtgaacctgaacctgtggcagaagctgaagctaagcagagatgatgccaagcctctgctgagactgaagggattcccttcctttcctctggtcgagagacaggccaacgaagtggactggtgggacatggtgtgtaacgtgaagaagctgatcaacgagaaaaaggaggatggcaaggtgttttggcagaatctggctggctacaagagacaggaagccctgagaccatacctgagcagcgaggaagatcggaagaagggaaagaaattcgctcggtaccagctgggcgacctgctgctgcacctggaaaagaagcacggcgaggactggggaaaggtgtacgacgaggcctgggagcggattgacaagaaagtggaaggcctgagcaagcacatcaagctggaagaggaacggagaagcgaggacgcccagagcaaggccgccctgaccgactggctgcgggctaaggccagcttcgtgatcgagggcctgaaggaggccgacaaggacgagttctgcagatgcgagctgaagctgcagaagtggtacggggacctgcggggaaagcccttcgccatcgaagccgagaacagcatcctggacatcagcggcttcagcaagcagtacaactgtgccttcatctggcagaaggacggcgtgaagaagctgaacctgtacctgatcatcaactacttcaagggcggcaagctgcggttcaagaagatcaaacctgaagccttcgaagccaacagattctacaccgtgatcaacaaaaagagcggcgagatcgtgcccatggaggtgaacttcaacttcgacgaccccaacctgatcatcctgcctctggcctttggcaagagacagggcagagaattcatctggaacgacctgctgtccctggaaaccggcagcctgaagctggccaacggaagagtgatcgagaagacactgtacaacagaagaacccggcaggatgagcctgccctgttcgtggccctgaccttcgagcggcgggaggtcctggactcctccaatatcaaaccaatgaacctgatcggcgtggcaagaggcgaaaacatccccgccgtgatcgccctgaccgaccccgagggctgcccactgagccggtttaaggatagcctgggaaacccaacccacatcctgagaatcggcgagagctataaggagaagcagcggaccatccaggccaagaaggaggtggagcagcggagagccggcggctacagccggaagtacgccagcaaagccaagaatctggcagacgatatggtgagaaacaccgctagagatctgctgtactacgccgtgacccaggatgccatgctgatcttcgccaacctgagccggggcttcggccggcagggcaagcggaccttcatggccgagagacagtacacacggatggaggactggctgaccgccaagctggcctacgagggcctgagcaagacctacctgtccaagacactggcccagtacacctccaagacatgcagcaactgtgggtttaccatcaccagcgccgactacgacagggtgctggagaagctgaagaagacagcaacaggctggatgaccacaattaacggcaaggagctgaaggtggagggccagattacctactacaacagatacaagagacagaacgtagtcaaggacctgtccgtcgagctggatagactgagcgaagaatctgtgaacaacgacatctcctcctggacaaagggcagaagcggagaagctctgagcctcctgaagaaaagattctcccatagacccgtgcaggagaagttcgtgtgcctgaactgcggcttcgagacacacgcagccgagcaagccgccctgaacatcgccagatcctggctgttcctgcggagccaggagtacaagaaataccagacaaacaagacaaccggcaacaccgataagagagccttcgtcgagacctggcagtccttttaccggaagaagcttaaggaggtgtggaaacctgccgtgcggtctggcggatctggcggaggctccaccagccccaagaaaaagagaaaagtctaagctgccttctgcggggcttgccttctggccatgcccttcttctctcccttgcacctgtacctcttggtctttgaataaagcctgagtaggaaggctagcaaaaaaaaaaaaaaaaaaaaaaaaaaaaaaaaaaaaaaaaaaaaaaaaaaaaaaaaaaaaaaaaaaaaaaaaaaaaaaaagcccagccggctccccaacctctaccgaggagggcacctctgagtccgccacccccgagagcggccctggcacctccaccgagcccagcgagggcagcgcacccggcagccctgccggcagccccacctccacagaggagggaaccagcaccgagcccagcgaaggcagcgccccaggcaccagcaccgagcctagtgagcaggagattaaacggatcaacaagatcagaagaagacttgtgaaagacagcaacaccaagaaggccggcaagacaggccccatgaaaaccctgctggttagagtgatgacacccgatctgagagagcggctggaaaacctgagaaagaagcctgaaaatatcccccagcccatcagcaatacatctagagccaacctgaataagctgctgaccgattacaccgaaatgaagaaggcgatcctgcatgtgtactgggaagagttccagaaggaccctgtgggcctgatgagccgggtggcccagcctgccagcaagaagatcgatcagaacaagctgaaacctgagatggacgagaagggcaacctgaccaccgccggctttgcctgctctcagtgtggccagcccctgttcgtgtacaagctggagcaggtgtctgagaagggcaaggcttacaccaactacttcggacggtgcaatgtggccgagcacgaaaagctgatcctgctggcccagctgaagcccgagaaggatagcgacgaagccgtgacatatagcctgggaaagtttgggcagagggccctggatttctacagcattcatgtgaccaaggagtccacccaccccgtgaagcccctggcccagatcgccggaaacagatacgcctccggacctgtgggaaaggccctgagcgacgcatgtatgggcacaatcgcctccttcctgtctaagtaccaggacatcatcatcgaacaccagaaggtggtgaagggcaaccagaagagactggagagcctgcgggagctggccggcaaggaaaacctggaataccctagcgtgaccctgccacctcagcctcacaccaaggagggcgttgatgcctacaacgaagtgatcgcccgggtgcgaatgtgggtgaacctgaacctgtggcagaagctgaagctaagcagagatgatgccaagcctctgctgagactgaagggattcccttcctttcctctggtcgagagacaggccaacgaagtggactggtgggacatggtgtgtaacgtgaagaagctgatcaacgagaaaaaggaggatggcaaggtgttttggcagaatctggctggctacaagagacaggaagccctgagaccatacctgagcagcgaggaagatcggaagaagggaaagaaattcgctcggtaccagctgggcgacctgctgctgcacctggaaaagaagcacggcgaggactggggaaaggtgtacgacgaggcctgggagcggattgacaagaaagtggaaggcctgagcaagcacatcaagctggaagaggaacggagaagcgaggacgcccagagcaaggccgccctgaccgactggctgcgggctaaggccagcttcgtgatcgagggcctgaaggaggccgacaaggacgagttctgcagatgcgagctgaagctgcagaagtggtacggggacctgcggggaaagcccttcgccatcgaagccgagaacagcatcctggacatcagcggcttcagcaagcagtacaactgtgccttcatctggcagaaggacggcgtgaagaagctgaacctgtacctgatcatcaactacttcaagggcggcaagctgcggttcaagaagatcaaacctgaagccttcgaagccaacagattctacaccgtgatcaacaaaaagagcggcgagatcgtgcccatggaggtgaacttcaacttcgacgaccccaacctgatcatcctgcctctggcctttggcaagagacagggcagagaattcatctggaacgacctgctgtccctggaaaccggcagcctgaagctggccaacggaagagtgatcgagaagacactgtacaacagaagaacccggcaggatgagcctgccctgttcgtggccctgaccttcgagcggcgggaggtcctggactcctccaatatcaaaccaatgaacctgatcggcgtggcaagaggcgaaaacatccccgccgtgatcgccctgaccgaccccgagggctgcccactgagccggtttaaggatagcctgggaaacccaacccacatcctgagaatcggcgagagctataaggagaagcagcggaccatccaggccaagaaggaggtggagcagcggagagccggcggctacagccggaagtacgccagcaaagccaagaatctggcagacgatatggtgagaaacaccgctagagatctgctgtactacgccgtgacccaggatgccatgctgatcttcgccaacctgagccggggcttcggccggcagggcaagcggaccttcatggccgagagacagtacacacggatggaggactggctgaccgccaagctggcctacgagggcctgagcaagacctacctgtccaagacactggcccagtacacctccaagacatgcagcaactgtgggtttaccatcaccagcgccgactacgacagggtgctggagaagctgaagaagacagcaacaggctggatgaccacaattaacggcaaggagctgaaggtggagggccagattacctactacaacagatacaagagacagaacgtagtcaaggacctgtccgtcgagctggatagactgagcgaagaatctgtgaacaacgacatctcctcctggacaaagggcagaagcggagaagctctgagcctcctgaagaaaagattctcccatagacccgtgcaggagaagttcgtgtgcctgaactgcggcttcgagacacacgcagccgagcaagccgccctgaacatcgccagatcctggctgttcctgcggagccaggagtacaagaaataccagacaaacaagacaaccggcaacaccgataagagagccttcgtcgagacctggcagtccttttaccggaagaagcttaaggaggtgtggaaacctgccgtgcggtctggcggatctggcggaggctccaccagccccaagaaaaagagaaaagtctaagctgccttctgcggggcttgccttctggccatgcccttcttctctcccttgcacctgtacctcttggtctttgaataaagcctgagtaggaaggctagcaaaaaaaaaaaaaaaaaaaaaaaaaaaaaaaaaaaaaaaaaaaaaaaaaaaaaaaaaaaaaaaaaaaaaaaaaaaaaaaa

SEQ ID NO: 9798 - RNA, 8787 nt, synthetic construct
  source 1..8787: mol_type = other RNA
aggaaataagagagaaaagaagagtaagaagaaatataagagccaccatggcccctaagaagaagcgtaaagtgagccggatgaaccacgaccaggagttcgacccccctaaggtgtaccctcccgtccccgccgagaagagaaagcccatccgggtcctgagcctgttcgatggcatcgccaccggtctgctggtgctgaaggacctgggcatccaggtggataggtacattgcctccgaggtgtgcgaggactccatcaccgtgggaatggtgcgtcatcagggcaagatcatgtacgtgggcgacgtgcggagcgtgacacagaagcatatccaggagtggggccctttcgacctggtgatcggcggcagcccttgcaatgacctgagcatcgtgaacccagcccggaagggcctgtacgagggaaccggcagactgttcttcgagttttacagactgctgcacgacgcccggcctaaggaaggcgacgaccggcccttcttttggctgttcgagaatgtggtggccatgggagtcagcgacaagcgggatattagccggttcctggagagcaaccccgtgatgatcgatgccaaggaagtgagcgccgcccaccgggccagatacttctggggcaatctgcctggcatgaacagacccctggccagcaccgtgaacgacaagctggagctgcaggagtgcctggagcacggccggatcgccaagttcagcaaggtgagaaccatcaccacccgaagcaacagcatcaaacaaggcaaggaccagcactttcctgtgttcatgaacgagaaggaggacatcctgtggtgtaccgagatggagagagtgttcgggttcccagtccactacacagatgtcagcaacatgtctagactggccagacagagactgctgggaagaagctggtccgtccctgtgatcagacacctgttcgcccctctgaaggagtacttcgcctgcgtgagcagcggcaacagcaacgccaacagccggggccccagcttctctagcggcctggtgccactgtccctgagagggagccacatgggccccatggagatctacaaaaccgtgagcgcctggaagcggcagcctgtgcgcgtgctgagcctgtttcggaatatcgataaagtcctgaaaagcctgggattcctggagagcggctctggctccggcggtggcaccctgaagtacgtggaggatgtgacaaacgtggtcagacgggatgtggagaagtggggccccttcgatctggtgtacggcagcacccaacccctgggcagctcttgtgaccggtgccctggctggtacatgtttcagttccaccggatcctgcagtacgccctgccgagacaggagtcccagcggccattcttttggattttcatggacaacttgctgctgaccgaggatgaccaggaaactaccactcggttcctgcagaccgaagccgtgaccctgcaggacgtgagaggccgggactaccagaacgccatgcgggtgtggtccaacatccctggactgaaaagcaagcacgcacctctgacccctaaagaagaggagtacctgcaggcccaggtgcggagcagaagcaagctggacgcccctaaggtggatctgctggtgaagaattgcctcctgcccctgagagagtacttcaagtatttcagccagaatagtctgcccctgggaggcagcggcggcggcagccagggcctggtgagcttcaaggacgtggccgtggacttcacccaggaggagtggcagcagctggaccccgcccagaggaccctgtacagggacgtgatgctggagaacttcagccacgtgatcagcctgggctaccccgtgagcaagcccgacgtgatcagcaagctggagcagggcgaggacccctggatcatcaagagggacgtgagcaactggatctacaccgacgagaaccaggccggcggcccaagcagcggcgcccctcctcccagcggcggcaggcggcccaagcagcggcgcccctcctcccagcggcggcagcccagccggctccccaacctctaccgaggagggcacctctgagtccgccacccccgagagcggccctggcacctccaccgagcccagcgagggcagcgcacccggcagccctgccggcagccccacctccacagaggagggaaccagcaccgagcccagcgaaggcagcgccccaggcaccagcaccgagcctagtgagcaggagattaaacggatcaacaagatcagaagaagacttgtgaaagacagcaacaccaagaaggccggcaagacaggccccatgaaaaccctgctggttagagtgatgacacccgatctgagagagcggctggaaaacctgagaaagaagcctgaaaatatcccccagcccatcagcaatacatctagagccaacctgaataagctgctgaccgattacaccgaaatgaagaaggcgatcctgcatgtgtactgggaagagttccagaaggaccctgtgggcctgatgagccgggtggcccagcctgccagcaagaagatcgatcagaacaagctgaaacctgagatggacgagaagggcaacctgaccaccgccggctttgcctgctctcagtgtggccagcccctgttcgtgtacaagctggagcaggtgtctgagaagggcaaggcttacaccaactacttcggacggtgcaatgtggccgagcacgaaaagctgatcctgctggcccagctgaagcccgagaaggatagcgacgaagccgtgacatatagcctgggaaagtttgggcagagggccctggatttctacagcattcatgtgaccaaggagtccacccaccccgtgaagcccctggcccagatcgccggaaacagatacgcctccggacctgtgggaaaggccctgagcgacgcatgtatgggcacaatcgcctccttcctgtctaagtaccaggacatcatcatcgaacaccagaaggtggtgaagggcaaccagaagagactggagagcctgcgggagctggccggcaaggaaaacctggaataccctagcgtgaccctgccacctcagcctcacaccaaggagggcgttgatgcctacaacgaagtgatcgcccgggtgcgaatgtgggtgaacctgaacctgtggcagaagctgaagctaagcagagatgatgccaagcctctgctgagactgaagggattcccttcctttcctctggtcgagagacaggccaacgaagtggactggtgggacatggtgtgtaacgtgaagaagctgatcaacgagaaaaaggaggatggcaaggtgttttggcagaatctggctggctacaagagacaggaagccctgagaccatacctgagcagcgaggaagatcggaagaagggaaagaaattcgctcggtaccagctgggcgacctgctgctgcacctggaaaagaagcacggcgaggactggggaaaggtgtacgacgaggcctgggagcggattgacaagaaagtggaaggcctgagcaagcacatcaagctggaagaggaacggagaagcgaggacgcccagagcaaggccgccctgaccgactggctgcgggctaaggccagcttcgtgatcgagggcctgaaggaggccgacaaggacgagttctgcagatgcgagctgaagctgcagaagtggtacggggacctgcggggaaagcccttcgccatcgaagccgagaacagcatcctggacatcagcggcttcagcaagcagtacaactgtgccttcatctggcagaaggacggcgtgaagaagctgaacctgtacctgatcatcaactacttcaagggcggcaagctgcggttcaagaagatcaaacctgaagccttcgaagccaacagattctacaccgtgatcaacaaaaagagcggcgagatcgtgcccatggaggtgaacttcaacttcgacgaccccaacctgatcatcctgcctctggcctttggcaagagacagggcagagaattcatctggaacgacctgctgtccctggaaaccggcagcctgaagctggccaacggaagagtgatcgagaagacactgtacaacagaagaacccggcaggatgagcctgccctgttcgtggccctgaccttcgagcggcgggaggtcctggactcctccaatatcaaaccaatgaacctgatcggcgtggcaagaggcgaaaacatccccgccgtgatcgccctgaccgaccccgagggctgcccactgagccggtttaaggatagcctgggaaacccaacccacatcctgagaatcggcgagagctataaggagaagcagcggaccatccaggccaagaaggaggtggagcagcggagagccggcggctacagccggaagtacgccagcaaagccaagaatctggcagacgatatggtgagaaacaccgctagagatctgctgtactacgccgtgacccaggatgccatgctgatcttcgccaacctgagccggggcttcggccggcagggcaagcggaccttcatggccgagagacagtacacacggatggaggactggctgaccgccaagctggcctacgagggcctgagcaagacctacctgtccaagacactggcccagtacacctccaagacatgcagcaactgtgggtttaccatcaccagcgccgactacgacagggtgctggagaagctgaagaagacagcaacaggctggatgaccacaattaacggcaaggagctgaaggtggagggccagattacctactacaacagatacaagagacagaacgtagtcaaggacctgtccgtcgagctggatagactgagcgaagaatctgtgaacaacgacatctcctcctggacaaagggcagaagcggagaagctctgagcctcctgaagaaaagattctcccatagacccgtgcaggagaagttcgtgtgcctgaactgcggcttcgagacacacgcagccgagcaagccgccctgaacatcgccagatcctggctgttcctgcggagccaggagtacaagaaataccagacaaacaagacaaccggcaacaccgataagagagccttcgtcgagacctggcagtccttttaccggaagaagcttaaggaggtgtggaaacctgccgtgcggtctggcggatctggcggaggctccaccagccccaagaaaaagagaaaagtctaagctgccttctgcggggcttgccttctggccatgcccttcttctctcccttgcacctgtacctcttggtctttgaataaagcctgagtaggaaggctagcaaaaaaaaaaaaaaaaaaaaaaaaaaaaaaaaaaaaaaaaaaaaaaaaaaaaaaaaaaaaaaaaaaaaaaaaaaaaaaaagcccagccggctccccaacctctaccgaggagggcacctctgagtccgccacccccgagagcggccctggcacctccaccgagcccagcgagggcagcgcacccggcagccctgccggcagccccacctccacagaggagggaaccagcaccgagcccagcgaaggcagcgccccaggcaccagcaccgagcctagtgagcaggagattaaacggatcaacaagatcagaagaagacttgtgaaagacagcaacaccaagaaggccggcaagacaggccccatgaaaaccctgctggttagagtgatgacacccgatctgagagagcggctggaaaacctgagaaagaagcctgaaaatatcccccagcccatcagcaatacatctagagccaacctgaataagctgctgaccgattacaccgaaatgaagaaggcgatcctgcatgtgtactgggaagagttccagaaggaccctgtgggcctgatgagccgggtggcccagcctgccagcaagaagatcgatcagaacaagctgaaacctgagatggacgagaagggcaacctgaccaccgccggctttgcctgctctcagtgtggccagcccctgttcgtgtacaagctggagcaggtgtctgagaagggcaaggcttacaccaactacttcggacggtgcaatgtggccgagcacgaaaagctgatcctgctggcccagctgaagcccgagaaggatagcgacgaagccgtgacatatagcctgggaaagtttgggcagagggccctggatttctacagcattcatgtgaccaaggagtccacccaccccgtgaagcccctggcccagatcgccggaaacagatacgcctccggacctgtgggaaaggccctgagcgacgcatgtatgggcacaatcgcctccttcctgtctaagtaccaggacatcatcatcgaacaccagaaggtggtgaagggcaaccagaagagactggagagcctgcgggagctggccggcaaggaaaacctggaataccctagcgtgaccctgccacctcagcctcacaccaaggagggcgttgatgcctacaacgaagtgatcgcccgggtgcgaatgtgggtgaacctgaacctgtggcagaagctgaagctaagcagagatgatgccaagcctctgctgagactgaagggattcccttcctttcctctggtcgagagacaggccaacgaagtggactggtgggacatggtgtgtaacgtgaagaagctgatcaacgagaaaaaggaggatggcaaggtgttttggcagaatctggctggctacaagagacaggaagccctgagaccatacctgagcagcgaggaagatcggaagaagggaaagaaattcgctcggtaccagctgggcgacctgctgctgcacctggaaaagaagcacggcgaggactggggaaaggtgtacgacgaggcctgggagcggattgacaagaaagtggaaggcctgagcaagcacatcaagctggaagaggaacggagaagcgaggacgcccagagcaaggccgccctgaccgactggctgcgggctaaggccagcttcgtgatcgagggcctgaaggaggccgacaaggacgagttctgcagatgcgagctgaagctgcagaagtggtacggggacctgcggggaaagcccttcgccatcgaagccgagaacagcatcctggacatcagcggcttcagcaagcagtacaactgtgccttcatctggcagaaggacggcgtgaagaagctgaacctgtacctgatcatcaactacttcaagggcggcaagctgcggttcaagaagatcaaacctgaagccttcgaagccaacagattctacaccgtgatcaacaaaaagagcggcgagatcgtgcccatggaggtgaacttcaacttcgacgaccccaacctgatcatcctgcctctggcctttggcaagagacagggcagagaattcatctggaacgacctgctgtccctggaaaccggcagcctgaagctggccaacggaagagtgatcgagaagacactgtacaacagaagaacccggcaggatgagcctgccctgttcgtggccctgaccttcgagcggcgggaggtcctggactcctccaatatcaaaccaatgaacctgatcggcgtggcaagaggcgaaaacatccccgccgtgatcgccctgaccgaccccgagggctgcccactgagccggtttaaggatagcctgggaaacccaacccacatcctgagaatcggcgagagctataaggagaagcagcggaccatccaggccaagaaggaggtggagcagcggagagccggcggctacagccggaagtacgccagcaaagccaagaatctggcagacgatatggtgagaaacaccgctagagatctgctgtactacgccgtgacccaggatgccatgctgatcttcgccaacctgagccggggcttcggccggcagggcaagcggaccttcatggccgagagacagtacacacggatggaggactggctgaccgccaagctggcctacgagggcctgagcaagacctacctgtccaagacactggcccagtacacctccaagacatgcagcaactgtgggtttaccatcaccagcgccgactacgacagggtgctggagaagctgaagaagacagcaacaggctggatgaccacaattaacggcaaggagctgaaggtggagggccagattacctactacaacagatacaagagacagaacgtagtcaaggacctgtccgtcgagctggatagactgagcgaagaatctgtgaacaacgacatctcctcctggacaaagggcagaagcggagaagctctgagcctcctgaagaaaagattctcccatagacccgtgcaggagaagttcgtgtgcctgaactgcggcttcgagacacacgcagccgagcaagccgccctgaacatcgccagatcctggctgttcctgcggagccaggagtacaagaaataccagacaaacaagacaaccggcaacaccgataagagagccttcgtcgagacctggcagtccttttaccggaagaagcttaaggaggtgtggaaacctgccgtgcggtctggcggatctggcggaggctccaccagccccaagaaaaagagaaaagtctaagctgccttctgcggggcttgccttctggccatgcccttcttctctcccttgcacctgtacctcttggtctttgaataaagcctgagtaggaaggctagcaaaaaaaaaaaaaaaaaaaaaaaaaaaaaaaaaaaaaaaaaaaaaaaaaaaaaaaaaaaaaaaaaaaaaaaaaaaaaaaa

SEQ ID NO: 9799 - RNA, 8787 nt, synthetic construct
  source 1..8787: mol_type = other RNA
aggaaataagagagaaaagaagagtaagaagaaatataagagccaccatggcccctaagaagaagcgtaaagtgagccggatgaaccacgaccaggagttcgacccccctaaggtgtaccctcccgtccccgccgagaagagaaagcccatccgggtcctgagcctgttcgatggcatcgccaccggtctgctggtgctgaaggacctgggcatccaggtggataggtacattgcctccgaggtgtgcgaggactccatcaccgtgggaatggtgcgtcatcagggcaagatcatgtacgtgggcgacgtgcggagcgtgacacagaagcatatccaggagtggggccctttcgacctggtgatcggcggcagcccttgcaatgacctgagcatcgtgaacccagcccggaagggcctgtacgagggaaccggcagactgttcttcgagttttacagactgctgcacgacgcccggcctaaggaaggcgacgaccggcccttcttttggctgttcgagaatgtggtggccatgggagtcagcgacaagcgggatattagccggttcctggagagcaaccccgtgatgatcgatgccaaggaagtgagcgccgcccaccgggccagatacttctggggcaatctgcctggcatgaacagacccctggccagcaccgtgaacgacaagctggagctgcaggagtgcctggagcacggccggatcgccaagttcagcaaggtgagaaccatcaccacccgaagcaacagcatcaaacaaggcaaggaccagcactttcctgtgttcatgaacgagaaggaggacatcctgtggtgtaccgagatggagagagtgttcgggttcccagtccactacacagatgtcagcaacatgtctagactggccagacagagactgctgggaagaagctggtccgtccctgtgatcagacacctgttcgcccctctgaaggagtacttcgcctgcgtgagcagcggcaacagcaacgccaacagccggggccccagcttctctagcggcctggtgccactgtccctgagagggagccacatgggccccatggagatctacaaaaccgtgagcgcctggaagcggcagcctgtgcgcgtgctgagcctgtttcggaatatcgataaagtcctgaaaagcctgggattcctggagagcggctctggctccggcggtggcaccctgaagtacgtggaggatgtgacaaacgtggtcagacgggatgtggagaagtggggccccttcgatctggtgtacggcagcacccaacccctgggcagctcttgtgaccggtgccctggctggtacatgtttcagttccaccggatcctgcagtacgccctgccgagacaggagtcccagcggccattcttttggattttcatggacaacttgctgctgaccgaggatgaccaggaaactaccactcggttcctgcagaccgaagccgtgaccctgcaggacgtgagaggccgggactaccagaacgccatgcgggtgtggtccaacatccctggactgaaaagcaagcacgcacctctgacccctaaagaagaggagtacctgcaggcccaggtgcggagcagaagcaagctggacgcccctaaggtggatctgctggtgaagaattgcctcctgcccctgagagagtacttcaagtatttcagccagaatagtctgcccctgggaggcagcggcggcggcgcccaggagagcgtgaccttcgaggacgtggccgtgaacttcaccgacagggagtggcagtgcctgacctacgcccagaggcacctgtacaaggacgtgatgctggagaactacggcaacatggtgagcgtgggcttccccttccccaagccccccctgatcagccacctggagaggggcgtggagctgtgcgtgcaggacccccaggacagggagagcctgagctgcagctgcctggtgagcggcggcccaagcagcggcgcccctcctcccagcggcggcaggcggcccaagcagcggcgcccctcctcccagcggcggcagcccagccggctccccaacctctaccgaggagggcacctctgagtccgccacccccgagagcggccctggcacctccaccgagcccagcgagggcagcgcacccggcagccctgccggcagccccacctccacagaggagggaaccagcaccgagcccagcgaaggcagcgccccaggcaccagcaccgagcctagtgagcaggagattaaacggatcaacaagatcagaagaagacttgtgaaagacagcaacaccaagaaggccggcaagacaggccccatgaaaaccctgctggttagagtgatgacacccgatctgagagagcggctggaaaacctgagaaagaagcctgaaaatatcccccagcccatcagcaatacatctagagccaacctgaataagctgctgaccgattacaccgaaatgaagaaggcgatcctgcatgtgtactgggaagagttccagaaggaccctgtgggcctgatgagccgggtggcccagcctgccagcaagaagatcgatcagaacaagctgaaacctgagatggacgagaagggcaacctgaccaccgccggctttgcctgctctcagtgtggccagcccctgttcgtgtacaagctggagcaggtgtctgagaagggcaaggcttacaccaactacttcggacggtgcaatgtggccgagcacgaaaagctgatcctgctggcccagctgaagcccgagaaggatagcgacgaagccgtgacatatagcctgggaaagtttgggcagagggccctggatttctacagcattcatgtgaccaaggagtccacccaccccgtgaagcccctggcccagatcgccggaaacagatacgcctccggacctgtgggaaaggccctgagcgacgcatgtatgggcacaatcgcctccttcctgtctaagtaccaggacatcatcatcgaacaccagaaggtggtgaagggcaaccagaagagactggagagcctgcgggagctggccggcaaggaaaacctggaataccctagcgtgaccctgccacctcagcctcacaccaaggagggcgttgatgcctacaacgaagtgatcgcccgggtgcgaatgtgggtgaacctgaacctgtggcagaagctgaagctaagcagagatgatgccaagcctctgctgagactgaagggattcccttcctttcctctggtcgagagacaggccaacgaagtggactggtgggacatggtgtgtaacgtgaagaagctgatcaacgagaaaaaggaggatggcaaggtgttttggcagaatctggctggctacaagagacaggaagccctgagaccatacctgagcagcgaggaagatcggaagaagggaaagaaattcgctcggtaccagctgggcgacctgctgctgcacctggaaaagaagcacggcgaggactggggaaaggtgtacgacgaggcctgggagcggattgacaagaaagtggaaggcctgagcaagcacatcaagctggaagaggaacggagaagcgaggacgcccagagcaaggccgccctgaccgactggctgcgggctaaggccagcttcgtgatcgagggcctgaaggaggccgacaaggacgagttctgcagatgcgagctgaagctgcagaagtggtacggggacctgcggggaaagcccttcgccatcgaagccgagaacagcatcctggacatcagcggcttcagcaagcagtacaactgtgccttcatctggcagaaggacggcgtgaagaagctgaacctgtacctgatcatcaactacttcaagggcggcaagctgcggttcaagaagatcaaacctgaagccttcgaagccaacagattctacaccgtgatcaacaaaaagagcggcgagatcgtgcccatggaggtgaacttcaacttcgacgaccccaacctgatcatcctgcctctggcctttggcaagagacagggcagagaattcatctggaacgacctgctgtccctggaaaccggcagcctgaagctggccaacggaagagtgatcgagaagacactgtacaacagaagaacccggcaggatgagcctgccctgttcgtggccctgaccttcgagcggcgggaggtcctggactcctccaatatcaaaccaatgaacctgatcggcgtggcaagaggcgaaaacatccccgccgtgatcgccctgaccgaccccgagggctgcccactgagccggtttaaggatagcctgggaaacccaacccacatcctgagaatcggcgagagctataaggagaagcagcggaccatccaggccaagaaggaggtggagcagcggagagccggcggctacagccggaagtacgccagcaaagccaagaatctggcagacgatatggtgagaaacaccgctagagatctgctgtactacgccgtgacccaggatgccatgctgatcttcgccaacctgagccggggcttcggccggcagggcaagcggaccttcatggccgagagacagtacacacggatggaggactggctgaccgccaagctggcctacgagggcctgagcaagacctacctgtccaagacactggcccagtacacctccaagacatgcagcaactgtgggtttaccatcaccagcgccgactacgacagggtgctggagaagctgaagaagacagcaacaggctggatgaccacaattaacggcaaggagctgaaggtggagggccagattacctactacaacagatacaagagacagaacgtagtcaaggacctgtccgtcgagctggatagactgagcgaagaatctgtgaacaacgacatctcctcctggacaaagggcagaagcggagaagctctgagcctcctgaagaaaagattctcccatagacccgtgcaggagaagttcgtgtgcctgaactgcggcttcgagacacacgcagccgagcaagccgccctgaacatcgccagatcctggctgttcctgcggagccaggagtacaagaaataccagacaaacaagacaaccggcaacaccgataagagagccttcgtcgagacctggcagtccttttaccggaagaagcttaaggaggtgtggaaacctgccgtgcggtctggcggatctggcggaggctccaccagccccaagaaaaagagaaaagtctaagctgccttctgcggggcttgccttctggccatgcccttcttctctcccttgcacctgtacctcttggtctttgaataaagcctgagtaggaaggctagcaaaaaaaaaaaaaaaaaaaaaaaaaaaaaaaaaaaaaaaaaaaaaaaaaaaaaaaaaaaaaaaaaaaaaaaaaaaaaaaagcccagccggctccccaacctctaccgaggagggcacctctgagtccgccacccccgagagcggccctggcacctccaccgagcccagcgagggcagcgcacccggcagccctgccggcagccccacctccacagaggagggaaccagcaccgagcccagcgaaggcagcgccccaggcaccagcaccgagcctagtgagcaggagattaaacggatcaacaagatcagaagaagacttgtgaaagacagcaacaccaagaaggccggcaagacaggccccatgaaaaccctgctggttagagtgatgacacccgatctgagagagcggctggaaaacctgagaaagaagcctgaaaatatcccccagcccatcagcaatacatctagagccaacctgaataagctgctgaccgattacaccgaaatgaagaaggcgatcctgcatgtgtactgggaagagttccagaaggaccctgtgggcctgatgagccgggtggcccagcctgccagcaagaagatcgatcagaacaagctgaaacctgagatggacgagaagggcaacctgaccaccgccggctttgcctgctctcagtgtggccagcccctgttcgtgtacaagctggagcaggtgtctgagaagggcaaggcttacaccaactacttcggacggtgcaatgtggccgagcacgaaaagctgatcctgctggcccagctgaagcccgagaaggatagcgacgaagccgtgacatatagcctgggaaagtttgggcagagggccctggatttctacagcattcatgtgaccaaggagtccacccaccccgtgaagcccctggcccagatcgccggaaacagatacgcctccggacctgtgggaaaggccctgagcgacgcatgtatgggcacaatcgcctccttcctgtctaagtaccaggacatcatcatcgaacaccagaaggtggtgaagggcaaccagaagagactggagagcctgcgggagctggccggcaaggaaaacctggaataccctagcgtgaccctgccacctcagcctcacaccaaggagggcgttgatgcctacaacgaagtgatcgcccgggtgcgaatgtgggtgaacctgaacctgtggcagaagctgaagctaagcagagatgatgccaagcctctgctgagactgaagggattcccttcctttcctctggtcgagagacaggccaacgaagtggactggtgggacatggtgtgtaacgtgaagaagctgatcaacgagaaaaaggaggatggcaaggtgttttggcagaatctggctggctacaagagacaggaagccctgagaccatacctgagcagcgaggaagatcggaagaagggaaagaaattcgctcggtaccagctgggcgacctgctgctgcacctggaaaagaagcacggcgaggactggggaaaggtgtacgacgaggcctgggagcggattgacaagaaagtggaaggcctgagcaagcacatcaagctggaagaggaacggagaagcgaggacgcccagagcaaggccgccctgaccgactggctgcgggctaaggccagcttcgtgatcgagggcctgaaggaggccgacaaggacgagttctgcagatgcgagctgaagctgcagaagtggtacggggacctgcggggaaagcccttcgccatcgaagccgagaacagcatcctggacatcagcggcttcagcaagcagtacaactgtgccttcatctggcagaaggacggcgtgaagaagctgaacctgtacctgatcatcaactacttcaagggcggcaagctgcggttcaagaagatcaaacctgaagccttcgaagccaacagattctacaccgtgatcaacaaaaagagcggcgagatcgtgcccatggaggtgaacttcaacttcgacgaccccaacctgatcatcctgcctctggcctttggcaagagacagggcagagaattcatctggaacgacctgctgtccctggaaaccggcagcctgaagctggccaacggaagagtgatcgagaagacactgtacaacagaagaacccggcaggatgagcctgccctgttcgtggccctgaccttcgagcggcgggaggtcctggactcctccaatatcaaaccaatgaacctgatcggcgtggcaagaggcgaaaacatccccgccgtgatcgccctgaccgaccccgagggctgcccactgagccggtttaaggatagcctgggaaacccaacccacatcctgagaatcggcgagagctataaggagaagcagcggaccatccaggccaagaaggaggtggagcagcggagagccggcggctacagccggaagtacgccagcaaagccaagaatctggcagacgatatggtgagaaacaccgctagagatctgctgtactacgccgtgacccaggatgccatgctgatcttcgccaacctgagccggggcttcggccggcagggcaagcggaccttcatggccgagagacagtacacacggatggaggactggctgaccgccaagctggcctacgagggcctgagcaagacctacctgtccaagacactggcccagtacacctccaagacatgcagcaactgtgggtttaccatcaccagcgccgactacgacagggtgctggagaagctgaagaagacagcaacaggctggatgaccacaattaacggcaaggagctgaaggtggagggccagattacctactacaacagatacaagagacagaacgtagtcaaggacctgtccgtcgagctggatagactgagcgaagaatctgtgaacaacgacatctcctcctggacaaagggcagaagcggagaagctctgagcctcctgaagaaaagattctcccatagacccgtgcaggagaagttcgtgtgcctgaactgcggcttcgagacacacgcagccgagcaagccgccctgaacatcgccagatcctggctgttcctgcggagccaggagtacaagaaataccagacaaacaagacaaccggcaacaccgataagagagccttcgtcgagacctggcagtccttttaccggaagaagcttaaggaggtgtggaaacctgccgtgcggtctggcggatctggcggaggctccaccagccccaagaaaaagagaaaagtctaagctgccttctgcggggcttgccttctggccatgcccttcttctctcccttgcacctgtacctcttggtctttgaataaagcctgagtaggaaggctagcaaaaaaaaaaaaaaaaaaaaaaaaaaaaaaaaaaaaaaaaaaaaaaaaaaaaaaaaaaaaaaaaaaaaaaaaaaaaaaaa

SEQ ID NO: 9800 - RNA, 8787 nt, synthetic construct
  source 1..8787: mol_type = other RNA
aggaaataagagagaaaagaagagtaagaagaaatataagagccaccatggcccctaagaagaagcgtaaagtgagccggatgaaccacgaccaggagttcgacccccctaaggtgtaccctcccgtccccgccgagaagagaaagcccatccgggtcctgagcctgttcgatggcatcgccaccggtctgctggtgctgaaggacctgggcatccaggtggataggtacattgcctccgaggtgtgcgaggactccatcaccgtgggaatggtgcgtcatcagggcaagatcatgtacgtgggcgacgtgcggagcgtgacacagaagcatatccaggagtggggccctttcgacctggtgatcggcggcagcccttgcaatgacctgagcatcgtgaacccagcccggaagggcctgtacgagggaaccggcagactgttcttcgagttttacagactgctgcacgacgcccggcctaaggaaggcgacgaccggcccttcttttggctgttcgagaatgtggtggccatgggagtcagcgacaagcgggatattagccggttcctggagagcaaccccgtgatgatcgatgccaaggaagtgagcgccgcccaccgggccagatacttctggggcaatctgcctggcatgaacagacccctggccagcaccgtgaacgacaagctggagctgcaggagtgcctggagcacggccggatcgccaagttcagcaaggtgagaaccatcaccacccgaagcaacagcatcaaacaaggcaaggaccagcactttcctgtgttcatgaacgagaaggaggacatcctgtggtgtaccgagatggagagagtgttcgggttcccagtccactacacagatgtcagcaacatgtctagactggccagacagagactgctgggaagaagctggtccgtccctgtgatcagacacctgttcgcccctctgaaggagtacttcgcctgcgtgagcagcggcaacagcaacgccaacagccggggccccagcttctctagcggcctggtgccactgtccctgagagggagccacatgggccccatggagatctacaaaaccgtgagcgcctggaagcggcagcctgtgcgcgtgctgagcctgtttcggaatatcgataaagtcctgaaaagcctgggattcctggagagcggctctggctccggcggtggcaccctgaagtacgtggaggatgtgacaaacgtggtcagacgggatgtggagaagtggggccccttcgatctggtgtacggcagcacccaacccctgggcagctcttgtgaccggtgccctggctggtacatgtttcagttccaccggatcctgcagtacgccctgccgagacaggagtcccagcggccattcttttggattttcatggacaacttgctgctgaccgaggatgaccaggaaactaccactcggttcctgcagaccgaagccgtgaccctgcaggacgtgagaggccgggactaccagaacgccatgcgggtgtggtccaacatccctggactgaaaagcaagcacgcacctctgacccctaaagaagaggagtacctgcaggcccaggtgcggagcagaagcaagctggacgcccctaaggtggatctgctggtgaagaattgcctcctgcccctgagagagtacttcaagtatttcagccagaatagtctgcccctgggaggcagcggcggcggcgcctacggcagcctgagcttcggcgaggtggccatcagcttcagccaggaggagtgggagtgcctggaccccgcccagagggccctgtacagggacgtgatgctggagacctacagcaacctggtgagcctggccggcagcagcatcagcaagcccgacgtgatcaccctgctggagcaggagaaggagccctgggtggtggtgaggagggagaccagcaggtggtaccccgacctggagagcggcggcccaagcagcggcgcccctcctcccagcggcggcaggcggcccaagcagcggcgcccctcctcccagcggcggcagcccagccggctccccaacctctaccgaggagggcacctctgagtccgccacccccgagagcggccctggcacctccaccgagcccagcgagggcagcgcacccggcagccctgccggcagccccacctccacagaggagggaaccagcaccgagcccagcgaaggcagcgccccaggcaccagcaccgagcctagtgagcaggagattaaacggatcaacaagatcagaagaagacttgtgaaagacagcaacaccaagaaggccggcaagacaggccccatgaaaaccctgctggttagagtgatgacacccgatctgagagagcggctggaaaacctgagaaagaagcctgaaaatatcccccagcccatcagcaatacatctagagccaacctgaataagctgctgaccgattacaccgaaatgaagaaggcgatcctgcatgtgtactgggaagagttccagaaggaccctgtgggcctgatgagccgggtggcccagcctgccagcaagaagatcgatcagaacaagctgaaacctgagatggacgagaagggcaacctgaccaccgccggctttgcctgctctcagtgtggccagcccctgttcgtgtacaagctggagcaggtgtctgagaagggcaaggcttacaccaactacttcggacggtgcaatgtggccgagcacgaaaagctgatcctgctggcccagctgaagcccgagaaggatagcgacgaagccgtgacatatagcctgggaaagtttgggcagagggccctggatttctacagcattcatgtgaccaaggagtccacccaccccgtgaagcccctggcccagatcgccggaaacagatacgcctccggacctgtgggaaaggccctgagcgacgcatgtatgggcacaatcgcctccttcctgtctaagtaccaggacatcatcatcgaacaccagaaggtggtgaagggcaaccagaagagactggagagcctgcgggagctggccggcaaggaaaacctggaataccctagcgtgaccctgccacctcagcctcacaccaaggagggcgttgatgcctacaacgaagtgatcgcccgggtgcgaatgtgggtgaacctgaacctgtggcagaagctgaagctaagcagagatgatgccaagcctctgctgagactgaagggattcccttcctttcctctggtcgagagacaggccaacgaagtggactggtgggacatggtgtgtaacgtgaagaagctgatcaacgagaaaaaggaggatggcaaggtgttttggcagaatctggctggctacaagagacaggaagccctgagaccatacctgagcagcgaggaagatcggaagaagggaaagaaattcgctcggtaccagctgggcgacctgctgctgcacctggaaaagaagcacggcgaggactggggaaaggtgtacgacgaggcctgggagcggattgacaagaaagtggaaggcctgagcaagcacatcaagctggaagaggaacggagaagcgaggacgcccagagcaaggccgccctgaccgactggctgcgggctaaggccagcttcgtgatcgagggcctgaaggaggccgacaaggacgagttctgcagatgcgagctgaagctgcagaagtggtacggggacctgcggggaaagcccttcgccatcgaagccgagaacagcatcctggacatcagcggcttcagcaagcagtacaactgtgccttcatctggcagaaggacggcgtgaagaagctgaacctgtacctgatcatcaactacttcaagggcggcaagctgcggttcaagaagatcaaacctgaagccttcgaagccaacagattctacaccgtgatcaacaaaaagagcggcgagatcgtgcccatggaggtgaacttcaacttcgacgaccccaacctgatcatcctgcctctggcctttggcaagagacagggcagagaattcatctggaacgacctgctgtccctggaaaccggcagcctgaagctggccaacggaagagtgatcgagaagacactgtacaacagaagaacccggcaggatgagcctgccctgttcgtggccctgaccttcgagcggcgggaggtcctggactcctccaatatcaaaccaatgaacctgatcggcgtggcaagaggcgaaaacatccccgccgtgatcgccctgaccgaccccgagggctgcccactgagccggtttaaggatagcctgggaaacccaacccacatcctgagaatcggcgagagctataaggagaagcagcggaccatccaggccaagaaggaggtggagcagcggagagccggcggctacagccggaagtacgccagcaaagccaagaatctggcagacgatatggtgagaaacaccgctagagatctgctgtactacgccgtgacccaggatgccatgctgatcttcgccaacctgagccggggcttcggccggcagggcaagcggaccttcatggccgagagacagtacacacggatggaggactggctgaccgccaagctggcctacgagggcctgagcaagacctacctgtccaagacactggcccagtacacctccaagacatgcagcaactgtgggtttaccatcaccagcgccgactacgacagggtgctggagaagctgaagaagacagcaacaggctggatgaccacaattaacggcaaggagctgaaggtggagggccagattacctactacaacagatacaagagacagaacgtagtcaaggacctgtccgtcgagctggatagactgagcgaagaatctgtgaacaacgacatctcctcctggacaaagggcagaagcggagaagctctgagcctcctgaagaaaagattctcccatagacccgtgcaggagaagttcgtgtgcctgaactgcggcttcgagacacacgcagccgagcaagccgccctgaacatcgccagatcctggctgttcctgcggagccaggagtacaagaaataccagacaaacaagacaaccggcaacaccgataagagagccttcgtcgagacctggcagtccttttaccggaagaagcttaaggaggtgtggaaacctgccgtgcggtctggcggatctggcggaggctccaccagccccaagaaaaagagaaaagtctaagctgccttctgcggggcttgccttctggccatgcccttcttctctcccttgcacctgtacctcttggtctttgaataaagcctgagtaggaaggctagcaaaaaaaaaaaaaaaaaaaaaaaaaaaaaaaaaaaaaaaaaaaaaaaaaaaaaaaaaaaaaaaaaaaaaaaaaaaaaaaagcccagccggctccccaacctctaccgaggagggcacctctgagtccgccacccccgagagcggccctggcacctccaccgagcccagcgagggcagcgcacccggcagccctgccggcagccccacctccacagaggagggaaccagcaccgagcccagcgaaggcagcgccccaggcaccagcaccgagcctagtgagcaggagattaaacggatcaacaagatcagaagaagacttgtgaaagacagcaacaccaagaaggccggcaagacaggccccatgaaaaccctgctggttagagtgatgacacccgatctgagagagcggctggaaaacctgagaaagaagcctgaaaatatcccccagcccatcagcaatacatctagagccaacctgaataagctgctgaccgattacaccgaaatgaagaaggcgatcctgcatgtgtactgggaagagttccagaaggaccctgtgggcctgatgagccgggtggcccagcctgccagcaagaagatcgatcagaacaagctgaaacctgagatggacgagaagggcaacctgaccaccgccggctttgcctgctctcagtgtggccagcccctgttcgtgtacaagctggagcaggtgtctgagaagggcaaggcttacaccaactacttcggacggtgcaatgtggccgagcacgaaaagctgatcctgctggcccagctgaagcccgagaaggatagcgacgaagccgtgacatatagcctgggaaagtttgggcagagggccctggatttctacagcattcatgtgaccaaggagtccacccaccccgtgaagcccctggcccagatcgccggaaacagatacgcctccggacctgtgggaaaggccctgagcgacgcatgtatgggcacaatcgcctccttcctgtctaagtaccaggacatcatcatcgaacaccagaaggtggtgaagggcaaccagaagagactggagagcctgcgggagctggccggcaaggaaaacctggaataccctagcgtgaccctgccacctcagcctcacaccaaggagggcgttgatgcctacaacgaagtgatcgcccgggtgcgaatgtgggtgaacctgaacctgtggcagaagctgaagctaagcagagatgatgccaagcctctgctgagactgaagggattcccttcctttcctctggtcgagagacaggccaacgaagtggactggtgggacatggtgtgtaacgtgaagaagctgatcaacgagaaaaaggaggatggcaaggtgttttggcagaatctggctggctacaagagacaggaagccctgagaccatacctgagcagcgaggaagatcggaagaagggaaagaaattcgctcggtaccagctgggcgacctgctgctgcacctggaaaagaagcacggcgaggactggggaaaggtgtacgacgaggcctgggagcggattgacaagaaagtggaaggcctgagcaagcacatcaagctggaagaggaacggagaagcgaggacgcccagagcaaggccgccctgaccgactggctgcgggctaaggccagcttcgtgatcgagggcctgaaggaggccgacaaggacgagttctgcagatgcgagctgaagctgcagaagtggtacggggacctgcggggaaagcccttcgccatcgaagccgagaacagcatcctggacatcagcggcttcagcaagcagtacaactgtgccttcatctggcagaaggacggcgtgaagaagctgaacctgtacctgatcatcaactacttcaagggcggcaagctgcggttcaagaagatcaaacctgaagccttcgaagccaacagattctacaccgtgatcaacaaaaagagcggcgagatcgtgcccatggaggtgaacttcaacttcgacgaccccaacctgatcatcctgcctctggcctttggcaagagacagggcagagaattcatctggaacgacctgctgtccctggaaaccggcagcctgaagctggccaacggaagagtgatcgagaagacactgtacaacagaagaacccggcaggatgagcctgccctgttcgtggccctgaccttcgagcggcgggaggtcctggactcctccaatatcaaaccaatgaacctgatcggcgtggcaagaggcgaaaacatccccgccgtgatcgccctgaccgaccccgagggctgcccactgagccggtttaaggatagcctgggaaacccaacccacatcctgagaatcggcgagagctataaggagaagcagcggaccatccaggccaagaaggaggtggagcagcggagagccggcggctacagccggaagtacgccagcaaagccaagaatctggcagacgatatggtgagaaacaccgctagagatctgctgtactacgccgtgacccaggatgccatgctgatcttcgccaacctgagccggggcttcggccggcagggcaagcggaccttcatggccgagagacagtacacacggatggaggactggctgaccgccaagctggcctacgagggcctgagcaagacctacctgtccaagacactggcccagtacacctccaagacatgcagcaactgtgggtttaccatcaccagcgccgactacgacagggtgctggagaagctgaagaagacagcaacaggctggatgaccacaattaacggcaaggagctgaaggtggagggccagattacctactacaacagatacaagagacagaacgtagtcaaggacctgtccgtcgagctggatagactgagcgaagaatctgtgaacaacgacatctcctcctggacaaagggcagaagcggagaagctctgagcctcctgaagaaaagattctcccatagacccgtgcaggagaagttcgtgtgcctgaactgcggcttcgagacacacgcagccgagcaagccgccctgaacatcgccagatcctggctgttcctgcggagccaggagtacaagaaataccagacaaacaagacaaccggcaacaccgataagagagccttcgtcgagacctggcagtccttttaccggaagaagcttaaggaggtgtggaaacctgccgtgcggtctggcggatctggcggaggctccaccagccccaagaaaaagagaaaagtctaagctgccttctgcggggcttgccttctggccatgcccttcttctctcccttgcacctgtacctcttggtctttgaataaagcctgagtaggaaggctagcaaaaaaaaaaaaaaaaaaaaaaaaaaaaaaaaaaaaaaaaaaaaaaaaaaaaaaaaaaaaaaaaaaaaaaaaaaaaaaaa

SEQ ID NO: 9801 - RNA, 8787 nt, synthetic construct
  source 1..8787: mol_type = other RNA
aggaaataagagagaaaagaagagtaagaagaaatataagagccaccatggcccctaagaagaagcgtaaagtgagccggatgaaccacgaccaggagttcgacccccctaaggtgtaccctcccgtccccgccgagaagagaaagcccatccgggtcctgagcctgttcgatggcatcgccaccggtctgctggtgctgaaggacctgggcatccaggtggataggtacattgcctccgaggtgtgcgaggactccatcaccgtgggaatggtgcgtcatcagggcaagatcatgtacgtgggcgacgtgcggagcgtgacacagaagcatatccaggagtggggccctttcgacctggtgatcggcggcagcccttgcaatgacctgagcatcgtgaacccagcccggaagggcctgtacgagggaaccggcagactgttcttcgagttttacagactgctgcacgacgcccggcctaaggaaggcgacgaccggcccttcttttggctgttcgagaatgtggtggccatgggagtcagcgacaagcgggatattagccggttcctggagagcaaccccgtgatgatcgatgccaaggaagtgagcgccgcccaccgggccagatacttctggggcaatctgcctggcatgaacagacccctggccagcaccgtgaacgacaagctggagctgcaggagtgcctggagcacggccggatcgccaagttcagcaaggtgagaaccatcaccacccgaagcaacagcatcaaacaaggcaaggaccagcactttcctgtgttcatgaacgagaaggaggacatcctgtggtgtaccgagatggagagagtgttcgggttcccagtccactacacagatgtcagcaacatgtctagactggccagacagagactgctgggaagaagctggtccgtccctgtgatcagacacctgttcgcccctctgaaggagtacttcgcctgcgtgagcagcggcaacagcaacgccaacagccggggccccagcttctctagcggcctggtgccactgtccctgagagggagccacatgggccccatggagatctacaaaaccgtgagcgcctggaagcggcagcctgtgcgcgtgctgagcctgtttcggaatatcgataaagtcctgaaaagcctgggattcctggagagcggctctggctccggcggtggcaccctgaagtacgtggaggatgtgacaaacgtggtcagacgggatgtggagaagtggggccccttcgatctggtgtacggcagcacccaacccctgggcagctcttgtgaccggtgccctggctggtacatgtttcagttccaccggatcctgcagtacgccctgccgagacaggagtcccagcggccattcttttggattttcatggacaacttgctgctgaccgaggatgaccaggaaactaccactcggttcctgcagaccgaagccgtgaccctgcaggacgtgagaggccgggactaccagaacgccatgcgggtgtggtccaacatccctggactgaaaagcaagcacgcacctctgacccctaaagaagaggagtacctgcaggcccaggtgcggagcagaagcaagctggacgcccctaaggtggatctgctggtgaagaattgcctcctgcccctgagagagtacttcaagtatttcagccagaatagtctgcccctgggaggcagcggcggcggccagctgaccttcgaggacgtggccctgagcttcagcaaggaggagtggcagatcatggaccccaaccagaagaccctgtacatcgacgtgatgagggagatctacgagaccgtgaccagcctgggcctgaagctgaagaacgacaccggcaacgaccagcccgtgagcctgagcaccagcgagatccagcccagcggctgcaaggtgctgaggaaggccaggatgaaggtggcccagaccaccggcggcccaagcagcggcgcccctcctcccagcggcggcaggcggcccaagcagcggcgcccctcctcccagcggcggcagcccagccggctccccaacctctaccgaggagggcacctctgagtccgccacccccgagagcggccctggcacctccaccgagcccagcgagggcagcgcacccggcagccctgccggcagccccacctccacagaggagggaaccagcaccgagcccagcgaaggcagcgccccaggcaccagcaccgagcctagtgagcaggagattaaacggatcaacaagatcagaagaagacttgtgaaagacagcaacaccaagaaggccggcaagacaggccccatgaaaaccctgctggttagagtgatgacacccgatctgagagagcggctggaaaacctgagaaagaagcctgaaaatatcccccagcccatcagcaatacatctagagccaacctgaataagctgctgaccgattacaccgaaatgaagaaggcgatcctgcatgtgtactgggaagagttccagaaggaccctgtgggcctgatgagccgggtggcccagcctgccagcaagaagatcgatcagaacaagctgaaacctgagatggacgagaagggcaacctgaccaccgccggctttgcctgctctcagtgtggccagcccctgttcgtgtacaagctggagcaggtgtctgagaagggcaaggcttacaccaactacttcggacggtgcaatgtggccgagcacgaaaagctgatcctgctggcccagctgaagcccgagaaggatagcgacgaagccgtgacatatagcctgggaaagtttgggcagagggccctggatttctacagcattcatgtgaccaaggagtccacccaccccgtgaagcccctggcccagatcgccggaaacagatacgcctccggacctgtgggaaaggccctgagcgacgcatgtatgggcacaatcgcctccttcctgtctaagtaccaggacatcatcatcgaacaccagaaggtggtgaagggcaaccagaagagactggagagcctgcgggagctggccggcaaggaaaacctggaataccctagcgtgaccctgccacctcagcctcacaccaaggagggcgttgatgcctacaacgaagtgatcgcccgggtgcgaatgtgggtgaacctgaacctgtggcagaagctgaagctaagcagagatgatgccaagcctctgctgagactgaagggattcccttcctttcctctggtcgagagacaggccaacgaagtggactggtgggacatggtgtgtaacgtgaagaagctgatcaacgagaaaaaggaggatggcaaggtgttttggcagaatctggctggctacaagagacaggaagccctgagaccatacctgagcagcgaggaagatcggaagaagggaaagaaattcgctcggtaccagctgggcgacctgctgctgcacctggaaaagaagcacggcgaggactggggaaaggtgtacgacgaggcctgggagcggattgacaagaaagtggaaggcctgagcaagcacatcaagctggaagaggaacggagaagcgaggacgcccagagcaaggccgccctgaccgactggctgcgggctaaggccagcttcgtgatcgagggcctgaaggaggccgacaaggacgagttctgcagatgcgagctgaagctgcagaagtggtacggggacctgcggggaaagcccttcgccatcgaagccgagaacagcatcctggacatcagcggcttcagcaagcagtacaactgtgccttcatctggcagaaggacggcgtgaagaagctgaacctgtacctgatcatcaactacttcaagggcggcaagctgcggttcaagaagatcaaacctgaagccttcgaagccaacagattctacaccgtgatcaacaaaaagagcggcgagatcgtgcccatggaggtgaacttcaacttcgacgaccccaacctgatcatcctgcctctggcctttggcaagagacagggcagagaattcatctggaacgacctgctgtccctggaaaccggcagcctgaagctggccaacggaagagtgatcgagaagacactgtacaacagaagaacccggcaggatgagcctgccctgttcgtggccctgaccttcgagcggcgggaggtcctggactcctccaatatcaaaccaatgaacctgatcggcgtggcaagaggcgaaaacatccccgccgtgatcgccctgaccgaccccgagggctgcccactgagccggtttaaggatagcctgggaaacccaacccacatcctgagaatcggcgagagctataaggagaagcagcggaccatccaggccaagaaggaggtggagcagcggagagccggcggctacagccggaagtacgccagcaaagccaagaatctggcagacgatatggtgagaaacaccgctagagatctgctgtactacgccgtgacccaggatgccatgctgatcttcgccaacctgagccggggcttcggccggcagggcaagcggaccttcatggccgagagacagtacacacggatggaggactggctgaccgccaagctggcctacgagggcctgagcaagacctacctgtccaagacactggcccagtacacctccaagacatgcagcaactgtgggtttaccatcaccagcgccgactacgacagggtgctggagaagctgaagaagacagcaacaggctggatgaccacaattaacggcaaggagctgaaggtggagggccagattacctactacaacagatacaagagacagaacgtagtcaaggacctgtccgtcgagctggatagactgagcgaagaatctgtgaacaacgacatctcctcctggacaaagggcagaagcggagaagctctgagcctcctgaagaaaagattctcccatagacccgtgcaggagaagttcgtgtgcctgaactgcggcttcgagacacacgcagccgagcaagccgccctgaacatcgccagatcctggctgttcctgcggagccaggagtacaagaaataccagacaaacaagacaaccggcaacaccgataagagagccttcgtcgagacctggcagtccttttaccggaagaagcttaaggaggtgtggaaacctgccgtgcggtctggcggatctggcggaggctccaccagccccaagaaaaagagaaaagtctaagctgccttctgcggggcttgccttctggccatgcccttcttctctcccttgcacctgtacctcttggtctttgaataaagcctgagtaggaaggctagcaaaaaaaaaaaaaaaaaaaaaaaaaaaaaaaaaaaaaaaaaaaaaaaaaaaaaaaaaaaaaaaaaaaaaaaaaaaaaaaagcccagccggctccccaacctctaccgaggagggcacctctgagtccgccacccccgagagcggccctggcacctccaccgagcccagcgagggcagcgcacccggcagccctgccggcagccccacctccacagaggagggaaccagcaccgagcccagcgaaggcagcgccccaggcaccagcaccgagcctagtgagcaggagattaaacggatcaacaagatcagaagaagacttgtgaaagacagcaacaccaagaaggccggcaagacaggccccatgaaaaccctgctggttagagtgatgacacccgatctgagagagcggctggaaaacctgagaaagaagcctgaaaatatcccccagcccatcagcaatacatctagagccaacctgaataagctgctgaccgattacaccgaaatgaagaaggcgatcctgcatgtgtactgggaagagttccagaaggaccctgtgggcctgatgagccgggtggcccagcctgccagcaagaagatcgatcagaacaagctgaaacctgagatggacgagaagggcaacctgaccaccgccggctttgcctgctctcagtgtggccagcccctgttcgtgtacaagctggagcaggtgtctgagaagggcaaggcttacaccaactacttcggacggtgcaatgtggccgagcacgaaaagctgatcctgctggcccagctgaagcccgagaaggatagcgacgaagccgtgacatatagcctgggaaagtttgggcagagggccctggatttctacagcattcatgtgaccaaggagtccacccaccccgtgaagcccctggcccagatcgccggaaacagatacgcctccggacctgtgggaaaggccctgagcgacgcatgtatgggcacaatcgcctccttcctgtctaagtaccaggacatcatcatcgaacaccagaaggtggtgaagggcaaccagaagagactggagagcctgcgggagctggccggcaaggaaaacctggaataccctagcgtgaccctgccacctcagcctcacaccaaggagggcgttgatgcctacaacgaagtgatcgcccgggtgcgaatgtgggtgaacctgaacctgtggcagaagctgaagctaagcagagatgatgccaagcctctgctgagactgaagggattcccttcctttcctctggtcgagagacaggccaacgaagtggactggtgggacatggtgtgtaacgtgaagaagctgatcaacgagaaaaaggaggatggcaaggtgttttggcagaatctggctggctacaagagacaggaagccctgagaccatacctgagcagcgaggaagatcggaagaagggaaagaaattcgctcggtaccagctgggcgacctgctgctgcacctggaaaagaagcacggcgaggactggggaaaggtgtacgacgaggcctgggagcggattgacaagaaagtggaaggcctgagcaagcacatcaagctggaagaggaacggagaagcgaggacgcccagagcaaggccgccctgaccgactggctgcgggctaaggccagcttcgtgatcgagggcctgaaggaggccgacaaggacgagttctgcagatgcgagctgaagctgcagaagtggtacggggacctgcggggaaagcccttcgccatcgaagccgagaacagcatcctggacatcagcggcttcagcaagcagtacaactgtgccttcatctggcagaaggacggcgtgaagaagctgaacctgtacctgatcatcaactacttcaagggcggcaagctgcggttcaagaagatcaaacctgaagccttcgaagccaacagattctacaccgtgatcaacaaaaagagcggcgagatcgtgcccatggaggtgaacttcaacttcgacgaccccaacctgatcatcctgcctctggcctttggcaagagacagggcagagaattcatctggaacgacctgctgtccctggaaaccggcagcctgaagctggccaacggaagagtgatcgagaagacactgtacaacagaagaacccggcaggatgagcctgccctgttcgtggccctgaccttcgagcggcgggaggtcctggactcctccaatatcaaaccaatgaacctgatcggcgtggcaagaggcgaaaacatccccgccgtgatcgccctgaccgaccccgagggctgcccactgagccggtttaaggatagcctgggaaacccaacccacatcctgagaatcggcgagagctataaggagaagcagcggaccatccaggccaagaaggaggtggagcagcggagagccggcggctacagccggaagtacgccagcaaagccaagaatctggcagacgatatggtgagaaacaccgctagagatctgctgtactacgccgtgacccaggatgccatgctgatcttcgccaacctgagccggggcttcggccggcagggcaagcggaccttcatggccgagagacagtacacacggatggaggactggctgaccgccaagctggcctacgagggcctgagcaagacctacctgtccaagacactggcccagtacacctccaagacatgcagcaactgtgggtttaccatcaccagcgccgactacgacagggtgctggagaagctgaagaagacagcaacaggctggatgaccacaattaacggcaaggagctgaaggtggagggccagattacctactacaacagatacaagagacagaacgtagtcaaggacctgtccgtcgagctggatagactgagcgaagaatctgtgaacaacgacatctcctcctggacaaagggcagaagcggagaagctctgagcctcctgaagaaaagattctcccatagacccgtgcaggagaagttcgtgtgcctgaactgcggcttcgagacacacgcagccgagcaagccgccctgaacatcgccagatcctggctgttcctgcggagccaggagtacaagaaataccagacaaacaagacaaccggcaacaccgataagagagccttcgtcgagacctggcagtccttttaccggaagaagcttaaggaggtgtggaaacctgccgtgcggtctggcggatctggcggaggctccaccagccccaagaaaaagagaaaagtctaagctgccttctgcggggcttgccttctggccatgcccttcttctctcccttgcacctgtacctcttggtctttgaataaagcctgagtaggaaggctagcaaaaaaaaaaaaaaaaaaaaaaaaaaaaaaaaaaaaaaaaaaaaaaaaaaaaaaaaaaaaaaaaaaaaaaaaaaaaaaaa

SEQ ID NO: 9802 - RNA, 8787 nt, synthetic construct
  source 1..8787: mol_type = other RNA
aggaaataagagagaaaagaagagtaagaagaaatataagagccaccatggcccctaagaagaagcgtaaagtgagccggatgaaccacgaccaggagttcgacccccctaaggtgtaccctcccgtccccgccgagaagagaaagcccatccgggtcctgagcctgttcgatggcatcgccaccggtctgctggtgctgaaggacctgggcatccaggtggataggtacattgcctccgaggtgtgcgaggactccatcaccgtgggaatggtgcgtcatcagggcaagatcatgtacgtgggcgacgtgcggagcgtgacacagaagcatatccaggagtggggccctttcgacctggtgatcggcggcagcccttgcaatgacctgagcatcgtgaacccagcccggaagggcctgtacgagggaaccggcagactgttcttcgagttttacagactgctgcacgacgcccggcctaaggaaggcgacgaccggcccttcttttggctgttcgagaatgtggtggccatgggagtcagcgacaagcgggatattagccggttcctggagagcaaccccgtgatgatcgatgccaaggaagtgagcgccgcccaccgggccagatacttctggggcaatctgcctggcatgaacagacccctggccagcaccgtgaacgacaagctggagctgcaggagtgcctggagcacggccggatcgccaagttcagcaaggtgagaaccatcaccacccgaagcaacagcatcaaacaaggcaaggaccagcactttcctgtgttcatgaacgagaaggaggacatcctgtggtgtaccgagatggagagagtgttcgggttcccagtccactacacagatgtcagcaacatgtctagactggccagacagagactgctgggaagaagctggtccgtccctgtgatcagacacctgttcgcccctctgaaggagtacttcgcctgcgtgagcagcggcaacagcaacgccaacagccggggccccagcttctctagcggcctggtgccactgtccctgagagggagccacatgggccccatggagatctacaaaaccgtgagcgcctggaagcggcagcctgtgcgcgtgctgagcctgtttcggaatatcgataaagtcctgaaaagcctgggattcctggagagcggctctggctccggcggtggcaccctgaagtacgtggaggatgtgacaaacgtggtcagacgggatgtggagaagtggggccccttcgatctggtgtacggcagcacccaacccctgggcagctcttgtgaccggtgccctggctggtacatgtttcagttccaccggatcctgcagtacgccctgccgagacaggagtcccagcggccattcttttggattttcatggacaacttgctgctgaccgaggatgaccaggaaactaccactcggttcctgcagaccgaagccgtgaccctgcaggacgtgagaggccgggactaccagaacgccatgcgggtgtggtccaacatccctggactgaaaagcaagcacgcacctctgacccctaaagaagaggagtacctgcaggcccaggtgcggagcagaagcaagctggacgcccctaaggtggatctgctggtgaagaattgcctcctgcccctgagagagtacttcaagtatttcagccagaatagtctgcccctgggaggcagcggcggcggcgagaagggccccctgaccttcagggacgtggtgatcgagttcagccaggaggagtggcagtgcctggacaccgcccagcaggacctgtacaggaaggtgatgctggagaacttcaggaacctggtgttcctgggcatcgacgtgagcaagcccgacctgatcacctgcctggagcagggcaagaacccctggaacatgaagaggcacagcatggtggccaccccccccggcgtgttcttcgtgggcggcccaagcagcggcgcccctcctcccagcggcggcaggcggcccaagcagcggcgcccctcctcccagcggcggcagcccagccggctccccaacctctaccgaggagggcacctctgagtccgccacccccgagagcggccctggcacctccaccgagcccagcgagggcagcgcacccggcagccctgccggcagccccacctccacagaggagggaaccagcaccgagcccagcgaaggcagcgccccaggcaccagcaccgagcctagtgagcaggagattaaacggatcaacaagatcagaagaagacttgtgaaagacagcaacaccaagaaggccggcaagacaggccccatgaaaaccctgctggttagagtgatgacacccgatctgagagagcggctggaaaacctgagaaagaagcctgaaaatatcccccagcccatcagcaatacatctagagccaacctgaataagctgctgaccgattacaccgaaatgaagaaggcgatcctgcatgtgtactgggaagagttccagaaggaccctgtgggcctgatgagccgggtggcccagcctgccagcaagaagatcgatcagaacaagctgaaacctgagatggacgagaagggcaacctgaccaccgccggctttgcctgctctcagtgtggccagcccctgttcgtgtacaagctggagcaggtgtctgagaagggcaaggcttacaccaactacttcggacggtgcaatgtggccgagcacgaaaagctgatcctgctggcccagctgaagcccgagaaggatagcgacgaagccgtgacatatagcctgggaaagtttgggcagagggccctggatttctacagcattcatgtgaccaaggagtccacccaccccgtgaagcccctggcccagatcgccggaaacagatacgcctccggacctgtgggaaaggccctgagcgacgcatgtatgggcacaatcgcctccttcctgtctaagtaccaggacatcatcatcgaacaccagaaggtggtgaagggcaaccagaagagactggagagcctgcgggagctggccggcaaggaaaacctggaataccctagcgtgaccctgccacctcagcctcacaccaaggagggcgttgatgcctacaacgaagtgatcgcccgggtgcgaatgtgggtgaacctgaacctgtggcagaagctgaagctaagcagagatgatgccaagcctctgctgagactgaagggattcccttcctttcctctggtcgagagacaggccaacgaagtggactggtgggacatggtgtgtaacgtgaagaagctgatcaacgagaaaaaggaggatggcaaggtgttttggcagaatctggctggctacaagagacaggaagccctgagaccatacctgagcagcgaggaagatcggaagaagggaaagaaattcgctcggtaccagctgggcgacctgctgctgcacctggaaaagaagcacggcgaggactggggaaaggtgtacgacgaggcctgggagcggattgacaagaaagtggaaggcctgagcaagcacatcaagctggaagaggaacggagaagcgaggacgcccagagcaaggccgccctgaccgactggctgcgggctaaggccagcttcgtgatcgagggcctgaaggaggccgacaaggacgagttctgcagatgcgagctgaagctgcagaagtggtacggggacctgcggggaaagcccttcgccatcgaagccgagaacagcatcctggacatcagcggcttcagcaagcagtacaactgtgccttcatctggcagaaggacggcgtgaagaagctgaacctgtacctgatcatcaactacttcaagggcggcaagctgcggttcaagaagatcaaacctgaagccttcgaagccaacagattctacaccgtgatcaacaaaaagagcggcgagatcgtgcccatggaggtgaacttcaacttcgacgaccccaacctgatcatcctgcctctggcctttggcaagagacagggcagagaattcatctggaacgacctgctgtccctggaaaccggcagcctgaagctggccaacggaagagtgatcgagaagacactgtacaacagaagaacccggcaggatgagcctgccctgttcgtggccctgaccttcgagcggcgggaggtcctggactcctccaatatcaaaccaatgaacctgatcggcgtggcaagaggcgaaaacatccccgccgtgatcgccctgaccgaccccgagggctgcccactgagccggtttaaggatagcctgggaaacccaacccacatcctgagaatcggcgagagctataaggagaagcagcggaccatccaggccaagaaggaggtggagcagcggagagccggcggctacagccggaagtacgccagcaaagccaagaatctggcagacgatatggtgagaaacaccgctagagatctgctgtactacgccgtgacccaggatgccatgctgatcttcgccaacctgagccggggcttcggccggcagggcaagcggaccttcatggccgagagacagtacacacggatggaggactggctgaccgccaagctggcctacgagggcctgagcaagacctacctgtccaagacactggcccagtacacctccaagacatgcagcaactgtgggtttaccatcaccagcgccgactacgacagggtgctggagaagctgaagaagacagcaacaggctggatgaccacaattaacggcaaggagctgaaggtggagggccagattacctactacaacagatacaagagacagaacgtagtcaaggacctgtccgtcgagctggatagactgagcgaagaatctgtgaacaacgacatctcctcctggacaaagggcagaagcggagaagctctgagcctcctgaagaaaagattctcccatagacccgtgcaggagaagttcgtgtgcctgaactgcggcttcgagacacacgcagccgagcaagccgccctgaacatcgccagatcctggctgttcctgcggagccaggagtacaagaaataccagacaaacaagacaaccggcaacaccgataagagagccttcgtcgagacctggcagtccttttaccggaagaagcttaaggaggtgtggaaacctgccgtgcggtctggcggatctggcggaggctccaccagccccaagaaaaagagaaaagtctaagctgccttctgcggggcttgccttctggccatgcccttcttctctcccttgcacctgtacctcttggtctttgaataaagcctgagtaggaaggctagcaaaaaaaaaaaaaaaaaaaaaaaaaaaaaaaaaaaaaaaaaaaaaaaaaaaaaaaaaaaaaaaaaaaaaaaaaaaaaaaagcccagccggctccccaacctctaccgaggagggcacctctgagtccgccacccccgagagcggccctggcacctccaccgagcccagcgagggcagcgcacccggcagccctgccggcagccccacctccacagaggagggaaccagcaccgagcccagcgaaggcagcgccccaggcaccagcaccgagcctagtgagcaggagattaaacggatcaacaagatcagaagaagacttgtgaaagacagcaacaccaagaaggccggcaagacaggccccatgaaaaccctgctggttagagtgatgacacccgatctgagagagcggctggaaaacctgagaaagaagcctgaaaatatcccccagcccatcagcaatacatctagagccaacctgaataagctgctgaccgattacaccgaaatgaagaaggcgatcctgcatgtgtactgggaagagttccagaaggaccctgtgggcctgatgagccgggtggcccagcctgccagcaagaagatcgatcagaacaagctgaaacctgagatggacgagaagggcaacctgaccaccgccggctttgcctgctctcagtgtggccagcccctgttcgtgtacaagctggagcaggtgtctgagaagggcaaggcttacaccaactacttcggacggtgcaatgtggccgagcacgaaaagctgatcctgctggcccagctgaagcccgagaaggatagcgacgaagccgtgacatatagcctgggaaagtttgggcagagggccctggatttctacagcattcatgtgaccaaggagtccacccaccccgtgaagcccctggcccagatcgccggaaacagatacgcctccggacctgtgggaaaggccctgagcgacgcatgtatgggcacaatcgcctccttcctgtctaagtaccaggacatcatcatcgaacaccagaaggtggtgaagggcaaccagaagagactggagagcctgcgggagctggccggcaaggaaaacctggaataccctagcgtgaccctgccacctcagcctcacaccaaggagggcgttgatgcctacaacgaagtgatcgcccgggtgcgaatgtgggtgaacctgaacctgtggcagaagctgaagctaagcagagatgatgccaagcctctgctgagactgaagggattcccttcctttcctctggtcgagagacaggccaacgaagtggactggtgggacatggtgtgtaacgtgaagaagctgatcaacgagaaaaaggaggatggcaaggtgttttggcagaatctggctggctacaagagacaggaagccctgagaccatacctgagcagcgaggaagatcggaagaagggaaagaaattcgctcggtaccagctgggcgacctgctgctgcacctggaaaagaagcacggcgaggactggggaaaggtgtacgacgaggcctgggagcggattgacaagaaagtggaaggcctgagcaagcacatcaagctggaagaggaacggagaagcgaggacgcccagagcaaggccgccctgaccgactggctgcgggctaaggccagcttcgtgatcgagggcctgaaggaggccgacaaggacgagttctgcagatgcgagctgaagctgcagaagtggtacggggacctgcggggaaagcccttcgccatcgaagccgagaacagcatcctggacatcagcggcttcagcaagcagtacaactgtgccttcatctggcagaaggacggcgtgaagaagctgaacctgtacctgatcatcaactacttcaagggcggcaagctgcggttcaagaagatcaaacctgaagccttcgaagccaacagattctacaccgtgatcaacaaaaagagcggcgagatcgtgcccatggaggtgaacttcaacttcgacgaccccaacctgatcatcctgcctctggcctttggcaagagacagggcagagaattcatctggaacgacctgctgtccctggaaaccggcagcctgaagctggccaacggaagagtgatcgagaagacactgtacaacagaagaacccggcaggatgagcctgccctgttcgtggccctgaccttcgagcggcgggaggtcctggactcctccaatatcaaaccaatgaacctgatcggcgtggcaagaggcgaaaacatccccgccgtgatcgccctgaccgaccccgagggctgcccactgagccggtttaaggatagcctgggaaacccaacccacatcctgagaatcggcgagagctataaggagaagcagcggaccatccaggccaagaaggaggtggagcagcggagagccggcggctacagccggaagtacgccagcaaagccaagaatctggcagacgatatggtgagaaacaccgctagagatctgctgtactacgccgtgacccaggatgccatgctgatcttcgccaacctgagccggggcttcggccggcagggcaagcggaccttcatggccgagagacagtacacacggatggaggactggctgaccgccaagctggcctacgagggcctgagcaagacctacctgtccaagacactggcccagtacacctccaagacatgcagcaactgtgggtttaccatcaccagcgccgactacgacagggtgctggagaagctgaagaagacagcaacaggctggatgaccacaattaacggcaaggagctgaaggtggagggccagattacctactacaacagatacaagagacagaacgtagtcaaggacctgtccgtcgagctggatagactgagcgaagaatctgtgaacaacgacatctcctcctggacaaagggcagaagcggagaagctctgagcctcctgaagaaaagattctcccatagacccgtgcaggagaagttcgtgtgcctgaactgcggcttcgagacacacgcagccgagcaagccgccctgaacatcgccagatcctggctgttcctgcggagccaggagtacaagaaataccagacaaacaagacaaccggcaacaccgataagagagccttcgtcgagacctggcagtccttttaccggaagaagcttaaggaggtgtggaaacctgccgtgcggtctggcggatctggcggaggctccaccagccccaagaaaaagagaaaagtctaagctgccttctgcggggcttgccttctggccatgcccttcttctctcccttgcacctgtacctcttggtctttgaataaagcctgagtaggaaggctagcaaaaaaaaaaaaaaaaaaaaaaaaaaaaaaaaaaaaaaaaaaaaaaaaaaaaaaaaaaaaaaaaaaaaaaaaaaaaaaaa

SEQ ID NO: 9803 - RNA, 8787 nt, synthetic construct
  source 1..8787: mol_type = other RNA
aggaaataagagagaaaagaagagtaagaagaaatataagagccaccatggcccctaagaagaagcgtaaagtgagccggatgaaccacgaccaggagttcgacccccctaaggtgtaccctcccgtccccgccgagaagagaaagcccatccgggtcctgagcctgttcgatggcatcgccaccggtctgctggtgctgaaggacctgggcatccaggtggataggtacattgcctccgaggtgtgcgaggactccatcaccgtgggaatggtgcgtcatcagggcaagatcatgtacgtgggcgacgtgcggagcgtgacacagaagcatatccaggagtggggccctttcgacctggtgatcggcggcagcccttgcaatgacctgagcatcgtgaacccagcccggaagggcctgtacgagggaaccggcagactgttcttcgagttttacagactgctgcacgacgcccggcctaaggaaggcgacgaccggcccttcttttggctgttcgagaatgtggtggccatgggagtcagcgacaagcgggatattagccggttcctggagagcaaccccgtgatgatcgatgccaaggaagtgagcgccgcccaccgggccagatacttctggggcaatctgcctggcatgaacagacccctggccagcaccgtgaacgacaagctggagctgcaggagtgcctggagcacggccggatcgccaagttcagcaaggtgagaaccatcaccacccgaagcaacagcatcaaacaaggcaaggaccagcactttcctgtgttcatgaacgagaaggaggacatcctgtggtgtaccgagatggagagagtgttcgggttcccagtccactacacagatgtcagcaacatgtctagactggccagacagagactgctgggaagaagctggtccgtccctgtgatcagacacctgttcgcccctctgaaggagtacttcgcctgcgtgagcagcggcaacagcaacgccaacagccggggccccagcttctctagcggcctggtgccactgtccctgagagggagccacatgggccccatggagatctacaaaaccgtgagcgcctggaagcggcagcctgtgcgcgtgctgagcctgtttcggaatatcgataaagtcctgaaaagcctgggattcctggagagcggctctggctccggcggtggcaccctgaagtacgtggaggatgtgacaaacgtggtcagacgggatgtggagaagtggggccccttcgatctggtgtacggcagcacccaacccctgggcagctcttgtgaccggtgccctggctggtacatgtttcagttccaccggatcctgcagtacgccctgccgagacaggagtcccagcggccattcttttggattttcatggacaacttgctgctgaccgaggatgaccaggaaactaccactcggttcctgcagaccgaagccgtgaccctgcaggacgtgagaggccgggactaccagaacgccatgcgggtgtggtccaacatccctggactgaaaagcaagcacgcacctctgacccctaaagaagaggagtacctgcaggcccaggtgcggagcagaagcaagctggacgcccctaaggtggatctgctggtgaagaattgcctcctgcccctgagagagtacttcaagtatttcagccagaatagtctgcccctgggaggcagcggcggcggcttccagcacctggtgatgttcagggacgtggccgtggacttcagccaggaggagtgggagtgcctgaacagctaccagaggaacctgtacagggacgtgatcctggagaactacagcaacctggtgagcgtgggctgcaccatcagcaagcccgacgtgatcaccctgctggagcagggcaaggagccctggatggtggtgagggacgagaggaggaggaggagcctggacctggaggccaggggcggcccaagcagcggcgcccctcctcccagcggcggcaggcggcccaagcagcggcgcccctcctcccagcggcggcagcccagccggctccccaacctctaccgaggagggcacctctgagtccgccacccccgagagcggccctggcacctccaccgagcccagcgagggcagcgcacccggcagccctgccggcagccccacctccacagaggagggaaccagcaccgagcccagcgaaggcagcgccccaggcaccagcaccgagcctagtgagcaggagattaaacggatcaacaagatcagaagaagacttgtgaaagacagcaacaccaagaaggccggcaagacaggccccatgaaaaccctgctggttagagtgatgacacccgatctgagagagcggctggaaaacctgagaaagaagcctgaaaatatcccccagcccatcagcaatacatctagagccaacctgaataagctgctgaccgattacaccgaaatgaagaaggcgatcctgcatgtgtactgggaagagttccagaaggaccctgtgggcctgatgagccgggtggcccagcctgccagcaagaagatcgatcagaacaagctgaaacctgagatggacgagaagggcaacctgaccaccgccggctttgcctgctctcagtgtggccagcccctgttcgtgtacaagctggagcaggtgtctgagaagggcaaggcttacaccaactacttcggacggtgcaatgtggccgagcacgaaaagctgatcctgctggcccagctgaagcccgagaaggatagcgacgaagccgtgacatatagcctgggaaagtttgggcagagggccctggatttctacagcattcatgtgaccaaggagtccacccaccccgtgaagcccctggcccagatcgccggaaacagatacgcctccggacctgtgggaaaggccctgagcgacgcatgtatgggcacaatcgcctccttcctgtctaagtaccaggacatcatcatcgaacaccagaaggtggtgaagggcaaccagaagagactggagagcctgcgggagctggccggcaaggaaaacctggaataccctagcgtgaccctgccacctcagcctcacaccaaggagggcgttgatgcctacaacgaagtgatcgcccgggtgcgaatgtgggtgaacctgaacctgtggcagaagctgaagctaagcagagatgatgccaagcctctgctgagactgaagggattcccttcctttcctctggtcgagagacaggccaacgaagtggactggtgggacatggtgtgtaacgtgaagaagctgatcaacgagaaaaaggaggatggcaaggtgttttggcagaatctggctggctacaagagacaggaagccctgagaccatacctgagcagcgaggaagatcggaagaagggaaagaaattcgctcggtaccagctgggcgacctgctgctgcacctggaaaagaagcacggcgaggactggggaaaggtgtacgacgaggcctgggagcggattgacaagaaagtggaaggcctgagcaagcacatcaagctggaagaggaacggagaagcgaggacgcccagagcaaggccgccctgaccgactggctgcgggctaaggccagcttcgtgatcgagggcctgaaggaggccgacaaggacgagttctgcagatgcgagctgaagctgcagaagtggtacggggacctgcggggaaagcccttcgccatcgaagccgagaacagcatcctggacatcagcggcttcagcaagcagtacaactgtgccttcatctggcagaaggacggcgtgaagaagctgaacctgtacctgatcatcaactacttcaagggcggcaagctgcggttcaagaagatcaaacctgaagccttcgaagccaacagattctacaccgtgatcaacaaaaagagcggcgagatcgtgcccatggaggtgaacttcaacttcgacgaccccaacctgatcatcctgcctctggcctttggcaagagacagggcagagaattcatctggaacgacctgctgtccctggaaaccggcagcctgaagctggccaacggaagagtgatcgagaagacactgtacaacagaagaacccggcaggatgagcctgccctgttcgtggccctgaccttcgagcggcgggaggtcctggactcctccaatatcaaaccaatgaacctgatcggcgtggcaagaggcgaaaacatccccgccgtgatcgccctgaccgaccccgagggctgcccactgagccggtttaaggatagcctgggaaacccaacccacatcctgagaatcggcgagagctataaggagaagcagcggaccatccaggccaagaaggaggtggagcagcggagagccggcggctacagccggaagtacgccagcaaagccaagaatctggcagacgatatggtgagaaacaccgctagagatctgctgtactacgccgtgacccaggatgccatgctgatcttcgccaacctgagccggggcttcggccggcagggcaagcggaccttcatggccgagagacagtacacacggatggaggactggctgaccgccaagctggcctacgagggcctgagcaagacctacctgtccaagacactggcccagtacacctccaagacatgcagcaactgtgggtttaccatcaccagcgccgactacgacagggtgctggagaagctgaagaagacagcaacaggctggatgaccacaattaacggcaaggagctgaaggtggagggccagattacctactacaacagatacaagagacagaacgtagtcaaggacctgtccgtcgagctggatagactgagcgaagaatctgtgaacaacgacatctcctcctggacaaagggcagaagcggagaagctctgagcctcctgaagaaaagattctcccatagacccgtgcaggagaagttcgtgtgcctgaactgcggcttcgagacacacgcagccgagcaagccgccctgaacatcgccagatcctggctgttcctgcggagccaggagtacaagaaataccagacaaacaagacaaccggcaacaccgataagagagccttcgtcgagacctggcagtccttttaccggaagaagcttaaggaggtgtggaaacctgccgtgcggtctggcggatctggcggaggctccaccagccccaagaaaaagagaaaagtctaagctgccttctgcggggcttgccttctggccatgcccttcttctctcccttgcacctgtacctcttggtctttgaataaagcctgagtaggaaggctagcaaaaaaaaaaaaaaaaaaaaaaaaaaaaaaaaaaaaaaaaaaaaaaaaaaaaaaaaaaaaaaaaaaaaaaaaaaaaaaaagcccagccggctccccaacctctaccgaggagggcacctctgagtccgccacccccgagagcggccctggcacctccaccgagcccagcgagggcagcgcacccggcagccctgccggcagccccacctccacagaggagggaaccagcaccgagcccagcgaaggcagcgccccaggcaccagcaccgagcctagtgagcaggagattaaacggatcaacaagatcagaagaagacttgtgaaagacagcaacaccaagaaggccggcaagacaggccccatgaaaaccctgctggttagagtgatgacacccgatctgagagagcggctggaaaacctgagaaagaagcctgaaaatatcccccagcccatcagcaatacatctagagccaacctgaataagctgctgaccgattacaccgaaatgaagaaggcgatcctgcatgtgtactgggaagagttccagaaggaccctgtgggcctgatgagccgggtggcccagcctgccagcaagaagatcgatcagaacaagctgaaacctgagatggacgagaagggcaacctgaccaccgccggctttgcctgctctcagtgtggccagcccctgttcgtgtacaagctggagcaggtgtctgagaagggcaaggcttacaccaactacttcggacggtgcaatgtggccgagcacgaaaagctgatcctgctggcccagctgaagcccgagaaggatagcgacgaagccgtgacatatagcctgggaaagtttgggcagagggccctggatttctacagcattcatgtgaccaaggagtccacccaccccgtgaagcccctggcccagatcgccggaaacagatacgcctccggacctgtgggaaaggccctgagcgacgcatgtatgggcacaatcgcctccttcctgtctaagtaccaggacatcatcatcgaacaccagaaggtggtgaagggcaaccagaagagactggagagcctgcgggagctggccggcaaggaaaacctggaataccctagcgtgaccctgccacctcagcctcacaccaaggagggcgttgatgcctacaacgaagtgatcgcccgggtgcgaatgtgggtgaacctgaacctgtggcagaagctgaagctaagcagagatgatgccaagcctctgctgagactgaagggattcccttcctttcctctggtcgagagacaggccaacgaagtggactggtgggacatggtgtgtaacgtgaagaagctgatcaacgagaaaaaggaggatggcaaggtgttttggcagaatctggctggctacaagagacaggaagccctgagaccatacctgagcagcgaggaagatcggaagaagggaaagaaattcgctcggtaccagctgggcgacctgctgctgcacctggaaaagaagcacggcgaggactggggaaaggtgtacgacgaggcctgggagcggattgacaagaaagtggaaggcctgagcaagcacatcaagctggaagaggaacggagaagcgaggacgcccagagcaaggccgccctgaccgactggctgcgggctaaggccagcttcgtgatcgagggcctgaaggaggccgacaaggacgagttctgcagatgcgagctgaagctgcagaagtggtacggggacctgcggggaaagcccttcgccatcgaagccgagaacagcatcctggacatcagcggcttcagcaagcagtacaactgtgccttcatctggcagaaggacggcgtgaagaagctgaacctgtacctgatcatcaactacttcaagggcggcaagctgcggttcaagaagatcaaacctgaagccttcgaagccaacagattctacaccgtgatcaacaaaaagagcggcgagatcgtgcccatggaggtgaacttcaacttcgacgaccccaacctgatcatcctgcctctggcctttggcaagagacagggcagagaattcatctggaacgacctgctgtccctggaaaccggcagcctgaagctggccaacggaagagtgatcgagaagacactgtacaacagaagaacccggcaggatgagcctgccctgttcgtggccctgaccttcgagcggcgggaggtcctggactcctccaatatcaaaccaatgaacctgatcggcgtggcaagaggcgaaaacatccccgccgtgatcgccctgaccgaccccgagggctgcccactgagccggtttaaggatagcctgggaaacccaacccacatcctgagaatcggcgagagctataaggagaagcagcggaccatccaggccaagaaggaggtggagcagcggagagccggcggctacagccggaagtacgccagcaaagccaagaatctggcagacgatatggtgagaaacaccgctagagatctgctgtactacgccgtgacccaggatgccatgctgatcttcgccaacctgagccggggcttcggccggcagggcaagcggaccttcatggccgagagacagtacacacggatggaggactggctgaccgccaagctggcctacgagggcctgagcaagacctacctgtccaagacactggcccagtacacctccaagacatgcagcaactgtgggtttaccatcaccagcgccgactacgacagggtgctggagaagctgaagaagacagcaacaggctggatgaccacaattaacggcaaggagctgaaggtggagggccagattacctactacaacagatacaagagacagaacgtagtcaaggacctgtccgtcgagctggatagactgagcgaagaatctgtgaacaacgacatctcctcctggacaaagggcagaagcggagaagctctgagcctcctgaagaaaagattctcccatagacccgtgcaggagaagttcgtgtgcctgaactgcggcttcgagacacacgcagccgagcaagccgccctgaacatcgccagatcctggctgttcctgcggagccaggagtacaagaaataccagacaaacaagacaaccggcaacaccgataagagagccttcgtcgagacctggcagtccttttaccggaagaagcttaaggaggtgtggaaacctgccgtgcggtctggcggatctggcggaggctccaccagccccaagaaaaagagaaaagtctaagctgccttctgcggggcttgccttctggccatgcccttcttctctcccttgcacctgtacctcttggtctttgaataaagcctgagtaggaaggctagcaaaaaaaaaaaaaaaaaaaaaaaaaaaaaaaaaaaaaaaaaaaaaaaaaaaaaaaaaaaaaaaaaaaaaaaaaaaaaaaa

SEQ ID NO: 9804 - RNA, 8796 nt, synthetic construct
  source 1..8796: mol_type = other RNA
aggaaataagagagaaaagaagagtaagaagaaatataagagccaccatggcccctaagaagaagcgtaaagtgagccggatgaaccacgaccaggagttcgacccccctaaggtgtaccctcccgtccccgccgagaagagaaagcccatccgggtcctgagcctgttcgatggcatcgccaccggtctgctggtgctgaaggacctgggcatccaggtggataggtacattgcctccgaggtgtgcgaggactccatcaccgtgggaatggtgcgtcatcagggcaagatcatgtacgtgggcgacgtgcggagcgtgacacagaagcatatccaggagtggggccctttcgacctggtgatcggcggcagcccttgcaatgacctgagcatcgtgaacccagcccggaagggcctgtacgagggaaccggcagactgttcttcgagttttacagactgctgcacgacgcccggcctaaggaaggcgacgaccggcccttcttttggctgttcgagaatgtggtggccatgggagtcagcgacaagcgggatattagccggttcctggagagcaaccccgtgatgatcgatgccaaggaagtgagcgccgcccaccgggccagatacttctggggcaatctgcctggcatgaacagacccctggccagcaccgtgaacgacaagctggagctgcaggagtgcctggagcacggccggatcgccaagttcagcaaggtgagaaccatcaccacccgaagcaacagcatcaaacaaggcaaggaccagcactttcctgtgttcatgaacgagaaggaggacatcctgtggtgtaccgagatggagagagtgttcgggttcccagtccactacacagatgtcagcaacatgtctagactggccagacagagactgctgggaagaagctggtccgtccctgtgatcagacacctgttcgcccctctgaaggagtacttcgcctgcgtgagcagcggcaacagcaacgccaacagccggggccccagcttctctagcggcctggtgccactgtccctgagagggagccacatgggccccatggagatctacaaaaccgtgagcgcctggaagcggcagcctgtgcgcgtgctgagcctgtttcggaatatcgataaagtcctgaaaagcctgggattcctggagagcggctctggctccggcggtggcaccctgaagtacgtggaggatgtgacaaacgtggtcagacgggatgtggagaagtggggccccttcgatctggtgtacggcagcacccaacccctgggcagctcttgtgaccggtgccctggctggtacatgtttcagttccaccggatcctgcagtacgccctgccgagacaggagtcccagcggccattcttttggattttcatggacaacttgctgctgaccgaggatgaccaggaaactaccactcggttcctgcagaccgaagccgtgaccctgcaggacgtgagaggccgggactaccagaacgccatgcgggtgtggtccaacatccctggactgaaaagcaagcacgcacctctgacccctaaagaagaggagtacctgcaggcccaggtgcggagcagaagcaagctggacgcccctaaggtggatctgctggtgaagaattgcctcctgcccctgagagagtacttcaagtatttcagccagaatagtctgcccctgggaggcagcggcggcggcctgaccttcgaggacgtggccgtgtacttcagcgaggaggagtggcagctgctgaaccccctggagaagaccctgtacaacgacgtgatgcaggacatctacgagaccgtgatcagcctgggcctgaagctgaagaacgacaccggcaacgaccaccccatcagcgtgagcaccagcgagatccagaccagcggctgcgaggtgagcaagaagaccaggatgaagatcgcccagaagaccatgggcagggagggcggcccaagcagcggcgcccctcctcccagcggcggcaggcggcccaagcagcggcgcccctcctcccagcggcggcagcccagccggctccccaacctctaccgaggagggcacctctgagtccgccacccccgagagcggccctggcacctccaccgagcccagcgagggcagcgcacccggcagccctgccggcagccccacctccacagaggagggaaccagcaccgagcccagcgaaggcagcgccccaggcaccagcaccgagcctagtgagcaggagattaaacggatcaacaagatcagaagaagacttgtgaaagacagcaacaccaagaaggccggcaagacaggccccatgaaaaccctgctggttagagtgatgacacccgatctgagagagcggctggaaaacctgagaaagaagcctgaaaatatcccccagcccatcagcaatacatctagagccaacctgaataagctgctgaccgattacaccgaaatgaagaaggcgatcctgcatgtgtactgggaagagttccagaaggaccctgtgggcctgatgagccgggtggcccagcctgccagcaagaagatcgatcagaacaagctgaaacctgagatggacgagaagggcaacctgaccaccgccggctttgcctgctctcagtgtggccagcccctgttcgtgtacaagctggagcaggtgtctgagaagggcaaggcttacaccaactacttcggacggtgcaatgtggccgagcacgaaaagctgatcctgctggcccagctgaagcccgagaaggatagcgacgaagccgtgacatatagcctgggaaagtttgggcagagggccctggatttctacagcattcatgtgaccaaggagtccacccaccccgtgaagcccctggcccagatcgccggaaacagatacgcctccggacctgtgggaaaggccctgagcgacgcatgtatgggcacaatcgcctccttcctgtctaagtaccaggacatcatcatcgaacaccagaaggtggtgaagggcaaccagaagagactggagagcctgcgggagctggccggcaaggaaaacctggaataccctagcgtgaccctgccacctcagcctcacaccaaggagggcgttgatgcctacaacgaagtgatcgcccgggtgcgaatgtgggtgaacctgaacctgtggcagaagctgaagctaagcagagatgatgccaagcctctgctgagactgaagggattcccttcctttcctctggtcgagagacaggccaacgaagtggactggtgggacatggtgtgtaacgtgaagaagctgatcaacgagaaaaaggaggatggcaaggtgttttggcagaatctggctggctacaagagacaggaagccctgagaccatacctgagcagcgaggaagatcggaagaagggaaagaaattcgctcggtaccagctgggcgacctgctgctgcacctggaaaagaagcacggcgaggactggggaaaggtgtacgacgaggcctgggagcggattgacaagaaagtggaaggcctgagcaagcacatcaagctggaagaggaacggagaagcgaggacgcccagagcaaggccgccctgaccgactggctgcgggctaaggccagcttcgtgatcgagggcctgaaggaggccgacaaggacgagttctgcagatgcgagctgaagctgcagaagtggtacggggacctgcggggaaagcccttcgccatcgaagccgagaacagcatcctggacatcagcggcttcagcaagcagtacaactgtgccttcatctggcagaaggacggcgtgaagaagctgaacctgtacctgatcatcaactacttcaagggcggcaagctgcggttcaagaagatcaaacctgaagccttcgaagccaacagattctacaccgtgatcaacaaaaagagcggcgagatcgtgcccatggaggtgaacttcaacttcgacgaccccaacctgatcatcctgcctctggcctttggcaagagacagggcagagaattcatctggaacgacctgctgtccctggaaaccggcagcctgaagctggccaacggaagagtgatcgagaagacactgtacaacagaagaacccggcaggatgagcctgccctgttcgtggccctgaccttcgagcggcgggaggtcctggactcctccaatatcaaaccaatgaacctgatcggcgtggcaagaggcgaaaacatccccgccgtgatcgccctgaccgaccccgagggctgcccactgagccggtttaaggatagcctgggaaacccaacccacatcctgagaatcggcgagagctataaggagaagcagcggaccatccaggccaagaaggaggtggagcagcggagagccggcggctacagccggaagtacgccagcaaagccaagaatctggcagacgatatggtgagaaacaccgctagagatctgctgtactacgccgtgacccaggatgccatgctgatcttcgccaacctgagccggggcttcggccggcagggcaagcggaccttcatggccgagagacagtacacacggatggaggactggctgaccgccaagctggcctacgagggcctgagcaagacctacctgtccaagacactggcccagtacacctccaagacatgcagcaactgtgggtttaccatcaccagcgccgactacgacagggtgctggagaagctgaagaagacagcaacaggctggatgaccacaattaacggcaaggagctgaaggtggagggccagattacctactacaacagatacaagagacagaacgtagtcaaggacctgtccgtcgagctggatagactgagcgaagaatctgtgaacaacgacatctcctcctggacaaagggcagaagcggagaagctctgagcctcctgaagaaaagattctcccatagacccgtgcaggagaagttcgtgtgcctgaactgcggcttcgagacacacgcagccgagcaagccgccctgaacatcgccagatcctggctgttcctgcggagccaggagtacaagaaataccagacaaacaagacaaccggcaacaccgataagagagccttcgtcgagacctggcagtccttttaccggaagaagcttaaggaggtgtggaaacctgccgtgcggtctggcggatctggcggaggctccaccagccccaagaaaaagagaaaagtctaagctgccttctgcggggcttgccttctggccatgcccttcttctctcccttgcacctgtacctcttggtctttgaataaagcctgagtaggaaggctagcaaaaaaaaaaaaaaaaaaaaaaaaaaaaaaaaaaaaaaaaaaaaaaaaaaaaaaaaaaaaaaaaaaaaaaaaaaaaaaaagcccagccggctccccaacctctaccgaggagggcacctctgagtccgccacccccgagagcggccctggcacctccaccgagcccagcgagggcagcgcacccggcagccctgccggcagccccacctccacagaggagggaaccagcaccgagcccagcgaaggcagcgccccaggcaccagcaccgagcctagtgagcaggagattaaacggatcaacaagatcagaagaagacttgtgaaagacagcaacaccaagaaggccggcaagacaggccccatgaaaaccctgctggttagagtgatgacacccgatctgagagagcggctggaaaacctgagaaagaagcctgaaaatatcccccagcccatcagcaatacatctagagccaacctgaataagctgctgaccgattacaccgaaatgaagaaggcgatcctgcatgtgtactgggaagagttccagaaggaccctgtgggcctgatgagccgggtggcccagcctgccagcaagaagatcgatcagaacaagctgaaacctgagatggacgagaagggcaacctgaccaccgccggctttgcctgctctcagtgtggccagcccctgttcgtgtacaagctggagcaggtgtctgagaagggcaaggcttacaccaactacttcggacggtgcaatgtggccgagcacgaaaagctgatcctgctggcccagctgaagcccgagaaggatagcgacgaagccgtgacatatagcctgggaaagtttgggcagagggccctggatttctacagcattcatgtgaccaaggagtccacccaccccgtgaagcccctggcccagatcgccggaaacagatacgcctccggacctgtgggaaaggccctgagcgacgcatgtatgggcacaatcgcctccttcctgtctaagtaccaggacatcatcatcgaacaccagaaggtggtgaagggcaaccagaagagactggagagcctgcgggagctggccggcaaggaaaacctggaataccctagcgtgaccctgccacctcagcctcacaccaaggagggcgttgatgcctacaacgaagtgatcgcccgggtgcgaatgtgggtgaacctgaacctgtggcagaagctgaagctaagcagagatgatgccaagcctctgctgagactgaagggattcccttcctttcctctggtcgagagacaggccaacgaagtggactggtgggacatggtgtgtaacgtgaagaagctgatcaacgagaaaaaggaggatggcaaggtgttttggcagaatctggctggctacaagagacaggaagccctgagaccatacctgagcagcgaggaagatcggaagaagggaaagaaattcgctcggtaccagctgggcgacctgctgctgcacctggaaaagaagcacggcgaggactggggaaaggtgtacgacgaggcctgggagcggattgacaagaaagtggaaggcctgagcaagcacatcaagctggaagaggaacggagaagcgaggacgcccagagcaaggccgccctgaccgactggctgcgggctaaggccagcttcgtgatcgagggcctgaaggaggccgacaaggacgagttctgcagatgcgagctgaagctgcagaagtggtacggggacctgcggggaaagcccttcgccatcgaagccgagaacagcatcctggacatcagcggcttcagcaagcagtacaactgtgccttcatctggcagaaggacggcgtgaagaagctgaacctgtacctgatcatcaactacttcaagggcggcaagctgcggttcaagaagatcaaacctgaagccttcgaagccaacagattctacaccgtgatcaacaaaaagagcggcgagatcgtgcccatggaggtgaacttcaacttcgacgaccccaacctgatcatcctgcctctggcctttggcaagagacagggcagagaattcatctggaacgacctgctgtccctggaaaccggcagcctgaagctggccaacggaagagtgatcgagaagacactgtacaacagaagaacccggcaggatgagcctgccctgttcgtggccctgaccttcgagcggcgggaggtcctggactcctccaatatcaaaccaatgaacctgatcggcgtggcaagaggcgaaaacatccccgccgtgatcgccctgaccgaccccgagggctgcccactgagccggtttaaggatagcctgggaaacccaacccacatcctgagaatcggcgagagctataaggagaagcagcggaccatccaggccaagaaggaggtggagcagcggagagccggcggctacagccggaagtacgccagcaaagccaagaatctggcagacgatatggtgagaaacaccgctagagatctgctgtactacgccgtgacccaggatgccatgctgatcttcgccaacctgagccggggcttcggccggcagggcaagcggaccttcatggccgagagacagtacacacggatggaggactggctgaccgccaagctggcctacgagggcctgagcaagacctacctgtccaagacactggcccagtacacctccaagacatgcagcaactgtgggtttaccatcaccagcgccgactacgacagggtgctggagaagctgaagaagacagcaacaggctggatgaccacaattaacggcaaggagctgaaggtggagggccagattacctactacaacagatacaagagacagaacgtagtcaaggacctgtccgtcgagctggatagactgagcgaagaatctgtgaacaacgacatctcctcctggacaaagggcagaagcggagaagctctgagcctcctgaagaaaagattctcccatagacccgtgcaggagaagttcgtgtgcctgaactgcggcttcgagacacacgcagccgagcaagccgccctgaacatcgccagatcctggctgttcctgcggagccaggagtacaagaaataccagacaaacaagacaaccggcaacaccgataagagagccttcgtcgagacctggcagtccttttaccggaagaagcttaaggaggtgtggaaacctgccgtgcggtctggcggatctggcggaggctccaccagccccaagaaaaagagaaaagtctaagctgccttctgcggggcttgccttctggccatgcccttcttctctcccttgcacctgtacctcttggtctttgaataaagcctgagtaggaaggctagcaaaaaaaaaaaaaaaaaaaaaaaaaaaaaaaaaaaaaaaaaaaaaaaaaaaaaaaaaaaaaaaaaaaaaaaaaaaaaaaa

SEQ ID NO: 9805 - RNA, 8787 nt, synthetic construct
  source 1..8787: mol_type = other RNA
aggaaataagagagaaaagaagagtaagaagaaatataagagccaccatggcccctaagaagaagcgtaaagtgagccggatgaaccacgaccaggagttcgacccccctaaggtgtaccctcccgtccccgccgagaagagaaagcccatccgggtcctgagcctgttcgatggcatcgccaccggtctgctggtgctgaaggacctgggcatccaggtggataggtacattgcctccgaggtgtgcgaggactccatcaccgtgggaatggtgcgtcatcagggcaagatcatgtacgtgggcgacgtgcggagcgtgacacagaagcatatccaggagtggggccctttcgacctggtgatcggcggcagcccttgcaatgacctgagcatcgtgaacccagcccggaagggcctgtacgagggaaccggcagactgttcttcgagttttacagactgctgcacgacgcccggcctaaggaaggcgacgaccggcccttcttttggctgttcgagaatgtggtggccatgggagtcagcgacaagcgggatattagccggttcctggagagcaaccccgtgatgatcgatgccaaggaagtgagcgccgcccaccgggccagatacttctggggcaatctgcctggcatgaacagacccctggccagcaccgtgaacgacaagctggagctgcaggagtgcctggagcacggccggatcgccaagttcagcaaggtgagaaccatcaccacccgaagcaacagcatcaaacaaggcaaggaccagcactttcctgtgttcatgaacgagaaggaggacatcctgtggtgtaccgagatggagagagtgttcgggttcccagtccactacacagatgtcagcaacatgtctagactggccagacagagactgctgggaagaagctggtccgtccctgtgatcagacacctgttcgcccctctgaaggagtacttcgcctgcgtgagcagcggcaacagcaacgccaacagccggggccccagcttctctagcggcctggtgccactgtccctgagagggagccacatgggccccatggagatctacaaaaccgtgagcgcctggaagcggcagcctgtgcgcgtgctgagcctgtttcggaatatcgataaagtcctgaaaagcctgggattcctggagagcggctctggctccggcggtggcaccctgaagtacgtggaggatgtgacaaacgtggtcagacgggatgtggagaagtggggccccttcgatctggtgtacggcagcacccaacccctgggcagctcttgtgaccggtgccctggctggtacatgtttcagttccaccggatcctgcagtacgccctgccgagacaggagtcccagcggccattcttttggattttcatggacaacttgctgctgaccgaggatgaccaggaaactaccactcggttcctgcagaccgaagccgtgaccctgcaggacgtgagaggccgggactaccagaacgccatgcgggtgtggtccaacatccctggactgaaaagcaagcacgcacctctgacccctaaagaagaggagtacctgcaggcccaggtgcggagcagaagcaagctggacgcccctaaggtggatctgctggtgaagaattgcctcctgcccctgagagagtacttcaagtatttcagccagaatagtctgcccctgggaggcagcggcggcggccccaggctgcccctgaccttcgaggacgtggccatctacttcagcgagcaggagtggcaggacctggaggcctggcagaaggagctgtacaagcacgtgatgaggagcaactacgagaccctggtgagcctggacgacggcctgcccaagcccgagctgatcagctggatcgagcacggcggcgagcccttcaggaactggagggagagccagaagagcaggaacatcatctgcagcagcagcggcggcccaagcagcggcgcccctcctcccagcggcggcaggcggcccaagcagcggcgcccctcctcccagcggcggcagcccagccggctccccaacctctaccgaggagggcacctctgagtccgccacccccgagagcggccctggcacctccaccgagcccagcgagggcagcgcacccggcagccctgccggcagccccacctccacagaggagggaaccagcaccgagcccagcgaaggcagcgccccaggcaccagcaccgagcctagtgagcaggagattaaacggatcaacaagatcagaagaagacttgtgaaagacagcaacaccaagaaggccggcaagacaggccccatgaaaaccctgctggttagagtgatgacacccgatctgagagagcggctggaaaacctgagaaagaagcctgaaaatatcccccagcccatcagcaatacatctagagccaacctgaataagctgctgaccgattacaccgaaatgaagaaggcgatcctgcatgtgtactgggaagagttccagaaggaccctgtgggcctgatgagccgggtggcccagcctgccagcaagaagatcgatcagaacaagctgaaacctgagatggacgagaagggcaacctgaccaccgccggctttgcctgctctcagtgtggccagcccctgttcgtgtacaagctggagcaggtgtctgagaagggcaaggcttacaccaactacttcggacggtgcaatgtggccgagcacgaaaagctgatcctgctggcccagctgaagcccgagaaggatagcgacgaagccgtgacatatagcctgggaaagtttgggcagagggccctggatttctacagcattcatgtgaccaaggagtccacccaccccgtgaagcccctggcccagatcgccggaaacagatacgcctccggacctgtgggaaaggccctgagcgacgcatgtatgggcacaatcgcctccttcctgtctaagtaccaggacatcatcatcgaacaccagaaggtggtgaagggcaaccagaagagactggagagcctgcgggagctggccggcaaggaaaacctggaataccctagcgtgaccctgccacctcagcctcacaccaaggagggcgttgatgcctacaacgaagtgatcgcccgggtgcgaatgtgggtgaacctgaacctgtggcagaagctgaagctaagcagagatgatgccaagcctctgctgagactgaagggattcccttcctttcctctggtcgagagacaggccaacgaagtggactggtgggacatggtgtgtaacgtgaagaagctgatcaacgagaaaaaggaggatggcaaggtgttttggcagaatctggctggctacaagagacaggaagccctgagaccatacctgagcagcgaggaagatcggaagaagggaaagaaattcgctcggtaccagctgggcgacctgctgctgcacctggaaaagaagcacggcgaggactggggaaaggtgtacgacgaggcctgggagcggattgacaagaaagtggaaggcctgagcaagcacatcaagctggaagaggaacggagaagcgaggacgcccagagcaaggccgccctgaccgactggctgcgggctaaggccagcttcgtgatcgagggcctgaaggaggccgacaaggacgagttctgcagatgcgagctgaagctgcagaagtggtacggggacctgcggggaaagcccttcgccatcgaagccgagaacagcatcctggacatcagcggcttcagcaagcagtacaactgtgccttcatctggcagaaggacggcgtgaagaagctgaacctgtacctgatcatcaactacttcaagggcggcaagctgcggttcaagaagatcaaacctgaagccttcgaagccaacagattctacaccgtgatcaacaaaaagagcggcgagatcgtgcccatggaggtgaacttcaacttcgacgaccccaacctgatcatcctgcctctggcctttggcaagagacagggcagagaattcatctggaacgacctgctgtccctggaaaccggcagcctgaagctggccaacggaagagtgatcgagaagacactgtacaacagaagaacccggcaggatgagcctgccctgttcgtggccctgaccttcgagcggcgggaggtcctggactcctccaatatcaaaccaatgaacctgatcggcgtggcaagaggcgaaaacatccccgccgtgatcgccctgaccgaccccgagggctgcccactgagccggtttaaggatagcctgggaaacccaacccacatcctgagaatcggcgagagctataaggagaagcagcggaccatccaggccaagaaggaggtggagcagcggagagccggcggctacagccggaagtacgccagcaaagccaagaatctggcagacgatatggtgagaaacaccgctagagatctgctgtactacgccgtgacccaggatgccatgctgatcttcgccaacctgagccggggcttcggccggcagggcaagcggaccttcatggccgagagacagtacacacggatggaggactggctgaccgccaagctggcctacgagggcctgagcaagacctacctgtccaagacactggcccagtacacctccaagacatgcagcaactgtgggtttaccatcaccagcgccgactacgacagggtgctggagaagctgaagaagacagcaacaggctggatgaccacaattaacggcaaggagctgaaggtggagggccagattacctactacaacagatacaagagacagaacgtagtcaaggacctgtccgtcgagctggatagactgagcgaagaatctgtgaacaacgacatctcctcctggacaaagggcagaagcggagaagctctgagcctcctgaagaaaagattctcccatagacccgtgcaggagaagttcgtgtgcctgaactgcggcttcgagacacacgcagccgagcaagccgccctgaacatcgccagatcctggctgttcctgcggagccaggagtacaagaaataccagacaaacaagacaaccggcaacaccgataagagagccttcgtcgagacctggcagtccttttaccggaagaagcttaaggaggtgtggaaacctgccgtgcggtctggcggatctggcggaggctccaccagccccaagaaaaagagaaaagtctaagctgccttctgcggggcttgccttctggccatgcccttcttctctcccttgcacctgtacctcttggtctttgaataaagcctgagtaggaaggctagcaaaaaaaaaaaaaaaaaaaaaaaaaaaaaaaaaaaaaaaaaaaaaaaaaaaaaaaaaaaaaaaaaaaaaaaaaaaaaaaagcccagccggctccccaacctctaccgaggagggcacctctgagtccgccacccccgagagcggccctggcacctccaccgagcccagcgagggcagcgcacccggcagccctgccggcagccccacctccacagaggagggaaccagcaccgagcccagcgaaggcagcgccccaggcaccagcaccgagcctagtgagcaggagattaaacggatcaacaagatcagaagaagacttgtgaaagacagcaacaccaagaaggccggcaagacaggccccatgaaaaccctgctggttagagtgatgacacccgatctgagagagcggctggaaaacctgagaaagaagcctgaaaatatcccccagcccatcagcaatacatctagagccaacctgaataagctgctgaccgattacaccgaaatgaagaaggcgatcctgcatgtgtactgggaagagttccagaaggaccctgtgggcctgatgagccgggtggcccagcctgccagcaagaagatcgatcagaacaagctgaaacctgagatggacgagaagggcaacctgaccaccgccggctttgcctgctctcagtgtggccagcccctgttcgtgtacaagctggagcaggtgtctgagaagggcaaggcttacaccaactacttcggacggtgcaatgtggccgagcacgaaaagctgatcctgctggcccagctgaagcccgagaaggatagcgacgaagccgtgacatatagcctgggaaagtttgggcagagggccctggatttctacagcattcatgtgaccaaggagtccacccaccccgtgaagcccctggcccagatcgccggaaacagatacgcctccggacctgtgggaaaggccctgagcgacgcatgtatgggcacaatcgcctccttcctgtctaagtaccaggacatcatcatcgaacaccagaaggtggtgaagggcaaccagaagagactggagagcctgcgggagctggccggcaaggaaaacctggaataccctagcgtgaccctgccacctcagcctcacaccaaggagggcgttgatgcctacaacgaagtgatcgcccgggtgcgaatgtgggtgaacctgaacctgtggcagaagctgaagctaagcagagatgatgccaagcctctgctgagactgaagggattcccttcctttcctctggtcgagagacaggccaacgaagtggactggtgggacatggtgtgtaacgtgaagaagctgatcaacgagaaaaaggaggatggcaaggtgttttggcagaatctggctggctacaagagacaggaagccctgagaccatacctgagcagcgaggaagatcggaagaagggaaagaaattcgctcggtaccagctgggcgacctgctgctgcacctggaaaagaagcacggcgaggactggggaaaggtgtacgacgaggcctgggagcggattgacaagaaagtggaaggcctgagcaagcacatcaagctggaagaggaacggagaagcgaggacgcccagagcaaggccgccctgaccgactggctgcgggctaaggccagcttcgtgatcgagggcctgaaggaggccgacaaggacgagttctgcagatgcgagctgaagctgcagaagtggtacggggacctgcggggaaagcccttcgccatcgaagccgagaacagcatcctggacatcagcggcttcagcaagcagtacaactgtgccttcatctggcagaaggacggcgtgaagaagctgaacctgtacctgatcatcaactacttcaagggcggcaagctgcggttcaagaagatcaaacctgaagccttcgaagccaacagattctacaccgtgatcaacaaaaagagcggcgagatcgtgcccatggaggtgaacttcaacttcgacgaccccaacctgatcatcctgcctctggcctttggcaagagacagggcagagaattcatctggaacgacctgctgtccctggaaaccggcagcctgaagctggccaacggaagagtgatcgagaagacactgtacaacagaagaacccggcaggatgagcctgccctgttcgtggccctgaccttcgagcggcgggaggtcctggactcctccaatatcaaaccaatgaacctgatcggcgtggcaagaggcgaaaacatccccgccgtgatcgccctgaccgaccccgagggctgcccactgagccggtttaaggatagcctgggaaacccaacccacatcctgagaatcggcgagagctataaggagaagcagcggaccatccaggccaagaaggaggtggagcagcggagagccggcggctacagccggaagtacgccagcaaagccaagaatctggcagacgatatggtgagaaacaccgctagagatctgctgtactacgccgtgacccaggatgccatgctgatcttcgccaacctgagccggggcttcggccggcagggcaagcggaccttcatggccgagagacagtacacacggatggaggactggctgaccgccaagctggcctacgagggcctgagcaagacctacctgtccaagacactggcccagtacacctccaagacatgcagcaactgtgggtttaccatcaccagcgccgactacgacagggtgctggagaagctgaagaagacagcaacaggctggatgaccacaattaacggcaaggagctgaaggtggagggccagattacctactacaacagatacaagagacagaacgtagtcaaggacctgtccgtcgagctggatagactgagcgaagaatctgtgaacaacgacatctcctcctggacaaagggcagaagcggagaagctctgagcctcctgaagaaaagattctcccatagacccgtgcaggagaagttcgtgtgcctgaactgcggcttcgagacacacgcagccgagcaagccgccctgaacatcgccagatcctggctgttcctgcggagccaggagtacaagaaataccagacaaacaagacaaccggcaacaccgataagagagccttcgtcgagacctggcagtccttttaccggaagaagcttaaggaggtgtggaaacctgccgtgcggtctggcggatctggcggaggctccaccagccccaagaaaaagagaaaagtctaagctgccttctgcggggcttgccttctggccatgcccttcttctctcccttgcacctgtacctcttggtctttgaataaagcctgagtaggaaggctagcaaaaaaaaaaaaaaaaaaaaaaaaaaaaaaaaaaaaaaaaaaaaaaaaaaaaaaaaaaaaaaaaaaaaaaaaaaaaaaaa

SEQ ID NO: 9806 - RNA, 8787 nt, synthetic construct
  source 1..8787: mol_type = other RNA
aggaaataagagagaaaagaagagtaagaagaaatataagagccaccatggcccctaagaagaagcgtaaagtgagccggatgaaccacgaccaggagttcgacccccctaaggtgtaccctcccgtccccgccgagaagagaaagcccatccgggtcctgagcctgttcgatggcatcgccaccggtctgctggtgctgaaggacctgggcatccaggtggataggtacattgcctccgaggtgtgcgaggactccatcaccgtgggaatggtgcgtcatcagggcaagatcatgtacgtgggcgacgtgcggagcgtgacacagaagcatatccaggagtggggccctttcgacctggtgatcggcggcagcccttgcaatgacctgagcatcgtgaacccagcccggaagggcctgtacgagggaaccggcagactgttcttcgagttttacagactgctgcacgacgcccggcctaaggaaggcgacgaccggcccttcttttggctgttcgagaatgtggtggccatgggagtcagcgacaagcgggatattagccggttcctggagagcaaccccgtgatgatcgatgccaaggaagtgagcgccgcccaccgggccagatacttctggggcaatctgcctggcatgaacagacccctggccagcaccgtgaacgacaagctggagctgcaggagtgcctggagcacggccggatcgccaagttcagcaaggtgagaaccatcaccacccgaagcaacagcatcaaacaaggcaaggaccagcactttcctgtgttcatgaacgagaaggaggacatcctgtggtgtaccgagatggagagagtgttcgggttcccagtccactacacagatgtcagcaacatgtctagactggccagacagagactgctgggaagaagctggtccgtccctgtgatcagacacctgttcgcccctctgaaggagtacttcgcctgcgtgagcagcggcaacagcaacgccaacagccggggccccagcttctctagcggcctggtgccactgtccctgagagggagccacatgggccccatggagatctacaaaaccgtgagcgcctggaagcggcagcctgtgcgcgtgctgagcctgtttcggaatatcgataaagtcctgaaaagcctgggattcctggagagcggctctggctccggcggtggcaccctgaagtacgtggaggatgtgacaaacgtggtcagacgggatgtggagaagtggggccccttcgatctggtgtacggcagcacccaacccctgggcagctcttgtgaccggtgccctggctggtacatgtttcagttccaccggatcctgcagtacgccctgccgagacaggagtcccagcggccattcttttggattttcatggacaacttgctgctgaccgaggatgaccaggaaactaccactcggttcctgcagaccgaagccgtgaccctgcaggacgtgagaggccgggactaccagaacgccatgcgggtgtggtccaacatccctggactgaaaagcaagcacgcacctctgacccctaaagaagaggagtacctgcaggcccaggtgcggagcagaagcaagctggacgcccctaaggtggatctgctggtgaagaattgcctcctgcccctgagagagtacttcaagtatttcagccagaatagtctgcccctgggaggcagcggcggcggcatgagccagggcagcgtgaccttcagggacgtggccatcgacttcagccaggaggagtggaagtggctgcagcccgcccagagggacctgtacaggtgcgtgatgctggagaactacggccacctggtgagcctgggcctgagcatcagcaagcccgacgtggtgagcctgctggagcagggcaaggagccctggctgggcaagagggacgtgaagagggacctgttccccgtgagcgagagcggcggcccaagcagcggcgcccctcctcccagcggcggcaggcggcccaagcagcggcgcccctcctcccagcggcggcagcccagccggctccccaacctctaccgaggagggcacctctgagtccgccacccccgagagcggccctggcacctccaccgagcccagcgagggcagcgcacccggcagccctgccggcagccccacctccacagaggagggaaccagcaccgagcccagcgaaggcagcgccccaggcaccagcaccgagcctagtgagcaggagattaaacggatcaacaagatcagaagaagacttgtgaaagacagcaacaccaagaaggccggcaagacaggccccatgaaaaccctgctggttagagtgatgacacccgatctgagagagcggctggaaaacctgagaaagaagcctgaaaatatcccccagcccatcagcaatacatctagagccaacctgaataagctgctgaccgattacaccgaaatgaagaaggcgatcctgcatgtgtactgggaagagttccagaaggaccctgtgggcctgatgagccgggtggcccagcctgccagcaagaagatcgatcagaacaagctgaaacctgagatggacgagaagggcaacctgaccaccgccggctttgcctgctctcagtgtggccagcccctgttcgtgtacaagctggagcaggtgtctgagaagggcaaggcttacaccaactacttcggacggtgcaatgtggccgagcacgaaaagctgatcctgctggcccagctgaagcccgagaaggatagcgacgaagccgtgacatatagcctgggaaagtttgggcagagggccctggatttctacagcattcatgtgaccaaggagtccacccaccccgtgaagcccctggcccagatcgccggaaacagatacgcctccggacctgtgggaaaggccctgagcgacgcatgtatgggcacaatcgcctccttcctgtctaagtaccaggacatcatcatcgaacaccagaaggtggtgaagggcaaccagaagagactggagagcctgcgggagctggccggcaaggaaaacctggaataccctagcgtgaccctgccacctcagcctcacaccaaggagggcgttgatgcctacaacgaagtgatcgcccgggtgcgaatgtgggtgaacctgaacctgtggcagaagctgaagctaagcagagatgatgccaagcctctgctgagactgaagggattcccttcctttcctctggtcgagagacaggccaacgaagtggactggtgggacatggtgtgtaacgtgaagaagctgatcaacgagaaaaaggaggatggcaaggtgttttggcagaatctggctggctacaagagacaggaagccctgagaccatacctgagcagcgaggaagatcggaagaagggaaagaaattcgctcggtaccagctgggcgacctgctgctgcacctggaaaagaagcacggcgaggactggggaaaggtgtacgacgaggcctgggagcggattgacaagaaagtggaaggcctgagcaagcacatcaagctggaagaggaacggagaagcgaggacgcccagagcaaggccgccctgaccgactggctgcgggctaaggccagcttcgtgatcgagggcctgaaggaggccgacaaggacgagttctgcagatgcgagctgaagctgcagaagtggtacggggacctgcggggaaagcccttcgccatcgaagccgagaacagcatcctggacatcagcggcttcagcaagcagtacaactgtgccttcatctggcagaaggacggcgtgaagaagctgaacctgtacctgatcatcaactacttcaagggcggcaagctgcggttcaagaagatcaaacctgaagccttcgaagccaacagattctacaccgtgatcaacaaaaagagcggcgagatcgtgcccatggaggtgaacttcaacttcgacgaccccaacctgatcatcctgcctctggcctttggcaagagacagggcagagaattcatctggaacgacctgctgtccctggaaaccggcagcctgaagctggccaacggaagagtgatcgagaagacactgtacaacagaagaacccggcaggatgagcctgccctgttcgtggccctgaccttcgagcggcgggaggtcctggactcctccaatatcaaaccaatgaacctgatcggcgtggcaagaggcgaaaacatccccgccgtgatcgccctgaccgaccccgagggctgcccactgagccggtttaaggatagcctgggaaacccaacccacatcctgagaatcggcgagagctataaggagaagcagcggaccatccaggccaagaaggaggtggagcagcggagagccggcggctacagccggaagtacgccagcaaagccaagaatctggcagacgatatggtgagaaacaccgctagagatctgctgtactacgccgtgacccaggatgccatgctgatcttcgccaacctgagccggggcttcggccggcagggcaagcggaccttcatggccgagagacagtacacacggatggaggactggctgaccgccaagctggcctacgagggcctgagcaagacctacctgtccaagacactggcccagtacacctccaagacatgcagcaactgtgggtttaccatcaccagcgccgactacgacagggtgctggagaagctgaagaagacagcaacaggctggatgaccacaattaacggcaaggagctgaaggtggagggccagattacctactacaacagatacaagagacagaacgtagtcaaggacctgtccgtcgagctggatagactgagcgaagaatctgtgaacaacgacatctcctcctggacaaagggcagaagcggagaagctctgagcctcctgaagaaaagattctcccatagacccgtgcaggagaagttcgtgtgcctgaactgcggcttcgagacacacgcagccgagcaagccgccctgaacatcgccagatcctggctgttcctgcggagccaggagtacaagaaataccagacaaacaagacaaccggcaacaccgataagagagccttcgtcgagacctggcagtccttttaccggaagaagcttaaggaggtgtggaaacctgccgtgcggtctggcggatctggcggaggctccaccagccccaagaaaaagagaaaagtctaagctgccttctgcggggcttgccttctggccatgcccttcttctctcccttgcacctgtacctcttggtctttgaataaagcctgagtaggaaggctagcaaaaaaaaaaaaaaaaaaaaaaaaaaaaaaaaaaaaaaaaaaaaaaaaaaaaaaaaaaaaaaaaaaaaaaaaaaaaaaaagcccagccggctccccaacctctaccgaggagggcacctctgagtccgccacccccgagagcggccctggcacctccaccgagcccagcgagggcagcgcacccggcagccctgccggcagccccacctccacagaggagggaaccagcaccgagcccagcgaaggcagcgccccaggcaccagcaccgagcctagtgagcaggagattaaacggatcaacaagatcagaagaagacttgtgaaagacagcaacaccaagaaggccggcaagacaggccccatgaaaaccctgctggttagagtgatgacacccgatctgagagagcggctggaaaacctgagaaagaagcctgaaaatatcccccagcccatcagcaatacatctagagccaacctgaataagctgctgaccgattacaccgaaatgaagaaggcgatcctgcatgtgtactgggaagagttccagaaggaccctgtgggcctgatgagccgggtggcccagcctgccagcaagaagatcgatcagaacaagctgaaacctgagatggacgagaagggcaacctgaccaccgccggctttgcctgctctcagtgtggccagcccctgttcgtgtacaagctggagcaggtgtctgagaagggcaaggcttacaccaactacttcggacggtgcaatgtggccgagcacgaaaagctgatcctgctggcccagctgaagcccgagaaggatagcgacgaagccgtgacatatagcctgggaaagtttgggcagagggccctggatttctacagcattcatgtgaccaaggagtccacccaccccgtgaagcccctggcccagatcgccggaaacagatacgcctccggacctgtgggaaaggccctgagcgacgcatgtatgggcacaatcgcctccttcctgtctaagtaccaggacatcatcatcgaacaccagaaggtggtgaagggcaaccagaagagactggagagcctgcgggagctggccggcaaggaaaacctggaataccctagcgtgaccctgccacctcagcctcacaccaaggagggcgttgatgcctacaacgaagtgatcgcccgggtgcgaatgtgggtgaacctgaacctgtggcagaagctgaagctaagcagagatgatgccaagcctctgctgagactgaagggattcccttcctttcctctggtcgagagacaggccaacgaagtggactggtgggacatggtgtgtaacgtgaagaagctgatcaacgagaaaaaggaggatggcaaggtgttttggcagaatctggctggctacaagagacaggaagccctgagaccatacctgagcagcgaggaagatcggaagaagggaaagaaattcgctcggtaccagctgggcgacctgctgctgcacctggaaaagaagcacggcgaggactggggaaaggtgtacgacgaggcctgggagcggattgacaagaaagtggaaggcctgagcaagcacatcaagctggaagaggaacggagaagcgaggacgcccagagcaaggccgccctgaccgactggctgcgggctaaggccagcttcgtgatcgagggcctgaaggaggccgacaaggacgagttctgcagatgcgagctgaagctgcagaagtggtacggggacctgcggggaaagcccttcgccatcgaagccgagaacagcatcctggacatcagcggcttcagcaagcagtacaactgtgccttcatctggcagaaggacggcgtgaagaagctgaacctgtacctgatcatcaactacttcaagggcggcaagctgcggttcaagaagatcaaacctgaagccttcgaagccaacagattctacaccgtgatcaacaaaaagagcggcgagatcgtgcccatggaggtgaacttcaacttcgacgaccccaacctgatcatcctgcctctggcctttggcaagagacagggcagagaattcatctggaacgacctgctgtccctggaaaccggcagcctgaagctggccaacggaagagtgatcgagaagacactgtacaacagaagaacccggcaggatgagcctgccctgttcgtggccctgaccttcgagcggcgggaggtcctggactcctccaatatcaaaccaatgaacctgatcggcgtggcaagaggcgaaaacatccccgccgtgatcgccctgaccgaccccgagggctgcccactgagccggtttaaggatagcctgggaaacccaacccacatcctgagaatcggcgagagctataaggagaagcagcggaccatccaggccaagaaggaggtggagcagcggagagccggcggctacagccggaagtacgccagcaaagccaagaatctggcagacgatatggtgagaaacaccgctagagatctgctgtactacgccgtgacccaggatgccatgctgatcttcgccaacctgagccggggcttcggccggcagggcaagcggaccttcatggccgagagacagtacacacggatggaggactggctgaccgccaagctggcctacgagggcctgagcaagacctacctgtccaagacactggcccagtacacctccaagacatgcagcaactgtgggtttaccatcaccagcgccgactacgacagggtgctggagaagctgaagaagacagcaacaggctggatgaccacaattaacggcaaggagctgaaggtggagggccagattacctactacaacagatacaagagacagaacgtagtcaaggacctgtccgtcgagctggatagactgagcgaagaatctgtgaacaacgacatctcctcctggacaaagggcagaagcggagaagctctgagcctcctgaagaaaagattctcccatagacccgtgcaggagaagttcgtgtgcctgaactgcggcttcgagacacacgcagccgagcaagccgccctgaacatcgccagatcctggctgttcctgcggagccaggagtacaagaaataccagacaaacaagacaaccggcaacaccgataagagagccttcgtcgagacctggcagtccttttaccggaagaagcttaaggaggtgtggaaacctgccgtgcggtctggcggatctggcggaggctccaccagccccaagaaaaagagaaaagtctaagctgccttctgcggggcttgccttctggccatgcccttcttctctcccttgcacctgtacctcttggtctttgaataaagcctgagtaggaaggctagcaaaaaaaaaaaaaaaaaaaaaaaaaaaaaaaaaaaaaaaaaaaaaaaaaaaaaaaaaaaaaaaaaaaaaaaaaaaaaaaa

SEQ ID NO: 9807 - RNA, 8787 nt, synthetic construct
  source 1..8787: mol_type = other RNA
aggaaataagagagaaaagaagagtaagaagaaatataagagccaccatggcccctaagaagaagcgtaaagtgagccggatgaaccacgaccaggagttcgacccccctaaggtgtaccctcccgtccccgccgagaagagaaagcccatccgggtcctgagcctgttcgatggcatcgccaccggtctgctggtgctgaaggacctgggcatccaggtggataggtacattgcctccgaggtgtgcgaggactccatcaccgtgggaatggtgcgtcatcagggcaagatcatgtacgtgggcgacgtgcggagcgtgacacagaagcatatccaggagtggggccctttcgacctggtgatcggcggcagcccttgcaatgacctgagcatcgtgaacccagcccggaagggcctgtacgagggaaccggcagactgttcttcgagttttacagactgctgcacgacgcccggcctaaggaaggcgacgaccggcccttcttttggctgttcgagaatgtggtggccatgggagtcagcgacaagcgggatattagccggttcctggagagcaaccccgtgatgatcgatgccaaggaagtgagcgccgcccaccgggccagatacttctggggcaatctgcctggcatgaacagacccctggccagcaccgtgaacgacaagctggagctgcaggagtgcctggagcacggccggatcgccaagttcagcaaggtgagaaccatcaccacccgaagcaacagcatcaaacaaggcaaggaccagcactttcctgtgttcatgaacgagaaggaggacatcctgtggtgtaccgagatggagagagtgttcgggttcccagtccactacacagatgtcagcaacatgtctagactggccagacagagactgctgggaagaagctggtccgtccctgtgatcagacacctgttcgcccctctgaaggagtacttcgcctgcgtgagcagcggcaacagcaacgccaacagccggggccccagcttctctagcggcctggtgccactgtccctgagagggagccacatgggccccatggagatctacaaaaccgtgagcgcctggaagcggcagcctgtgcgcgtgctgagcctgtttcggaatatcgataaagtcctgaaaagcctgggattcctggagagcggctctggctccggcggtggcaccctgaagtacgtggaggatgtgacaaacgtggtcagacgggatgtggagaagtggggccccttcgatctggtgtacggcagcacccaacccctgggcagctcttgtgaccggtgccctggctggtacatgtttcagttccaccggatcctgcagtacgccctgccgagacaggagtcccagcggccattcttttggattttcatggacaacttgctgctgaccgaggatgaccaggaaactaccactcggttcctgcagaccgaagccgtgaccctgcaggacgtgagaggccgggactaccagaacgccatgcgggtgtggtccaacatccctggactgaaaagcaagcacgcacctctgacccctaaagaagaggagtacctgcaggcccaggtgcggagcagaagcaagctggacgcccctaaggtggatctgctggtgaagaattgcctcctgcccctgagagagtacttcaagtatttcagccagaatagtctgcccctgggaggcagcggcggcggcgtggccttcgaggacgtggccgtgaacttcacccaggaggagtgggccctgctggaccccagccagaagaacctgtacagggaggtgatgcaggagaccctgaggaacctggccagcatcggccagaggtggagcaaccagaacgccgaggacaagcaccagaaccccaggaggaacctgaggaggctgatcggcgagaggctgttccagagcaaggagagccaccagcacgtggaggtgctgggcggcccaagcagcggcgcccctcctcccagcggcggcaggcggcccaagcagcggcgcccctcctcccagcggcggcagcccagccggctccccaacctctaccgaggagggcacctctgagtccgccacccccgagagcggccctggcacctccaccgagcccagcgagggcagcgcacccggcagccctgccggcagccccacctccacagaggagggaaccagcaccgagcccagcgaaggcagcgccccaggcaccagcaccgagcctagtgagcaggagattaaacggatcaacaagatcagaagaagacttgtgaaagacagcaacaccaagaaggccggcaagacaggccccatgaaaaccctgctggttagagtgatgacacccgatctgagagagcggctggaaaacctgagaaagaagcctgaaaatatcccccagcccatcagcaatacatctagagccaacctgaataagctgctgaccgattacaccgaaatgaagaaggcgatcctgcatgtgtactgggaagagttccagaaggaccctgtgggcctgatgagccgggtggcccagcctgccagcaagaagatcgatcagaacaagctgaaacctgagatggacgagaagggcaacctgaccaccgccggctttgcctgctctcagtgtggccagcccctgttcgtgtacaagctggagcaggtgtctgagaagggcaaggcttacaccaactacttcggacggtgcaatgtggccgagcacgaaaagctgatcctgctggcccagctgaagcccgagaaggatagcgacgaagccgtgacatatagcctgggaaagtttgggcagagggccctggatttctacagcattcatgtgaccaaggagtccacccaccccgtgaagcccctggcccagatcgccggaaacagatacgcctccggacctgtgggaaaggccctgagcgacgcatgtatgggcacaatcgcctccttcctgtctaagtaccaggacatcatcatcgaacaccagaaggtggtgaagggcaaccagaagagactggagagcctgcgggagctggccggcaaggaaaacctggaataccctagcgtgaccctgccacctcagcctcacaccaaggagggcgttgatgcctacaacgaagtgatcgcccgggtgcgaatgtgggtgaacctgaacctgtggcagaagctgaagctaagcagagatgatgccaagcctctgctgagactgaagggattcccttcctttcctctggtcgagagacaggccaacgaagtggactggtgggacatggtgtgtaacgtgaagaagctgatcaacgagaaaaaggaggatggcaaggtgttttggcagaatctggctggctacaagagacaggaagccctgagaccatacctgagcagcgaggaagatcggaagaagggaaagaaattcgctcggtaccagctgggcgacctgctgctgcacctggaaaagaagcacggcgaggactggggaaaggtgtacgacgaggcctgggagcggattgacaagaaagtggaaggcctgagcaagcacatcaagctggaagaggaacggagaagcgaggacgcccagagcaaggccgccctgaccgactggctgcgggctaaggccagcttcgtgatcgagggcctgaaggaggccgacaaggacgagttctgcagatgcgagctgaagctgcagaagtggtacggggacctgcggggaaagcccttcgccatcgaagccgagaacagcatcctggacatcagcggcttcagcaagcagtacaactgtgccttcatctggcagaaggacggcgtgaagaagctgaacctgtacctgatcatcaactacttcaagggcggcaagctgcggttcaagaagatcaaacctgaagccttcgaagccaacagattctacaccgtgatcaacaaaaagagcggcgagatcgtgcccatggaggtgaacttcaacttcgacgaccccaacctgatcatcctgcctctggcctttggcaagagacagggcagagaattcatctggaacgacctgctgtccctggaaaccggcagcctgaagctggccaacggaagagtgatcgagaagacactgtacaacagaagaacccggcaggatgagcctgccctgttcgtggccctgaccttcgagcggcgggaggtcctggactcctccaatatcaaaccaatgaacctgatcggcgtggcaagaggcgaaaacatccccgccgtgatcgccctgaccgaccccgagggctgcccactgagccggtttaaggatagcctgggaaacccaacccacatcctgagaatcggcgagagctataaggagaagcagcggaccatccaggccaagaaggaggtggagcagcggagagccggcggctacagccggaagtacgccagcaaagccaagaatctggcagacgatatggtgagaaacaccgctagagatctgctgtactacgccgtgacccaggatgccatgctgatcttcgccaacctgagccggggcttcggccggcagggcaagcggaccttcatggccgagagacagtacacacggatggaggactggctgaccgccaagctggcctacgagggcctgagcaagacctacctgtccaagacactggcccagtacacctccaagacatgcagcaactgtgggtttaccatcaccagcgccgactacgacagggtgctggagaagctgaagaagacagcaacaggctggatgaccacaattaacggcaaggagctgaaggtggagggccagattacctactacaacagatacaagagacagaacgtagtcaaggacctgtccgtcgagctggatagactgagcgaagaatctgtgaacaacgacatctcctcctggacaaagggcagaagcggagaagctctgagcctcctgaagaaaagattctcccatagacccgtgcaggagaagttcgtgtgcctgaactgcggcttcgagacacacgcagccgagcaagccgccctgaacatcgccagatcctggctgttcctgcggagccaggagtacaagaaataccagacaaacaagacaaccggcaacaccgataagagagccttcgtcgagacctggcagtccttttaccggaagaagcttaaggaggtgtggaaacctgccgtgcggtctggcggatctggcggaggctccaccagccccaagaaaaagagaaaagtctaagctgccttctgcggggcttgccttctggccatgcccttcttctctcccttgcacctgtacctcttggtctttgaataaagcctgagtaggaaggctagcaaaaaaaaaaaaaaaaaaaaaaaaaaaaaaaaaaaaaaaaaaaaaaaaaaaaaaaaaaaaaaaaaaaaaaaaaaaaaaaagcccagccggctccccaacctctaccgaggagggcacctctgagtccgccacccccgagagcggccctggcacctccaccgagcccagcgagggcagcgcacccggcagccctgccggcagccccacctccacagaggagggaaccagcaccgagcccagcgaaggcagcgccccaggcaccagcaccgagcctagtgagcaggagattaaacggatcaacaagatcagaagaagacttgtgaaagacagcaacaccaagaaggccggcaagacaggccccatgaaaaccctgctggttagagtgatgacacccgatctgagagagcggctggaaaacctgagaaagaagcctgaaaatatcccccagcccatcagcaatacatctagagccaacctgaataagctgctgaccgattacaccgaaatgaagaaggcgatcctgcatgtgtactgggaagagttccagaaggaccctgtgggcctgatgagccgggtggcccagcctgccagcaagaagatcgatcagaacaagctgaaacctgagatggacgagaagggcaacctgaccaccgccggctttgcctgctctcagtgtggccagcccctgttcgtgtacaagctggagcaggtgtctgagaagggcaaggcttacaccaactacttcggacggtgcaatgtggccgagcacgaaaagctgatcctgctggcccagctgaagcccgagaaggatagcgacgaagccgtgacatatagcctgggaaagtttgggcagagggccctggatttctacagcattcatgtgaccaaggagtccacccaccccgtgaagcccctggcccagatcgccggaaacagatacgcctccggacctgtgggaaaggccctgagcgacgcatgtatgggcacaatcgcctccttcctgtctaagtaccaggacatcatcatcgaacaccagaaggtggtgaagggcaaccagaagagactggagagcctgcgggagctggccggcaaggaaaacctggaataccctagcgtgaccctgccacctcagcctcacaccaaggagggcgttgatgcctacaacgaagtgatcgcccgggtgcgaatgtgggtgaacctgaacctgtggcagaagctgaagctaagcagagatgatgccaagcctctgctgagactgaagggattcccttcctttcctctggtcgagagacaggccaacgaagtggactggtgggacatggtgtgtaacgtgaagaagctgatcaacgagaaaaaggaggatggcaaggtgttttggcagaatctggctggctacaagagacaggaagccctgagaccatacctgagcagcgaggaagatcggaagaagggaaagaaattcgctcggtaccagctgggcgacctgctgctgcacctggaaaagaagcacggcgaggactggggaaaggtgtacgacgaggcctgggagcggattgacaagaaagtggaaggcctgagcaagcacatcaagctggaagaggaacggagaagcgaggacgcccagagcaaggccgccctgaccgactggctgcgggctaaggccagcttcgtgatcgagggcctgaaggaggccgacaaggacgagttctgcagatgcgagctgaagctgcagaagtggtacggggacctgcggggaaagcccttcgccatcgaagccgagaacagcatcctggacatcagcggcttcagcaagcagtacaactgtgccttcatctggcagaaggacggcgtgaagaagctgaacctgtacctgatcatcaactacttcaagggcggcaagctgcggttcaagaagatcaaacctgaagccttcgaagccaacagattctacaccgtgatcaacaaaaagagcggcgagatcgtgcccatggaggtgaacttcaacttcgacgaccccaacctgatcatcctgcctctggcctttggcaagagacagggcagagaattcatctggaacgacctgctgtccctggaaaccggcagcctgaagctggccaacggaagagtgatcgagaagacactgtacaacagaagaacccggcaggatgagcctgccctgttcgtggccctgaccttcgagcggcgggaggtcctggactcctccaatatcaaaccaatgaacctgatcggcgtggcaagaggcgaaaacatccccgccgtgatcgccctgaccgaccccgagggctgcccactgagccggtttaaggatagcctgggaaacccaacccacatcctgagaatcggcgagagctataaggagaagcagcggaccatccaggccaagaaggaggtggagcagcggagagccggcggctacagccggaagtacgccagcaaagccaagaatctggcagacgatatggtgagaaacaccgctagagatctgctgtactacgccgtgacccaggatgccatgctgatcttcgccaacctgagccggggcttcggccggcagggcaagcggaccttcatggccgagagacagtacacacggatggaggactggctgaccgccaagctggcctacgagggcctgagcaagacctacctgtccaagacactggcccagtacacctccaagacatgcagcaactgtgggtttaccatcaccagcgccgactacgacagggtgctggagaagctgaagaagacagcaacaggctggatgaccacaattaacggcaaggagctgaaggtggagggccagattacctactacaacagatacaagagacagaacgtagtcaaggacctgtccgtcgagctggatagactgagcgaagaatctgtgaacaacgacatctcctcctggacaaagggcagaagcggagaagctctgagcctcctgaagaaaagattctcccatagacccgtgcaggagaagttcgtgtgcctgaactgcggcttcgagacacacgcagccgagcaagccgccctgaacatcgccagatcctggctgttcctgcggagccaggagtacaagaaataccagacaaacaagacaaccggcaacaccgataagagagccttcgtcgagacctggcagtccttttaccggaagaagcttaaggaggtgtggaaacctgccgtgcggtctggcggatctggcggaggctccaccagccccaagaaaaagagaaaagtctaagctgccttctgcggggcttgccttctggccatgcccttcttctctcccttgcacctgtacctcttggtctttgaataaagcctgagtaggaaggctagcaaaaaaaaaaaaaaaaaaaaaaaaaaaaaaaaaaaaaaaaaaaaaaaaaaaaaaaaaaaaaaaaaaaaaaaaaaaaaaaa

SEQ ID NO: 9808 - RNA, 8787 nt, synthetic construct
  source 1..8787: mol_type = other RNA
aggaaataagagagaaaagaagagtaagaagaaatataagagccaccatggcccctaagaagaagcgtaaagtgagccggatgaaccacgaccaggagttcgacccccctaaggtgtaccctcccgtccccgccgagaagagaaagcccatccgggtcctgagcctgttcgatggcatcgccaccggtctgctggtgctgaaggacctgggcatccaggtggataggtacattgcctccgaggtgtgcgaggactccatcaccgtgggaatggtgcgtcatcagggcaagatcatgtacgtgggcgacgtgcggagcgtgacacagaagcatatccaggagtggggccctttcgacctggtgatcggcggcagcccttgcaatgacctgagcatcgtgaacccagcccggaagggcctgtacgagggaaccggcagactgttcttcgagttttacagactgctgcacgacgcccggcctaaggaaggcgacgaccggcccttcttttggctgttcgagaatgtggtggccatgggagtcagcgacaagcgggatattagccggttcctggagagcaaccccgtgatgatcgatgccaaggaagtgagcgccgcccaccgggccagatacttctggggcaatctgcctggcatgaacagacccctggccagcaccgtgaacgacaagctggagctgcaggagtgcctggagcacggccggatcgccaagttcagcaaggtgagaaccatcaccacccgaagcaacagcatcaaacaaggcaaggaccagcactttcctgtgttcatgaacgagaaggaggacatcctgtggtgtaccgagatggagagagtgttcgggttcccagtccactacacagatgtcagcaacatgtctagactggccagacagagactgctgggaagaagctggtccgtccctgtgatcagacacctgttcgcccctctgaaggagtacttcgcctgcgtgagcagcggcaacagcaacgccaacagccggggccccagcttctctagcggcctggtgccactgtccctgagagggagccacatgggccccatggagatctacaaaaccgtgagcgcctggaagcggcagcctgtgcgcgtgctgagcctgtttcggaatatcgataaagtcctgaaaagcctgggattcctggagagcggctctggctccggcggtggcaccctgaagtacgtggaggatgtgacaaacgtggtcagacgggatgtggagaagtggggccccttcgatctggtgtacggcagcacccaacccctgggcagctcttgtgaccggtgccctggctggtacatgtttcagttccaccggatcctgcagtacgccctgccgagacaggagtcccagcggccattcttttggattttcatggacaacttgctgctgaccgaggatgaccaggaaactaccactcggttcctgcagaccgaagccgtgaccctgcaggacgtgagaggccgggactaccagaacgccatgcgggtgtggtccaacatccctggactgaaaagcaagcacgcacctctgacccctaaagaagaggagtacctgcaggcccaggtgcggagcagaagcaagctggacgcccctaaggtggatctgctggtgaagaattgcctcctgcccctgagagagtacttcaagtatttcagccagaatagtctgcccctgggaggcagcggcggcggcgtggaggagcccgtgaccttcaaggacgtggccgtggccttcacccaggaggagtggggccagctggacctggtgcagaggaccctgtacagggacgtgatgctggagacctacggccacctgctgagcgtgggcaaccagatcgccaagcccgaggtgatcagcctgctggagcagggcgaggagccctggagcgtggagcagggctaccccaagagcagctgccccgagtggatgaggaacggcggcccaagcagcggcgcccctcctcccagcggcggcaggcggcccaagcagcggcgcccctcctcccagcggcggcagcccagccggctccccaacctctaccgaggagggcacctctgagtccgccacccccgagagcggccctggcacctccaccgagcccagcgagggcagcgcacccggcagccctgccggcagccccacctccacagaggagggaaccagcaccgagcccagcgaaggcagcgccccaggcaccagcaccgagcctagtgagcaggagattaaacggatcaacaagatcagaagaagacttgtgaaagacagcaacaccaagaaggccggcaagacaggccccatgaaaaccctgctggttagagtgatgacacccgatctgagagagcggctggaaaacctgagaaagaagcctgaaaatatcccccagcccatcagcaatacatctagagccaacctgaataagctgctgaccgattacaccgaaatgaagaaggcgatcctgcatgtgtactgggaagagttccagaaggaccctgtgggcctgatgagccgggtggcccagcctgccagcaagaagatcgatcagaacaagctgaaacctgagatggacgagaagggcaacctgaccaccgccggctttgcctgctctcagtgtggccagcccctgttcgtgtacaagctggagcaggtgtctgagaagggcaaggcttacaccaactacttcggacggtgcaatgtggccgagcacgaaaagctgatcctgctggcccagctgaagcccgagaaggatagcgacgaagccgtgacatatagcctgggaaagtttgggcagagggccctggatttctacagcattcatgtgaccaaggagtccacccaccccgtgaagcccctggcccagatcgccggaaacagatacgcctccggacctgtgggaaaggccctgagcgacgcatgtatgggcacaatcgcctccttcctgtctaagtaccaggacatcatcatcgaacaccagaaggtggtgaagggcaaccagaagagactggagagcctgcgggagctggccggcaaggaaaacctggaataccctagcgtgaccctgccacctcagcctcacaccaaggagggcgttgatgcctacaacgaagtgatcgcccgggtgcgaatgtgggtgaacctgaacctgtggcagaagctgaagctaagcagagatgatgccaagcctctgctgagactgaagggattcccttcctttcctctggtcgagagacaggccaacgaagtggactggtgggacatggtgtgtaacgtgaagaagctgatcaacgagaaaaaggaggatggcaaggtgttttggcagaatctggctggctacaagagacaggaagccctgagaccatacctgagcagcgaggaagatcggaagaagggaaagaaattcgctcggtaccagctgggcgacctgctgctgcacctggaaaagaagcacggcgaggactggggaaaggtgtacgacgaggcctgggagcggattgacaagaaagtggaaggcctgagcaagcacatcaagctggaagaggaacggagaagcgaggacgcccagagcaaggccgccctgaccgactggctgcgggctaaggccagcttcgtgatcgagggcctgaaggaggccgacaaggacgagttctgcagatgcgagctgaagctgcagaagtggtacggggacctgcggggaaagcccttcgccatcgaagccgagaacagcatcctggacatcagcggcttcagcaagcagtacaactgtgccttcatctggcagaaggacggcgtgaagaagctgaacctgtacctgatcatcaactacttcaagggcggcaagctgcggttcaagaagatcaaacctgaagccttcgaagccaacagattctacaccgtgatcaacaaaaagagcggcgagatcgtgcccatggaggtgaacttcaacttcgacgaccccaacctgatcatcctgcctctggcctttggcaagagacagggcagagaattcatctggaacgacctgctgtccctggaaaccggcagcctgaagctggccaacggaagagtgatcgagaagacactgtacaacagaagaacccggcaggatgagcctgccctgttcgtggccctgaccttcgagcggcgggaggtcctggactcctccaatatcaaaccaatgaacctgatcggcgtggcaagaggcgaaaacatccccgccgtgatcgccctgaccgaccccgagggctgcccactgagccggtttaaggatagcctgggaaacccaacccacatcctgagaatcggcgagagctataaggagaagcagcggaccatccaggccaagaaggaggtggagcagcggagagccggcggctacagccggaagtacgccagcaaagccaagaatctggcagacgatatggtgagaaacaccgctagagatctgctgtactacgccgtgacccaggatgccatgctgatcttcgccaacctgagccggggcttcggccggcagggcaagcggaccttcatggccgagagacagtacacacggatggaggactggctgaccgccaagctggcctacgagggcctgagcaagacctacctgtccaagacactggcccagtacacctccaagacatgcagcaactgtgggtttaccatcaccagcgccgactacgacagggtgctggagaagctgaagaagacagcaacaggctggatgaccacaattaacggcaaggagctgaaggtggagggccagattacctactacaacagatacaagagacagaacgtagtcaaggacctgtccgtcgagctggatagactgagcgaagaatctgtgaacaacgacatctcctcctggacaaagggcagaagcggagaagctctgagcctcctgaagaaaagattctcccatagacccgtgcaggagaagttcgtgtgcctgaactgcggcttcgagacacacgcagccgagcaagccgccctgaacatcgccagatcctggctgttcctgcggagccaggagtacaagaaataccagacaaacaagacaaccggcaacaccgataagagagccttcgtcgagacctggcagtccttttaccggaagaagcttaaggaggtgtggaaacctgccgtgcggtctggcggatctggcggaggctccaccagccccaagaaaaagagaaaagtctaagctgccttctgcggggcttgccttctggccatgcccttcttctctcccttgcacctgtacctcttggtctttgaataaagcctgagtaggaaggctagcaaaaaaaaaaaaaaaaaaaaaaaaaaaaaaaaaaaaaaaaaaaaaaaaaaaaaaaaaaaaaaaaaaaaaaaaaaaaaaaagcccagccggctccccaacctctaccgaggagggcacctctgagtccgccacccccgagagcggccctggcacctccaccgagcccagcgagggcagcgcacccggcagccctgccggcagccccacctccacagaggagggaaccagcaccgagcccagcgaaggcagcgccccaggcaccagcaccgagcctagtgagcaggagattaaacggatcaacaagatcagaagaagacttgtgaaagacagcaacaccaagaaggccggcaagacaggccccatgaaaaccctgctggttagagtgatgacacccgatctgagagagcggctggaaaacctgagaaagaagcctgaaaatatcccccagcccatcagcaatacatctagagccaacctgaataagctgctgaccgattacaccgaaatgaagaaggcgatcctgcatgtgtactgggaagagttccagaaggaccctgtgggcctgatgagccgggtggcccagcctgccagcaagaagatcgatcagaacaagctgaaacctgagatggacgagaagggcaacctgaccaccgccggctttgcctgctctcagtgtggccagcccctgttcgtgtacaagctggagcaggtgtctgagaagggcaaggcttacaccaactacttcggacggtgcaatgtggccgagcacgaaaagctgatcctgctggcccagctgaagcccgagaaggatagcgacgaagccgtgacatatagcctgggaaagtttgggcagagggccctggatttctacagcattcatgtgaccaaggagtccacccaccccgtgaagcccctggcccagatcgccggaaacagatacgcctccggacctgtgggaaaggccctgagcgacgcatgtatgggcacaatcgcctccttcctgtctaagtaccaggacatcatcatcgaacaccagaaggtggtgaagggcaaccagaagagactggagagcctgcgggagctggccggcaaggaaaacctggaataccctagcgtgaccctgccacctcagcctcacaccaaggagggcgttgatgcctacaacgaagtgatcgcccgggtgcgaatgtgggtgaacctgaacctgtggcagaagctgaagctaagcagagatgatgccaagcctctgctgagactgaagggattcccttcctttcctctggtcgagagacaggccaacgaagtggactggtgggacatggtgtgtaacgtgaagaagctgatcaacgagaaaaaggaggatggcaaggtgttttggcagaatctggctggctacaagagacaggaagccctgagaccatacctgagcagcgaggaagatcggaagaagggaaagaaattcgctcggtaccagctgggcgacctgctgctgcacctggaaaagaagcacggcgaggactggggaaaggtgtacgacgaggcctgggagcggattgacaagaaagtggaaggcctgagcaagcacatcaagctggaagaggaacggagaagcgaggacgcccagagcaaggccgccctgaccgactggctgcgggctaaggccagcttcgtgatcgagggcctgaaggaggccgacaaggacgagttctgcagatgcgagctgaagctgcagaagtggtacggggacctgcggggaaagcccttcgccatcgaagccgagaacagcatcctggacatcagcggcttcagcaagcagtacaactgtgccttcatctggcagaaggacggcgtgaagaagctgaacctgtacctgatcatcaactacttcaagggcggcaagctgcggttcaagaagatcaaacctgaagccttcgaagccaacagattctacaccgtgatcaacaaaaagagcggcgagatcgtgcccatggaggtgaacttcaacttcgacgaccccaacctgatcatcctgcctctggcctttggcaagagacagggcagagaattcatctggaacgacctgctgtccctggaaaccggcagcctgaagctggccaacggaagagtgatcgagaagacactgtacaacagaagaacccggcaggatgagcctgccctgttcgtggccctgaccttcgagcggcgggaggtcctggactcctccaatatcaaaccaatgaacctgatcggcgtggcaagaggcgaaaacatccccgccgtgatcgccctgaccgaccccgagggctgcccactgagccggtttaaggatagcctgggaaacccaacccacatcctgagaatcggcgagagctataaggagaagcagcggaccatccaggccaagaaggaggtggagcagcggagagccggcggctacagccggaagtacgccagcaaagccaagaatctggcagacgatatggtgagaaacaccgctagagatctgctgtactacgccgtgacccaggatgccatgctgatcttcgccaacctgagccggggcttcggccggcagggcaagcggaccttcatggccgagagacagtacacacggatggaggactggctgaccgccaagctggcctacgagggcctgagcaagacctacctgtccaagacactggcccagtacacctccaagacatgcagcaactgtgggtttaccatcaccagcgccgactacgacagggtgctggagaagctgaagaagacagcaacaggctggatgaccacaattaacggcaaggagctgaaggtggagggccagattacctactacaacagatacaagagacagaacgtagtcaaggacctgtccgtcgagctggatagactgagcgaagaatctgtgaacaacgacatctcctcctggacaaagggcagaagcggagaagctctgagcctcctgaagaaaagattctcccatagacccgtgcaggagaagttcgtgtgcctgaactgcggcttcgagacacacgcagccgagcaagccgccctgaacatcgccagatcctggctgttcctgcggagccaggagtacaagaaataccagacaaacaagacaaccggcaacaccgataagagagccttcgtcgagacctggcagtccttttaccggaagaagcttaaggaggtgtggaaacctgccgtgcggtctggcggatctggcggaggctccaccagccccaagaaaaagagaaaagtctaagctgccttctgcggggcttgccttctggccatgcccttcttctctcccttgcacctgtacctcttggtctttgaataaagcctgagtaggaaggctagcaaaaaaaaaaaaaaaaaaaaaaaaaaaaaaaaaaaaaaaaaaaaaaaaaaaaaaaaaaaaaaaaaaaaaaaaaaaaaaaa

SEQ ID NO: 9809 - RNA, 8787 nt, synthetic construct
  source 1..8787: mol_type = other RNA
aggaaataagagagaaaagaagagtaagaagaaatataagagccaccatggcccctaagaagaagcgtaaagtgagccggatgaaccacgaccaggagttcgacccccctaaggtgtaccctcccgtccccgccgagaagagaaagcccatccgggtcctgagcctgttcgatggcatcgccaccggtctgctggtgctgaaggacctgggcatccaggtggataggtacattgcctccgaggtgtgcgaggactccatcaccgtgggaatggtgcgtcatcagggcaagatcatgtacgtgggcgacgtgcggagcgtgacacagaagcatatccaggagtggggccctttcgacctggtgatcggcggcagcccttgcaatgacctgagcatcgtgaacccagcccggaagggcctgtacgagggaaccggcagactgttcttcgagttttacagactgctgcacgacgcccggcctaaggaaggcgacgaccggcccttcttttggctgttcgagaatgtggtggccatgggagtcagcgacaagcgggatattagccggttcctggagagcaaccccgtgatgatcgatgccaaggaagtgagcgccgcccaccgggccagatacttctggggcaatctgcctggcatgaacagacccctggccagcaccgtgaacgacaagctggagctgcaggagtgcctggagcacggccggatcgccaagttcagcaaggtgagaaccatcaccacccgaagcaacagcatcaaacaaggcaaggaccagcactttcctgtgttcatgaacgagaaggaggacatcctgtggtgtaccgagatggagagagtgttcgggttcccagtccactacacagatgtcagcaacatgtctagactggccagacagagactgctgggaagaagctggtccgtccctgtgatcagacacctgttcgcccctctgaaggagtacttcgcctgcgtgagcagcggcaacagcaacgccaacagccggggccccagcttctctagcggcctggtgccactgtccctgagagggagccacatgggccccatggagatctacaaaaccgtgagcgcctggaagcggcagcctgtgcgcgtgctgagcctgtttcggaatatcgataaagtcctgaaaagcctgggattcctggagagcggctctggctccggcggtggcaccctgaagtacgtggaggatgtgacaaacgtggtcagacgggatgtggagaagtggggccccttcgatctggtgtacggcagcacccaacccctgggcagctcttgtgaccggtgccctggctggtacatgtttcagttccaccggatcctgcagtacgccctgccgagacaggagtcccagcggccattcttttggattttcatggacaacttgctgctgaccgaggatgaccaggaaactaccactcggttcctgcagaccgaagccgtgaccctgcaggacgtgagaggccgggactaccagaacgccatgcgggtgtggtccaacatccctggactgaaaagcaagcacgcacctctgacccctaaagaagaggagtacctgcaggcccaggtgcggagcagaagcaagctggacgcccctaaggtggatctgctggtgaagaattgcctcctgcccctgagagagtacttcaagtatttcagccagaatagtctgcccctgggaggcagcggcggcggctgcgaggtgagcgtgagcttcgaggacgtgaccgtggacttcagcagggaggagtggcagcacctggaccccgcccagaggaggctgtacagggacgtgaccctggagaactacagccacctgtgcagcgtgggctaccaggtgcccaagcccgaggtgatcttcaagctggagcagggcgagggcccctggaccctggaggaggagaccccccaccagagctgcagcgacgaggacatgggcggcggcccaagcagcggcgcccctcctcccagcggcggcaggcggcccaagcagcggcgcccctcctcccagcggcggcagcccagccggctccccaacctctaccgaggagggcacctctgagtccgccacccccgagagcggccctggcacctccaccgagcccagcgagggcagcgcacccggcagccctgccggcagccccacctccacagaggagggaaccagcaccgagcccagcgaaggcagcgccccaggcaccagcaccgagcctagtgagcaggagattaaacggatcaacaagatcagaagaagacttgtgaaagacagcaacaccaagaaggccggcaagacaggccccatgaaaaccctgctggttagagtgatgacacccgatctgagagagcggctggaaaacctgagaaagaagcctgaaaatatcccccagcccatcagcaatacatctagagccaacctgaataagctgctgaccgattacaccgaaatgaagaaggcgatcctgcatgtgtactgggaagagttccagaaggaccctgtgggcctgatgagccgggtggcccagcctgccagcaagaagatcgatcagaacaagctgaaacctgagatggacgagaagggcaacctgaccaccgccggctttgcctgctctcagtgtggccagcccctgttcgtgtacaagctggagcaggtgtctgagaagggcaaggcttacaccaactacttcggacggtgcaatgtggccgagcacgaaaagctgatcctgctggcccagctgaagcccgagaaggatagcgacgaagccgtgacatatagcctgggaaagtttgggcagagggccctggatttctacagcattcatgtgaccaaggagtccacccaccccgtgaagcccctggcccagatcgccggaaacagatacgcctccggacctgtgggaaaggccctgagcgacgcatgtatgggcacaatcgcctccttcctgtctaagtaccaggacatcatcatcgaacaccagaaggtggtgaagggcaaccagaagagactggagagcctgcgggagctggccggcaaggaaaacctggaataccctagcgtgaccctgccacctcagcctcacaccaaggagggcgttgatgcctacaacgaagtgatcgcccgggtgcgaatgtgggtgaacctgaacctgtggcagaagctgaagctaagcagagatgatgccaagcctctgctgagactgaagggattcccttcctttcctctggtcgagagacaggccaacgaagtggactggtgggacatggtgtgtaacgtgaagaagctgatcaacgagaaaaaggaggatggcaaggtgttttggcagaatctggctggctacaagagacaggaagccctgagaccatacctgagcagcgaggaagatcggaagaagggaaagaaattcgctcggtaccagctgggcgacctgctgctgcacctggaaaagaagcacggcgaggactggggaaaggtgtacgacgaggcctgggagcggattgacaagaaagtggaaggcctgagcaagcacatcaagctggaagaggaacggagaagcgaggacgcccagagcaaggccgccctgaccgactggctgcgggctaaggccagcttcgtgatcgagggcctgaaggaggccgacaaggacgagttctgcagatgcgagctgaagctgcagaagtggtacggggacctgcggggaaagcccttcgccatcgaagccgagaacagcatcctggacatcagcggcttcagcaagcagtacaactgtgccttcatctggcagaaggacggcgtgaagaagctgaacctgtacctgatcatcaactacttcaagggcggcaagctgcggttcaagaagatcaaacctgaagccttcgaagccaacagattctacaccgtgatcaacaaaaagagcggcgagatcgtgcccatggaggtgaacttcaacttcgacgaccccaacctgatcatcctgcctctggcctttggcaagagacagggcagagaattcatctggaacgacctgctgtccctggaaaccggcagcctgaagctggccaacggaagagtgatcgagaagacactgtacaacagaagaacccggcaggatgagcctgccctgttcgtggccctgaccttcgagcggcgggaggtcctggactcctccaatatcaaaccaatgaacctgatcggcgtggcaagaggcgaaaacatccccgccgtgatcgccctgaccgaccccgagggctgcccactgagccggtttaaggatagcctgggaaacccaacccacatcctgagaatcggcgagagctataaggagaagcagcggaccatccaggccaagaaggaggtggagcagcggagagccggcggctacagccggaagtacgccagcaaagccaagaatctggcagacgatatggtgagaaacaccgctagagatctgctgtactacgccgtgacccaggatgccatgctgatcttcgccaacctgagccggggcttcggccggcagggcaagcggaccttcatggccgagagacagtacacacggatggaggactggctgaccgccaagctggcctacgagggcctgagcaagacctacctgtccaagacactggcccagtacacctccaagacatgcagcaactgtgggtttaccatcaccagcgccgactacgacagggtgctggagaagctgaagaagacagcaacaggctggatgaccacaattaacggcaaggagctgaaggtggagggccagattacctactacaacagatacaagagacagaacgtagtcaaggacctgtccgtcgagctggatagactgagcgaagaatctgtgaacaacgacatctcctcctggacaaagggcagaagcggagaagctctgagcctcctgaagaaaagattctcccatagacccgtgcaggagaagttcgtgtgcctgaactgcggcttcgagacacacgcagccgagcaagccgccctgaacatcgccagatcctggctgttcctgcggagccaggagtacaagaaataccagacaaacaagacaaccggcaacaccgataagagagccttcgtcgagacctggcagtccttttaccggaagaagcttaaggaggtgtggaaacctgccgtgcggtctggcggatctggcggaggctccaccagccccaagaaaaagagaaaagtctaagctgccttctgcggggcttgccttctggccatgcccttcttctctcccttgcacctgtacctcttggtctttgaataaagcctgagtaggaaggctagcaaaaaaaaaaaaaaaaaaaaaaaaaaaaaaaaaaaaaaaaaaaaaaaaaaaaaaaaaaaaaaaaaaaaaaaaaaaaaaaagcccagccggctccccaacctctaccgaggagggcacctctgagtccgccacccccgagagcggccctggcacctccaccgagcccagcgagggcagcgcacccggcagccctgccggcagccccacctccacagaggagggaaccagcaccgagcccagcgaaggcagcgccccaggcaccagcaccgagcctagtgagcaggagattaaacggatcaacaagatcagaagaagacttgtgaaagacagcaacaccaagaaggccggcaagacaggccccatgaaaaccctgctggttagagtgatgacacccgatctgagagagcggctggaaaacctgagaaagaagcctgaaaatatcccccagcccatcagcaatacatctagagccaacctgaataagctgctgaccgattacaccgaaatgaagaaggcgatcctgcatgtgtactgggaagagttccagaaggaccctgtgggcctgatgagccgggtggcccagcctgccagcaagaagatcgatcagaacaagctgaaacctgagatggacgagaagggcaacctgaccaccgccggctttgcctgctctcagtgtggccagcccctgttcgtgtacaagctggagcaggtgtctgagaagggcaaggcttacaccaactacttcggacggtgcaatgtggccgagcacgaaaagctgatcctgctggcccagctgaagcccgagaaggatagcgacgaagccgtgacatatagcctgggaaagtttgggcagagggccctggatttctacagcattcatgtgaccaaggagtccacccaccccgtgaagcccctggcccagatcgccggaaacagatacgcctccggacctgtgggaaaggccctgagcgacgcatgtatgggcacaatcgcctccttcctgtctaagtaccaggacatcatcatcgaacaccagaaggtggtgaagggcaaccagaagagactggagagcctgcgggagctggccggcaaggaaaacctggaataccctagcgtgaccctgccacctcagcctcacaccaaggagggcgttgatgcctacaacgaagtgatcgcccgggtgcgaatgtgggtgaacctgaacctgtggcagaagctgaagctaagcagagatgatgccaagcctctgctgagactgaagggattcccttcctttcctctggtcgagagacaggccaacgaagtggactggtgggacatggtgtgtaacgtgaagaagctgatcaacgagaaaaaggaggatggcaaggtgttttggcagaatctggctggctacaagagacaggaagccctgagaccatacctgagcagcgaggaagatcggaagaagggaaagaaattcgctcggtaccagctgggcgacctgctgctgcacctggaaaagaagcacggcgaggactggggaaaggtgtacgacgaggcctgggagcggattgacaagaaagtggaaggcctgagcaagcacatcaagctggaagaggaacggagaagcgaggacgcccagagcaaggccgccctgaccgactggctgcgggctaaggccagcttcgtgatcgagggcctgaaggaggccgacaaggacgagttctgcagatgcgagctgaagctgcagaagtggtacggggacctgcggggaaagcccttcgccatcgaagccgagaacagcatcctggacatcagcggcttcagcaagcagtacaactgtgccttcatctggcagaaggacggcgtgaagaagctgaacctgtacctgatcatcaactacttcaagggcggcaagctgcggttcaagaagatcaaacctgaagccttcgaagccaacagattctacaccgtgatcaacaaaaagagcggcgagatcgtgcccatggaggtgaacttcaacttcgacgaccccaacctgatcatcctgcctctggcctttggcaagagacagggcagagaattcatctggaacgacctgctgtccctggaaaccggcagcctgaagctggccaacggaagagtgatcgagaagacactgtacaacagaagaacccggcaggatgagcctgccctgttcgtggccctgaccttcgagcggcgggaggtcctggactcctccaatatcaaaccaatgaacctgatcggcgtggcaagaggcgaaaacatccccgccgtgatcgccctgaccgaccccgagggctgcccactgagccggtttaaggatagcctgggaaacccaacccacatcctgagaatcggcgagagctataaggagaagcagcggaccatccaggccaagaaggaggtggagcagcggagagccggcggctacagccggaagtacgccagcaaagccaagaatctggcagacgatatggtgagaaacaccgctagagatctgctgtactacgccgtgacccaggatgccatgctgatcttcgccaacctgagccggggcttcggccggcagggcaagcggaccttcatggccgagagacagtacacacggatggaggactggctgaccgccaagctggcctacgagggcctgagcaagacctacctgtccaagacactggcccagtacacctccaagacatgcagcaactgtgggtttaccatcaccagcgccgactacgacagggtgctggagaagctgaagaagacagcaacaggctggatgaccacaattaacggcaaggagctgaaggtggagggccagattacctactacaacagatacaagagacagaacgtagtcaaggacctgtccgtcgagctggatagactgagcgaagaatctgtgaacaacgacatctcctcctggacaaagggcagaagcggagaagctctgagcctcctgaagaaaagattctcccatagacccgtgcaggagaagttcgtgtgcctgaactgcggcttcgagacacacgcagccgagcaagccgccctgaacatcgccagatcctggctgttcctgcggagccaggagtacaagaaataccagacaaacaagacaaccggcaacaccgataagagagccttcgtcgagacctggcagtccttttaccggaagaagcttaaggaggtgtggaaacctgccgtgcggtctggcggatctggcggaggctccaccagccccaagaaaaagagaaaagtctaagctgccttctgcggggcttgccttctggccatgcccttcttctctcccttgcacctgtacctcttggtctttgaataaagcctgagtaggaaggctagcaaaaaaaaaaaaaaaaaaaaaaaaaaaaaaaaaaaaaaaaaaaaaaaaaaaaaaaaaaaaaaaaaaaaaaaaaaaaaaaa

SEQ ID NO: 9810 - RNA, 8787 nt, synthetic construct
  source 1..8787: mol_type = other RNA
aggaaataagagagaaaagaagagtaagaagaaatataagagccaccatggcccctaagaagaagcgtaaagtgagccggatgaaccacgaccaggagttcgacccccctaaggtgtaccctcccgtccccgccgagaagagaaagcccatccgggtcctgagcctgttcgatggcatcgccaccggtctgctggtgctgaaggacctgggcatccaggtggataggtacattgcctccgaggtgtgcgaggactccatcaccgtgggaatggtgcgtcatcagggcaagatcatgtacgtgggcgacgtgcggagcgtgacacagaagcatatccaggagtggggccctttcgacctggtgatcggcggcagcccttgcaatgacctgagcatcgtgaacccagcccggaagggcctgtacgagggaaccggcagactgttcttcgagttttacagactgctgcacgacgcccggcctaaggaaggcgacgaccggcccttcttttggctgttcgagaatgtggtggccatgggagtcagcgacaagcgggatattagccggttcctggagagcaaccccgtgatgatcgatgccaaggaagtgagcgccgcccaccgggccagatacttctggggcaatctgcctggcatgaacagacccctggccagcaccgtgaacgacaagctggagctgcaggagtgcctggagcacggccggatcgccaagttcagcaaggtgagaaccatcaccacccgaagcaacagcatcaaacaaggcaaggaccagcactttcctgtgttcatgaacgagaaggaggacatcctgtggtgtaccgagatggagagagtgttcgggttcccagtccactacacagatgtcagcaacatgtctagactggccagacagagactgctgggaagaagctggtccgtccctgtgatcagacacctgttcgcccctctgaaggagtacttcgcctgcgtgagcagcggcaacagcaacgccaacagccggggccccagcttctctagcggcctggtgccactgtccctgagagggagccacatgggccccatggagatctacaaaaccgtgagcgcctggaagcggcagcctgtgcgcgtgctgagcctgtttcggaatatcgataaagtcctgaaaagcctgggattcctggagagcggctctggctccggcggtggcaccctgaagtacgtggaggatgtgacaaacgtggtcagacgggatgtggagaagtggggccccttcgatctggtgtacggcagcacccaacccctgggcagctcttgtgaccggtgccctggctggtacatgtttcagttccaccggatcctgcagtacgccctgccgagacaggagtcccagcggccattcttttggattttcatggacaacttgctgctgaccgaggatgaccaggaaactaccactcggttcctgcagaccgaagccgtgaccctgcaggacgtgagaggccgggactaccagaacgccatgcgggtgtggtccaacatccctggactgaaaagcaagcacgcacctctgacccctaaagaagaggagtacctgcaggcccaggtgcggagcagaagcaagctggacgcccctaaggtggatctgctggtgaagaattgcctcctgcccctgagagagtacttcaagtatttcagccagaatagtctgcccctgggaggcagcggcggcggcttcggcaacctgctgggcgtgccctgggcccagggcaacagcgccctgcccgagggcctgctgagcttcaaggacatcagcatggagttcacctgggacgagtggcagctgctggacagcacccagaagtacctgtacagggacgtgatcctggagaactaccacaacctgatcagcgtgggctaccacggcaccaagcccgacctgatcttcaagctggagcagggcgaggacccctggatcggcggcccaagcagcggcgcccctcctcccagcggcggcaggcggcccaagcagcggcgcccctcctcccagcggcggcagcccagccggctccccaacctctaccgaggagggcacctctgagtccgccacccccgagagcggccctggcacctccaccgagcccagcgagggcagcgcacccggcagccctgccggcagccccacctccacagaggagggaaccagcaccgagcccagcgaaggcagcgccccaggcaccagcaccgagcctagtgagcaggagattaaacggatcaacaagatcagaagaagacttgtgaaagacagcaacaccaagaaggccggcaagacaggccccatgaaaaccctgctggttagagtgatgacacccgatctgagagagcggctggaaaacctgagaaagaagcctgaaaatatcccccagcccatcagcaatacatctagagccaacctgaataagctgctgaccgattacaccgaaatgaagaaggcgatcctgcatgtgtactgggaagagttccagaaggaccctgtgggcctgatgagccgggtggcccagcctgccagcaagaagatcgatcagaacaagctgaaacctgagatggacgagaagggcaacctgaccaccgccggctttgcctgctctcagtgtggccagcccctgttcgtgtacaagctggagcaggtgtctgagaagggcaaggcttacaccaactacttcggacggtgcaatgtggccgagcacgaaaagctgatcctgctggcccagctgaagcccgagaaggatagcgacgaagccgtgacatatagcctgggaaagtttgggcagagggccctggatttctacagcattcatgtgaccaaggagtccacccaccccgtgaagcccctggcccagatcgccggaaacagatacgcctccggacctgtgggaaaggccctgagcgacgcatgtatgggcacaatcgcctccttcctgtctaagtaccaggacatcatcatcgaacaccagaaggtggtgaagggcaaccagaagagactggagagcctgcgggagctggccggcaaggaaaacctggaataccctagcgtgaccctgccacctcagcctcacaccaaggagggcgttgatgcctacaacgaagtgatcgcccgggtgcgaatgtgggtgaacctgaacctgtggcagaagctgaagctaagcagagatgatgccaagcctctgctgagactgaagggattcccttcctttcctctggtcgagagacaggccaacgaagtggactggtgggacatggtgtgtaacgtgaagaagctgatcaacgagaaaaaggaggatggcaaggtgttttggcagaatctggctggctacaagagacaggaagccctgagaccatacctgagcagcgaggaagatcggaagaagggaaagaaattcgctcggtaccagctgggcgacctgctgctgcacctggaaaagaagcacggcgaggactggggaaaggtgtacgacgaggcctgggagcggattgacaagaaagtggaaggcctgagcaagcacatcaagctggaagaggaacggagaagcgaggacgcccagagcaaggccgccctgaccgactggctgcgggctaaggccagcttcgtgatcgagggcctgaaggaggccgacaaggacgagttctgcagatgcgagctgaagctgcagaagtggtacggggacctgcggggaaagcccttcgccatcgaagccgagaacagcatcctggacatcagcggcttcagcaagcagtacaactgtgccttcatctggcagaaggacggcgtgaagaagctgaacctgtacctgatcatcaactacttcaagggcggcaagctgcggttcaagaagatcaaacctgaagccttcgaagccaacagattctacaccgtgatcaacaaaaagagcggcgagatcgtgcccatggaggtgaacttcaacttcgacgaccccaacctgatcatcctgcctctggcctttggcaagagacagggcagagaattcatctggaacgacctgctgtccctggaaaccggcagcctgaagctggccaacggaagagtgatcgagaagacactgtacaacagaagaacccggcaggatgagcctgccctgttcgtggccctgaccttcgagcggcgggaggtcctggactcctccaatatcaaaccaatgaacctgatcggcgtggcaagaggcgaaaacatccccgccgtgatcgccctgaccgaccccgagggctgcccactgagccggtttaaggatagcctgggaaacccaacccacatcctgagaatcggcgagagctataaggagaagcagcggaccatccaggccaagaaggaggtggagcagcggagagccggcggctacagccggaagtacgccagcaaagccaagaatctggcagacgatatggtgagaaacaccgctagagatctgctgtactacgccgtgacccaggatgccatgctgatcttcgccaacctgagccggggcttcggccggcagggcaagcggaccttcatggccgagagacagtacacacggatggaggactggctgaccgccaagctggcctacgagggcctgagcaagacctacctgtccaagacactggcccagtacacctccaagacatgcagcaactgtgggtttaccatcaccagcgccgactacgacagggtgctggagaagctgaagaagacagcaacaggctggatgaccacaattaacggcaaggagctgaaggtggagggccagattacctactacaacagatacaagagacagaacgtagtcaaggacctgtccgtcgagctggatagactgagcgaagaatctgtgaacaacgacatctcctcctggacaaagggcagaagcggagaagctctgagcctcctgaagaaaagattctcccatagacccgtgcaggagaagttcgtgtgcctgaactgcggcttcgagacacacgcagccgagcaagccgccctgaacatcgccagatcctggctgttcctgcggagccaggagtacaagaaataccagacaaacaagacaaccggcaacaccgataagagagccttcgtcgagacctggcagtccttttaccggaagaagcttaaggaggtgtggaaacctgccgtgcggtctggcggatctggcggaggctccaccagccccaagaaaaagagaaaagtctaagctgccttctgcggggcttgccttctggccatgcccttcttctctcccttgcacctgtacctcttggtctttgaataaagcctgagtaggaaggctagcaaaaaaaaaaaaaaaaaaaaaaaaaaaaaaaaaaaaaaaaaaaaaaaaaaaaaaaaaaaaaaaaaaaaaaaaaaaaaaaagcccagccggctccccaacctctaccgaggagggcacctctgagtccgccacccccgagagcggccctggcacctccaccgagcccagcgagggcagcgcacccggcagccctgccggcagccccacctccacagaggagggaaccagcaccgagcccagcgaaggcagcgccccaggcaccagcaccgagcctagtgagcaggagattaaacggatcaacaagatcagaagaagacttgtgaaagacagcaacaccaagaaggccggcaagacaggccccatgaaaaccctgctggttagagtgatgacacccgatctgagagagcggctggaaaacctgagaaagaagcctgaaaatatcccccagcccatcagcaatacatctagagccaacctgaataagctgctgaccgattacaccgaaatgaagaaggcgatcctgcatgtgtactgggaagagttccagaaggaccctgtgggcctgatgagccgggtggcccagcctgccagcaagaagatcgatcagaacaagctgaaacctgagatggacgagaagggcaacctgaccaccgccggctttgcctgctctcagtgtggccagcccctgttcgtgtacaagctggagcaggtgtctgagaagggcaaggcttacaccaactacttcggacggtgcaatgtggccgagcacgaaaagctgatcctgctggcccagctgaagcccgagaaggatagcgacgaagccgtgacatatagcctgggaaagtttgggcagagggccctggatttctacagcattcatgtgaccaaggagtccacccaccccgtgaagcccctggcccagatcgccggaaacagatacgcctccggacctgtgggaaaggccctgagcgacgcatgtatgggcacaatcgcctccttcctgtctaagtaccaggacatcatcatcgaacaccagaaggtggtgaagggcaaccagaagagactggagagcctgcgggagctggccggcaaggaaaacctggaataccctagcgtgaccctgccacctcagcctcacaccaaggagggcgttgatgcctacaacgaagtgatcgcccgggtgcgaatgtgggtgaacctgaacctgtggcagaagctgaagctaagcagagatgatgccaagcctctgctgagactgaagggattcccttcctttcctctggtcgagagacaggccaacgaagtggactggtgggacatggtgtgtaacgtgaagaagctgatcaacgagaaaaaggaggatggcaaggtgttttggcagaatctggctggctacaagagacaggaagccctgagaccatacctgagcagcgaggaagatcggaagaagggaaagaaattcgctcggtaccagctgggcgacctgctgctgcacctggaaaagaagcacggcgaggactggggaaaggtgtacgacgaggcctgggagcggattgacaagaaagtggaaggcctgagcaagcacatcaagctggaagaggaacggagaagcgaggacgcccagagcaaggccgccctgaccgactggctgcgggctaaggccagcttcgtgatcgagggcctgaaggaggccgacaaggacgagttctgcagatgcgagctgaagctgcagaagtggtacggggacctgcggggaaagcccttcgccatcgaagccgagaacagcatcctggacatcagcggcttcagcaagcagtacaactgtgccttcatctggcagaaggacggcgtgaagaagctgaacctgtacctgatcatcaactacttcaagggcggcaagctgcggttcaagaagatcaaacctgaagccttcgaagccaacagattctacaccgtgatcaacaaaaagagcggcgagatcgtgcccatggaggtgaacttcaacttcgacgaccccaacctgatcatcctgcctctggcctttggcaagagacagggcagagaattcatctggaacgacctgctgtccctggaaaccggcagcctgaagctggccaacggaagagtgatcgagaagacactgtacaacagaagaacccggcaggatgagcctgccctgttcgtggccctgaccttcgagcggcgggaggtcctggactcctccaatatcaaaccaatgaacctgatcggcgtggcaagaggcgaaaacatccccgccgtgatcgccctgaccgaccccgagggctgcccactgagccggtttaaggatagcctgggaaacccaacccacatcctgagaatcggcgagagctataaggagaagcagcggaccatccaggccaagaaggaggtggagcagcggagagccggcggctacagccggaagtacgccagcaaagccaagaatctggcagacgatatggtgagaaacaccgctagagatctgctgtactacgccgtgacccaggatgccatgctgatcttcgccaacctgagccggggcttcggccggcagggcaagcggaccttcatggccgagagacagtacacacggatggaggactggctgaccgccaagctggcctacgagggcctgagcaagacctacctgtccaagacactggcccagtacacctccaagacatgcagcaactgtgggtttaccatcaccagcgccgactacgacagggtgctggagaagctgaagaagacagcaacaggctggatgaccacaattaacggcaaggagctgaaggtggagggccagattacctactacaacagatacaagagacagaacgtagtcaaggacctgtccgtcgagctggatagactgagcgaagaatctgtgaacaacgacatctcctcctggacaaagggcagaagcggagaagctctgagcctcctgaagaaaagattctcccatagacccgtgcaggagaagttcgtgtgcctgaactgcggcttcgagacacacgcagccgagcaagccgccctgaacatcgccagatcctggctgttcctgcggagccaggagtacaagaaataccagacaaacaagacaaccggcaacaccgataagagagccttcgtcgagacctggcagtccttttaccggaagaagcttaaggaggtgtggaaacctgccgtgcggtctggcggatctggcggaggctccaccagccccaagaaaaagagaaaagtctaagctgccttctgcggggcttgccttctggccatgcccttcttctctcccttgcacctgtacctcttggtctttgaataaagcctgagtaggaaggctagcaaaaaaaaaaaaaaaaaaaaaaaaaaaaaaaaaaaaaaaaaaaaaaaaaaaaaaaaaaaaaaaaaaaaaaaaaaaaaaaa

SEQ ID NO: 9811 - RNA, 8787 nt, synthetic construct
  source 1..8787: mol_type = other RNA
aggaaataagagagaaaagaagagtaagaagaaatataagagccaccatggcccctaagaagaagcgtaaagtgagccggatgaaccacgaccaggagttcgacccccctaaggtgtaccctcccgtccccgccgagaagagaaagcccatccgggtcctgagcctgttcgatggcatcgccaccggtctgctggtgctgaaggacctgggcatccaggtggataggtacattgcctccgaggtgtgcgaggactccatcaccgtgggaatggtgcgtcatcagggcaagatcatgtacgtgggcgacgtgcggagcgtgacacagaagcatatccaggagtggggccctttcgacctggtgatcggcggcagcccttgcaatgacctgagcatcgtgaacccagcccggaagggcctgtacgagggaaccggcagactgttcttcgagttttacagactgctgcacgacgcccggcctaaggaaggcgacgaccggcccttcttttggctgttcgagaatgtggtggccatgggagtcagcgacaagcgggatattagccggttcctggagagcaaccccgtgatgatcgatgccaaggaagtgagcgccgcccaccgggccagatacttctggggcaatctgcctggcatgaacagacccctggccagcaccgtgaacgacaagctggagctgcaggagtgcctggagcacggccggatcgccaagttcagcaaggtgagaaccatcaccacccgaagcaacagcatcaaacaaggcaaggaccagcactttcctgtgttcatgaacgagaaggaggacatcctgtggtgtaccgagatggagagagtgttcgggttcccagtccactacacagatgtcagcaacatgtctagactggccagacagagactgctgggaagaagctggtccgtccctgtgatcagacacctgttcgcccctctgaaggagtacttcgcctgcgtgagcagcggcaacagcaacgccaacagccggggccccagcttctctagcggcctggtgccactgtccctgagagggagccacatgggccccatggagatctacaaaaccgtgagcgcctggaagcggcagcctgtgcgcgtgctgagcctgtttcggaatatcgataaagtcctgaaaagcctgggattcctggagagcggctctggctccggcggtggcaccctgaagtacgtggaggatgtgacaaacgtggtcagacgggatgtggagaagtggggccccttcgatctggtgtacggcagcacccaacccctgggcagctcttgtgaccggtgccctggctggtacatgtttcagttccaccggatcctgcagtacgccctgccgagacaggagtcccagcggccattcttttggattttcatggacaacttgctgctgaccgaggatgaccaggaaactaccactcggttcctgcagaccgaagccgtgaccctgcaggacgtgagaggccgggactaccagaacgccatgcgggtgtggtccaacatccctggactgaaaagcaagcacgcacctctgacccctaaagaagaggagtacctgcaggcccaggtgcggagcagaagcaagctggacgcccctaaggtggatctgctggtgaagaattgcctcctgcccctgagagagtacttcaagtatttcagccagaatagtctgcccctgggaggcagcggcggcggcatgggcagcgtgagcttcgaggacatcagcctggacttcacctgggacgagtggcaggacctggacagcgcccagaggaccctgtacagggacgtgatgctggagaactacagcagcctgatgttcctgggccactgcaccaccaagcccgagctgatcttcaagctggagcacggcttcggcccctggagcctggccgaggccagcatccagagcctgcccggcgtgcacaagatgaccgtgggcggcccaagcagcggcgcccctcctcccagcggcggcaggcggcccaagcagcggcgcccctcctcccagcggcggcagcccagccggctccccaacctctaccgaggagggcacctctgagtccgccacccccgagagcggccctggcacctccaccgagcccagcgagggcagcgcacccggcagccctgccggcagccccacctccacagaggagggaaccagcaccgagcccagcgaaggcagcgccccaggcaccagcaccgagcctagtgagcaggagattaaacggatcaacaagatcagaagaagacttgtgaaagacagcaacaccaagaaggccggcaagacaggccccatgaaaaccctgctggttagagtgatgacacccgatctgagagagcggctggaaaacctgagaaagaagcctgaaaatatcccccagcccatcagcaatacatctagagccaacctgaataagctgctgaccgattacaccgaaatgaagaaggcgatcctgcatgtgtactgggaagagttccagaaggaccctgtgggcctgatgagccgggtggcccagcctgccagcaagaagatcgatcagaacaagctgaaacctgagatggacgagaagggcaacctgaccaccgccggctttgcctgctctcagtgtggccagcccctgttcgtgtacaagctggagcaggtgtctgagaagggcaaggcttacaccaactacttcggacggtgcaatgtggccgagcacgaaaagctgatcctgctggcccagctgaagcccgagaaggatagcgacgaagccgtgacatatagcctgggaaagtttgggcagagggccctggatttctacagcattcatgtgaccaaggagtccacccaccccgtgaagcccctggcccagatcgccggaaacagatacgcctccggacctgtgggaaaggccctgagcgacgcatgtatgggcacaatcgcctccttcctgtctaagtaccaggacatcatcatcgaacaccagaaggtggtgaagggcaaccagaagagactggagagcctgcgggagctggccggcaaggaaaacctggaataccctagcgtgaccctgccacctcagcctcacaccaaggagggcgttgatgcctacaacgaagtgatcgcccgggtgcgaatgtgggtgaacctgaacctgtggcagaagctgaagctaagcagagatgatgccaagcctctgctgagactgaagggattcccttcctttcctctggtcgagagacaggccaacgaagtggactggtgggacatggtgtgtaacgtgaagaagctgatcaacgagaaaaaggaggatggcaaggtgttttggcagaatctggctggctacaagagacaggaagccctgagaccatacctgagcagcgaggaagatcggaagaagggaaagaaattcgctcggtaccagctgggcgacctgctgctgcacctggaaaagaagcacggcgaggactggggaaaggtgtacgacgaggcctgggagcggattgacaagaaagtggaaggcctgagcaagcacatcaagctggaagaggaacggagaagcgaggacgcccagagcaaggccgccctgaccgactggctgcgggctaaggccagcttcgtgatcgagggcctgaaggaggccgacaaggacgagttctgcagatgcgagctgaagctgcagaagtggtacggggacctgcggggaaagcccttcgccatcgaagccgagaacagcatcctggacatcagcggcttcagcaagcagtacaactgtgccttcatctggcagaaggacggcgtgaagaagctgaacctgtacctgatcatcaactacttcaagggcggcaagctgcggttcaagaagatcaaacctgaagccttcgaagccaacagattctacaccgtgatcaacaaaaagagcggcgagatcgtgcccatggaggtgaacttcaacttcgacgaccccaacctgatcatcctgcctctggcctttggcaagagacagggcagagaattcatctggaacgacctgctgtccctggaaaccggcagcctgaagctggccaacggaagagtgatcgagaagacactgtacaacagaagaacccggcaggatgagcctgccctgttcgtggccctgaccttcgagcggcgggaggtcctggactcctccaatatcaaaccaatgaacctgatcggcgtggcaagaggcgaaaacatccccgccgtgatcgccctgaccgaccccgagggctgcccactgagccggtttaaggatagcctgggaaacccaacccacatcctgagaatcggcgagagctataaggagaagcagcggaccatccaggccaagaaggaggtggagcagcggagagccggcggctacagccggaagtacgccagcaaagccaagaatctggcagacgatatggtgagaaacaccgctagagatctgctgtactacgccgtgacccaggatgccatgctgatcttcgccaacctgagccggggcttcggccggcagggcaagcggaccttcatggccgagagacagtacacacggatggaggactggctgaccgccaagctggcctacgagggcctgagcaagacctacctgtccaagacactggcccagtacacctccaagacatgcagcaactgtgggtttaccatcaccagcgccgactacgacagggtgctggagaagctgaagaagacagcaacaggctggatgaccacaattaacggcaaggagctgaaggtggagggccagattacctactacaacagatacaagagacagaacgtagtcaaggacctgtccgtcgagctggatagactgagcgaagaatctgtgaacaacgacatctcctcctggacaaagggcagaagcggagaagctctgagcctcctgaagaaaagattctcccatagacccgtgcaggagaagttcgtgtgcctgaactgcggcttcgagacacacgcagccgagcaagccgccctgaacatcgccagatcctggctgttcctgcggagccaggagtacaagaaataccagacaaacaagacaaccggcaacaccgataagagagccttcgtcgagacctggcagtccttttaccggaagaagcttaaggaggtgtggaaacctgccgtgcggtctggcggatctggcggaggctccaccagccccaagaaaaagagaaaagtctaagctgccttctgcggggcttgccttctggccatgcccttcttctctcccttgcacctgtacctcttggtctttgaataaagcctgagtaggaaggctagcaaaaaaaaaaaaaaaaaaaaaaaaaaaaaaaaaaaaaaaaaaaaaaaaaaaaaaaaaaaaaaaaaaaaaaaaaaaaaaaagcccagccggctccccaacctctaccgaggagggcacctctgagtccgccacccccgagagcggccctggcacctccaccgagcccagcgagggcagcgcacccggcagccctgccggcagccccacctccacagaggagggaaccagcaccgagcccagcgaaggcagcgccccaggcaccagcaccgagcctagtgagcaggagattaaacggatcaacaagatcagaagaagacttgtgaaagacagcaacaccaagaaggccggcaagacaggccccatgaaaaccctgctggttagagtgatgacacccgatctgagagagcggctggaaaacctgagaaagaagcctgaaaatatcccccagcccatcagcaatacatctagagccaacctgaataagctgctgaccgattacaccgaaatgaagaaggcgatcctgcatgtgtactgggaagagttccagaaggaccctgtgggcctgatgagccgggtggcccagcctgccagcaagaagatcgatcagaacaagctgaaacctgagatggacgagaagggcaacctgaccaccgccggctttgcctgctctcagtgtggccagcccctgttcgtgtacaagctggagcaggtgtctgagaagggcaaggcttacaccaactacttcggacggtgcaatgtggccgagcacgaaaagctgatcctgctggcccagctgaagcccgagaaggatagcgacgaagccgtgacatatagcctgggaaagtttgggcagagggccctggatttctacagcattcatgtgaccaaggagtccacccaccccgtgaagcccctggcccagatcgccggaaacagatacgcctccggacctgtgggaaaggccctgagcgacgcatgtatgggcacaatcgcctccttcctgtctaagtaccaggacatcatcatcgaacaccagaaggtggtgaagggcaaccagaagagactggagagcctgcgggagctggccggcaaggaaaacctggaataccctagcgtgaccctgccacctcagcctcacaccaaggagggcgttgatgcctacaacgaagtgatcgcccgggtgcgaatgtgggtgaacctgaacctgtggcagaagctgaagctaagcagagatgatgccaagcctctgctgagactgaagggattcccttcctttcctctggtcgagagacaggccaacgaagtggactggtgggacatggtgtgtaacgtgaagaagctgatcaacgagaaaaaggaggatggcaaggtgttttggcagaatctggctggctacaagagacaggaagccctgagaccatacctgagcagcgaggaagatcggaagaagggaaagaaattcgctcggtaccagctgggcgacctgctgctgcacctggaaaagaagcacggcgaggactggggaaaggtgtacgacgaggcctgggagcggattgacaagaaagtggaaggcctgagcaagcacatcaagctggaagaggaacggagaagcgaggacgcccagagcaaggccgccctgaccgactggctgcgggctaaggccagcttcgtgatcgagggcctgaaggaggccgacaaggacgagttctgcagatgcgagctgaagctgcagaagtggtacggggacctgcggggaaagcccttcgccatcgaagccgagaacagcatcctggacatcagcggcttcagcaagcagtacaactgtgccttcatctggcagaaggacggcgtgaagaagctgaacctgtacctgatcatcaactacttcaagggcggcaagctgcggttcaagaagatcaaacctgaagccttcgaagccaacagattctacaccgtgatcaacaaaaagagcggcgagatcgtgcccatggaggtgaacttcaacttcgacgaccccaacctgatcatcctgcctctggcctttggcaagagacagggcagagaattcatctggaacgacctgctgtccctggaaaccggcagcctgaagctggccaacggaagagtgatcgagaagacactgtacaacagaagaacccggcaggatgagcctgccctgttcgtggccctgaccttcgagcggcgggaggtcctggactcctccaatatcaaaccaatgaacctgatcggcgtggcaagaggcgaaaacatccccgccgtgatcgccctgaccgaccccgagggctgcccactgagccggtttaaggatagcctgggaaacccaacccacatcctgagaatcggcgagagctataaggagaagcagcggaccatccaggccaagaaggaggtggagcagcggagagccggcggctacagccggaagtacgccagcaaagccaagaatctggcagacgatatggtgagaaacaccgctagagatctgctgtactacgccgtgacccaggatgccatgctgatcttcgccaacctgagccggggcttcggccggcagggcaagcggaccttcatggccgagagacagtacacacggatggaggactggctgaccgccaagctggcctacgagggcctgagcaagacctacctgtccaagacactggcccagtacacctccaagacatgcagcaactgtgggtttaccatcaccagcgccgactacgacagggtgctggagaagctgaagaagacagcaacaggctggatgaccacaattaacggcaaggagctgaaggtggagggccagattacctactacaacagatacaagagacagaacgtagtcaaggacctgtccgtcgagctggatagactgagcgaagaatctgtgaacaacgacatctcctcctggacaaagggcagaagcggagaagctctgagcctcctgaagaaaagattctcccatagacccgtgcaggagaagttcgtgtgcctgaactgcggcttcgagacacacgcagccgagcaagccgccctgaacatcgccagatcctggctgttcctgcggagccaggagtacaagaaataccagacaaacaagacaaccggcaacaccgataagagagccttcgtcgagacctggcagtccttttaccggaagaagcttaaggaggtgtggaaacctgccgtgcggtctggcggatctggcggaggctccaccagccccaagaaaaagagaaaagtctaagctgccttctgcggggcttgccttctggccatgcccttcttctctcccttgcacctgtacctcttggtctttgaataaagcctgagtaggaaggctagcaaaaaaaaaaaaaaaaaaaaaaaaaaaaaaaaaaaaaaaaaaaaaaaaaaaaaaaaaaaaaaaaaaaaaaaaaaaaaaaa

SEQ ID NO: 9812 - RNA, 8787 nt, synthetic construct
  source 1..8787: mol_type = other RNA
aggaaataagagagaaaagaagagtaagaagaaatataagagccaccatggcccctaagaagaagcgtaaagtgagccggatgaaccacgaccaggagttcgacccccctaaggtgtaccctcccgtccccgccgagaagagaaagcccatccgggtcctgagcctgttcgatggcatcgccaccggtctgctggtgctgaaggacctgggcatccaggtggataggtacattgcctccgaggtgtgcgaggactccatcaccgtgggaatggtgcgtcatcagggcaagatcatgtacgtgggcgacgtgcggagcgtgacacagaagcatatccaggagtggggccctttcgacctggtgatcggcggcagcccttgcaatgacctgagcatcgtgaacccagcccggaagggcctgtacgagggaaccggcagactgttcttcgagttttacagactgctgcacgacgcccggcctaaggaaggcgacgaccggcccttcttttggctgttcgagaatgtggtggccatgggagtcagcgacaagcgggatattagccggttcctggagagcaaccccgtgatgatcgatgccaaggaagtgagcgccgcccaccgggccagatacttctggggcaatctgcctggcatgaacagacccctggccagcaccgtgaacgacaagctggagctgcaggagtgcctggagcacggccggatcgccaagttcagcaaggtgagaaccatcaccacccgaagcaacagcatcaaacaaggcaaggaccagcactttcctgtgttcatgaacgagaaggaggacatcctgtggtgtaccgagatggagagagtgttcgggttcccagtccactacacagatgtcagcaacatgtctagactggccagacagagactgctgggaagaagctggtccgtccctgtgatcagacacctgttcgcccctctgaaggagtacttcgcctgcgtgagcagcggcaacagcaacgccaacagccggggccccagcttctctagcggcctggtgccactgtccctgagagggagccacatgggccccatggagatctacaaaaccgtgagcgcctggaagcggcagcctgtgcgcgtgctgagcctgtttcggaatatcgataaagtcctgaaaagcctgggattcctggagagcggctctggctccggcggtggcaccctgaagtacgtggaggatgtgacaaacgtggtcagacgggatgtggagaagtggggccccttcgatctggtgtacggcagcacccaacccctgggcagctcttgtgaccggtgccctggctggtacatgtttcagttccaccggatcctgcagtacgccctgccgagacaggagtcccagcggccattcttttggattttcatggacaacttgctgctgaccgaggatgaccaggaaactaccactcggttcctgcagaccgaagccgtgaccctgcaggacgtgagaggccgggactaccagaacgccatgcgggtgtggtccaacatccctggactgaaaagcaagcacgcacctctgacccctaaagaagaggagtacctgcaggcccaggtgcggagcagaagcaagctggacgcccctaaggtggatctgctggtgaagaattgcctcctgcccctgagagagtacttcaagtatttcagccagaatagtctgcccctgggaggcagcggcggcggcgtgcccgagcccgtgaccttcgaggacgtggccgtggacttcacccaggaggagtggggccagctggacctggtgcagaggaccctgtacagggacgtgatgctggagacctacggccacctgctgagcgtgggcaaccagatcgccaagcccgaggtgatcagcctgctggagcagggcgaggagccctggctggtggagcagacctgccccgagagcagctgccccgagtggatgagggacggcggcccaagcagcggcgcccctcctcccagcggcggcaggcggcccaagcagcggcgcccctcctcccagcggcggcagcccagccggctccccaacctctaccgaggagggcacctctgagtccgccacccccgagagcggccctggcacctccaccgagcccagcgagggcagcgcacccggcagccctgccggcagccccacctccacagaggagggaaccagcaccgagcccagcgaaggcagcgccccaggcaccagcaccgagcctagtgagcaggagattaaacggatcaacaagatcagaagaagacttgtgaaagacagcaacaccaagaaggccggcaagacaggccccatgaaaaccctgctggttagagtgatgacacccgatctgagagagcggctggaaaacctgagaaagaagcctgaaaatatcccccagcccatcagcaatacatctagagccaacctgaataagctgctgaccgattacaccgaaatgaagaaggcgatcctgcatgtgtactgggaagagttccagaaggaccctgtgggcctgatgagccgggtggcccagcctgccagcaagaagatcgatcagaacaagctgaaacctgagatggacgagaagggcaacctgaccaccgccggctttgcctgctctcagtgtggccagcccctgttcgtgtacaagctggagcaggtgtctgagaagggcaaggcttacaccaactacttcggacggtgcaatgtggccgagcacgaaaagctgatcctgctggcccagctgaagcccgagaaggatagcgacgaagccgtgacatatagcctgggaaagtttgggcagagggccctggatttctacagcattcatgtgaccaaggagtccacccaccccgtgaagcccctggcccagatcgccggaaacagatacgcctccggacctgtgggaaaggccctgagcgacgcatgtatgggcacaatcgcctccttcctgtctaagtaccaggacatcatcatcgaacaccagaaggtggtgaagggcaaccagaagagactggagagcctgcgggagctggccggcaaggaaaacctggaataccctagcgtgaccctgccacctcagcctcacaccaaggagggcgttgatgcctacaacgaagtgatcgcccgggtgcgaatgtgggtgaacctgaacctgtggcagaagctgaagctaagcagagatgatgccaagcctctgctgagactgaagggattcccttcctttcctctggtcgagagacaggccaacgaagtggactggtgggacatggtgtgtaacgtgaagaagctgatcaacgagaaaaaggaggatggcaaggtgttttggcagaatctggctggctacaagagacaggaagccctgagaccatacctgagcagcgaggaagatcggaagaagggaaagaaattcgctcggtaccagctgggcgacctgctgctgcacctggaaaagaagcacggcgaggactggggaaaggtgtacgacgaggcctgggagcggattgacaagaaagtggaaggcctgagcaagcacatcaagctggaagaggaacggagaagcgaggacgcccagagcaaggccgccctgaccgactggctgcgggctaaggccagcttcgtgatcgagggcctgaaggaggccgacaaggacgagttctgcagatgcgagctgaagctgcagaagtggtacggggacctgcggggaaagcccttcgccatcgaagccgagaacagcatcctggacatcagcggcttcagcaagcagtacaactgtgccttcatctggcagaaggacggcgtgaagaagctgaacctgtacctgatcatcaactacttcaagggcggcaagctgcggttcaagaagatcaaacctgaagccttcgaagccaacagattctacaccgtgatcaacaaaaagagcggcgagatcgtgcccatggaggtgaacttcaacttcgacgaccccaacctgatcatcctgcctctggcctttggcaagagacagggcagagaattcatctggaacgacctgctgtccctggaaaccggcagcctgaagctggccaacggaagagtgatcgagaagacactgtacaacagaagaacccggcaggatgagcctgccctgttcgtggccctgaccttcgagcggcgggaggtcctggactcctccaatatcaaaccaatgaacctgatcggcgtggcaagaggcgaaaacatccccgccgtgatcgccctgaccgaccccgagggctgcccactgagccggtttaaggatagcctgggaaacccaacccacatcctgagaatcggcgagagctataaggagaagcagcggaccatccaggccaagaaggaggtggagcagcggagagccggcggctacagccggaagtacgccagcaaagccaagaatctggcagacgatatggtgagaaacaccgctagagatctgctgtactacgccgtgacccaggatgccatgctgatcttcgccaacctgagccggggcttcggccggcagggcaagcggaccttcatggccgagagacagtacacacggatggaggactggctgaccgccaagctggcctacgagggcctgagcaagacctacctgtccaagacactggcccagtacacctccaagacatgcagcaactgtgggtttaccatcaccagcgccgactacgacagggtgctggagaagctgaagaagacagcaacaggctggatgaccacaattaacggcaaggagctgaaggtggagggccagattacctactacaacagatacaagagacagaacgtagtcaaggacctgtccgtcgagctggatagactgagcgaagaatctgtgaacaacgacatctcctcctggacaaagggcagaagcggagaagctctgagcctcctgaagaaaagattctcccatagacccgtgcaggagaagttcgtgtgcctgaactgcggcttcgagacacacgcagccgagcaagccgccctgaacatcgccagatcctggctgttcctgcggagccaggagtacaagaaataccagacaaacaagacaaccggcaacaccgataagagagccttcgtcgagacctggcagtccttttaccggaagaagcttaaggaggtgtggaaacctgccgtgcggtctggcggatctggcggaggctccaccagccccaagaaaaagagaaaagtctaagctgccttctgcggggcttgccttctggccatgcccttcttctctcccttgcacctgtacctcttggtctttgaataaagcctgagtaggaaggctagcaaaaaaaaaaaaaaaaaaaaaaaaaaaaaaaaaaaaaaaaaaaaaaaaaaaaaaaaaaaaaaaaaaaaaaaaaaaaaaaagcccagccggctccccaacctctaccgaggagggcacctctgagtccgccacccccgagagcggccctggcacctccaccgagcccagcgagggcagcgcacccggcagccctgccggcagccccacctccacagaggagggaaccagcaccgagcccagcgaaggcagcgccccaggcaccagcaccgagcctagtgagcaggagattaaacggatcaacaagatcagaagaagacttgtgaaagacagcaacaccaagaaggccggcaagacaggccccatgaaaaccctgctggttagagtgatgacacccgatctgagagagcggctggaaaacctgagaaagaagcctgaaaatatcccccagcccatcagcaatacatctagagccaacctgaataagctgctgaccgattacaccgaaatgaagaaggcgatcctgcatgtgtactgggaagagttccagaaggaccctgtgggcctgatgagccgggtggcccagcctgccagcaagaagatcgatcagaacaagctgaaacctgagatggacgagaagggcaacctgaccaccgccggctttgcctgctctcagtgtggccagcccctgttcgtgtacaagctggagcaggtgtctgagaagggcaaggcttacaccaactacttcggacggtgcaatgtggccgagcacgaaaagctgatcctgctggcccagctgaagcccgagaaggatagcgacgaagccgtgacatatagcctgggaaagtttgggcagagggccctggatttctacagcattcatgtgaccaaggagtccacccaccccgtgaagcccctggcccagatcgccggaaacagatacgcctccggacctgtgggaaaggccctgagcgacgcatgtatgggcacaatcgcctccttcctgtctaagtaccaggacatcatcatcgaacaccagaaggtggtgaagggcaaccagaagagactggagagcctgcgggagctggccggcaaggaaaacctggaataccctagcgtgaccctgccacctcagcctcacaccaaggagggcgttgatgcctacaacgaagtgatcgcccgggtgcgaatgtgggtgaacctgaacctgtggcagaagctgaagctaagcagagatgatgccaagcctctgctgagactgaagggattcccttcctttcctctggtcgagagacaggccaacgaagtggactggtgggacatggtgtgtaacgtgaagaagctgatcaacgagaaaaaggaggatggcaaggtgttttggcagaatctggctggctacaagagacaggaagccctgagaccatacctgagcagcgaggaagatcggaagaagggaaagaaattcgctcggtaccagctgggcgacctgctgctgcacctggaaaagaagcacggcgaggactggggaaaggtgtacgacgaggcctgggagcggattgacaagaaagtggaaggcctgagcaagcacatcaagctggaagaggaacggagaagcgaggacgcccagagcaaggccgccctgaccgactggctgcgggctaaggccagcttcgtgatcgagggcctgaaggaggccgacaaggacgagttctgcagatgcgagctgaagctgcagaagtggtacggggacctgcggggaaagcccttcgccatcgaagccgagaacagcatcctggacatcagcggcttcagcaagcagtacaactgtgccttcatctggcagaaggacggcgtgaagaagctgaacctgtacctgatcatcaactacttcaagggcggcaagctgcggttcaagaagatcaaacctgaagccttcgaagccaacagattctacaccgtgatcaacaaaaagagcggcgagatcgtgcccatggaggtgaacttcaacttcgacgaccccaacctgatcatcctgcctctggcctttggcaagagacagggcagagaattcatctggaacgacctgctgtccctggaaaccggcagcctgaagctggccaacggaagagtgatcgagaagacactgtacaacagaagaacccggcaggatgagcctgccctgttcgtggccctgaccttcgagcggcgggaggtcctggactcctccaatatcaaaccaatgaacctgatcggcgtggcaagaggcgaaaacatccccgccgtgatcgccctgaccgaccccgagggctgcccactgagccggtttaaggatagcctgggaaacccaacccacatcctgagaatcggcgagagctataaggagaagcagcggaccatccaggccaagaaggaggtggagcagcggagagccggcggctacagccggaagtacgccagcaaagccaagaatctggcagacgatatggtgagaaacaccgctagagatctgctgtactacgccgtgacccaggatgccatgctgatcttcgccaacctgagccggggcttcggccggcagggcaagcggaccttcatggccgagagacagtacacacggatggaggactggctgaccgccaagctggcctacgagggcctgagcaagacctacctgtccaagacactggcccagtacacctccaagacatgcagcaactgtgggtttaccatcaccagcgccgactacgacagggtgctggagaagctgaagaagacagcaacaggctggatgaccacaattaacggcaaggagctgaaggtggagggccagattacctactacaacagatacaagagacagaacgtagtcaaggacctgtccgtcgagctggatagactgagcgaagaatctgtgaacaacgacatctcctcctggacaaagggcagaagcggagaagctctgagcctcctgaagaaaagattctcccatagacccgtgcaggagaagttcgtgtgcctgaactgcggcttcgagacacacgcagccgagcaagccgccctgaacatcgccagatcctggctgttcctgcggagccaggagtacaagaaataccagacaaacaagacaaccggcaacaccgataagagagccttcgtcgagacctggcagtccttttaccggaagaagcttaaggaggtgtggaaacctgccgtgcggtctggcggatctggcggaggctccaccagccccaagaaaaagagaaaagtctaagctgccttctgcggggcttgccttctggccatgcccttcttctctcccttgcacctgtacctcttggtctttgaataaagcctgagtaggaaggctagcaaaaaaaaaaaaaaaaaaaaaaaaaaaaaaaaaaaaaaaaaaaaaaaaaaaaaaaaaaaaaaaaaaaaaaaaaaaaaaaa

SEQ ID NO: 9813 - RNA, 8787 nt, synthetic construct
  source 1..8787: mol_type = other RNA
aggaaataagagagaaaagaagagtaagaagaaatataagagccaccatggcccctaagaagaagcgtaaagtgagccggatgaaccacgaccaggagttcgacccccctaaggtgtaccctcccgtccccgccgagaagagaaagcccatccgggtcctgagcctgttcgatggcatcgccaccggtctgctggtgctgaaggacctgggcatccaggtggataggtacattgcctccgaggtgtgcgaggactccatcaccgtgggaatggtgcgtcatcagggcaagatcatgtacgtgggcgacgtgcggagcgtgacacagaagcatatccaggagtggggccctttcgacctggtgatcggcggcagcccttgcaatgacctgagcatcgtgaacccagcccggaagggcctgtacgagggaaccggcagactgttcttcgagttttacagactgctgcacgacgcccggcctaaggaaggcgacgaccggcccttcttttggctgttcgagaatgtggtggccatgggagtcagcgacaagcgggatattagccggttcctggagagcaaccccgtgatgatcgatgccaaggaagtgagcgccgcccaccgggccagatacttctggggcaatctgcctggcatgaacagacccctggccagcaccgtgaacgacaagctggagctgcaggagtgcctggagcacggccggatcgccaagttcagcaaggtgagaaccatcaccacccgaagcaacagcatcaaacaaggcaaggaccagcactttcctgtgttcatgaacgagaaggaggacatcctgtggtgtaccgagatggagagagtgttcgggttcccagtccactacacagatgtcagcaacatgtctagactggccagacagagactgctgggaagaagctggtccgtccctgtgatcagacacctgttcgcccctctgaaggagtacttcgcctgcgtgagcagcggcaacagcaacgccaacagccggggccccagcttctctagcggcctggtgccactgtccctgagagggagccacatgggccccatggagatctacaaaaccgtgagcgcctggaagcggcagcctgtgcgcgtgctgagcctgtttcggaatatcgataaagtcctgaaaagcctgggattcctggagagcggctctggctccggcggtggcaccctgaagtacgtggaggatgtgacaaacgtggtcagacgggatgtggagaagtggggccccttcgatctggtgtacggcagcacccaacccctgggcagctcttgtgaccggtgccctggctggtacatgtttcagttccaccggatcctgcagtacgccctgccgagacaggagtcccagcggccattcttttggattttcatggacaacttgctgctgaccgaggatgaccaggaaactaccactcggttcctgcagaccgaagccgtgaccctgcaggacgtgagaggccgggactaccagaacgccatgcgggtgtggtccaacatccctggactgaaaagcaagcacgcacctctgacccctaaagaagaggagtacctgcaggcccaggtgcggagcagaagcaagctggacgcccctaaggtggatctgctggtgaagaattgcctcctgcccctgagagagtacttcaagtatttcagccagaatagtctgcccctgggaggcagcggcggcggcttccaggagagcgtgaccttcaaggacgtggccgtggagttcaccggcgaggagtggaggcagctggacagggcccagaggagcctgttcagggacgtgatgctggagaactacaggaacctggtgagcctgggcctgaccgtggccaagcccaacctgatcttcctgctggagaggggcgaggccccctggaccctgcagaggcagatccccggcggcaccagcagcgactgcccctgctggggcggcccaagcagcggcgcccctcctcccagcggcggcaggcggcccaagcagcggcgcccctcctcccagcggcggcagcccagccggctccccaacctctaccgaggagggcacctctgagtccgccacccccgagagcggccctggcacctccaccgagcccagcgagggcagcgcacccggcagccctgccggcagccccacctccacagaggagggaaccagcaccgagcccagcgaaggcagcgccccaggcaccagcaccgagcctagtgagcaggagattaaacggatcaacaagatcagaagaagacttgtgaaagacagcaacaccaagaaggccggcaagacaggccccatgaaaaccctgctggttagagtgatgacacccgatctgagagagcggctggaaaacctgagaaagaagcctgaaaatatcccccagcccatcagcaatacatctagagccaacctgaataagctgctgaccgattacaccgaaatgaagaaggcgatcctgcatgtgtactgggaagagttccagaaggaccctgtgggcctgatgagccgggtggcccagcctgccagcaagaagatcgatcagaacaagctgaaacctgagatggacgagaagggcaacctgaccaccgccggctttgcctgctctcagtgtggccagcccctgttcgtgtacaagctggagcaggtgtctgagaagggcaaggcttacaccaactacttcggacggtgcaatgtggccgagcacgaaaagctgatcctgctggcccagctgaagcccgagaaggatagcgacgaagccgtgacatatagcctgggaaagtttgggcagagggccctggatttctacagcattcatgtgaccaaggagtccacccaccccgtgaagcccctggcccagatcgccggaaacagatacgcctccggacctgtgggaaaggccctgagcgacgcatgtatgggcacaatcgcctccttcctgtctaagtaccaggacatcatcatcgaacaccagaaggtggtgaagggcaaccagaagagactggagagcctgcgggagctggccggcaaggaaaacctggaataccctagcgtgaccctgccacctcagcctcacaccaaggagggcgttgatgcctacaacgaagtgatcgcccgggtgcgaatgtgggtgaacctgaacctgtggcagaagctgaagctaagcagagatgatgccaagcctctgctgagactgaagggattcccttcctttcctctggtcgagagacaggccaacgaagtggactggtgggacatggtgtgtaacgtgaagaagctgatcaacgagaaaaaggaggatggcaaggtgttttggcagaatctggctggctacaagagacaggaagccctgagaccatacctgagcagcgaggaagatcggaagaagggaaagaaattcgctcggtaccagctgggcgacctgctgctgcacctggaaaagaagcacggcgaggactggggaaaggtgtacgacgaggcctgggagcggattgacaagaaagtggaaggcctgagcaagcacatcaagctggaagaggaacggagaagcgaggacgcccagagcaaggccgccctgaccgactggctgcgggctaaggccagcttcgtgatcgagggcctgaaggaggccgacaaggacgagttctgcagatgcgagctgaagctgcagaagtggtacggggacctgcggggaaagcccttcgccatcgaagccgagaacagcatcctggacatcagcggcttcagcaagcagtacaactgtgccttcatctggcagaaggacggcgtgaagaagctgaacctgtacctgatcatcaactacttcaagggcggcaagctgcggttcaagaagatcaaacctgaagccttcgaagccaacagattctacaccgtgatcaacaaaaagagcggcgagatcgtgcccatggaggtgaacttcaacttcgacgaccccaacctgatcatcctgcctctggcctttggcaagagacagggcagagaattcatctggaacgacctgctgtccctggaaaccggcagcctgaagctggccaacggaagagtgatcgagaagacactgtacaacagaagaacccggcaggatgagcctgccctgttcgtggccctgaccttcgagcggcgggaggtcctggactcctccaatatcaaaccaatgaacctgatcggcgtggcaagaggcgaaaacatccccgccgtgatcgccctgaccgaccccgagggctgcccactgagccggtttaaggatagcctgggaaacccaacccacatcctgagaatcggcgagagctataaggagaagcagcggaccatccaggccaagaaggaggtggagcagcggagagccggcggctacagccggaagtacgccagcaaagccaagaatctggcagacgatatggtgagaaacaccgctagagatctgctgtactacgccgtgacccaggatgccatgctgatcttcgccaacctgagccggggcttcggccggcagggcaagcggaccttcatggccgagagacagtacacacggatggaggactggctgaccgccaagctggcctacgagggcctgagcaagacctacctgtccaagacactggcccagtacacctccaagacatgcagcaactgtgggtttaccatcaccagcgccgactacgacagggtgctggagaagctgaagaagacagcaacaggctggatgaccacaattaacggcaaggagctgaaggtggagggccagattacctactacaacagatacaagagacagaacgtagtcaaggacctgtccgtcgagctggatagactgagcgaagaatctgtgaacaacgacatctcctcctggacaaagggcagaagcggagaagctctgagcctcctgaagaaaagattctcccatagacccgtgcaggagaagttcgtgtgcctgaactgcggcttcgagacacacgcagccgagcaagccgccctgaacatcgccagatcctggctgttcctgcggagccaggagtacaagaaataccagacaaacaagacaaccggcaacaccgataagagagccttcgtcgagacctggcagtccttttaccggaagaagcttaaggaggtgtggaaacctgccgtgcggtctggcggatctggcggaggctccaccagccccaagaaaaagagaaaagtctaagctgccttctgcggggcttgccttctggccatgcccttcttctctcccttgcacctgtacctcttggtctttgaataaagcctgagtaggaaggctagcaaaaaaaaaaaaaaaaaaaaaaaaaaaaaaaaaaaaaaaaaaaaaaaaaaaaaaaaaaaaaaaaaaaaaaaaaaaaaaaagcccagccggctccccaacctctaccgaggagggcacctctgagtccgccacccccgagagcggccctggcacctccaccgagcccagcgagggcagcgcacccggcagccctgccggcagccccacctccacagaggagggaaccagcaccgagcccagcgaaggcagcgccccaggcaccagcaccgagcctagtgagcaggagattaaacggatcaacaagatcagaagaagacttgtgaaagacagcaacaccaagaaggccggcaagacaggccccatgaaaaccctgctggttagagtgatgacacccgatctgagagagcggctggaaaacctgagaaagaagcctgaaaatatcccccagcccatcagcaatacatctagagccaacctgaataagctgctgaccgattacaccgaaatgaagaaggcgatcctgcatgtgtactgggaagagttccagaaggaccctgtgggcctgatgagccgggtggcccagcctgccagcaagaagatcgatcagaacaagctgaaacctgagatggacgagaagggcaacctgaccaccgccggctttgcctgctctcagtgtggccagcccctgttcgtgtacaagctggagcaggtgtctgagaagggcaaggcttacaccaactacttcggacggtgcaatgtggccgagcacgaaaagctgatcctgctggcccagctgaagcccgagaaggatagcgacgaagccgtgacatatagcctgggaaagtttgggcagagggccctggatttctacagcattcatgtgaccaaggagtccacccaccccgtgaagcccctggcccagatcgccggaaacagatacgcctccggacctgtgggaaaggccctgagcgacgcatgtatgggcacaatcgcctccttcctgtctaagtaccaggacatcatcatcgaacaccagaaggtggtgaagggcaaccagaagagactggagagcctgcgggagctggccggcaaggaaaacctggaataccctagcgtgaccctgccacctcagcctcacaccaaggagggcgttgatgcctacaacgaagtgatcgcccgggtgcgaatgtgggtgaacctgaacctgtggcagaagctgaagctaagcagagatgatgccaagcctctgctgagactgaagggattcccttcctttcctctggtcgagagacaggccaacgaagtggactggtgggacatggtgtgtaacgtgaagaagctgatcaacgagaaaaaggaggatggcaaggtgttttggcagaatctggctggctacaagagacaggaagccctgagaccatacctgagcagcgaggaagatcggaagaagggaaagaaattcgctcggtaccagctgggcgacctgctgctgcacctggaaaagaagcacggcgaggactggggaaaggtgtacgacgaggcctgggagcggattgacaagaaagtggaaggcctgagcaagcacatcaagctggaagaggaacggagaagcgaggacgcccagagcaaggccgccctgaccgactggctgcgggctaaggccagcttcgtgatcgagggcctgaaggaggccgacaaggacgagttctgcagatgcgagctgaagctgcagaagtggtacggggacctgcggggaaagcccttcgccatcgaagccgagaacagcatcctggacatcagcggcttcagcaagcagtacaactgtgccttcatctggcagaaggacggcgtgaagaagctgaacctgtacctgatcatcaactacttcaagggcggcaagctgcggttcaagaagatcaaacctgaagccttcgaagccaacagattctacaccgtgatcaacaaaaagagcggcgagatcgtgcccatggaggtgaacttcaacttcgacgaccccaacctgatcatcctgcctctggcctttggcaagagacagggcagagaattcatctggaacgacctgctgtccctggaaaccggcagcctgaagctggccaacggaagagtgatcgagaagacactgtacaacagaagaacccggcaggatgagcctgccctgttcgtggccctgaccttcgagcggcgggaggtcctggactcctccaatatcaaaccaatgaacctgatcggcgtggcaagaggcgaaaacatccccgccgtgatcgccctgaccgaccccgagggctgcccactgagccggtttaaggatagcctgggaaacccaacccacatcctgagaatcggcgagagctataaggagaagcagcggaccatccaggccaagaaggaggtggagcagcggagagccggcggctacagccggaagtacgccagcaaagccaagaatctggcagacgatatggtgagaaacaccgctagagatctgctgtactacgccgtgacccaggatgccatgctgatcttcgccaacctgagccggggcttcggccggcagggcaagcggaccttcatggccgagagacagtacacacggatggaggactggctgaccgccaagctggcctacgagggcctgagcaagacctacctgtccaagacactggcccagtacacctccaagacatgcagcaactgtgggtttaccatcaccagcgccgactacgacagggtgctggagaagctgaagaagacagcaacaggctggatgaccacaattaacggcaaggagctgaaggtggagggccagattacctactacaacagatacaagagacagaacgtagtcaaggacctgtccgtcgagctggatagactgagcgaagaatctgtgaacaacgacatctcctcctggacaaagggcagaagcggagaagctctgagcctcctgaagaaaagattctcccatagacccgtgcaggagaagttcgtgtgcctgaactgcggcttcgagacacacgcagccgagcaagccgccctgaacatcgccagatcctggctgttcctgcggagccaggagtacaagaaataccagacaaacaagacaaccggcaacaccgataagagagccttcgtcgagacctggcagtccttttaccggaagaagcttaaggaggtgtggaaacctgccgtgcggtctggcggatctggcggaggctccaccagccccaagaaaaagagaaaagtctaagctgccttctgcggggcttgccttctggccatgcccttcttctctcccttgcacctgtacctcttggtctttgaataaagcctgagtaggaaggctagcaaaaaaaaaaaaaaaaaaaaaaaaaaaaaaaaaaaaaaaaaaaaaaaaaaaaaaaaaaaaaaaaaaaaaaaaaaaaaaaa

SEQ ID NO: 9814 - RNA, 8787 nt, synthetic construct
  source 1..8787: mol_type = other RNA
aggaaataagagagaaaagaagagtaagaagaaatataagagccaccatggcccctaagaagaagcgtaaagtgagccggatgaaccacgaccaggagttcgacccccctaaggtgtaccctcccgtccccgccgagaagagaaagcccatccgggtcctgagcctgttcgatggcatcgccaccggtctgctggtgctgaaggacctgggcatccaggtggataggtacattgcctccgaggtgtgcgaggactccatcaccgtgggaatggtgcgtcatcagggcaagatcatgtacgtgggcgacgtgcggagcgtgacacagaagcatatccaggagtggggccctttcgacctggtgatcggcggcagcccttgcaatgacctgagcatcgtgaacccagcccggaagggcctgtacgagggaaccggcagactgttcttcgagttttacagactgctgcacgacgcccggcctaaggaaggcgacgaccggcccttcttttggctgttcgagaatgtggtggccatgggagtcagcgacaagcgggatattagccggttcctggagagcaaccccgtgatgatcgatgccaaggaagtgagcgccgcccaccgggccagatacttctggggcaatctgcctggcatgaacagacccctggccagcaccgtgaacgacaagctggagctgcaggagtgcctggagcacggccggatcgccaagttcagcaaggtgagaaccatcaccacccgaagcaacagcatcaaacaaggcaaggaccagcactttcctgtgttcatgaacgagaaggaggacatcctgtggtgtaccgagatggagagagtgttcgggttcccagtccactacacagatgtcagcaacatgtctagactggccagacagagactgctgggaagaagctggtccgtccctgtgatcagacacctgttcgcccctctgaaggagtacttcgcctgcgtgagcagcggcaacagcaacgccaacagccggggccccagcttctctagcggcctggtgccactgtccctgagagggagccacatgggccccatggagatctacaaaaccgtgagcgcctggaagcggcagcctgtgcgcgtgctgagcctgtttcggaatatcgataaagtcctgaaaagcctgggattcctggagagcggctctggctccggcggtggcaccctgaagtacgtggaggatgtgacaaacgtggtcagacgggatgtggagaagtggggccccttcgatctggtgtacggcagcacccaacccctgggcagctcttgtgaccggtgccctggctggtacatgtttcagttccaccggatcctgcagtacgccctgccgagacaggagtcccagcggccattcttttggattttcatggacaacttgctgctgaccgaggatgaccaggaaactaccactcggttcctgcagaccgaagccgtgaccctgcaggacgtgagaggccgggactaccagaacgccatgcgggtgtggtccaacatccctggactgaaaagcaagcacgcacctctgacccctaaagaagaggagtacctgcaggcccaggtgcggagcagaagcaagctggacgcccctaaggtggatctgctggtgaagaattgcctcctgcccctgagagagtacttcaagtatttcagccagaatagtctgcccctgggaggcagcggcggcggcctgcagggcagcgtgagcttcaaggacgtgaccgtggacttcacccaggaggagtggcaccagctgaaccccgcccagaaggccctgtacagggacgtgatgctggagaactactgccacttcatcagcgtgggcttccacatgaccaagcccgacatgatcaggaagctggagcagggcgaggagctgtggaccgagaggatcttcagcaggcagagccacctggaggaggacggcaaggccggcggcccaagcagcggcgcccctcctcccagcggcggcaggcggcccaagcagcggcgcccctcctcccagcggcggcagcccagccggctccccaacctctaccgaggagggcacctctgagtccgccacccccgagagcggccctggcacctccaccgagcccagcgagggcagcgcacccggcagccctgccggcagccccacctccacagaggagggaaccagcaccgagcccagcgaaggcagcgccccaggcaccagcaccgagcctagtgagcaggagattaaacggatcaacaagatcagaagaagacttgtgaaagacagcaacaccaagaaggccggcaagacaggccccatgaaaaccctgctggttagagtgatgacacccgatctgagagagcggctggaaaacctgagaaagaagcctgaaaatatcccccagcccatcagcaatacatctagagccaacctgaataagctgctgaccgattacaccgaaatgaagaaggcgatcctgcatgtgtactgggaagagttccagaaggaccctgtgggcctgatgagccgggtggcccagcctgccagcaagaagatcgatcagaacaagctgaaacctgagatggacgagaagggcaacctgaccaccgccggctttgcctgctctcagtgtggccagcccctgttcgtgtacaagctggagcaggtgtctgagaagggcaaggcttacaccaactacttcggacggtgcaatgtggccgagcacgaaaagctgatcctgctggcccagctgaagcccgagaaggatagcgacgaagccgtgacatatagcctgggaaagtttgggcagagggccctggatttctacagcattcatgtgaccaaggagtccacccaccccgtgaagcccctggcccagatcgccggaaacagatacgcctccggacctgtgggaaaggccctgagcgacgcatgtatgggcacaatcgcctccttcctgtctaagtaccaggacatcatcatcgaacaccagaaggtggtgaagggcaaccagaagagactggagagcctgcgggagctggccggcaaggaaaacctggaataccctagcgtgaccctgccacctcagcctcacaccaaggagggcgttgatgcctacaacgaagtgatcgcccgggtgcgaatgtgggtgaacctgaacctgtggcagaagctgaagctaagcagagatgatgccaagcctctgctgagactgaagggattcccttcctttcctctggtcgagagacaggccaacgaagtggactggtgggacatggtgtgtaacgtgaagaagctgatcaacgagaaaaaggaggatggcaaggtgttttggcagaatctggctggctacaagagacaggaagccctgagaccatacctgagcagcgaggaagatcggaagaagggaaagaaattcgctcggtaccagctgggcgacctgctgctgcacctggaaaagaagcacggcgaggactggggaaaggtgtacgacgaggcctgggagcggattgacaagaaagtggaaggcctgagcaagcacatcaagctggaagaggaacggagaagcgaggacgcccagagcaaggccgccctgaccgactggctgcgggctaaggccagcttcgtgatcgagggcctgaaggaggccgacaaggacgagttctgcagatgcgagctgaagctgcagaagtggtacggggacctgcggggaaagcccttcgccatcgaagccgagaacagcatcctggacatcagcggcttcagcaagcagtacaactgtgccttcatctggcagaaggacggcgtgaagaagctgaacctgtacctgatcatcaactacttcaagggcggcaagctgcggttcaagaagatcaaacctgaagccttcgaagccaacagattctacaccgtgatcaacaaaaagagcggcgagatcgtgcccatggaggtgaacttcaacttcgacgaccccaacctgatcatcctgcctctggcctttggcaagagacagggcagagaattcatctggaacgacctgctgtccctggaaaccggcagcctgaagctggccaacggaagagtgatcgagaagacactgtacaacagaagaacccggcaggatgagcctgccctgttcgtggccctgaccttcgagcggcgggaggtcctggactcctccaatatcaaaccaatgaacctgatcggcgtggcaagaggcgaaaacatccccgccgtgatcgccctgaccgaccccgagggctgcccactgagccggtttaaggatagcctgggaaacccaacccacatcctgagaatcggcgagagctataaggagaagcagcggaccatccaggccaagaaggaggtggagcagcggagagccggcggctacagccggaagtacgccagcaaagccaagaatctggcagacgatatggtgagaaacaccgctagagatctgctgtactacgccgtgacccaggatgccatgctgatcttcgccaacctgagccggggcttcggccggcagggcaagcggaccttcatggccgagagacagtacacacggatggaggactggctgaccgccaagctggcctacgagggcctgagcaagacctacctgtccaagacactggcccagtacacctccaagacatgcagcaactgtgggtttaccatcaccagcgccgactacgacagggtgctggagaagctgaagaagacagcaacaggctggatgaccacaattaacggcaaggagctgaaggtggagggccagattacctactacaacagatacaagagacagaacgtagtcaaggacctgtccgtcgagctggatagactgagcgaagaatctgtgaacaacgacatctcctcctggacaaagggcagaagcggagaagctctgagcctcctgaagaaaagattctcccatagacccgtgcaggagaagttcgtgtgcctgaactgcggcttcgagacacacgcagccgagcaagccgccctgaacatcgccagatcctggctgttcctgcggagccaggagtacaagaaataccagacaaacaagacaaccggcaacaccgataagagagccttcgtcgagacctggcagtccttttaccggaagaagcttaaggaggtgtggaaacctgccgtgcggtctggcggatctggcggaggctccaccagccccaagaaaaagagaaaagtctaagctgccttctgcggggcttgccttctggccatgcccttcttctctcccttgcacctgtacctcttggtctttgaataaagcctgagtaggaaggctagcaaaaaaaaaaaaaaaaaaaaaaaaaaaaaaaaaaaaaaaaaaaaaaaaaaaaaaaaaaaaaaaaaaaaaaaaaaaaaaaagcccagccggctccccaacctctaccgaggagggcacctctgagtccgccacccccgagagcggccctggcacctccaccgagcccagcgagggcagcgcacccggcagccctgccggcagccccacctccacagaggagggaaccagcaccgagcccagcgaaggcagcgccccaggcaccagcaccgagcctagtgagcaggagattaaacggatcaacaagatcagaagaagacttgtgaaagacagcaacaccaagaaggccggcaagacaggccccatgaaaaccctgctggttagagtgatgacacccgatctgagagagcggctggaaaacctgagaaagaagcctgaaaatatcccccagcccatcagcaatacatctagagccaacctgaataagctgctgaccgattacaccgaaatgaagaaggcgatcctgcatgtgtactgggaagagttccagaaggaccctgtgggcctgatgagccgggtggcccagcctgccagcaagaagatcgatcagaacaagctgaaacctgagatggacgagaagggcaacctgaccaccgccggctttgcctgctctcagtgtggccagcccctgttcgtgtacaagctggagcaggtgtctgagaagggcaaggcttacaccaactacttcggacggtgcaatgtggccgagcacgaaaagctgatcctgctggcccagctgaagcccgagaaggatagcgacgaagccgtgacatatagcctgggaaagtttgggcagagggccctggatttctacagcattcatgtgaccaaggagtccacccaccccgtgaagcccctggcccagatcgccggaaacagatacgcctccggacctgtgggaaaggccctgagcgacgcatgtatgggcacaatcgcctccttcctgtctaagtaccaggacatcatcatcgaacaccagaaggtggtgaagggcaaccagaagagactggagagcctgcgggagctggccggcaaggaaaacctggaataccctagcgtgaccctgccacctcagcctcacaccaaggagggcgttgatgcctacaacgaagtgatcgcccgggtgcgaatgtgggtgaacctgaacctgtggcagaagctgaagctaagcagagatgatgccaagcctctgctgagactgaagggattcccttcctttcctctggtcgagagacaggccaacgaagtggactggtgggacatggtgtgtaacgtgaagaagctgatcaacgagaaaaaggaggatggcaaggtgttttggcagaatctggctggctacaagagacaggaagccctgagaccatacctgagcagcgaggaagatcggaagaagggaaagaaattcgctcggtaccagctgggcgacctgctgctgcacctggaaaagaagcacggcgaggactggggaaaggtgtacgacgaggcctgggagcggattgacaagaaagtggaaggcctgagcaagcacatcaagctggaagaggaacggagaagcgaggacgcccagagcaaggccgccctgaccgactggctgcgggctaaggccagcttcgtgatcgagggcctgaaggaggccgacaaggacgagttctgcagatgcgagctgaagctgcagaagtggtacggggacctgcggggaaagcccttcgccatcgaagccgagaacagcatcctggacatcagcggcttcagcaagcagtacaactgtgccttcatctggcagaaggacggcgtgaagaagctgaacctgtacctgatcatcaactacttcaagggcggcaagctgcggttcaagaagatcaaacctgaagccttcgaagccaacagattctacaccgtgatcaacaaaaagagcggcgagatcgtgcccatggaggtgaacttcaacttcgacgaccccaacctgatcatcctgcctctggcctttggcaagagacagggcagagaattcatctggaacgacctgctgtccctggaaaccggcagcctgaagctggccaacggaagagtgatcgagaagacactgtacaacagaagaacccggcaggatgagcctgccctgttcgtggccctgaccttcgagcggcgggaggtcctggactcctccaatatcaaaccaatgaacctgatcggcgtggcaagaggcgaaaacatccccgccgtgatcgccctgaccgaccccgagggctgcccactgagccggtttaaggatagcctgggaaacccaacccacatcctgagaatcggcgagagctataaggagaagcagcggaccatccaggccaagaaggaggtggagcagcggagagccggcggctacagccggaagtacgccagcaaagccaagaatctggcagacgatatggtgagaaacaccgctagagatctgctgtactacgccgtgacccaggatgccatgctgatcttcgccaacctgagccggggcttcggccggcagggcaagcggaccttcatggccgagagacagtacacacggatggaggactggctgaccgccaagctggcctacgagggcctgagcaagacctacctgtccaagacactggcccagtacacctccaagacatgcagcaactgtgggtttaccatcaccagcgccgactacgacagggtgctggagaagctgaagaagacagcaacaggctggatgaccacaattaacggcaaggagctgaaggtggagggccagattacctactacaacagatacaagagacagaacgtagtcaaggacctgtccgtcgagctggatagactgagcgaagaatctgtgaacaacgacatctcctcctggacaaagggcagaagcggagaagctctgagcctcctgaagaaaagattctcccatagacccgtgcaggagaagttcgtgtgcctgaactgcggcttcgagacacacgcagccgagcaagccgccctgaacatcgccagatcctggctgttcctgcggagccaggagtacaagaaataccagacaaacaagacaaccggcaacaccgataagagagccttcgtcgagacctggcagtccttttaccggaagaagcttaaggaggtgtggaaacctgccgtgcggtctggcggatctggcggaggctccaccagccccaagaaaaagagaaaagtctaagctgccttctgcggggcttgccttctggccatgcccttcttctctcccttgcacctgtacctcttggtctttgaataaagcctgagtaggaaggctagcaaaaaaaaaaaaaaaaaaaaaaaaaaaaaaaaaaaaaaaaaaaaaaaaaaaaaaaaaaaaaaaaaaaaaaaaaaaaaaaa

SEQ ID NO: 9815 - RNA, 8787 nt, synthetic construct
  source 1..8787: mol_type = other RNA
aggaaataagagagaaaagaagagtaagaagaaatataagagccaccatggcccctaagaagaagcgtaaagtgagccggatgaaccacgaccaggagttcgacccccctaaggtgtaccctcccgtccccgccgagaagagaaagcccatccgggtcctgagcctgttcgatggcatcgccaccggtctgctggtgctgaaggacctgggcatccaggtggataggtacattgcctccgaggtgtgcgaggactccatcaccgtgggaatggtgcgtcatcagggcaagatcatgtacgtgggcgacgtgcggagcgtgacacagaagcatatccaggagtggggccctttcgacctggtgatcggcggcagcccttgcaatgacctgagcatcgtgaacccagcccggaagggcctgtacgagggaaccggcagactgttcttcgagttttacagactgctgcacgacgcccggcctaaggaaggcgacgaccggcccttcttttggctgttcgagaatgtggtggccatgggagtcagcgacaagcgggatattagccggttcctggagagcaaccccgtgatgatcgatgccaaggaagtgagcgccgcccaccgggccagatacttctggggcaatctgcctggcatgaacagacccctggccagcaccgtgaacgacaagctggagctgcaggagtgcctggagcacggccggatcgccaagttcagcaaggtgagaaccatcaccacccgaagcaacagcatcaaacaaggcaaggaccagcactttcctgtgttcatgaacgagaaggaggacatcctgtggtgtaccgagatggagagagtgttcgggttcccagtccactacacagatgtcagcaacatgtctagactggccagacagagactgctgggaagaagctggtccgtccctgtgatcagacacctgttcgcccctctgaaggagtacttcgcctgcgtgagcagcggcaacagcaacgccaacagccggggccccagcttctctagcggcctggtgccactgtccctgagagggagccacatgggccccatggagatctacaaaaccgtgagcgcctggaagcggcagcctgtgcgcgtgctgagcctgtttcggaatatcgataaagtcctgaaaagcctgggattcctggagagcggctctggctccggcggtggcaccctgaagtacgtggaggatgtgacaaacgtggtcagacgggatgtggagaagtggggccccttcgatctggtgtacggcagcacccaacccctgggcagctcttgtgaccggtgccctggctggtacatgtttcagttccaccggatcctgcagtacgccctgccgagacaggagtcccagcggccattcttttggattttcatggacaacttgctgctgaccgaggatgaccaggaaactaccactcggttcctgcagaccgaagccgtgaccctgcaggacgtgagaggccgggactaccagaacgccatgcgggtgtggtccaacatccctggactgaaaagcaagcacgcacctctgacccctaaagaagaggagtacctgcaggcccaggtgcggagcagaagcaagctggacgcccctaaggtggatctgctggtgaagaattgcctcctgcccctgagagagtacttcaagtatttcagccagaatagtctgcccctgggaggcagcggcggcggcgccagcgtggtgttcgaggacgtggccgtgaacttcacccccgaggagtgggccctgctgaaccccggccagaggaagctgtacagggacgtgatgctggagacctgcaggaacctgagcgccgtgggctgcaggagccagggcaacaccagcacccccaggccccagtggagcatcctgctgaacgagccccccggcgaggacaagaccggcatcttcaccaggaaggacagctgcagcgtgggcggcccaagcagcggcgcccctcctcccagcggcggcaggcggcccaagcagcggcgcccctcctcccagcggcggcagcccagccggctccccaacctctaccgaggagggcacctctgagtccgccacccccgagagcggccctggcacctccaccgagcccagcgagggcagcgcacccggcagccctgccggcagccccacctccacagaggagggaaccagcaccgagcccagcgaaggcagcgccccaggcaccagcaccgagcctagtgagcaggagattaaacggatcaacaagatcagaagaagacttgtgaaagacagcaacaccaagaaggccggcaagacaggccccatgaaaaccctgctggttagagtgatgacacccgatctgagagagcggctggaaaacctgagaaagaagcctgaaaatatcccccagcccatcagcaatacatctagagccaacctgaataagctgctgaccgattacaccgaaatgaagaaggcgatcctgcatgtgtactgggaagagttccagaaggaccctgtgggcctgatgagccgggtggcccagcctgccagcaagaagatcgatcagaacaagctgaaacctgagatggacgagaagggcaacctgaccaccgccggctttgcctgctctcagtgtggccagcccctgttcgtgtacaagctggagcaggtgtctgagaagggcaaggcttacaccaactacttcggacggtgcaatgtggccgagcacgaaaagctgatcctgctggcccagctgaagcccgagaaggatagcgacgaagccgtgacatatagcctgggaaagtttgggcagagggccctggatttctacagcattcatgtgaccaaggagtccacccaccccgtgaagcccctggcccagatcgccggaaacagatacgcctccggacctgtgggaaaggccctgagcgacgcatgtatgggcacaatcgcctccttcctgtctaagtaccaggacatcatcatcgaacaccagaaggtggtgaagggcaaccagaagagactggagagcctgcgggagctggccggcaaggaaaacctggaataccctagcgtgaccctgccacctcagcctcacaccaaggagggcgttgatgcctacaacgaagtgatcgcccgggtgcgaatgtgggtgaacctgaacctgtggcagaagctgaagctaagcagagatgatgccaagcctctgctgagactgaagggattcccttcctttcctctggtcgagagacaggccaacgaagtggactggtgggacatggtgtgtaacgtgaagaagctgatcaacgagaaaaaggaggatggcaaggtgttttggcagaatctggctggctacaagagacaggaagccctgagaccatacctgagcagcgaggaagatcggaagaagggaaagaaattcgctcggtaccagctgggcgacctgctgctgcacctggaaaagaagcacggcgaggactggggaaaggtgtacgacgaggcctgggagcggattgacaagaaagtggaaggcctgagcaagcacatcaagctggaagaggaacggagaagcgaggacgcccagagcaaggccgccctgaccgactggctgcgggctaaggccagcttcgtgatcgagggcctgaaggaggccgacaaggacgagttctgcagatgcgagctgaagctgcagaagtggtacggggacctgcggggaaagcccttcgccatcgaagccgagaacagcatcctggacatcagcggcttcagcaagcagtacaactgtgccttcatctggcagaaggacggcgtgaagaagctgaacctgtacctgatcatcaactacttcaagggcggcaagctgcggttcaagaagatcaaacctgaagccttcgaagccaacagattctacaccgtgatcaacaaaaagagcggcgagatcgtgcccatggaggtgaacttcaacttcgacgaccccaacctgatcatcctgcctctggcctttggcaagagacagggcagagaattcatctggaacgacctgctgtccctggaaaccggcagcctgaagctggccaacggaagagtgatcgagaagacactgtacaacagaagaacccggcaggatgagcctgccctgttcgtggccctgaccttcgagcggcgggaggtcctggactcctccaatatcaaaccaatgaacctgatcggcgtggcaagaggcgaaaacatccccgccgtgatcgccctgaccgaccccgagggctgcccactgagccggtttaaggatagcctgggaaacccaacccacatcctgagaatcggcgagagctataaggagaagcagcggaccatccaggccaagaaggaggtggagcagcggagagccggcggctacagccggaagtacgccagcaaagccaagaatctggcagacgatatggtgagaaacaccgctagagatctgctgtactacgccgtgacccaggatgccatgctgatcttcgccaacctgagccggggcttcggccggcagggcaagcggaccttcatggccgagagacagtacacacggatggaggactggctgaccgccaagctggcctacgagggcctgagcaagacctacctgtccaagacactggcccagtacacctccaagacatgcagcaactgtgggtttaccatcaccagcgccgactacgacagggtgctggagaagctgaagaagacagcaacaggctggatgaccacaattaacggcaaggagctgaaggtggagggccagattacctactacaacagatacaagagacagaacgtagtcaaggacctgtccgtcgagctggatagactgagcgaagaatctgtgaacaacgacatctcctcctggacaaagggcagaagcggagaagctctgagcctcctgaagaaaagattctcccatagacccgtgcaggagaagttcgtgtgcctgaactgcggcttcgagacacacgcagccgagcaagccgccctgaacatcgccagatcctggctgttcctgcggagccaggagtacaagaaataccagacaaacaagacaaccggcaacaccgataagagagccttcgtcgagacctggcagtccttttaccggaagaagcttaaggaggtgtggaaacctgccgtgcggtctggcggatctggcggaggctccaccagccccaagaaaaagagaaaagtctaagctgccttctgcggggcttgccttctggccatgcccttcttctctcccttgcacctgtacctcttggtctttgaataaagcctgagtaggaaggctagcaaaaaaaaaaaaaaaaaaaaaaaaaaaaaaaaaaaaaaaaaaaaaaaaaaaaaaaaaaaaaaaaaaaaaaaaaaaaaaaagcccagccggctccccaacctctaccgaggagggcacctctgagtccgccacccccgagagcggccctggcacctccaccgagcccagcgagggcagcgcacccggcagccctgccggcagccccacctccacagaggagggaaccagcaccgagcccagcgaaggcagcgccccaggcaccagcaccgagcctagtgagcaggagattaaacggatcaacaagatcagaagaagacttgtgaaagacagcaacaccaagaaggccggcaagacaggccccatgaaaaccctgctggttagagtgatgacacccgatctgagagagcggctggaaaacctgagaaagaagcctgaaaatatcccccagcccatcagcaatacatctagagccaacctgaataagctgctgaccgattacaccgaaatgaagaaggcgatcctgcatgtgtactgggaagagttccagaaggaccctgtgggcctgatgagccgggtggcccagcctgccagcaagaagatcgatcagaacaagctgaaacctgagatggacgagaagggcaacctgaccaccgccggctttgcctgctctcagtgtggccagcccctgttcgtgtacaagctggagcaggtgtctgagaagggcaaggcttacaccaactacttcggacggtgcaatgtggccgagcacgaaaagctgatcctgctggcccagctgaagcccgagaaggatagcgacgaagccgtgacatatagcctgggaaagtttgggcagagggccctggatttctacagcattcatgtgaccaaggagtccacccaccccgtgaagcccctggcccagatcgccggaaacagatacgcctccggacctgtgggaaaggccctgagcgacgcatgtatgggcacaatcgcctccttcctgtctaagtaccaggacatcatcatcgaacaccagaaggtggtgaagggcaaccagaagagactggagagcctgcgggagctggccggcaaggaaaacctggaataccctagcgtgaccctgccacctcagcctcacaccaaggagggcgttgatgcctacaacgaagtgatcgcccgggtgcgaatgtgggtgaacctgaacctgtggcagaagctgaagctaagcagagatgatgccaagcctctgctgagactgaagggattcccttcctttcctctggtcgagagacaggccaacgaagtggactggtgggacatggtgtgtaacgtgaagaagctgatcaacgagaaaaaggaggatggcaaggtgttttggcagaatctggctggctacaagagacaggaagccctgagaccatacctgagcagcgaggaagatcggaagaagggaaagaaattcgctcggtaccagctgggcgacctgctgctgcacctggaaaagaagcacggcgaggactggggaaaggtgtacgacgaggcctgggagcggattgacaagaaagtggaaggcctgagcaagcacatcaagctggaagaggaacggagaagcgaggacgcccagagcaaggccgccctgaccgactggctgcgggctaaggccagcttcgtgatcgagggcctgaaggaggccgacaaggacgagttctgcagatgcgagctgaagctgcagaagtggtacggggacctgcggggaaagcccttcgccatcgaagccgagaacagcatcctggacatcagcggcttcagcaagcagtacaactgtgccttcatctggcagaaggacggcgtgaagaagctgaacctgtacctgatcatcaactacttcaagggcggcaagctgcggttcaagaagatcaaacctgaagccttcgaagccaacagattctacaccgtgatcaacaaaaagagcggcgagatcgtgcccatggaggtgaacttcaacttcgacgaccccaacctgatcatcctgcctctggcctttggcaagagacagggcagagaattcatctggaacgacctgctgtccctggaaaccggcagcctgaagctggccaacggaagagtgatcgagaagacactgtacaacagaagaacccggcaggatgagcctgccctgttcgtggccctgaccttcgagcggcgggaggtcctggactcctccaatatcaaaccaatgaacctgatcggcgtggcaagaggcgaaaacatccccgccgtgatcgccctgaccgaccccgagggctgcccactgagccggtttaaggatagcctgggaaacccaacccacatcctgagaatcggcgagagctataaggagaagcagcggaccatccaggccaagaaggaggtggagcagcggagagccggcggctacagccggaagtacgccagcaaagccaagaatctggcagacgatatggtgagaaacaccgctagagatctgctgtactacgccgtgacccaggatgccatgctgatcttcgccaacctgagccggggcttcggccggcagggcaagcggaccttcatggccgagagacagtacacacggatggaggactggctgaccgccaagctggcctacgagggcctgagcaagacctacctgtccaagacactggcccagtacacctccaagacatgcagcaactgtgggtttaccatcaccagcgccgactacgacagggtgctggagaagctgaagaagacagcaacaggctggatgaccacaattaacggcaaggagctgaaggtggagggccagattacctactacaacagatacaagagacagaacgtagtcaaggacctgtccgtcgagctggatagactgagcgaagaatctgtgaacaacgacatctcctcctggacaaagggcagaagcggagaagctctgagcctcctgaagaaaagattctcccatagacccgtgcaggagaagttcgtgtgcctgaactgcggcttcgagacacacgcagccgagcaagccgccctgaacatcgccagatcctggctgttcctgcggagccaggagtacaagaaataccagacaaacaagacaaccggcaacaccgataagagagccttcgtcgagacctggcagtccttttaccggaagaagcttaaggaggtgtggaaacctgccgtgcggtctggcggatctggcggaggctccaccagccccaagaaaaagagaaaagtctaagctgccttctgcggggcttgccttctggccatgcccttcttctctcccttgcacctgtacctcttggtctttgaataaagcctgagtaggaaggctagcaaaaaaaaaaaaaaaaaaaaaaaaaaaaaaaaaaaaaaaaaaaaaaaaaaaaaaaaaaaaaaaaaaaaaaaaaaaaaaaa

SEQ ID NO: 9816 - RNA, 8787 nt, synthetic construct
  source 1..8787: mol_type = other RNA
aggaaataagagagaaaagaagagtaagaagaaatataagagccaccatggcccctaagaagaagcgtaaagtgagccggatgaaccacgaccaggagttcgacccccctaaggtgtaccctcccgtccccgccgagaagagaaagcccatccgggtcctgagcctgttcgatggcatcgccaccggtctgctggtgctgaaggacctgggcatccaggtggataggtacattgcctccgaggtgtgcgaggactccatcaccgtgggaatggtgcgtcatcagggcaagatcatgtacgtgggcgacgtgcggagcgtgacacagaagcatatccaggagtggggccctttcgacctggtgatcggcggcagcccttgcaatgacctgagcatcgtgaacccagcccggaagggcctgtacgagggaaccggcagactgttcttcgagttttacagactgctgcacgacgcccggcctaaggaaggcgacgaccggcccttcttttggctgttcgagaatgtggtggccatgggagtcagcgacaagcgggatattagccggttcctggagagcaaccccgtgatgatcgatgccaaggaagtgagcgccgcccaccgggccagatacttctggggcaatctgcctggcatgaacagacccctggccagcaccgtgaacgacaagctggagctgcaggagtgcctggagcacggccggatcgccaagttcagcaaggtgagaaccatcaccacccgaagcaacagcatcaaacaaggcaaggaccagcactttcctgtgttcatgaacgagaaggaggacatcctgtggtgtaccgagatggagagagtgttcgggttcccagtccactacacagatgtcagcaacatgtctagactggccagacagagactgctgggaagaagctggtccgtccctgtgatcagacacctgttcgcccctctgaaggagtacttcgcctgcgtgagcagcggcaacagcaacgccaacagccggggccccagcttctctagcggcctggtgccactgtccctgagagggagccacatgggccccatggagatctacaaaaccgtgagcgcctggaagcggcagcctgtgcgcgtgctgagcctgtttcggaatatcgataaagtcctgaaaagcctgggattcctggagagcggctctggctccggcggtggcaccctgaagtacgtggaggatgtgacaaacgtggtcagacgggatgtggagaagtggggccccttcgatctggtgtacggcagcacccaacccctgggcagctcttgtgaccggtgccctggctggtacatgtttcagttccaccggatcctgcagtacgccctgccgagacaggagtcccagcggccattcttttggattttcatggacaacttgctgctgaccgaggatgaccaggaaactaccactcggttcctgcagaccgaagccgtgaccctgcaggacgtgagaggccgggactaccagaacgccatgcgggtgtggtccaacatccctggactgaaaagcaagcacgcacctctgacccctaaagaagaggagtacctgcaggcccaggtgcggagcagaagcaagctggacgcccctaaggtggatctgctggtgaagaattgcctcctgcccctgagagagtacttcaagtatttcagccagaatagtctgcccctgggaggcagcggcggcggcagcctgaccctggaggacgtggccgtggacttcacctgggaggagtggcagctgctgggccccgcccagaaggacctgtacagggacgtgatgctggagaactacagcaacctggtggccgtgggctaccaggccagcaagcccgacgccctgagcaagctggagcagggcgaggagccctgcaccaccgaggacgagatctacaccaggatctgctgcggcggccagccccagacctgcagcggcggcccaagcagcggcgcccctcctcccagcggcggcaggcggcccaagcagcggcgcccctcctcccagcggcggcagcccagccggctccccaacctctaccgaggagggcacctctgagtccgccacccccgagagcggccctggcacctccaccgagcccagcgagggcagcgcacccggcagccctgccggcagccccacctccacagaggagggaaccagcaccgagcccagcgaaggcagcgccccaggcaccagcaccgagcctagtgagcaggagattaaacggatcaacaagatcagaagaagacttgtgaaagacagcaacaccaagaaggccggcaagacaggccccatgaaaaccctgctggttagagtgatgacacccgatctgagagagcggctggaaaacctgagaaagaagcctgaaaatatcccccagcccatcagcaatacatctagagccaacctgaataagctgctgaccgattacaccgaaatgaagaaggcgatcctgcatgtgtactgggaagagttccagaaggaccctgtgggcctgatgagccgggtggcccagcctgccagcaagaagatcgatcagaacaagctgaaacctgagatggacgagaagggcaacctgaccaccgccggctttgcctgctctcagtgtggccagcccctgttcgtgtacaagctggagcaggtgtctgagaagggcaaggcttacaccaactacttcggacggtgcaatgtggccgagcacgaaaagctgatcctgctggcccagctgaagcccgagaaggatagcgacgaagccgtgacatatagcctgggaaagtttgggcagagggccctggatttctacagcattcatgtgaccaaggagtccacccaccccgtgaagcccctggcccagatcgccggaaacagatacgcctccggacctgtgggaaaggccctgagcgacgcatgtatgggcacaatcgcctccttcctgtctaagtaccaggacatcatcatcgaacaccagaaggtggtgaagggcaaccagaagagactggagagcctgcgggagctggccggcaaggaaaacctggaataccctagcgtgaccctgccacctcagcctcacaccaaggagggcgttgatgcctacaacgaagtgatcgcccgggtgcgaatgtgggtgaacctgaacctgtggcagaagctgaagctaagcagagatgatgccaagcctctgctgagactgaagggattcccttcctttcctctggtcgagagacaggccaacgaagtggactggtgggacatggtgtgtaacgtgaagaagctgatcaacgagaaaaaggaggatggcaaggtgttttggcagaatctggctggctacaagagacaggaagccctgagaccatacctgagcagcgaggaagatcggaagaagggaaagaaattcgctcggtaccagctgggcgacctgctgctgcacctggaaaagaagcacggcgaggactggggaaaggtgtacgacgaggcctgggagcggattgacaagaaagtggaaggcctgagcaagcacatcaagctggaagaggaacggagaagcgaggacgcccagagcaaggccgccctgaccgactggctgcgggctaaggccagcttcgtgatcgagggcctgaaggaggccgacaaggacgagttctgcagatgcgagctgaagctgcagaagtggtacggggacctgcggggaaagcccttcgccatcgaagccgagaacagcatcctggacatcagcggcttcagcaagcagtacaactgtgccttcatctggcagaaggacggcgtgaagaagctgaacctgtacctgatcatcaactacttcaagggcggcaagctgcggttcaagaagatcaaacctgaagccttcgaagccaacagattctacaccgtgatcaacaaaaagagcggcgagatcgtgcccatggaggtgaacttcaacttcgacgaccccaacctgatcatcctgcctctggcctttggcaagagacagggcagagaattcatctggaacgacctgctgtccctggaaaccggcagcctgaagctggccaacggaagagtgatcgagaagacactgtacaacagaagaacccggcaggatgagcctgccctgttcgtggccctgaccttcgagcggcgggaggtcctggactcctccaatatcaaaccaatgaacctgatcggcgtggcaagaggcgaaaacatccccgccgtgatcgccctgaccgaccccgagggctgcccactgagccggtttaaggatagcctgggaaacccaacccacatcctgagaatcggcgagagctataaggagaagcagcggaccatccaggccaagaaggaggtggagcagcggagagccggcggctacagccggaagtacgccagcaaagccaagaatctggcagacgatatggtgagaaacaccgctagagatctgctgtactacgccgtgacccaggatgccatgctgatcttcgccaacctgagccggggcttcggccggcagggcaagcggaccttcatggccgagagacagtacacacggatggaggactggctgaccgccaagctggcctacgagggcctgagcaagacctacctgtccaagacactggcccagtacacctccaagacatgcagcaactgtgggtttaccatcaccagcgccgactacgacagggtgctggagaagctgaagaagacagcaacaggctggatgaccacaattaacggcaaggagctgaaggtggagggccagattacctactacaacagatacaagagacagaacgtagtcaaggacctgtccgtcgagctggatagactgagcgaagaatctgtgaacaacgacatctcctcctggacaaagggcagaagcggagaagctctgagcctcctgaagaaaagattctcccatagacccgtgcaggagaagttcgtgtgcctgaactgcggcttcgagacacacgcagccgagcaagccgccctgaacatcgccagatcctggctgttcctgcggagccaggagtacaagaaataccagacaaacaagacaaccggcaacaccgataagagagccttcgtcgagacctggcagtccttttaccggaagaagcttaaggaggtgtggaaacctgccgtgcggtctggcggatctggcggaggctccaccagccccaagaaaaagagaaaagtctaagctgccttctgcggggcttgccttctggccatgcccttcttctctcccttgcacctgtacctcttggtctttgaataaagcctgagtaggaaggctagcaaaaaaaaaaaaaaaaaaaaaaaaaaaaaaaaaaaaaaaaaaaaaaaaaaaaaaaaaaaaaaaaaaaaaaaaaaaaaaaagcccagccggctccccaacctctaccgaggagggcacctctgagtccgccacccccgagagcggccctggcacctccaccgagcccagcgagggcagcgcacccggcagccctgccggcagccccacctccacagaggagggaaccagcaccgagcccagcgaaggcagcgccccaggcaccagcaccgagcctagtgagcaggagattaaacggatcaacaagatcagaagaagacttgtgaaagacagcaacaccaagaaggccggcaagacaggccccatgaaaaccctgctggttagagtgatgacacccgatctgagagagcggctggaaaacctgagaaagaagcctgaaaatatcccccagcccatcagcaatacatctagagccaacctgaataagctgctgaccgattacaccgaaatgaagaaggcgatcctgcatgtgtactgggaagagttccagaaggaccctgtgggcctgatgagccgggtggcccagcctgccagcaagaagatcgatcagaacaagctgaaacctgagatggacgagaagggcaacctgaccaccgccggctttgcctgctctcagtgtggccagcccctgttcgtgtacaagctggagcaggtgtctgagaagggcaaggcttacaccaactacttcggacggtgcaatgtggccgagcacgaaaagctgatcctgctggcccagctgaagcccgagaaggatagcgacgaagccgtgacatatagcctgggaaagtttgggcagagggccctggatttctacagcattcatgtgaccaaggagtccacccaccccgtgaagcccctggcccagatcgccggaaacagatacgcctccggacctgtgggaaaggccctgagcgacgcatgtatgggcacaatcgcctccttcctgtctaagtaccaggacatcatcatcgaacaccagaaggtggtgaagggcaaccagaagagactggagagcctgcgggagctggccggcaaggaaaacctggaataccctagcgtgaccctgccacctcagcctcacaccaaggagggcgttgatgcctacaacgaagtgatcgcccgggtgcgaatgtgggtgaacctgaacctgtggcagaagctgaagctaagcagagatgatgccaagcctctgctgagactgaagggattcccttcctttcctctggtcgagagacaggccaacgaagtggactggtgggacatggtgtgtaacgtgaagaagctgatcaacgagaaaaaggaggatggcaaggtgttttggcagaatctggctggctacaagagacaggaagccctgagaccatacctgagcagcgaggaagatcggaagaagggaaagaaattcgctcggtaccagctgggcgacctgctgctgcacctggaaaagaagcacggcgaggactggggaaaggtgtacgacgaggcctgggagcggattgacaagaaagtggaaggcctgagcaagcacatcaagctggaagaggaacggagaagcgaggacgcccagagcaaggccgccctgaccgactggctgcgggctaaggccagcttcgtgatcgagggcctgaaggaggccgacaaggacgagttctgcagatgcgagctgaagctgcagaagtggtacggggacctgcggggaaagcccttcgccatcgaagccgagaacagcatcctggacatcagcggcttcagcaagcagtacaactgtgccttcatctggcagaaggacggcgtgaagaagctgaacctgtacctgatcatcaactacttcaagggcggcaagctgcggttcaagaagatcaaacctgaagccttcgaagccaacagattctacaccgtgatcaacaaaaagagcggcgagatcgtgcccatggaggtgaacttcaacttcgacgaccccaacctgatcatcctgcctctggcctttggcaagagacagggcagagaattcatctggaacgacctgctgtccctggaaaccggcagcctgaagctggccaacggaagagtgatcgagaagacactgtacaacagaagaacccggcaggatgagcctgccctgttcgtggccctgaccttcgagcggcgggaggtcctggactcctccaatatcaaaccaatgaacctgatcggcgtggcaagaggcgaaaacatccccgccgtgatcgccctgaccgaccccgagggctgcccactgagccggtttaaggatagcctgggaaacccaacccacatcctgagaatcggcgagagctataaggagaagcagcggaccatccaggccaagaaggaggtggagcagcggagagccggcggctacagccggaagtacgccagcaaagccaagaatctggcagacgatatggtgagaaacaccgctagagatctgctgtactacgccgtgacccaggatgccatgctgatcttcgccaacctgagccggggcttcggccggcagggcaagcggaccttcatggccgagagacagtacacacggatggaggactggctgaccgccaagctggcctacgagggcctgagcaagacctacctgtccaagacactggcccagtacacctccaagacatgcagcaactgtgggtttaccatcaccagcgccgactacgacagggtgctggagaagctgaagaagacagcaacaggctggatgaccacaattaacggcaaggagctgaaggtggagggccagattacctactacaacagatacaagagacagaacgtagtcaaggacctgtccgtcgagctggatagactgagcgaagaatctgtgaacaacgacatctcctcctggacaaagggcagaagcggagaagctctgagcctcctgaagaaaagattctcccatagacccgtgcaggagaagttcgtgtgcctgaactgcggcttcgagacacacgcagccgagcaagccgccctgaacatcgccagatcctggctgttcctgcggagccaggagtacaagaaataccagacaaacaagacaaccggcaacaccgataagagagccttcgtcgagacctggcagtccttttaccggaagaagcttaaggaggtgtggaaacctgccgtgcggtctggcggatctggcggaggctccaccagccccaagaaaaagagaaaagtctaagctgccttctgcggggcttgccttctggccatgcccttcttctctcccttgcacctgtacctcttggtctttgaataaagcctgagtaggaaggctagcaaaaaaaaaaaaaaaaaaaaaaaaaaaaaaaaaaaaaaaaaaaaaaaaaaaaaaaaaaaaaaaaaaaaaaaaaaaaaaaa

SEQ ID NO: 9817 - RNA, 8787 nt, synthetic construct
  source 1..8787: mol_type = other RNA
aggaaataagagagaaaagaagagtaagaagaaatataagagccaccatggcccctaagaagaagcgtaaagtgagccggatgaaccacgaccaggagttcgacccccctaaggtgtaccctcccgtccccgccgagaagagaaagcccatccgggtcctgagcctgttcgatggcatcgccaccggtctgctggtgctgaaggacctgggcatccaggtggataggtacattgcctccgaggtgtgcgaggactccatcaccgtgggaatggtgcgtcatcagggcaagatcatgtacgtgggcgacgtgcggagcgtgacacagaagcatatccaggagtggggccctttcgacctggtgatcggcggcagcccttgcaatgacctgagcatcgtgaacccagcccggaagggcctgtacgagggaaccggcagactgttcttcgagttttacagactgctgcacgacgcccggcctaaggaaggcgacgaccggcccttcttttggctgttcgagaatgtggtggccatgggagtcagcgacaagcgggatattagccggttcctggagagcaaccccgtgatgatcgatgccaaggaagtgagcgccgcccaccgggccagatacttctggggcaatctgcctggcatgaacagacccctggccagcaccgtgaacgacaagctggagctgcaggagtgcctggagcacggccggatcgccaagttcagcaaggtgagaaccatcaccacccgaagcaacagcatcaaacaaggcaaggaccagcactttcctgtgttcatgaacgagaaggaggacatcctgtggtgtaccgagatggagagagtgttcgggttcccagtccactacacagatgtcagcaacatgtctagactggccagacagagactgctgggaagaagctggtccgtccctgtgatcagacacctgttcgcccctctgaaggagtacttcgcctgcgtgagcagcggcaacagcaacgccaacagccggggccccagcttctctagcggcctggtgccactgtccctgagagggagccacatgggccccatggagatctacaaaaccgtgagcgcctggaagcggcagcctgtgcgcgtgctgagcctgtttcggaatatcgataaagtcctgaaaagcctgggattcctggagagcggctctggctccggcggtggcaccctgaagtacgtggaggatgtgacaaacgtggtcagacgggatgtggagaagtggggccccttcgatctggtgtacggcagcacccaacccctgggcagctcttgtgaccggtgccctggctggtacatgtttcagttccaccggatcctgcagtacgccctgccgagacaggagtcccagcggccattcttttggattttcatggacaacttgctgctgaccgaggatgaccaggaaactaccactcggttcctgcagaccgaagccgtgaccctgcaggacgtgagaggccgggactaccagaacgccatgcgggtgtggtccaacatccctggactgaaaagcaagcacgcacctctgacccctaaagaagaggagtacctgcaggcccaggtgcggagcagaagcaagctggacgcccctaaggtggatctgctggtgaagaattgcctcctgcccctgagagagtacttcaagtatttcagccagaatagtctgcccctgggaggcagcggcggcggcttccaggccagcgtgagcttccaggacgtgaccgtggagttcagccaggaggagtggcagcacctgggccccgtggagaggaccctgtacagggacgtgatgctggagaactacagccacctggtgagcgtgggctactgcttcaccaagcccgagctgatcttcaccctggagcagggcgaggacccctggctgctggagaaggagaagggcttcctgagcaggaacagccccgaggacagcggcggcccaagcagcggcgcccctcctcccagcggcggcaggcggcccaagcagcggcgcccctcctcccagcggcggcagcccagccggctccccaacctctaccgaggagggcacctctgagtccgccacccccgagagcggccctggcacctccaccgagcccagcgagggcagcgcacccggcagccctgccggcagccccacctccacagaggagggaaccagcaccgagcccagcgaaggcagcgccccaggcaccagcaccgagcctagtgagcaggagattaaacggatcaacaagatcagaagaagacttgtgaaagacagcaacaccaagaaggccggcaagacaggccccatgaaaaccctgctggttagagtgatgacacccgatctgagagagcggctggaaaacctgagaaagaagcctgaaaatatcccccagcccatcagcaatacatctagagccaacctgaataagctgctgaccgattacaccgaaatgaagaaggcgatcctgcatgtgtactgggaagagttccagaaggaccctgtgggcctgatgagccgggtggcccagcctgccagcaagaagatcgatcagaacaagctgaaacctgagatggacgagaagggcaacctgaccaccgccggctttgcctgctctcagtgtggccagcccctgttcgtgtacaagctggagcaggtgtctgagaagggcaaggcttacaccaactacttcggacggtgcaatgtggccgagcacgaaaagctgatcctgctggcccagctgaagcccgagaaggatagcgacgaagccgtgacatatagcctgggaaagtttgggcagagggccctggatttctacagcattcatgtgaccaaggagtccacccaccccgtgaagcccctggcccagatcgccggaaacagatacgcctccggacctgtgggaaaggccctgagcgacgcatgtatgggcacaatcgcctccttcctgtctaagtaccaggacatcatcatcgaacaccagaaggtggtgaagggcaaccagaagagactggagagcctgcgggagctggccggcaaggaaaacctggaataccctagcgtgaccctgccacctcagcctcacaccaaggagggcgttgatgcctacaacgaagtgatcgcccgggtgcgaatgtgggtgaacctgaacctgtggcagaagctgaagctaagcagagatgatgccaagcctctgctgagactgaagggattcccttcctttcctctggtcgagagacaggccaacgaagtggactggtgggacatggtgtgtaacgtgaagaagctgatcaacgagaaaaaggaggatggcaaggtgttttggcagaatctggctggctacaagagacaggaagccctgagaccatacctgagcagcgaggaagatcggaagaagggaaagaaattcgctcggtaccagctgggcgacctgctgctgcacctggaaaagaagcacggcgaggactggggaaaggtgtacgacgaggcctgggagcggattgacaagaaagtggaaggcctgagcaagcacatcaagctggaagaggaacggagaagcgaggacgcccagagcaaggccgccctgaccgactggctgcgggctaaggccagcttcgtgatcgagggcctgaaggaggccgacaaggacgagttctgcagatgcgagctgaagctgcagaagtggtacggggacctgcggggaaagcccttcgccatcgaagccgagaacagcatcctggacatcagcggcttcagcaagcagtacaactgtgccttcatctggcagaaggacggcgtgaagaagctgaacctgtacctgatcatcaactacttcaagggcggcaagctgcggttcaagaagatcaaacctgaagccttcgaagccaacagattctacaccgtgatcaacaaaaagagcggcgagatcgtgcccatggaggtgaacttcaacttcgacgaccccaacctgatcatcctgcctctggcctttggcaagagacagggcagagaattcatctggaacgacctgctgtccctggaaaccggcagcctgaagctggccaacggaagagtgatcgagaagacactgtacaacagaagaacccggcaggatgagcctgccctgttcgtggccctgaccttcgagcggcgggaggtcctggactcctccaatatcaaaccaatgaacctgatcggcgtggcaagaggcgaaaacatccccgccgtgatcgccctgaccgaccccgagggctgcccactgagccggtttaaggatagcctgggaaacccaacccacatcctgagaatcggcgagagctataaggagaagcagcggaccatccaggccaagaaggaggtggagcagcggagagccggcggctacagccggaagtacgccagcaaagccaagaatctggcagacgatatggtgagaaacaccgctagagatctgctgtactacgccgtgacccaggatgccatgctgatcttcgccaacctgagccggggcttcggccggcagggcaagcggaccttcatggccgagagacagtacacacggatggaggactggctgaccgccaagctggcctacgagggcctgagcaagacctacctgtccaagacactggcccagtacacctccaagacatgcagcaactgtgggtttaccatcaccagcgccgactacgacagggtgctggagaagctgaagaagacagcaacaggctggatgaccacaattaacggcaaggagctgaaggtggagggccagattacctactacaacagatacaagagacagaacgtagtcaaggacctgtccgtcgagctggatagactgagcgaagaatctgtgaacaacgacatctcctcctggacaaagggcagaagcggagaagctctgagcctcctgaagaaaagattctcccatagacccgtgcaggagaagttcgtgtgcctgaactgcggcttcgagacacacgcagccgagcaagccgccctgaacatcgccagatcctggctgttcctgcggagccaggagtacaagaaataccagacaaacaagacaaccggcaacaccgataagagagccttcgtcgagacctggcagtccttttaccggaagaagcttaaggaggtgtggaaacctgccgtgcggtctggcggatctggcggaggctccaccagccccaagaaaaagagaaaagtctaagctgccttctgcggggcttgccttctggccatgcccttcttctctcccttgcacctgtacctcttggtctttgaataaagcctgagtaggaaggctagcaaaaaaaaaaaaaaaaaaaaaaaaaaaaaaaaaaaaaaaaaaaaaaaaaaaaaaaaaaaaaaaaaaaaaaaaaaaaaaaagcccagccggctccccaacctctaccgaggagggcacctctgagtccgccacccccgagagcggccctggcacctccaccgagcccagcgagggcagcgcacccggcagccctgccggcagccccacctccacagaggagggaaccagcaccgagcccagcgaaggcagcgccccaggcaccagcaccgagcctagtgagcaggagattaaacggatcaacaagatcagaagaagacttgtgaaagacagcaacaccaagaaggccggcaagacaggccccatgaaaaccctgctggttagagtgatgacacccgatctgagagagcggctggaaaacctgagaaagaagcctgaaaatatcccccagcccatcagcaatacatctagagccaacctgaataagctgctgaccgattacaccgaaatgaagaaggcgatcctgcatgtgtactgggaagagttccagaaggaccctgtgggcctgatgagccgggtggcccagcctgccagcaagaagatcgatcagaacaagctgaaacctgagatggacgagaagggcaacctgaccaccgccggctttgcctgctctcagtgtggccagcccctgttcgtgtacaagctggagcaggtgtctgagaagggcaaggcttacaccaactacttcggacggtgcaatgtggccgagcacgaaaagctgatcctgctggcccagctgaagcccgagaaggatagcgacgaagccgtgacatatagcctgggaaagtttgggcagagggccctggatttctacagcattcatgtgaccaaggagtccacccaccccgtgaagcccctggcccagatcgccggaaacagatacgcctccggacctgtgggaaaggccctgagcgacgcatgtatgggcacaatcgcctccttcctgtctaagtaccaggacatcatcatcgaacaccagaaggtggtgaagggcaaccagaagagactggagagcctgcgggagctggccggcaaggaaaacctggaataccctagcgtgaccctgccacctcagcctcacaccaaggagggcgttgatgcctacaacgaagtgatcgcccgggtgcgaatgtgggtgaacctgaacctgtggcagaagctgaagctaagcagagatgatgccaagcctctgctgagactgaagggattcccttcctttcctctggtcgagagacaggccaacgaagtggactggtgggacatggtgtgtaacgtgaagaagctgatcaacgagaaaaaggaggatggcaaggtgttttggcagaatctggctggctacaagagacaggaagccctgagaccatacctgagcagcgaggaagatcggaagaagggaaagaaattcgctcggtaccagctgggcgacctgctgctgcacctggaaaagaagcacggcgaggactggggaaaggtgtacgacgaggcctgggagcggattgacaagaaagtggaaggcctgagcaagcacatcaagctggaagaggaacggagaagcgaggacgcccagagcaaggccgccctgaccgactggctgcgggctaaggccagcttcgtgatcgagggcctgaaggaggccgacaaggacgagttctgcagatgcgagctgaagctgcagaagtggtacggggacctgcggggaaagcccttcgccatcgaagccgagaacagcatcctggacatcagcggcttcagcaagcagtacaactgtgccttcatctggcagaaggacggcgtgaagaagctgaacctgtacctgatcatcaactacttcaagggcggcaagctgcggttcaagaagatcaaacctgaagccttcgaagccaacagattctacaccgtgatcaacaaaaagagcggcgagatcgtgcccatggaggtgaacttcaacttcgacgaccccaacctgatcatcctgcctctggcctttggcaagagacagggcagagaattcatctggaacgacctgctgtccctggaaaccggcagcctgaagctggccaacggaagagtgatcgagaagacactgtacaacagaagaacccggcaggatgagcctgccctgttcgtggccctgaccttcgagcggcgggaggtcctggactcctccaatatcaaaccaatgaacctgatcggcgtggcaagaggcgaaaacatccccgccgtgatcgccctgaccgaccccgagggctgcccactgagccggtttaaggatagcctgggaaacccaacccacatcctgagaatcggcgagagctataaggagaagcagcggaccatccaggccaagaaggaggtggagcagcggagagccggcggctacagccggaagtacgccagcaaagccaagaatctggcagacgatatggtgagaaacaccgctagagatctgctgtactacgccgtgacccaggatgccatgctgatcttcgccaacctgagccggggcttcggccggcagggcaagcggaccttcatggccgagagacagtacacacggatggaggactggctgaccgccaagctggcctacgagggcctgagcaagacctacctgtccaagacactggcccagtacacctccaagacatgcagcaactgtgggtttaccatcaccagcgccgactacgacagggtgctggagaagctgaagaagacagcaacaggctggatgaccacaattaacggcaaggagctgaaggtggagggccagattacctactacaacagatacaagagacagaacgtagtcaaggacctgtccgtcgagctggatagactgagcgaagaatctgtgaacaacgacatctcctcctggacaaagggcagaagcggagaagctctgagcctcctgaagaaaagattctcccatagacccgtgcaggagaagttcgtgtgcctgaactgcggcttcgagacacacgcagccgagcaagccgccctgaacatcgccagatcctggctgttcctgcggagccaggagtacaagaaataccagacaaacaagacaaccggcaacaccgataagagagccttcgtcgagacctggcagtccttttaccggaagaagcttaaggaggtgtggaaacctgccgtgcggtctggcggatctggcggaggctccaccagccccaagaaaaagagaaaagtctaagctgccttctgcggggcttgccttctggccatgcccttcttctctcccttgcacctgtacctcttggtctttgaataaagcctgagtaggaaggctagcaaaaaaaaaaaaaaaaaaaaaaaaaaaaaaaaaaaaaaaaaaaaaaaaaaaaaaaaaaaaaaaaaaaaaaaaaaaaaaaa

SEQ ID NO: 9818 - RNA, 8787 nt, synthetic construct
  source 1..8787: mol_type = other RNA
aggaaataagagagaaaagaagagtaagaagaaatataagagccaccatggcccctaagaagaagcgtaaagtgagccggatgaaccacgaccaggagttcgacccccctaaggtgtaccctcccgtccccgccgagaagagaaagcccatccgggtcctgagcctgttcgatggcatcgccaccggtctgctggtgctgaaggacctgggcatccaggtggataggtacattgcctccgaggtgtgcgaggactccatcaccgtgggaatggtgcgtcatcagggcaagatcatgtacgtgggcgacgtgcggagcgtgacacagaagcatatccaggagtggggccctttcgacctggtgatcggcggcagcccttgcaatgacctgagcatcgtgaacccagcccggaagggcctgtacgagggaaccggcagactgttcttcgagttttacagactgctgcacgacgcccggcctaaggaaggcgacgaccggcccttcttttggctgttcgagaatgtggtggccatgggagtcagcgacaagcgggatattagccggttcctggagagcaaccccgtgatgatcgatgccaaggaagtgagcgccgcccaccgggccagatacttctggggcaatctgcctggcatgaacagacccctggccagcaccgtgaacgacaagctggagctgcaggagtgcctggagcacggccggatcgccaagttcagcaaggtgagaaccatcaccacccgaagcaacagcatcaaacaaggcaaggaccagcactttcctgtgttcatgaacgagaaggaggacatcctgtggtgtaccgagatggagagagtgttcgggttcccagtccactacacagatgtcagcaacatgtctagactggccagacagagactgctgggaagaagctggtccgtccctgtgatcagacacctgttcgcccctctgaaggagtacttcgcctgcgtgagcagcggcaacagcaacgccaacagccggggccccagcttctctagcggcctggtgccactgtccctgagagggagccacatgggccccatggagatctacaaaaccgtgagcgcctggaagcggcagcctgtgcgcgtgctgagcctgtttcggaatatcgataaagtcctgaaaagcctgggattcctggagagcggctctggctccggcggtggcaccctgaagtacgtggaggatgtgacaaacgtggtcagacgggatgtggagaagtggggccccttcgatctggtgtacggcagcacccaacccctgggcagctcttgtgaccggtgccctggctggtacatgtttcagttccaccggatcctgcagtacgccctgccgagacaggagtcccagcggccattcttttggattttcatggacaacttgctgctgaccgaggatgaccaggaaactaccactcggttcctgcagaccgaagccgtgaccctgcaggacgtgagaggccgggactaccagaacgccatgcgggtgtggtccaacatccctggactgaaaagcaagcacgcacctctgacccctaaagaagaggagtacctgcaggcccaggtgcggagcagaagcaagctggacgcccctaaggtggatctgctggtgaagaattgcctcctgcccctgagagagtacttcaagtatttcagccagaatagtctgcccctgggaggcagcggcggcggcccccaggtgagcctgaccttcgaggacgtggccgtgctgttcaccagggacgagtggaggaagctggcccccagccagaggaacctgtacagggacgtgatgctggagaactacaggaacctggtgagcctgggcctgcccttcaccaagcccaaggtgatcagcctgctgcagcagggcgaggacccctggaaggtggagaaggactgcttcggcggcagcttcctgggctgcaagagcaacggcggcccaagcagcggcgcccctcctcccagcggcggcaggcggcccaagcagcggcgcccctcctcccagcggcggcagcccagccggctccccaacctctaccgaggagggcacctctgagtccgccacccccgagagcggccctggcacctccaccgagcccagcgagggcagcgcacccggcagccctgccggcagccccacctccacagaggagggaaccagcaccgagcccagcgaaggcagcgccccaggcaccagcaccgagcctagtgagcaggagattaaacggatcaacaagatcagaagaagacttgtgaaagacagcaacaccaagaaggccggcaagacaggccccatgaaaaccctgctggttagagtgatgacacccgatctgagagagcggctggaaaacctgagaaagaagcctgaaaatatcccccagcccatcagcaatacatctagagccaacctgaataagctgctgaccgattacaccgaaatgaagaaggcgatcctgcatgtgtactgggaagagttccagaaggaccctgtgggcctgatgagccgggtggcccagcctgccagcaagaagatcgatcagaacaagctgaaacctgagatggacgagaagggcaacctgaccaccgccggctttgcctgctctcagtgtggccagcccctgttcgtgtacaagctggagcaggtgtctgagaagggcaaggcttacaccaactacttcggacggtgcaatgtggccgagcacgaaaagctgatcctgctggcccagctgaagcccgagaaggatagcgacgaagccgtgacatatagcctgggaaagtttgggcagagggccctggatttctacagcattcatgtgaccaaggagtccacccaccccgtgaagcccctggcccagatcgccggaaacagatacgcctccggacctgtgggaaaggccctgagcgacgcatgtatgggcacaatcgcctccttcctgtctaagtaccaggacatcatcatcgaacaccagaaggtggtgaagggcaaccagaagagactggagagcctgcgggagctggccggcaaggaaaacctggaataccctagcgtgaccctgccacctcagcctcacaccaaggagggcgttgatgcctacaacgaagtgatcgcccgggtgcgaatgtgggtgaacctgaacctgtggcagaagctgaagctaagcagagatgatgccaagcctctgctgagactgaagggattcccttcctttcctctggtcgagagacaggccaacgaagtggactggtgggacatggtgtgtaacgtgaagaagctgatcaacgagaaaaaggaggatggcaaggtgttttggcagaatctggctggctacaagagacaggaagccctgagaccatacctgagcagcgaggaagatcggaagaagggaaagaaattcgctcggtaccagctgggcgacctgctgctgcacctggaaaagaagcacggcgaggactggggaaaggtgtacgacgaggcctgggagcggattgacaagaaagtggaaggcctgagcaagcacatcaagctggaagaggaacggagaagcgaggacgcccagagcaaggccgccctgaccgactggctgcgggctaaggccagcttcgtgatcgagggcctgaaggaggccgacaaggacgagttctgcagatgcgagctgaagctgcagaagtggtacggggacctgcggggaaagcccttcgccatcgaagccgagaacagcatcctggacatcagcggcttcagcaagcagtacaactgtgccttcatctggcagaaggacggcgtgaagaagctgaacctgtacctgatcatcaactacttcaagggcggcaagctgcggttcaagaagatcaaacctgaagccttcgaagccaacagattctacaccgtgatcaacaaaaagagcggcgagatcgtgcccatggaggtgaacttcaacttcgacgaccccaacctgatcatcctgcctctggcctttggcaagagacagggcagagaattcatctggaacgacctgctgtccctggaaaccggcagcctgaagctggccaacggaagagtgatcgagaagacactgtacaacagaagaacccggcaggatgagcctgccctgttcgtggccctgaccttcgagcggcgggaggtcctggactcctccaatatcaaaccaatgaacctgatcggcgtggcaagaggcgaaaacatccccgccgtgatcgccctgaccgaccccgagggctgcccactgagccggtttaaggatagcctgggaaacccaacccacatcctgagaatcggcgagagctataaggagaagcagcggaccatccaggccaagaaggaggtggagcagcggagagccggcggctacagccggaagtacgccagcaaagccaagaatctggcagacgatatggtgagaaacaccgctagagatctgctgtactacgccgtgacccaggatgccatgctgatcttcgccaacctgagccggggcttcggccggcagggcaagcggaccttcatggccgagagacagtacacacggatggaggactggctgaccgccaagctggcctacgagggcctgagcaagacctacctgtccaagacactggcccagtacacctccaagacatgcagcaactgtgggtttaccatcaccagcgccgactacgacagggtgctggagaagctgaagaagacagcaacaggctggatgaccacaattaacggcaaggagctgaaggtggagggccagattacctactacaacagatacaagagacagaacgtagtcaaggacctgtccgtcgagctggatagactgagcgaagaatctgtgaacaacgacatctcctcctggacaaagggcagaagcggagaagctctgagcctcctgaagaaaagattctcccatagacccgtgcaggagaagttcgtgtgcctgaactgcggcttcgagacacacgcagccgagcaagccgccctgaacatcgccagatcctggctgttcctgcggagccaggagtacaagaaataccagacaaacaagacaaccggcaacaccgataagagagccttcgtcgagacctggcagtccttttaccggaagaagcttaaggaggtgtggaaacctgccgtgcggtctggcggatctggcggaggctccaccagccccaagaaaaagagaaaagtctaagctgccttctgcggggcttgccttctggccatgcccttcttctctcccttgcacctgtacctcttggtctttgaataaagcctgagtaggaaggctagcaaaaaaaaaaaaaaaaaaaaaaaaaaaaaaaaaaaaaaaaaaaaaaaaaaaaaaaaaaaaaaaaaaaaaaaaaaaaaaaagcccagccggctccccaacctctaccgaggagggcacctctgagtccgccacccccgagagcggccctggcacctccaccgagcccagcgagggcagcgcacccggcagccctgccggcagccccacctccacagaggagggaaccagcaccgagcccagcgaaggcagcgccccaggcaccagcaccgagcctagtgagcaggagattaaacggatcaacaagatcagaagaagacttgtgaaagacagcaacaccaagaaggccggcaagacaggccccatgaaaaccctgctggttagagtgatgacacccgatctgagagagcggctggaaaacctgagaaagaagcctgaaaatatcccccagcccatcagcaatacatctagagccaacctgaataagctgctgaccgattacaccgaaatgaagaaggcgatcctgcatgtgtactgggaagagttccagaaggaccctgtgggcctgatgagccgggtggcccagcctgccagcaagaagatcgatcagaacaagctgaaacctgagatggacgagaagggcaacctgaccaccgccggctttgcctgctctcagtgtggccagcccctgttcgtgtacaagctggagcaggtgtctgagaagggcaaggcttacaccaactacttcggacggtgcaatgtggccgagcacgaaaagctgatcctgctggcccagctgaagcccgagaaggatagcgacgaagccgtgacatatagcctgggaaagtttgggcagagggccctggatttctacagcattcatgtgaccaaggagtccacccaccccgtgaagcccctggcccagatcgccggaaacagatacgcctccggacctgtgggaaaggccctgagcgacgcatgtatgggcacaatcgcctccttcctgtctaagtaccaggacatcatcatcgaacaccagaaggtggtgaagggcaaccagaagagactggagagcctgcgggagctggccggcaaggaaaacctggaataccctagcgtgaccctgccacctcagcctcacaccaaggagggcgttgatgcctacaacgaagtgatcgcccgggtgcgaatgtgggtgaacctgaacctgtggcagaagctgaagctaagcagagatgatgccaagcctctgctgagactgaagggattcccttcctttcctctggtcgagagacaggccaacgaagtggactggtgggacatggtgtgtaacgtgaagaagctgatcaacgagaaaaaggaggatggcaaggtgttttggcagaatctggctggctacaagagacaggaagccctgagaccatacctgagcagcgaggaagatcggaagaagggaaagaaattcgctcggtaccagctgggcgacctgctgctgcacctggaaaagaagcacggcgaggactggggaaaggtgtacgacgaggcctgggagcggattgacaagaaagtggaaggcctgagcaagcacatcaagctggaagaggaacggagaagcgaggacgcccagagcaaggccgccctgaccgactggctgcgggctaaggccagcttcgtgatcgagggcctgaaggaggccgacaaggacgagttctgcagatgcgagctgaagctgcagaagtggtacggggacctgcggggaaagcccttcgccatcgaagccgagaacagcatcctggacatcagcggcttcagcaagcagtacaactgtgccttcatctggcagaaggacggcgtgaagaagctgaacctgtacctgatcatcaactacttcaagggcggcaagctgcggttcaagaagatcaaacctgaagccttcgaagccaacagattctacaccgtgatcaacaaaaagagcggcgagatcgtgcccatggaggtgaacttcaacttcgacgaccccaacctgatcatcctgcctctggcctttggcaagagacagggcagagaattcatctggaacgacctgctgtccctggaaaccggcagcctgaagctggccaacggaagagtgatcgagaagacactgtacaacagaagaacccggcaggatgagcctgccctgttcgtggccctgaccttcgagcggcgggaggtcctggactcctccaatatcaaaccaatgaacctgatcggcgtggcaagaggcgaaaacatccccgccgtgatcgccctgaccgaccccgagggctgcccactgagccggtttaaggatagcctgggaaacccaacccacatcctgagaatcggcgagagctataaggagaagcagcggaccatccaggccaagaaggaggtggagcagcggagagccggcggctacagccggaagtacgccagcaaagccaagaatctggcagacgatatggtgagaaacaccgctagagatctgctgtactacgccgtgacccaggatgccatgctgatcttcgccaacctgagccggggcttcggccggcagggcaagcggaccttcatggccgagagacagtacacacggatggaggactggctgaccgccaagctggcctacgagggcctgagcaagacctacctgtccaagacactggcccagtacacctccaagacatgcagcaactgtgggtttaccatcaccagcgccgactacgacagggtgctggagaagctgaagaagacagcaacaggctggatgaccacaattaacggcaaggagctgaaggtggagggccagattacctactacaacagatacaagagacagaacgtagtcaaggacctgtccgtcgagctggatagactgagcgaagaatctgtgaacaacgacatctcctcctggacaaagggcagaagcggagaagctctgagcctcctgaagaaaagattctcccatagacccgtgcaggagaagttcgtgtgcctgaactgcggcttcgagacacacgcagccgagcaagccgccctgaacatcgccagatcctggctgttcctgcggagccaggagtacaagaaataccagacaaacaagacaaccggcaacaccgataagagagccttcgtcgagacctggcagtccttttaccggaagaagcttaaggaggtgtggaaacctgccgtgcggtctggcggatctggcggaggctccaccagccccaagaaaaagagaaaagtctaagctgccttctgcggggcttgccttctggccatgcccttcttctctcccttgcacctgtacctcttggtctttgaataaagcctgagtaggaaggctagcaaaaaaaaaaaaaaaaaaaaaaaaaaaaaaaaaaaaaaaaaaaaaaaaaaaaaaaaaaaaaaaaaaaaaaaaaaaaaaaa

SEQ ID NO: 9819 - RNA, 8784 nt, synthetic construct
  source 1..8784: mol_type = other RNA
aggaaataagagagaaaagaagagtaagaagaaatataagagccaccatggcccctaagaagaagcgtaaagtgagccggatgaaccacgaccaggagttcgacccccctaaggtgtaccctcccgtccccgccgagaagagaaagcccatccgggtcctgagcctgttcgatggcatcgccaccggtctgctggtgctgaaggacctgggcatccaggtggataggtacattgcctccgaggtgtgcgaggactccatcaccgtgggaatggtgcgtcatcagggcaagatcatgtacgtgggcgacgtgcggagcgtgacacagaagcatatccaggagtggggccctttcgacctggtgatcggcggcagcccttgcaatgacctgagcatcgtgaacccagcccggaagggcctgtacgagggaaccggcagactgttcttcgagttttacagactgctgcacgacgcccggcctaaggaaggcgacgaccggcccttcttttggctgttcgagaatgtggtggccatgggagtcagcgacaagcgggatattagccggttcctggagagcaaccccgtgatgatcgatgccaaggaagtgagcgccgcccaccgggccagatacttctggggcaatctgcctggcatgaacagacccctggccagcaccgtgaacgacaagctggagctgcaggagtgcctggagcacggccggatcgccaagttcagcaaggtgagaaccatcaccacccgaagcaacagcatcaaacaaggcaaggaccagcactttcctgtgttcatgaacgagaaggaggacatcctgtggtgtaccgagatggagagagtgttcgggttcccagtccactacacagatgtcagcaacatgtctagactggccagacagagactgctgggaagaagctggtccgtccctgtgatcagacacctgttcgcccctctgaaggagtacttcgcctgcgtgagcagcggcaacagcaacgccaacagccggggccccagcttctctagcggcctggtgccactgtccctgagagggagccacatgggccccatggagatctacaaaaccgtgagcgcctggaagcggcagcctgtgcgcgtgctgagcctgtttcggaatatcgataaagtcctgaaaagcctgggattcctggagagcggctctggctccggcggtggcaccctgaagtacgtggaggatgtgacaaacgtggtcagacgggatgtggagaagtggggccccttcgatctggtgtacggcagcacccaacccctgggcagctcttgtgaccggtgccctggctggtacatgtttcagttccaccggatcctgcagtacgccctgccgagacaggagtcccagcggccattcttttggattttcatggacaacttgctgctgaccgaggatgaccaggaaactaccactcggttcctgcagaccgaagccgtgaccctgcaggacgtgagaggccgggactaccagaacgccatgcgggtgtggtccaacatccctggactgaaaagcaagcacgcacctctgacccctaaagaagaggagtacctgcaggcccaggtgcggagcagaagcaagctggacgcccctaaggtggatctgctggtgaagaattgcctcctgcccctgagagagtacttcaagtatttcagccagaatagtctgcccctgggaggcagcggcggcggcgacagcgtggccttcgaggacgtggccgtgaacttcacccaggaggagtgggccctgctgagccccagccagaagaacctgtacagagacgtgaccctggagaccttcagaaacctggccagcgtgggcatccagtggaaggaccaggacatcgagaacctgtaccagaacctgggcatcaagctgagaagcctggtggagagactgtgcggcagaaaggagggcaacgagcacagagagggcggcccaagcagcggcgcccctcctcccagcggcggcaggcggcccaagcagcggcgcccctcctcccagcggcggcagcccagccggctccccaacctctaccgaggagggcacctctgagtccgccacccccgagagcggccctggcacctccaccgagcccagcgagggcagcgcacccggcagccctgccggcagccccacctccacagaggagggaaccagcaccgagcccagcgaaggcagcgccccaggcaccagcaccgagcctagtgagcaggagattaaacggatcaacaagatcagaagaagacttgtgaaagacagcaacaccaagaaggccggcaagacaggccccatgaaaaccctgctggttagagtgatgacacccgatctgagagagcggctggaaaacctgagaaagaagcctgaaaatatcccccagcccatcagcaatacatctagagccaacctgaataagctgctgaccgattacaccgaaatgaagaaggcgatcctgcatgtgtactgggaagagttccagaaggaccctgtgggcctgatgagccgggtggcccagcctgccagcaagaagatcgatcagaacaagctgaaacctgagatggacgagaagggcaacctgaccaccgccggctttgcctgctctcagtgtggccagcccctgttcgtgtacaagctggagcaggtgtctgagaagggcaaggcttacaccaactacttcggacggtgcaatgtggccgagcacgaaaagctgatcctgctggcccagctgaagcccgagaaggatagcgacgaagccgtgacatatagcctgggaaagtttgggcagagggccctggatttctacagcattcatgtgaccaaggagtccacccaccccgtgaagcccctggcccagatcgccggaaacagatacgcctccggacctgtgggaaaggccctgagcgacgcatgtatgggcacaatcgcctccttcctgtctaagtaccaggacatcatcatcgaacaccagaaggtggtgaagggcaaccagaagagactggagagcctgcgggagctggccggcaaggaaaacctggaataccctagcgtgaccctgccacctcagcctcacaccaaggagggcgttgatgcctacaacgaagtgatcgcccgggtgcgaatgtgggtgaacctgaacctgtggcagaagctgaagctaagcagagatgatgccaagcctctgctgagactgaagggattcccttcctttcctctggtcgagagacaggccaacgaagtggactggtgggacatggtgtgtaacgtgaagaagctgatcaacgagaaaaaggaggatggcaaggtgttttggcagaatctggctggctacaagagacaggaagccctgagaccatacctgagcagcgaggaagatcggaagaagggaaagaaattcgctcggtaccagctgggcgacctgctgctgcacctggaaaagaagcacggcgaggactggggaaaggtgtacgacgaggcctgggagcggattgacaagaaagtggaaggcctgagcaagcacatcaagctggaagaggaacggagaagcgaggacgcccagagcaaggccgccctgaccgactggctgcgggctaaggccagcttcgtgatcgagggcctgaaggaggccgacaaggacgagttctgcagatgcgagctgaagctgcagaagtggtacggggacctgcggggaaagcccttcgccatcgaagccgagaacagcatcctggacatcagcggcttcagcaagcagtacaactgtgccttcatctggcagaaggacggcgtgaagaagctgaacctgtacctgatcatcaactacttcaagggcggcaagctgcggttcaagaagatcaaacctgaagccttcgaagccaacagattctacaccgtgatcaacaaaaagagcggcgagatcgtgcccatggaggtgaacttcaacttcgacgaccccaacctgatcatcctgcctctggcctttggcaagagacagggcagagaattcatctggaacgacctgctgtccctggaaaccggcagcctgaagctggccaacggaagagtgatcgagaagacactgtacaacagaagaacccggcaggatgagcctgccctgttcgtggccctgaccttcgagcggcgggaggtcctggactcctccaatatcaaaccaatgaacctgatcggcgtggcaagaggcgaaaacatccccgccgtgatcgccctgaccgaccccgagggctgcccactgagccggtttaaggatagcctgggaaacccaacccacatcctgagaatcggcgagagctataaggagaagcagcggaccatccaggccaagaaggaggtggagcagcggagagccggcggctacagccggaagtacgccagcaaagccaagaatctggcagacgatatggtgagaaacaccgctagagatctgctgtactacgccgtgacccaggatgccatgctgatcttcgccaacctgagccggggcttcggccggcagggcaagcggaccttcatggccgagagacagtacacacggatggaggactggctgaccgccaagctggcctacgagggcctgagcaagacctacctgtccaagacactggcccagtacacctccaagacatgcagcaactgtgggtttaccatcaccagcgccgactacgacagggtgctggagaagctgaagaagacagcaacaggctggatgaccacaattaacggcaaggagctgaaggtggagggccagattacctactacaacagatacaagagacagaacgtagtcaaggacctgtccgtcgagctggatagactgagcgaagaatctgtgaacaacgacatctcctcctggacaaagggcagaagcggagaagctctgagcctcctgaagaaaagattctcccatagacccgtgcaggagaagttcgtgtgcctgaactgcggcttcgagacacacgcagccgagcaagccgccctgaacatcgccagatcctggctgttcctgcggagccaggagtacaagaaataccagacaaacaagacaaccggcaacaccgataagagagccttcgtcgagacctggcagtccttttaccggaagaagcttaaggaggtgtggaaacctgccgtgcggtctggcggatctggcggaggctccaccagccccaagaaaaagagaaaagtctaagctgccttctgcggggcttgccttctggccatgcccttcttctctcccttgcacctgtacctcttggtctttgaataaagcctgagtaggaaggctagcaaaaaaaaaaaaaaaaaaaaaaaaaaaaaaaaaaaaaaaaaaaaaaaaaaaaaaaaaaaaaaaaaaaaaaaaaaaaaaaagcccagccggctccccaacctctaccgaggagggcacctctgagtccgccacccccgagagcggccctggcacctccaccgagcccagcgagggcagcgcacccggcagccctgccggcagccccacctccacagaggagggaaccagcaccgagcccagcgaaggcagcgccccaggcaccagcaccgagcctagtgagcaggagattaaacggatcaacaagatcagaagaagacttgtgaaagacagcaacaccaagaaggccggcaagacaggccccatgaaaaccctgctggttagagtgatgacacccgatctgagagagcggctggaaaacctgagaaagaagcctgaaaatatcccccagcccatcagcaatacatctagagccaacctgaataagctgctgaccgattacaccgaaatgaagaaggcgatcctgcatgtgtactgggaagagttccagaaggaccctgtgggcctgatgagccgggtggcccagcctgccagcaagaagatcgatcagaacaagctgaaacctgagatggacgagaagggcaacctgaccaccgccggctttgcctgctctcagtgtggccagcccctgttcgtgtacaagctggagcaggtgtctgagaagggcaaggcttacaccaactacttcggacggtgcaatgtggccgagcacgaaaagctgatcctgctggcccagctgaagcccgagaaggatagcgacgaagccgtgacatatagcctgggaaagtttgggcagagggccctggatttctacagcattcatgtgaccaaggagtccacccaccccgtgaagcccctggcccagatcgccggaaacagatacgcctccggacctgtgggaaaggccctgagcgacgcatgtatgggcacaatcgcctccttcctgtctaagtaccaggacatcatcatcgaacaccagaaggtggtgaagggcaaccagaagagactggagagcctgcgggagctggccggcaaggaaaacctggaataccctagcgtgaccctgccacctcagcctcacaccaaggagggcgttgatgcctacaacgaagtgatcgcccgggtgcgaatgtgggtgaacctgaacctgtggcagaagctgaagctaagcagagatgatgccaagcctctgctgagactgaagggattcccttcctttcctctggtcgagagacaggccaacgaagtggactggtgggacatggtgtgtaacgtgaagaagctgatcaacgagaaaaaggaggatggcaaggtgttttggcagaatctggctggctacaagagacaggaagccctgagaccatacctgagcagcgaggaagatcggaagaagggaaagaaattcgctcggtaccagctgggcgacctgctgctgcacctggaaaagaagcacggcgaggactggggaaaggtgtacgacgaggcctgggagcggattgacaagaaagtggaaggcctgagcaagcacatcaagctggaagaggaacggagaagcgaggacgcccagagcaaggccgccctgaccgactggctgcgggctaaggccagcttcgtgatcgagggcctgaaggaggccgacaaggacgagttctgcagatgcgagctgaagctgcagaagtggtacggggacctgcggggaaagcccttcgccatcgaagccgagaacagcatcctggacatcagcggcttcagcaagcagtacaactgtgccttcatctggcagaaggacggcgtgaagaagctgaacctgtacctgatcatcaactacttcaagggcggcaagctgcggttcaagaagatcaaacctgaagccttcgaagccaacagattctacaccgtgatcaacaaaaagagcggcgagatcgtgcccatggaggtgaacttcaacttcgacgaccccaacctgatcatcctgcctctggcctttggcaagagacagggcagagaattcatctggaacgacctgctgtccctggaaaccggcagcctgaagctggccaacggaagagtgatcgagaagacactgtacaacagaagaacccggcaggatgagcctgccctgttcgtggccctgaccttcgagcggcgggaggtcctggactcctccaatatcaaaccaatgaacctgatcggcgtggcaagaggcgaaaacatccccgccgtgatcgccctgaccgaccccgagggctgcccactgagccggtttaaggatagcctgggaaacccaacccacatcctgagaatcggcgagagctataaggagaagcagcggaccatccaggccaagaaggaggtggagcagcggagagccggcggctacagccggaagtacgccagcaaagccaagaatctggcagacgatatggtgagaaacaccgctagagatctgctgtactacgccgtgacccaggatgccatgctgatcttcgccaacctgagccggggcttcggccggcagggcaagcggaccttcatggccgagagacagtacacacggatggaggactggctgaccgccaagctggcctacgagggcctgagcaagacctacctgtccaagacactggcccagtacacctccaagacatgcagcaactgtgggtttaccatcaccagcgccgactacgacagggtgctggagaagctgaagaagacagcaacaggctggatgaccacaattaacggcaaggagctgaaggtggagggccagattacctactacaacagatacaagagacagaacgtagtcaaggacctgtccgtcgagctggatagactgagcgaagaatctgtgaacaacgacatctcctcctggacaaagggcagaagcggagaagctctgagcctcctgaagaaaagattctcccatagacccgtgcaggagaagttcgtgtgcctgaactgcggcttcgagacacacgcagccgagcaagccgccctgaacatcgccagatcctggctgttcctgcggagccaggagtacaagaaataccagacaaacaagacaaccggcaacaccgataagagagccttcgtcgagacctggcagtccttttaccggaagaagcttaaggaggtgtggaaacctgccgtgcggtctggcggatctggcggaggctccaccagccccaagaaaaagagaaaagtctaagctgccttctgcggggcttgccttctggccatgcccttcttctctcccttgcacctgtacctcttggtctttgaataaagcctgagtaggaaggctagcaaaaaaaaaaaaaaaaaaaaaaaaaaaaaaaaaaaaaaaaaaaaaaaaaaaaaaaaaaaaaaaaaaaaaaaaaaaaaaaa

SEQ ID NO: 9820 - RNA, 8787 nt, synthetic construct
  source 1..8787: mol_type = other RNA
aggaaataagagagaaaagaagagtaagaagaaatataagagccaccatggcccctaagaagaagcgtaaagtgagccggatgaaccacgaccaggagttcgacccccctaaggtgtaccctcccgtccccgccgagaagagaaagcccatccgggtcctgagcctgttcgatggcatcgccaccggtctgctggtgctgaaggacctgggcatccaggtggataggtacattgcctccgaggtgtgcgaggactccatcaccgtgggaatggtgcgtcatcagggcaagatcatgtacgtgggcgacgtgcggagcgtgacacagaagcatatccaggagtggggccctttcgacctggtgatcggcggcagcccttgcaatgacctgagcatcgtgaacccagcccggaagggcctgtacgagggaaccggcagactgttcttcgagttttacagactgctgcacgacgcccggcctaaggaaggcgacgaccggcccttcttttggctgttcgagaatgtggtggccatgggagtcagcgacaagcgggatattagccggttcctggagagcaaccccgtgatgatcgatgccaaggaagtgagcgccgcccaccgggccagatacttctggggcaatctgcctggcatgaacagacccctggccagcaccgtgaacgacaagctggagctgcaggagtgcctggagcacggccggatcgccaagttcagcaaggtgagaaccatcaccacccgaagcaacagcatcaaacaaggcaaggaccagcactttcctgtgttcatgaacgagaaggaggacatcctgtggtgtaccgagatggagagagtgttcgggttcccagtccactacacagatgtcagcaacatgtctagactggccagacagagactgctgggaagaagctggtccgtccctgtgatcagacacctgttcgcccctctgaaggagtacttcgcctgcgtgagcagcggcaacagcaacgccaacagccggggccccagcttctctagcggcctggtgccactgtccctgagagggagccacatgggccccatggagatctacaaaaccgtgagcgcctggaagcggcagcctgtgcgcgtgctgagcctgtttcggaatatcgataaagtcctgaaaagcctgggattcctggagagcggctctggctccggcggtggcaccctgaagtacgtggaggatgtgacaaacgtggtcagacgggatgtggagaagtggggccccttcgatctggtgtacggcagcacccaacccctgggcagctcttgtgaccggtgccctggctggtacatgtttcagttccaccggatcctgcagtacgccctgccgagacaggagtcccagcggccattcttttggattttcatggacaacttgctgctgaccgaggatgaccaggaaactaccactcggttcctgcagaccgaagccgtgaccctgcaggacgtgagaggccgggactaccagaacgccatgcgggtgtggtccaacatccctggactgaaaagcaagcacgcacctctgacccctaaagaagaggagtacctgcaggcccaggtgcggagcagaagcaagctggacgcccctaaggtggatctgctggtgaagaattgcctcctgcccctgagagagtacttcaagtatttcagccagaatagtctgcccctgggaggcagcggcggcggcatggccgccgccgccctgagggagcccgcccagggctacgtgaccttcgaggacgtggccgtgtacttcagccaggaggagtggaggctgctggacgaggcccagaggctgctgtacaggaacgtgatgctggagaacttcagcctgatggccagcctgggcctggccagcagcaagacccacgagatcacccagctggagagctgggaggagcccttcgtgcccgcctgggacgtgatgaccggcggcccaagcagcggcgcccctcctcccagcggcggcaggcggcccaagcagcggcgcccctcctcccagcggcggcagcccagccggctccccaacctctaccgaggagggcacctctgagtccgccacccccgagagcggccctggcacctccaccgagcccagcgagggcagcgcacccggcagccctgccggcagccccacctccacagaggagggaaccagcaccgagcccagcgaaggcagcgccccaggcaccagcaccgagcctagtgagcaggagattaaacggatcaacaagatcagaagaagacttgtgaaagacagcaacaccaagaaggccggcaagacaggccccatgaaaaccctgctggttagagtgatgacacccgatctgagagagcggctggaaaacctgagaaagaagcctgaaaatatcccccagcccatcagcaatacatctagagccaacctgaataagctgctgaccgattacaccgaaatgaagaaggcgatcctgcatgtgtactgggaagagttccagaaggaccctgtgggcctgatgagccgggtggcccagcctgccagcaagaagatcgatcagaacaagctgaaacctgagatggacgagaagggcaacctgaccaccgccggctttgcctgctctcagtgtggccagcccctgttcgtgtacaagctggagcaggtgtctgagaagggcaaggcttacaccaactacttcggacggtgcaatgtggccgagcacgaaaagctgatcctgctggcccagctgaagcccgagaaggatagcgacgaagccgtgacatatagcctgggaaagtttgggcagagggccctggatttctacagcattcatgtgaccaaggagtccacccaccccgtgaagcccctggcccagatcgccggaaacagatacgcctccggacctgtgggaaaggccctgagcgacgcatgtatgggcacaatcgcctccttcctgtctaagtaccaggacatcatcatcgaacaccagaaggtggtgaagggcaaccagaagagactggagagcctgcgggagctggccggcaaggaaaacctggaataccctagcgtgaccctgccacctcagcctcacaccaaggagggcgttgatgcctacaacgaagtgatcgcccgggtgcgaatgtgggtgaacctgaacctgtggcagaagctgaagctaagcagagatgatgccaagcctctgctgagactgaagggattcccttcctttcctctggtcgagagacaggccaacgaagtggactggtgggacatggtgtgtaacgtgaagaagctgatcaacgagaaaaaggaggatggcaaggtgttttggcagaatctggctggctacaagagacaggaagccctgagaccatacctgagcagcgaggaagatcggaagaagggaaagaaattcgctcggtaccagctgggcgacctgctgctgcacctggaaaagaagcacggcgaggactggggaaaggtgtacgacgaggcctgggagcggattgacaagaaagtggaaggcctgagcaagcacatcaagctggaagaggaacggagaagcgaggacgcccagagcaaggccgccctgaccgactggctgcgggctaaggccagcttcgtgatcgagggcctgaaggaggccgacaaggacgagttctgcagatgcgagctgaagctgcagaagtggtacggggacctgcggggaaagcccttcgccatcgaagccgagaacagcatcctggacatcagcggcttcagcaagcagtacaactgtgccttcatctggcagaaggacggcgtgaagaagctgaacctgtacctgatcatcaactacttcaagggcggcaagctgcggttcaagaagatcaaacctgaagccttcgaagccaacagattctacaccgtgatcaacaaaaagagcggcgagatcgtgcccatggaggtgaacttcaacttcgacgaccccaacctgatcatcctgcctctggcctttggcaagagacagggcagagaattcatctggaacgacctgctgtccctggaaaccggcagcctgaagctggccaacggaagagtgatcgagaagacactgtacaacagaagaacccggcaggatgagcctgccctgttcgtggccctgaccttcgagcggcgggaggtcctggactcctccaatatcaaaccaatgaacctgatcggcgtggcaagaggcgaaaacatccccgccgtgatcgccctgaccgaccccgagggctgcccactgagccggtttaaggatagcctgggaaacccaacccacatcctgagaatcggcgagagctataaggagaagcagcggaccatccaggccaagaaggaggtggagcagcggagagccggcggctacagccggaagtacgccagcaaagccaagaatctggcagacgatatggtgagaaacaccgctagagatctgctgtactacgccgtgacccaggatgccatgctgatcttcgccaacctgagccggggcttcggccggcagggcaagcggaccttcatggccgagagacagtacacacggatggaggactggctgaccgccaagctggcctacgagggcctgagcaagacctacctgtccaagacactggcccagtacacctccaagacatgcagcaactgtgggtttaccatcaccagcgccgactacgacagggtgctggagaagctgaagaagacagcaacaggctggatgaccacaattaacggcaaggagctgaaggtggagggccagattacctactacaacagatacaagagacagaacgtagtcaaggacctgtccgtcgagctggatagactgagcgaagaatctgtgaacaacgacatctcctcctggacaaagggcagaagcggagaagctctgagcctcctgaagaaaagattctcccatagacccgtgcaggagaagttcgtgtgcctgaactgcggcttcgagacacacgcagccgagcaagccgccctgaacatcgccagatcctggctgttcctgcggagccaggagtacaagaaataccagacaaacaagacaaccggcaacaccgataagagagccttcgtcgagacctggcagtccttttaccggaagaagcttaaggaggtgtggaaacctgccgtgcggtctggcggatctggcggaggctccaccagccccaagaaaaagagaaaagtctaagctgccttctgcggggcttgccttctggccatgcccttcttctctcccttgcacctgtacctcttggtctttgaataaagcctgagtaggaaggctagcaaaaaaaaaaaaaaaaaaaaaaaaaaaaaaaaaaaaaaaaaaaaaaaaaaaaaaaaaaaaaaaaaaaaaaaaaaaaaaaagcccagccggctccccaacctctaccgaggagggcacctctgagtccgccacccccgagagcggccctggcacctccaccgagcccagcgagggcagcgcacccggcagccctgccggcagccccacctccacagaggagggaaccagcaccgagcccagcgaaggcagcgccccaggcaccagcaccgagcctagtgagcaggagattaaacggatcaacaagatcagaagaagacttgtgaaagacagcaacaccaagaaggccggcaagacaggccccatgaaaaccctgctggttagagtgatgacacccgatctgagagagcggctggaaaacctgagaaagaagcctgaaaatatcccccagcccatcagcaatacatctagagccaacctgaataagctgctgaccgattacaccgaaatgaagaaggcgatcctgcatgtgtactgggaagagttccagaaggaccctgtgggcctgatgagccgggtggcccagcctgccagcaagaagatcgatcagaacaagctgaaacctgagatggacgagaagggcaacctgaccaccgccggctttgcctgctctcagtgtggccagcccctgttcgtgtacaagctggagcaggtgtctgagaagggcaaggcttacaccaactacttcggacggtgcaatgtggccgagcacgaaaagctgatcctgctggcccagctgaagcccgagaaggatagcgacgaagccgtgacatatagcctgggaaagtttgggcagagggccctggatttctacagcattcatgtgaccaaggagtccacccaccccgtgaagcccctggcccagatcgccggaaacagatacgcctccggacctgtgggaaaggccctgagcgacgcatgtatgggcacaatcgcctccttcctgtctaagtaccaggacatcatcatcgaacaccagaaggtggtgaagggcaaccagaagagactggagagcctgcgggagctggccggcaaggaaaacctggaataccctagcgtgaccctgccacctcagcctcacaccaaggagggcgttgatgcctacaacgaagtgatcgcccgggtgcgaatgtgggtgaacctgaacctgtggcagaagctgaagctaagcagagatgatgccaagcctctgctgagactgaagggattcccttcctttcctctggtcgagagacaggccaacgaagtggactggtgggacatggtgtgtaacgtgaagaagctgatcaacgagaaaaaggaggatggcaaggtgttttggcagaatctggctggctacaagagacaggaagccctgagaccatacctgagcagcgaggaagatcggaagaagggaaagaaattcgctcggtaccagctgggcgacctgctgctgcacctggaaaagaagcacggcgaggactggggaaaggtgtacgacgaggcctgggagcggattgacaagaaagtggaaggcctgagcaagcacatcaagctggaagaggaacggagaagcgaggacgcccagagcaaggccgccctgaccgactggctgcgggctaaggccagcttcgtgatcgagggcctgaaggaggccgacaaggacgagttctgcagatgcgagctgaagctgcagaagtggtacggggacctgcggggaaagcccttcgccatcgaagccgagaacagcatcctggacatcagcggcttcagcaagcagtacaactgtgccttcatctggcagaaggacggcgtgaagaagctgaacctgtacctgatcatcaactacttcaagggcggcaagctgcggttcaagaagatcaaacctgaagccttcgaagccaacagattctacaccgtgatcaacaaaaagagcggcgagatcgtgcccatggaggtgaacttcaacttcgacgaccccaacctgatcatcctgcctctggcctttggcaagagacagggcagagaattcatctggaacgacctgctgtccctggaaaccggcagcctgaagctggccaacggaagagtgatcgagaagacactgtacaacagaagaacccggcaggatgagcctgccctgttcgtggccctgaccttcgagcggcgggaggtcctggactcctccaatatcaaaccaatgaacctgatcggcgtggcaagaggcgaaaacatccccgccgtgatcgccctgaccgaccccgagggctgcccactgagccggtttaaggatagcctgggaaacccaacccacatcctgagaatcggcgagagctataaggagaagcagcggaccatccaggccaagaaggaggtggagcagcggagagccggcggctacagccggaagtacgccagcaaagccaagaatctggcagacgatatggtgagaaacaccgctagagatctgctgtactacgccgtgacccaggatgccatgctgatcttcgccaacctgagccggggcttcggccggcagggcaagcggaccttcatggccgagagacagtacacacggatggaggactggctgaccgccaagctggcctacgagggcctgagcaagacctacctgtccaagacactggcccagtacacctccaagacatgcagcaactgtgggtttaccatcaccagcgccgactacgacagggtgctggagaagctgaagaagacagcaacaggctggatgaccacaattaacggcaaggagctgaaggtggagggccagattacctactacaacagatacaagagacagaacgtagtcaaggacctgtccgtcgagctggatagactgagcgaagaatctgtgaacaacgacatctcctcctggacaaagggcagaagcggagaagctctgagcctcctgaagaaaagattctcccatagacccgtgcaggagaagttcgtgtgcctgaactgcggcttcgagacacacgcagccgagcaagccgccctgaacatcgccagatcctggctgttcctgcggagccaggagtacaagaaataccagacaaacaagacaaccggcaacaccgataagagagccttcgtcgagacctggcagtccttttaccggaagaagcttaaggaggtgtggaaacctgccgtgcggtctggcggatctggcggaggctccaccagccccaagaaaaagagaaaagtctaagctgccttctgcggggcttgccttctggccatgcccttcttctctcccttgcacctgtacctcttggtctttgaataaagcctgagtaggaaggctagcaaaaaaaaaaaaaaaaaaaaaaaaaaaaaaaaaaaaaaaaaaaaaaaaaaaaaaaaaaaaaaaaaaaaaaaaaaaaaaaa

SEQ ID NO: 9821 - RNA, 8787 nt, synthetic construct
  source 1..8787: mol_type = other RNA
aggaaataagagagaaaagaagagtaagaagaaatataagagccaccatggcccctaagaagaagcgtaaagtgagccggatgaaccacgaccaggagttcgacccccctaaggtgtaccctcccgtccccgccgagaagagaaagcccatccgggtcctgagcctgttcgatggcatcgccaccggtctgctggtgctgaaggacctgggcatccaggtggataggtacattgcctccgaggtgtgcgaggactccatcaccgtgggaatggtgcgtcatcagggcaagatcatgtacgtgggcgacgtgcggagcgtgacacagaagcatatccaggagtggggccctttcgacctggtgatcggcggcagcccttgcaatgacctgagcatcgtgaacccagcccggaagggcctgtacgagggaaccggcagactgttcttcgagttttacagactgctgcacgacgcccggcctaaggaaggcgacgaccggcccttcttttggctgttcgagaatgtggtggccatgggagtcagcgacaagcgggatattagccggttcctggagagcaaccccgtgatgatcgatgccaaggaagtgagcgccgcccaccgggccagatacttctggggcaatctgcctggcatgaacagacccctggccagcaccgtgaacgacaagctggagctgcaggagtgcctggagcacggccggatcgccaagttcagcaaggtgagaaccatcaccacccgaagcaacagcatcaaacaaggcaaggaccagcactttcctgtgttcatgaacgagaaggaggacatcctgtggtgtaccgagatggagagagtgttcgggttcccagtccactacacagatgtcagcaacatgtctagactggccagacagagactgctgggaagaagctggtccgtccctgtgatcagacacctgttcgcccctctgaaggagtacttcgcctgcgtgagcagcggcaacagcaacgccaacagccggggccccagcttctctagcggcctggtgccactgtccctgagagggagccacatgggccccatggagatctacaaaaccgtgagcgcctggaagcggcagcctgtgcgcgtgctgagcctgtttcggaatatcgataaagtcctgaaaagcctgggattcctggagagcggctctggctccggcggtggcaccctgaagtacgtggaggatgtgacaaacgtggtcagacgggatgtggagaagtggggccccttcgatctggtgtacggcagcacccaacccctgggcagctcttgtgaccggtgccctggctggtacatgtttcagttccaccggatcctgcagtacgccctgccgagacaggagtcccagcggccattcttttggattttcatggacaacttgctgctgaccgaggatgaccaggaaactaccactcggttcctgcagaccgaagccgtgaccctgcaggacgtgagaggccgggactaccagaacgccatgcgggtgtggtccaacatccctggactgaaaagcaagcacgcacctctgacccctaaagaagaggagtacctgcaggcccaggtgcggagcagaagcaagctggacgcccctaaggtggatctgctggtgaagaattgcctcctgcccctgagagagtacttcaagtatttcagccagaatagtctgcccctgggaggcagcggcggcggcctgcagggcggcgtgaccttcgaggacgtggccgtggacttcacccaggaggagtggcagaggctgagccccgagcagagggacctgtacagggacgtgaccctggagaactacaggaacctggtgagcatgggcgagcaggacagcaccaagcccgaggtgatcctgaggctggagaacggcgaggagccctggatggtgggcacccaggagctgaggagctgcagccccgccggcaaggacggcggcccaagcagcggcgcccctcctcccagcggcggcaggcggcccaagcagcggcgcccctcctcccagcggcggcagcccagccggctccccaacctctaccgaggagggcacctctgagtccgccacccccgagagcggccctggcacctccaccgagcccagcgagggcagcgcacccggcagccctgccggcagccccacctccacagaggagggaaccagcaccgagcccagcgaaggcagcgccccaggcaccagcaccgagcctagtgagcaggagattaaacggatcaacaagatcagaagaagacttgtgaaagacagcaacaccaagaaggccggcaagacaggccccatgaaaaccctgctggttagagtgatgacacccgatctgagagagcggctggaaaacctgagaaagaagcctgaaaatatcccccagcccatcagcaatacatctagagccaacctgaataagctgctgaccgattacaccgaaatgaagaaggcgatcctgcatgtgtactgggaagagttccagaaggaccctgtgggcctgatgagccgggtggcccagcctgccagcaagaagatcgatcagaacaagctgaaacctgagatggacgagaagggcaacctgaccaccgccggctttgcctgctctcagtgtggccagcccctgttcgtgtacaagctggagcaggtgtctgagaagggcaaggcttacaccaactacttcggacggtgcaatgtggccgagcacgaaaagctgatcctgctggcccagctgaagcccgagaaggatagcgacgaagccgtgacatatagcctgggaaagtttgggcagagggccctggatttctacagcattcatgtgaccaaggagtccacccaccccgtgaagcccctggcccagatcgccggaaacagatacgcctccggacctgtgggaaaggccctgagcgacgcatgtatgggcacaatcgcctccttcctgtctaagtaccaggacatcatcatcgaacaccagaaggtggtgaagggcaaccagaagagactggagagcctgcgggagctggccggcaaggaaaacctggaataccctagcgtgaccctgccacctcagcctcacaccaaggagggcgttgatgcctacaacgaagtgatcgcccgggtgcgaatgtgggtgaacctgaacctgtggcagaagctgaagctaagcagagatgatgccaagcctctgctgagactgaagggattcccttcctttcctctggtcgagagacaggccaacgaagtggactggtgggacatggtgtgtaacgtgaagaagctgatcaacgagaaaaaggaggatggcaaggtgttttggcagaatctggctggctacaagagacaggaagccctgagaccatacctgagcagcgaggaagatcggaagaagggaaagaaattcgctcggtaccagctgggcgacctgctgctgcacctggaaaagaagcacggcgaggactggggaaaggtgtacgacgaggcctgggagcggattgacaagaaagtggaaggcctgagcaagcacatcaagctggaagaggaacggagaagcgaggacgcccagagcaaggccgccctgaccgactggctgcgggctaaggccagcttcgtgatcgagggcctgaaggaggccgacaaggacgagttctgcagatgcgagctgaagctgcagaagtggtacggggacctgcggggaaagcccttcgccatcgaagccgagaacagcatcctggacatcagcggcttcagcaagcagtacaactgtgccttcatctggcagaaggacggcgtgaagaagctgaacctgtacctgatcatcaactacttcaagggcggcaagctgcggttcaagaagatcaaacctgaagccttcgaagccaacagattctacaccgtgatcaacaaaaagagcggcgagatcgtgcccatggaggtgaacttcaacttcgacgaccccaacctgatcatcctgcctctggcctttggcaagagacagggcagagaattcatctggaacgacctgctgtccctggaaaccggcagcctgaagctggccaacggaagagtgatcgagaagacactgtacaacagaagaacccggcaggatgagcctgccctgttcgtggccctgaccttcgagcggcgggaggtcctggactcctccaatatcaaaccaatgaacctgatcggcgtggcaagaggcgaaaacatccccgccgtgatcgccctgaccgaccccgagggctgcccactgagccggtttaaggatagcctgggaaacccaacccacatcctgagaatcggcgagagctataaggagaagcagcggaccatccaggccaagaaggaggtggagcagcggagagccggcggctacagccggaagtacgccagcaaagccaagaatctggcagacgatatggtgagaaacaccgctagagatctgctgtactacgccgtgacccaggatgccatgctgatcttcgccaacctgagccggggcttcggccggcagggcaagcggaccttcatggccgagagacagtacacacggatggaggactggctgaccgccaagctggcctacgagggcctgagcaagacctacctgtccaagacactggcccagtacacctccaagacatgcagcaactgtgggtttaccatcaccagcgccgactacgacagggtgctggagaagctgaagaagacagcaacaggctggatgaccacaattaacggcaaggagctgaaggtggagggccagattacctactacaacagatacaagagacagaacgtagtcaaggacctgtccgtcgagctggatagactgagcgaagaatctgtgaacaacgacatctcctcctggacaaagggcagaagcggagaagctctgagcctcctgaagaaaagattctcccatagacccgtgcaggagaagttcgtgtgcctgaactgcggcttcgagacacacgcagccgagcaagccgccctgaacatcgccagatcctggctgttcctgcggagccaggagtacaagaaataccagacaaacaagacaaccggcaacaccgataagagagccttcgtcgagacctggcagtccttttaccggaagaagcttaaggaggtgtggaaacctgccgtgcggtctggcggatctggcggaggctccaccagccccaagaaaaagagaaaagtctaagctgccttctgcggggcttgccttctggccatgcccttcttctctcccttgcacctgtacctcttggtctttgaataaagcctgagtaggaaggctagcaaaaaaaaaaaaaaaaaaaaaaaaaaaaaaaaaaaaaaaaaaaaaaaaaaaaaaaaaaaaaaaaaaaaaaaaaaaaaaaagcccagccggctccccaacctctaccgaggagggcacctctgagtccgccacccccgagagcggccctggcacctccaccgagcccagcgagggcagcgcacccggcagccctgccggcagccccacctccacagaggagggaaccagcaccgagcccagcgaaggcagcgccccaggcaccagcaccgagcctagtgagcaggagattaaacggatcaacaagatcagaagaagacttgtgaaagacagcaacaccaagaaggccggcaagacaggccccatgaaaaccctgctggttagagtgatgacacccgatctgagagagcggctggaaaacctgagaaagaagcctgaaaatatcccccagcccatcagcaatacatctagagccaacctgaataagctgctgaccgattacaccgaaatgaagaaggcgatcctgcatgtgtactgggaagagttccagaaggaccctgtgggcctgatgagccgggtggcccagcctgccagcaagaagatcgatcagaacaagctgaaacctgagatggacgagaagggcaacctgaccaccgccggctttgcctgctctcagtgtggccagcccctgttcgtgtacaagctggagcaggtgtctgagaagggcaaggcttacaccaactacttcggacggtgcaatgtggccgagcacgaaaagctgatcctgctggcccagctgaagcccgagaaggatagcgacgaagccgtgacatatagcctgggaaagtttgggcagagggccctggatttctacagcattcatgtgaccaaggagtccacccaccccgtgaagcccctggcccagatcgccggaaacagatacgcctccggacctgtgggaaaggccctgagcgacgcatgtatgggcacaatcgcctccttcctgtctaagtaccaggacatcatcatcgaacaccagaaggtggtgaagggcaaccagaagagactggagagcctgcgggagctggccggcaaggaaaacctggaataccctagcgtgaccctgccacctcagcctcacaccaaggagggcgttgatgcctacaacgaagtgatcgcccgggtgcgaatgtgggtgaacctgaacctgtggcagaagctgaagctaagcagagatgatgccaagcctctgctgagactgaagggattcccttcctttcctctggtcgagagacaggccaacgaagtggactggtgggacatggtgtgtaacgtgaagaagctgatcaacgagaaaaaggaggatggcaaggtgttttggcagaatctggctggctacaagagacaggaagccctgagaccatacctgagcagcgaggaagatcggaagaagggaaagaaattcgctcggtaccagctgggcgacctgctgctgcacctggaaaagaagcacggcgaggactggggaaaggtgtacgacgaggcctgggagcggattgacaagaaagtggaaggcctgagcaagcacatcaagctggaagaggaacggagaagcgaggacgcccagagcaaggccgccctgaccgactggctgcgggctaaggccagcttcgtgatcgagggcctgaaggaggccgacaaggacgagttctgcagatgcgagctgaagctgcagaagtggtacggggacctgcggggaaagcccttcgccatcgaagccgagaacagcatcctggacatcagcggcttcagcaagcagtacaactgtgccttcatctggcagaaggacggcgtgaagaagctgaacctgtacctgatcatcaactacttcaagggcggcaagctgcggttcaagaagatcaaacctgaagccttcgaagccaacagattctacaccgtgatcaacaaaaagagcggcgagatcgtgcccatggaggtgaacttcaacttcgacgaccccaacctgatcatcctgcctctggcctttggcaagagacagggcagagaattcatctggaacgacctgctgtccctggaaaccggcagcctgaagctggccaacggaagagtgatcgagaagacactgtacaacagaagaacccggcaggatgagcctgccctgttcgtggccctgaccttcgagcggcgggaggtcctggactcctccaatatcaaaccaatgaacctgatcggcgtggcaagaggcgaaaacatccccgccgtgatcgccctgaccgaccccgagggctgcccactgagccggtttaaggatagcctgggaaacccaacccacatcctgagaatcggcgagagctataaggagaagcagcggaccatccaggccaagaaggaggtggagcagcggagagccggcggctacagccggaagtacgccagcaaagccaagaatctggcagacgatatggtgagaaacaccgctagagatctgctgtactacgccgtgacccaggatgccatgctgatcttcgccaacctgagccggggcttcggccggcagggcaagcggaccttcatggccgagagacagtacacacggatggaggactggctgaccgccaagctggcctacgagggcctgagcaagacctacctgtccaagacactggcccagtacacctccaagacatgcagcaactgtgggtttaccatcaccagcgccgactacgacagggtgctggagaagctgaagaagacagcaacaggctggatgaccacaattaacggcaaggagctgaaggtggagggccagattacctactacaacagatacaagagacagaacgtagtcaaggacctgtccgtcgagctggatagactgagcgaagaatctgtgaacaacgacatctcctcctggacaaagggcagaagcggagaagctctgagcctcctgaagaaaagattctcccatagacccgtgcaggagaagttcgtgtgcctgaactgcggcttcgagacacacgcagccgagcaagccgccctgaacatcgccagatcctggctgttcctgcggagccaggagtacaagaaataccagacaaacaagacaaccggcaacaccgataagagagccttcgtcgagacctggcagtccttttaccggaagaagcttaaggaggtgtggaaacctgccgtgcggtctggcggatctggcggaggctccaccagccccaagaaaaagagaaaagtctaagctgccttctgcggggcttgccttctggccatgcccttcttctctcccttgcacctgtacctcttggtctttgaataaagcctgagtaggaaggctagcaaaaaaaaaaaaaaaaaaaaaaaaaaaaaaaaaaaaaaaaaaaaaaaaaaaaaaaaaaaaaaaaaaaaaaaaaaaaaaaa

SEQ ID NO: 9822 - RNA, 8787 nt, synthetic construct
  source 1..8787: mol_type = other RNA
aggaaataagagagaaaagaagagtaagaagaaatataagagccaccatggcccctaagaagaagcgtaaagtgagccggatgaaccacgaccaggagttcgacccccctaaggtgtaccctcccgtccccgccgagaagagaaagcccatccgggtcctgagcctgttcgatggcatcgccaccggtctgctggtgctgaaggacctgggcatccaggtggataggtacattgcctccgaggtgtgcgaggactccatcaccgtgggaatggtgcgtcatcagggcaagatcatgtacgtgggcgacgtgcggagcgtgacacagaagcatatccaggagtggggccctttcgacctggtgatcggcggcagcccttgcaatgacctgagcatcgtgaacccagcccggaagggcctgtacgagggaaccggcagactgttcttcgagttttacagactgctgcacgacgcccggcctaaggaaggcgacgaccggcccttcttttggctgttcgagaatgtggtggccatgggagtcagcgacaagcgggatattagccggttcctggagagcaaccccgtgatgatcgatgccaaggaagtgagcgccgcccaccgggccagatacttctggggcaatctgcctggcatgaacagacccctggccagcaccgtgaacgacaagctggagctgcaggagtgcctggagcacggccggatcgccaagttcagcaaggtgagaaccatcaccacccgaagcaacagcatcaaacaaggcaaggaccagcactttcctgtgttcatgaacgagaaggaggacatcctgtggtgtaccgagatggagagagtgttcgggttcccagtccactacacagatgtcagcaacatgtctagactggccagacagagactgctgggaagaagctggtccgtccctgtgatcagacacctgttcgcccctctgaaggagtacttcgcctgcgtgagcagcggcaacagcaacgccaacagccggggccccagcttctctagcggcctggtgccactgtccctgagagggagccacatgggccccatggagatctacaaaaccgtgagcgcctggaagcggcagcctgtgcgcgtgctgagcctgtttcggaatatcgataaagtcctgaaaagcctgggattcctggagagcggctctggctccggcggtggcaccctgaagtacgtggaggatgtgacaaacgtggtcagacgggatgtggagaagtggggccccttcgatctggtgtacggcagcacccaacccctgggcagctcttgtgaccggtgccctggctggtacatgtttcagttccaccggatcctgcagtacgccctgccgagacaggagtcccagcggccattcttttggattttcatggacaacttgctgctgaccgaggatgaccaggaaactaccactcggttcctgcagaccgaagccgtgaccctgcaggacgtgagaggccgggactaccagaacgccatgcgggtgtggtccaacatccctggactgaaaagcaagcacgcacctctgacccctaaagaagaggagtacctgcaggcccaggtgcggagcagaagcaagctggacgcccctaaggtggatctgctggtgaagaattgcctcctgcccctgagagagtacttcaagtatttcagccagaatagtctgcccctgggaggcagcggcggcggctaccagacccccgtgagcttcaaggacgtggtggtgggcttcacccaggaggagtggcactggctgagccccgcccagagggccctgtacagggacgtgatgctggagacctacagcaacctggtgagcgtgggctacgagggcaccaagcccgacgtgatcctgaggctggagcaggaggaggccccctggatcggcgaggccgcctgccccggctgccactgctggggcatcagcaagctgggcggcccaagcagcggcgcccctcctcccagcggcggcaggcggcccaagcagcggcgcccctcctcccagcggcggcagcccagccggctccccaacctctaccgaggagggcacctctgagtccgccacccccgagagcggccctggcacctccaccgagcccagcgagggcagcgcacccggcagccctgccggcagccccacctccacagaggagggaaccagcaccgagcccagcgaaggcagcgccccaggcaccagcaccgagcctagtgagcaggagattaaacggatcaacaagatcagaagaagacttgtgaaagacagcaacaccaagaaggccggcaagacaggccccatgaaaaccctgctggttagagtgatgacacccgatctgagagagcggctggaaaacctgagaaagaagcctgaaaatatcccccagcccatcagcaatacatctagagccaacctgaataagctgctgaccgattacaccgaaatgaagaaggcgatcctgcatgtgtactgggaagagttccagaaggaccctgtgggcctgatgagccgggtggcccagcctgccagcaagaagatcgatcagaacaagctgaaacctgagatggacgagaagggcaacctgaccaccgccggctttgcctgctctcagtgtggccagcccctgttcgtgtacaagctggagcaggtgtctgagaagggcaaggcttacaccaactacttcggacggtgcaatgtggccgagcacgaaaagctgatcctgctggcccagctgaagcccgagaaggatagcgacgaagccgtgacatatagcctgggaaagtttgggcagagggccctggatttctacagcattcatgtgaccaaggagtccacccaccccgtgaagcccctggcccagatcgccggaaacagatacgcctccggacctgtgggaaaggccctgagcgacgcatgtatgggcacaatcgcctccttcctgtctaagtaccaggacatcatcatcgaacaccagaaggtggtgaagggcaaccagaagagactggagagcctgcgggagctggccggcaaggaaaacctggaataccctagcgtgaccctgccacctcagcctcacaccaaggagggcgttgatgcctacaacgaagtgatcgcccgggtgcgaatgtgggtgaacctgaacctgtggcagaagctgaagctaagcagagatgatgccaagcctctgctgagactgaagggattcccttcctttcctctggtcgagagacaggccaacgaagtggactggtgggacatggtgtgtaacgtgaagaagctgatcaacgagaaaaaggaggatggcaaggtgttttggcagaatctggctggctacaagagacaggaagccctgagaccatacctgagcagcgaggaagatcggaagaagggaaagaaattcgctcggtaccagctgggcgacctgctgctgcacctggaaaagaagcacggcgaggactggggaaaggtgtacgacgaggcctgggagcggattgacaagaaagtggaaggcctgagcaagcacatcaagctggaagaggaacggagaagcgaggacgcccagagcaaggccgccctgaccgactggctgcgggctaaggccagcttcgtgatcgagggcctgaaggaggccgacaaggacgagttctgcagatgcgagctgaagctgcagaagtggtacggggacctgcggggaaagcccttcgccatcgaagccgagaacagcatcctggacatcagcggcttcagcaagcagtacaactgtgccttcatctggcagaaggacggcgtgaagaagctgaacctgtacctgatcatcaactacttcaagggcggcaagctgcggttcaagaagatcaaacctgaagccttcgaagccaacagattctacaccgtgatcaacaaaaagagcggcgagatcgtgcccatggaggtgaacttcaacttcgacgaccccaacctgatcatcctgcctctggcctttggcaagagacagggcagagaattcatctggaacgacctgctgtccctggaaaccggcagcctgaagctggccaacggaagagtgatcgagaagacactgtacaacagaagaacccggcaggatgagcctgccctgttcgtggccctgaccttcgagcggcgggaggtcctggactcctccaatatcaaaccaatgaacctgatcggcgtggcaagaggcgaaaacatccccgccgtgatcgccctgaccgaccccgagggctgcccactgagccggtttaaggatagcctgggaaacccaacccacatcctgagaatcggcgagagctataaggagaagcagcggaccatccaggccaagaaggaggtggagcagcggagagccggcggctacagccggaagtacgccagcaaagccaagaatctggcagacgatatggtgagaaacaccgctagagatctgctgtactacgccgtgacccaggatgccatgctgatcttcgccaacctgagccggggcttcggccggcagggcaagcggaccttcatggccgagagacagtacacacggatggaggactggctgaccgccaagctggcctacgagggcctgagcaagacctacctgtccaagacactggcccagtacacctccaagacatgcagcaactgtgggtttaccatcaccagcgccgactacgacagggtgctggagaagctgaagaagacagcaacaggctggatgaccacaattaacggcaaggagctgaaggtggagggccagattacctactacaacagatacaagagacagaacgtagtcaaggacctgtccgtcgagctggatagactgagcgaagaatctgtgaacaacgacatctcctcctggacaaagggcagaagcggagaagctctgagcctcctgaagaaaagattctcccatagacccgtgcaggagaagttcgtgtgcctgaactgcggcttcgagacacacgcagccgagcaagccgccctgaacatcgccagatcctggctgttcctgcggagccaggagtacaagaaataccagacaaacaagacaaccggcaacaccgataagagagccttcgtcgagacctggcagtccttttaccggaagaagcttaaggaggtgtggaaacctgccgtgcggtctggcggatctggcggaggctccaccagccccaagaaaaagagaaaagtctaagctgccttctgcggggcttgccttctggccatgcccttcttctctcccttgcacctgtacctcttggtctttgaataaagcctgagtaggaaggctagcaaaaaaaaaaaaaaaaaaaaaaaaaaaaaaaaaaaaaaaaaaaaaaaaaaaaaaaaaaaaaaaaaaaaaaaaaaaaaaaagcccagccggctccccaacctctaccgaggagggcacctctgagtccgccacccccgagagcggccctggcacctccaccgagcccagcgagggcagcgcacccggcagccctgccggcagccccacctccacagaggagggaaccagcaccgagcccagcgaaggcagcgccccaggcaccagcaccgagcctagtgagcaggagattaaacggatcaacaagatcagaagaagacttgtgaaagacagcaacaccaagaaggccggcaagacaggccccatgaaaaccctgctggttagagtgatgacacccgatctgagagagcggctggaaaacctgagaaagaagcctgaaaatatcccccagcccatcagcaatacatctagagccaacctgaataagctgctgaccgattacaccgaaatgaagaaggcgatcctgcatgtgtactgggaagagttccagaaggaccctgtgggcctgatgagccgggtggcccagcctgccagcaagaagatcgatcagaacaagctgaaacctgagatggacgagaagggcaacctgaccaccgccggctttgcctgctctcagtgtggccagcccctgttcgtgtacaagctggagcaggtgtctgagaagggcaaggcttacaccaactacttcggacggtgcaatgtggccgagcacgaaaagctgatcctgctggcccagctgaagcccgagaaggatagcgacgaagccgtgacatatagcctgggaaagtttgggcagagggccctggatttctacagcattcatgtgaccaaggagtccacccaccccgtgaagcccctggcccagatcgccggaaacagatacgcctccggacctgtgggaaaggccctgagcgacgcatgtatgggcacaatcgcctccttcctgtctaagtaccaggacatcatcatcgaacaccagaaggtggtgaagggcaaccagaagagactggagagcctgcgggagctggccggcaaggaaaacctggaataccctagcgtgaccctgccacctcagcctcacaccaaggagggcgttgatgcctacaacgaagtgatcgcccgggtgcgaatgtgggtgaacctgaacctgtggcagaagctgaagctaagcagagatgatgccaagcctctgctgagactgaagggattcccttcctttcctctggtcgagagacaggccaacgaagtggactggtgggacatggtgtgtaacgtgaagaagctgatcaacgagaaaaaggaggatggcaaggtgttttggcagaatctggctggctacaagagacaggaagccctgagaccatacctgagcagcgaggaagatcggaagaagggaaagaaattcgctcggtaccagctgggcgacctgctgctgcacctggaaaagaagcacggcgaggactggggaaaggtgtacgacgaggcctgggagcggattgacaagaaagtggaaggcctgagcaagcacatcaagctggaagaggaacggagaagcgaggacgcccagagcaaggccgccctgaccgactggctgcgggctaaggccagcttcgtgatcgagggcctgaaggaggccgacaaggacgagttctgcagatgcgagctgaagctgcagaagtggtacggggacctgcggggaaagcccttcgccatcgaagccgagaacagcatcctggacatcagcggcttcagcaagcagtacaactgtgccttcatctggcagaaggacggcgtgaagaagctgaacctgtacctgatcatcaactacttcaagggcggcaagctgcggttcaagaagatcaaacctgaagccttcgaagccaacagattctacaccgtgatcaacaaaaagagcggcgagatcgtgcccatggaggtgaacttcaacttcgacgaccccaacctgatcatcctgcctctggcctttggcaagagacagggcagagaattcatctggaacgacctgctgtccctggaaaccggcagcctgaagctggccaacggaagagtgatcgagaagacactgtacaacagaagaacccggcaggatgagcctgccctgttcgtggccctgaccttcgagcggcgggaggtcctggactcctccaatatcaaaccaatgaacctgatcggcgtggcaagaggcgaaaacatccccgccgtgatcgccctgaccgaccccgagggctgcccactgagccggtttaaggatagcctgggaaacccaacccacatcctgagaatcggcgagagctataaggagaagcagcggaccatccaggccaagaaggaggtggagcagcggagagccggcggctacagccggaagtacgccagcaaagccaagaatctggcagacgatatggtgagaaacaccgctagagatctgctgtactacgccgtgacccaggatgccatgctgatcttcgccaacctgagccggggcttcggccggcagggcaagcggaccttcatggccgagagacagtacacacggatggaggactggctgaccgccaagctggcctacgagggcctgagcaagacctacctgtccaagacactggcccagtacacctccaagacatgcagcaactgtgggtttaccatcaccagcgccgactacgacagggtgctggagaagctgaagaagacagcaacaggctggatgaccacaattaacggcaaggagctgaaggtggagggccagattacctactacaacagatacaagagacagaacgtagtcaaggacctgtccgtcgagctggatagactgagcgaagaatctgtgaacaacgacatctcctcctggacaaagggcagaagcggagaagctctgagcctcctgaagaaaagattctcccatagacccgtgcaggagaagttcgtgtgcctgaactgcggcttcgagacacacgcagccgagcaagccgccctgaacatcgccagatcctggctgttcctgcggagccaggagtacaagaaataccagacaaacaagacaaccggcaacaccgataagagagccttcgtcgagacctggcagtccttttaccggaagaagcttaaggaggtgtggaaacctgccgtgcggtctggcggatctggcggaggctccaccagccccaagaaaaagagaaaagtctaagctgccttctgcggggcttgccttctggccatgcccttcttctctcccttgcacctgtacctcttggtctttgaataaagcctgagtaggaaggctagcaaaaaaaaaaaaaaaaaaaaaaaaaaaaaaaaaaaaaaaaaaaaaaaaaaaaaaaaaaaaaaaaaaaaaaaaaaaaaaaa

SEQ ID NO: 9823 - RNA, 8787 nt, synthetic construct
  source 1..8787: mol_type = other RNA
aggaaataagagagaaaagaagagtaagaagaaatataagagccaccatggcccctaagaagaagcgtaaagtgagccggatgaaccacgaccaggagttcgacccccctaaggtgtaccctcccgtccccgccgagaagagaaagcccatccgggtcctgagcctgttcgatggcatcgccaccggtctgctggtgctgaaggacctgggcatccaggtggataggtacattgcctccgaggtgtgcgaggactccatcaccgtgggaatggtgcgtcatcagggcaagatcatgtacgtgggcgacgtgcggagcgtgacacagaagcatatccaggagtggggccctttcgacctggtgatcggcggcagcccttgcaatgacctgagcatcgtgaacccagcccggaagggcctgtacgagggaaccggcagactgttcttcgagttttacagactgctgcacgacgcccggcctaaggaaggcgacgaccggcccttcttttggctgttcgagaatgtggtggccatgggagtcagcgacaagcgggatattagccggttcctggagagcaaccccgtgatgatcgatgccaaggaagtgagcgccgcccaccgggccagatacttctggggcaatctgcctggcatgaacagacccctggccagcaccgtgaacgacaagctggagctgcaggagtgcctggagcacggccggatcgccaagttcagcaaggtgagaaccatcaccacccgaagcaacagcatcaaacaaggcaaggaccagcactttcctgtgttcatgaacgagaaggaggacatcctgtggtgtaccgagatggagagagtgttcgggttcccagtccactacacagatgtcagcaacatgtctagactggccagacagagactgctgggaagaagctggtccgtccctgtgatcagacacctgttcgcccctctgaaggagtacttcgcctgcgtgagcagcggcaacagcaacgccaacagccggggccccagcttctctagcggcctggtgccactgtccctgagagggagccacatgggccccatggagatctacaaaaccgtgagcgcctggaagcggcagcctgtgcgcgtgctgagcctgtttcggaatatcgataaagtcctgaaaagcctgggattcctggagagcggctctggctccggcggtggcaccctgaagtacgtggaggatgtgacaaacgtggtcagacgggatgtggagaagtggggccccttcgatctggtgtacggcagcacccaacccctgggcagctcttgtgaccggtgccctggctggtacatgtttcagttccaccggatcctgcagtacgccctgccgagacaggagtcccagcggccattcttttggattttcatggacaacttgctgctgaccgaggatgaccaggaaactaccactcggttcctgcagaccgaagccgtgaccctgcaggacgtgagaggccgggactaccagaacgccatgcgggtgtggtccaacatccctggactgaaaagcaagcacgcacctctgacccctaaagaagaggagtacctgcaggcccaggtgcggagcagaagcaagctggacgcccctaaggtggatctgctggtgaagaattgcctcctgcccctgagagagtacttcaagtatttcagccagaatagtctgcccctgggaggcagcggcggcggcgtgcacggcagcgtgaccttcagggacgtggccatcgacttcagccaggaggagtgggagtgcctgcagcccgagcagaggaccctgtacagggacgtgatgctggagaactacagccacctgatcagcctgggcagcagcgtgagcaagcccgacgtgatcaccctgctggagcaggagaaggagccctggatcgtggtgaggaaggagaccagcaggtggtaccccgacctggagagcaagggcggcccaagcagcggcgcccctcctcccagcggcggcaggcggcccaagcagcggcgcccctcctcccagcggcggcagcccagccggctccccaacctctaccgaggagggcacctctgagtccgccacccccgagagcggccctggcacctccaccgagcccagcgagggcagcgcacccggcagccctgccggcagccccacctccacagaggagggaaccagcaccgagcccagcgaaggcagcgccccaggcaccagcaccgagcctagtgagcaggagattaaacggatcaacaagatcagaagaagacttgtgaaagacagcaacaccaagaaggccggcaagacaggccccatgaaaaccctgctggttagagtgatgacacccgatctgagagagcggctggaaaacctgagaaagaagcctgaaaatatcccccagcccatcagcaatacatctagagccaacctgaataagctgctgaccgattacaccgaaatgaagaaggcgatcctgcatgtgtactgggaagagttccagaaggaccctgtgggcctgatgagccgggtggcccagcctgccagcaagaagatcgatcagaacaagctgaaacctgagatggacgagaagggcaacctgaccaccgccggctttgcctgctctcagtgtggccagcccctgttcgtgtacaagctggagcaggtgtctgagaagggcaaggcttacaccaactacttcggacggtgcaatgtggccgagcacgaaaagctgatcctgctggcccagctgaagcccgagaaggatagcgacgaagccgtgacatatagcctgggaaagtttgggcagagggccctggatttctacagcattcatgtgaccaaggagtccacccaccccgtgaagcccctggcccagatcgccggaaacagatacgcctccggacctgtgggaaaggccctgagcgacgcatgtatgggcacaatcgcctccttcctgtctaagtaccaggacatcatcatcgaacaccagaaggtggtgaagggcaaccagaagagactggagagcctgcgggagctggccggcaaggaaaacctggaataccctagcgtgaccctgccacctcagcctcacaccaaggagggcgttgatgcctacaacgaagtgatcgcccgggtgcgaatgtgggtgaacctgaacctgtggcagaagctgaagctaagcagagatgatgccaagcctctgctgagactgaagggattcccttcctttcctctggtcgagagacaggccaacgaagtggactggtgggacatggtgtgtaacgtgaagaagctgatcaacgagaaaaaggaggatggcaaggtgttttggcagaatctggctggctacaagagacaggaagccctgagaccatacctgagcagcgaggaagatcggaagaagggaaagaaattcgctcggtaccagctgggcgacctgctgctgcacctggaaaagaagcacggcgaggactggggaaaggtgtacgacgaggcctgggagcggattgacaagaaagtggaaggcctgagcaagcacatcaagctggaagaggaacggagaagcgaggacgcccagagcaaggccgccctgaccgactggctgcgggctaaggccagcttcgtgatcgagggcctgaaggaggccgacaaggacgagttctgcagatgcgagctgaagctgcagaagtggtacggggacctgcggggaaagcccttcgccatcgaagccgagaacagcatcctggacatcagcggcttcagcaagcagtacaactgtgccttcatctggcagaaggacggcgtgaagaagctgaacctgtacctgatcatcaactacttcaagggcggcaagctgcggttcaagaagatcaaacctgaagccttcgaagccaacagattctacaccgtgatcaacaaaaagagcggcgagatcgtgcccatggaggtgaacttcaacttcgacgaccccaacctgatcatcctgcctctggcctttggcaagagacagggcagagaattcatctggaacgacctgctgtccctggaaaccggcagcctgaagctggccaacggaagagtgatcgagaagacactgtacaacagaagaacccggcaggatgagcctgccctgttcgtggccctgaccttcgagcggcgggaggtcctggactcctccaatatcaaaccaatgaacctgatcggcgtggcaagaggcgaaaacatccccgccgtgatcgccctgaccgaccccgagggctgcccactgagccggtttaaggatagcctgggaaacccaacccacatcctgagaatcggcgagagctataaggagaagcagcggaccatccaggccaagaaggaggtggagcagcggagagccggcggctacagccggaagtacgccagcaaagccaagaatctggcagacgatatggtgagaaacaccgctagagatctgctgtactacgccgtgacccaggatgccatgctgatcttcgccaacctgagccggggcttcggccggcagggcaagcggaccttcatggccgagagacagtacacacggatggaggactggctgaccgccaagctggcctacgagggcctgagcaagacctacctgtccaagacactggcccagtacacctccaagacatgcagcaactgtgggtttaccatcaccagcgccgactacgacagggtgctggagaagctgaagaagacagcaacaggctggatgaccacaattaacggcaaggagctgaaggtggagggccagattacctactacaacagatacaagagacagaacgtagtcaaggacctgtccgtcgagctggatagactgagcgaagaatctgtgaacaacgacatctcctcctggacaaagggcagaagcggagaagctctgagcctcctgaagaaaagattctcccatagacccgtgcaggagaagttcgtgtgcctgaactgcggcttcgagacacacgcagccgagcaagccgccctgaacatcgccagatcctggctgttcctgcggagccaggagtacaagaaataccagacaaacaagacaaccggcaacaccgataagagagccttcgtcgagacctggcagtccttttaccggaagaagcttaaggaggtgtggaaacctgccgtgcggtctggcggatctggcggaggctccaccagccccaagaaaaagagaaaagtctaagctgccttctgcggggcttgccttctggccatgcccttcttctctcccttgcacctgtacctcttggtctttgaataaagcctgagtaggaaggctagcaaaaaaaaaaaaaaaaaaaaaaaaaaaaaaaaaaaaaaaaaaaaaaaaaaaaaaaaaaaaaaaaaaaaaaaaaaaaaaaagcccagccggctccccaacctctaccgaggagggcacctctgagtccgccacccccgagagcggccctggcacctccaccgagcccagcgagggcagcgcacccggcagccctgccggcagccccacctccacagaggagggaaccagcaccgagcccagcgaaggcagcgccccaggcaccagcaccgagcctagtgagcaggagattaaacggatcaacaagatcagaagaagacttgtgaaagacagcaacaccaagaaggccggcaagacaggccccatgaaaaccctgctggttagagtgatgacacccgatctgagagagcggctggaaaacctgagaaagaagcctgaaaatatcccccagcccatcagcaatacatctagagccaacctgaataagctgctgaccgattacaccgaaatgaagaaggcgatcctgcatgtgtactgggaagagttccagaaggaccctgtgggcctgatgagccgggtggcccagcctgccagcaagaagatcgatcagaacaagctgaaacctgagatggacgagaagggcaacctgaccaccgccggctttgcctgctctcagtgtggccagcccctgttcgtgtacaagctggagcaggtgtctgagaagggcaaggcttacaccaactacttcggacggtgcaatgtggccgagcacgaaaagctgatcctgctggcccagctgaagcccgagaaggatagcgacgaagccgtgacatatagcctgggaaagtttgggcagagggccctggatttctacagcattcatgtgaccaaggagtccacccaccccgtgaagcccctggcccagatcgccggaaacagatacgcctccggacctgtgggaaaggccctgagcgacgcatgtatgggcacaatcgcctccttcctgtctaagtaccaggacatcatcatcgaacaccagaaggtggtgaagggcaaccagaagagactggagagcctgcgggagctggccggcaaggaaaacctggaataccctagcgtgaccctgccacctcagcctcacaccaaggagggcgttgatgcctacaacgaagtgatcgcccgggtgcgaatgtgggtgaacctgaacctgtggcagaagctgaagctaagcagagatgatgccaagcctctgctgagactgaagggattcccttcctttcctctggtcgagagacaggccaacgaagtggactggtgggacatggtgtgtaacgtgaagaagctgatcaacgagaaaaaggaggatggcaaggtgttttggcagaatctggctggctacaagagacaggaagccctgagaccatacctgagcagcgaggaagatcggaagaagggaaagaaattcgctcggtaccagctgggcgacctgctgctgcacctggaaaagaagcacggcgaggactggggaaaggtgtacgacgaggcctgggagcggattgacaagaaagtggaaggcctgagcaagcacatcaagctggaagaggaacggagaagcgaggacgcccagagcaaggccgccctgaccgactggctgcgggctaaggccagcttcgtgatcgagggcctgaaggaggccgacaaggacgagttctgcagatgcgagctgaagctgcagaagtggtacggggacctgcggggaaagcccttcgccatcgaagccgagaacagcatcctggacatcagcggcttcagcaagcagtacaactgtgccttcatctggcagaaggacggcgtgaagaagctgaacctgtacctgatcatcaactacttcaagggcggcaagctgcggttcaagaagatcaaacctgaagccttcgaagccaacagattctacaccgtgatcaacaaaaagagcggcgagatcgtgcccatggaggtgaacttcaacttcgacgaccccaacctgatcatcctgcctctggcctttggcaagagacagggcagagaattcatctggaacgacctgctgtccctggaaaccggcagcctgaagctggccaacggaagagtgatcgagaagacactgtacaacagaagaacccggcaggatgagcctgccctgttcgtggccctgaccttcgagcggcgggaggtcctggactcctccaatatcaaaccaatgaacctgatcggcgtggcaagaggcgaaaacatccccgccgtgatcgccctgaccgaccccgagggctgcccactgagccggtttaaggatagcctgggaaacccaacccacatcctgagaatcggcgagagctataaggagaagcagcggaccatccaggccaagaaggaggtggagcagcggagagccggcggctacagccggaagtacgccagcaaagccaagaatctggcagacgatatggtgagaaacaccgctagagatctgctgtactacgccgtgacccaggatgccatgctgatcttcgccaacctgagccggggcttcggccggcagggcaagcggaccttcatggccgagagacagtacacacggatggaggactggctgaccgccaagctggcctacgagggcctgagcaagacctacctgtccaagacactggcccagtacacctccaagacatgcagcaactgtgggtttaccatcaccagcgccgactacgacagggtgctggagaagctgaagaagacagcaacaggctggatgaccacaattaacggcaaggagctgaaggtggagggccagattacctactacaacagatacaagagacagaacgtagtcaaggacctgtccgtcgagctggatagactgagcgaagaatctgtgaacaacgacatctcctcctggacaaagggcagaagcggagaagctctgagcctcctgaagaaaagattctcccatagacccgtgcaggagaagttcgtgtgcctgaactgcggcttcgagacacacgcagccgagcaagccgccctgaacatcgccagatcctggctgttcctgcggagccaggagtacaagaaataccagacaaacaagacaaccggcaacaccgataagagagccttcgtcgagacctggcagtccttttaccggaagaagcttaaggaggtgtggaaacctgccgtgcggtctggcggatctggcggaggctccaccagccccaagaaaaagagaaaagtctaagctgccttctgcggggcttgccttctggccatgcccttcttctctcccttgcacctgtacctcttggtctttgaataaagcctgagtaggaaggctagcaaaaaaaaaaaaaaaaaaaaaaaaaaaaaaaaaaaaaaaaaaaaaaaaaaaaaaaaaaaaaaaaaaaaaaaaaaaaaaaa

SEQ ID NO: 9824 - RNA, 8787 nt, synthetic construct
  source 1..8787: mol_type = other RNA
aggaaataagagagaaaagaagagtaagaagaaatataagagccaccatggcccctaagaagaagcgtaaagtgagccggatgaaccacgaccaggagttcgacccccctaaggtgtaccctcccgtccccgccgagaagagaaagcccatccgggtcctgagcctgttcgatggcatcgccaccggtctgctggtgctgaaggacctgggcatccaggtggataggtacattgcctccgaggtgtgcgaggactccatcaccgtgggaatggtgcgtcatcagggcaagatcatgtacgtgggcgacgtgcggagcgtgacacagaagcatatccaggagtggggccctttcgacctggtgatcggcggcagcccttgcaatgacctgagcatcgtgaacccagcccggaagggcctgtacgagggaaccggcagactgttcttcgagttttacagactgctgcacgacgcccggcctaaggaaggcgacgaccggcccttcttttggctgttcgagaatgtggtggccatgggagtcagcgacaagcgggatattagccggttcctggagagcaaccccgtgatgatcgatgccaaggaagtgagcgccgcccaccgggccagatacttctggggcaatctgcctggcatgaacagacccctggccagcaccgtgaacgacaagctggagctgcaggagtgcctggagcacggccggatcgccaagttcagcaaggtgagaaccatcaccacccgaagcaacagcatcaaacaaggcaaggaccagcactttcctgtgttcatgaacgagaaggaggacatcctgtggtgtaccgagatggagagagtgttcgggttcccagtccactacacagatgtcagcaacatgtctagactggccagacagagactgctgggaagaagctggtccgtccctgtgatcagacacctgttcgcccctctgaaggagtacttcgcctgcgtgagcagcggcaacagcaacgccaacagccggggccccagcttctctagcggcctggtgccactgtccctgagagggagccacatgggccccatggagatctacaaaaccgtgagcgcctggaagcggcagcctgtgcgcgtgctgagcctgtttcggaatatcgataaagtcctgaaaagcctgggattcctggagagcggctctggctccggcggtggcaccctgaagtacgtggaggatgtgacaaacgtggtcagacgggatgtggagaagtggggccccttcgatctggtgtacggcagcacccaacccctgggcagctcttgtgaccggtgccctggctggtacatgtttcagttccaccggatcctgcagtacgccctgccgagacaggagtcccagcggccattcttttggattttcatggacaacttgctgctgaccgaggatgaccaggaaactaccactcggttcctgcagaccgaagccgtgaccctgcaggacgtgagaggccgggactaccagaacgccatgcgggtgtggtccaacatccctggactgaaaagcaagcacgcacctctgacccctaaagaagaggagtacctgcaggcccaggtgcggagcagaagcaagctggacgcccctaaggtggatctgctggtgaagaattgcctcctgcccctgagagagtacttcaagtatttcagccagaatagtctgcccctgggaggcagcggcggcggcttccaggagctggtgagcttcaacgacgtgaccgtgggcttcacccaggaggagtggcagcacctggaccccagccagaggagcctgtacagggaggtgatgctggagaactacagccacctggtgagcgtgggctactgcgtgaccaagcccgaggtgatcttcaggctggagcagggcgaggagccctggatcagcgaggccgagttccccagccagagcttccccgagctgtggaaggccggcggcccaagcagcggcgcccctcctcccagcggcggcaggcggcccaagcagcggcgcccctcctcccagcggcggcagcccagccggctccccaacctctaccgaggagggcacctctgagtccgccacccccgagagcggccctggcacctccaccgagcccagcgagggcagcgcacccggcagccctgccggcagccccacctccacagaggagggaaccagcaccgagcccagcgaaggcagcgccccaggcaccagcaccgagcctagtgagcaggagattaaacggatcaacaagatcagaagaagacttgtgaaagacagcaacaccaagaaggccggcaagacaggccccatgaaaaccctgctggttagagtgatgacacccgatctgagagagcggctggaaaacctgagaaagaagcctgaaaatatcccccagcccatcagcaatacatctagagccaacctgaataagctgctgaccgattacaccgaaatgaagaaggcgatcctgcatgtgtactgggaagagttccagaaggaccctgtgggcctgatgagccgggtggcccagcctgccagcaagaagatcgatcagaacaagctgaaacctgagatggacgagaagggcaacctgaccaccgccggctttgcctgctctcagtgtggccagcccctgttcgtgtacaagctggagcaggtgtctgagaagggcaaggcttacaccaactacttcggacggtgcaatgtggccgagcacgaaaagctgatcctgctggcccagctgaagcccgagaaggatagcgacgaagccgtgacatatagcctgggaaagtttgggcagagggccctggatttctacagcattcatgtgaccaaggagtccacccaccccgtgaagcccctggcccagatcgccggaaacagatacgcctccggacctgtgggaaaggccctgagcgacgcatgtatgggcacaatcgcctccttcctgtctaagtaccaggacatcatcatcgaacaccagaaggtggtgaagggcaaccagaagagactggagagcctgcgggagctggccggcaaggaaaacctggaataccctagcgtgaccctgccacctcagcctcacaccaaggagggcgttgatgcctacaacgaagtgatcgcccgggtgcgaatgtgggtgaacctgaacctgtggcagaagctgaagctaagcagagatgatgccaagcctctgctgagactgaagggattcccttcctttcctctggtcgagagacaggccaacgaagtggactggtgggacatggtgtgtaacgtgaagaagctgatcaacgagaaaaaggaggatggcaaggtgttttggcagaatctggctggctacaagagacaggaagccctgagaccatacctgagcagcgaggaagatcggaagaagggaaagaaattcgctcggtaccagctgggcgacctgctgctgcacctggaaaagaagcacggcgaggactggggaaaggtgtacgacgaggcctgggagcggattgacaagaaagtggaaggcctgagcaagcacatcaagctggaagaggaacggagaagcgaggacgcccagagcaaggccgccctgaccgactggctgcgggctaaggccagcttcgtgatcgagggcctgaaggaggccgacaaggacgagttctgcagatgcgagctgaagctgcagaagtggtacggggacctgcggggaaagcccttcgccatcgaagccgagaacagcatcctggacatcagcggcttcagcaagcagtacaactgtgccttcatctggcagaaggacggcgtgaagaagctgaacctgtacctgatcatcaactacttcaagggcggcaagctgcggttcaagaagatcaaacctgaagccttcgaagccaacagattctacaccgtgatcaacaaaaagagcggcgagatcgtgcccatggaggtgaacttcaacttcgacgaccccaacctgatcatcctgcctctggcctttggcaagagacagggcagagaattcatctggaacgacctgctgtccctggaaaccggcagcctgaagctggccaacggaagagtgatcgagaagacactgtacaacagaagaacccggcaggatgagcctgccctgttcgtggccctgaccttcgagcggcgggaggtcctggactcctccaatatcaaaccaatgaacctgatcggcgtggcaagaggcgaaaacatccccgccgtgatcgccctgaccgaccccgagggctgcccactgagccggtttaaggatagcctgggaaacccaacccacatcctgagaatcggcgagagctataaggagaagcagcggaccatccaggccaagaaggaggtggagcagcggagagccggcggctacagccggaagtacgccagcaaagccaagaatctggcagacgatatggtgagaaacaccgctagagatctgctgtactacgccgtgacccaggatgccatgctgatcttcgccaacctgagccggggcttcggccggcagggcaagcggaccttcatggccgagagacagtacacacggatggaggactggctgaccgccaagctggcctacgagggcctgagcaagacctacctgtccaagacactggcccagtacacctccaagacatgcagcaactgtgggtttaccatcaccagcgccgactacgacagggtgctggagaagctgaagaagacagcaacaggctggatgaccacaattaacggcaaggagctgaaggtggagggccagattacctactacaacagatacaagagacagaacgtagtcaaggacctgtccgtcgagctggatagactgagcgaagaatctgtgaacaacgacatctcctcctggacaaagggcagaagcggagaagctctgagcctcctgaagaaaagattctcccatagacccgtgcaggagaagttcgtgtgcctgaactgcggcttcgagacacacgcagccgagcaagccgccctgaacatcgccagatcctggctgttcctgcggagccaggagtacaagaaataccagacaaacaagacaaccggcaacaccgataagagagccttcgtcgagacctggcagtccttttaccggaagaagcttaaggaggtgtggaaacctgccgtgcggtctggcggatctggcggaggctccaccagccccaagaaaaagagaaaagtctaagctgccttctgcggggcttgccttctggccatgcccttcttctctcccttgcacctgtacctcttggtctttgaataaagcctgagtaggaaggctagcaaaaaaaaaaaaaaaaaaaaaaaaaaaaaaaaaaaaaaaaaaaaaaaaaaaaaaaaaaaaaaaaaaaaaaaaaaaaaaaagcccagccggctccccaacctctaccgaggagggcacctctgagtccgccacccccgagagcggccctggcacctccaccgagcccagcgagggcagcgcacccggcagccctgccggcagccccacctccacagaggagggaaccagcaccgagcccagcgaaggcagcgccccaggcaccagcaccgagcctagtgagcaggagattaaacggatcaacaagatcagaagaagacttgtgaaagacagcaacaccaagaaggccggcaagacaggccccatgaaaaccctgctggttagagtgatgacacccgatctgagagagcggctggaaaacctgagaaagaagcctgaaaatatcccccagcccatcagcaatacatctagagccaacctgaataagctgctgaccgattacaccgaaatgaagaaggcgatcctgcatgtgtactgggaagagttccagaaggaccctgtgggcctgatgagccgggtggcccagcctgccagcaagaagatcgatcagaacaagctgaaacctgagatggacgagaagggcaacctgaccaccgccggctttgcctgctctcagtgtggccagcccctgttcgtgtacaagctggagcaggtgtctgagaagggcaaggcttacaccaactacttcggacggtgcaatgtggccgagcacgaaaagctgatcctgctggcccagctgaagcccgagaaggatagcgacgaagccgtgacatatagcctgggaaagtttgggcagagggccctggatttctacagcattcatgtgaccaaggagtccacccaccccgtgaagcccctggcccagatcgccggaaacagatacgcctccggacctgtgggaaaggccctgagcgacgcatgtatgggcacaatcgcctccttcctgtctaagtaccaggacatcatcatcgaacaccagaaggtggtgaagggcaaccagaagagactggagagcctgcgggagctggccggcaaggaaaacctggaataccctagcgtgaccctgccacctcagcctcacaccaaggagggcgttgatgcctacaacgaagtgatcgcccgggtgcgaatgtgggtgaacctgaacctgtggcagaagctgaagctaagcagagatgatgccaagcctctgctgagactgaagggattcccttcctttcctctggtcgagagacaggccaacgaagtggactggtgggacatggtgtgtaacgtgaagaagctgatcaacgagaaaaaggaggatggcaaggtgttttggcagaatctggctggctacaagagacaggaagccctgagaccatacctgagcagcgaggaagatcggaagaagggaaagaaattcgctcggtaccagctgggcgacctgctgctgcacctggaaaagaagcacggcgaggactggggaaaggtgtacgacgaggcctgggagcggattgacaagaaagtggaaggcctgagcaagcacatcaagctggaagaggaacggagaagcgaggacgcccagagcaaggccgccctgaccgactggctgcgggctaaggccagcttcgtgatcgagggcctgaaggaggccgacaaggacgagttctgcagatgcgagctgaagctgcagaagtggtacggggacctgcggggaaagcccttcgccatcgaagccgagaacagcatcctggacatcagcggcttcagcaagcagtacaactgtgccttcatctggcagaaggacggcgtgaagaagctgaacctgtacctgatcatcaactacttcaagggcggcaagctgcggttcaagaagatcaaacctgaagccttcgaagccaacagattctacaccgtgatcaacaaaaagagcggcgagatcgtgcccatggaggtgaacttcaacttcgacgaccccaacctgatcatcctgcctctggcctttggcaagagacagggcagagaattcatctggaacgacctgctgtccctggaaaccggcagcctgaagctggccaacggaagagtgatcgagaagacactgtacaacagaagaacccggcaggatgagcctgccctgttcgtggccctgaccttcgagcggcgggaggtcctggactcctccaatatcaaaccaatgaacctgatcggcgtggcaagaggcgaaaacatccccgccgtgatcgccctgaccgaccccgagggctgcccactgagccggtttaaggatagcctgggaaacccaacccacatcctgagaatcggcgagagctataaggagaagcagcggaccatccaggccaagaaggaggtggagcagcggagagccggcggctacagccggaagtacgccagcaaagccaagaatctggcagacgatatggtgagaaacaccgctagagatctgctgtactacgccgtgacccaggatgccatgctgatcttcgccaacctgagccggggcttcggccggcagggcaagcggaccttcatggccgagagacagtacacacggatggaggactggctgaccgccaagctggcctacgagggcctgagcaagacctacctgtccaagacactggcccagtacacctccaagacatgcagcaactgtgggtttaccatcaccagcgccgactacgacagggtgctggagaagctgaagaagacagcaacaggctggatgaccacaattaacggcaaggagctgaaggtggagggccagattacctactacaacagatacaagagacagaacgtagtcaaggacctgtccgtcgagctggatagactgagcgaagaatctgtgaacaacgacatctcctcctggacaaagggcagaagcggagaagctctgagcctcctgaagaaaagattctcccatagacccgtgcaggagaagttcgtgtgcctgaactgcggcttcgagacacacgcagccgagcaagccgccctgaacatcgccagatcctggctgttcctgcggagccaggagtacaagaaataccagacaaacaagacaaccggcaacaccgataagagagccttcgtcgagacctggcagtccttttaccggaagaagcttaaggaggtgtggaaacctgccgtgcggtctggcggatctggcggaggctccaccagccccaagaaaaagagaaaagtctaagctgccttctgcggggcttgccttctggccatgcccttcttctctcccttgcacctgtacctcttggtctttgaataaagcctgagtaggaaggctagcaaaaaaaaaaaaaaaaaaaaaaaaaaaaaaaaaaaaaaaaaaaaaaaaaaaaaaaaaaaaaaaaaaaaaaaaaaaaaaaa

SEQ ID NO: 9825 - RNA, 8787 nt, synthetic construct
  source 1..8787: mol_type = other RNA
aggaaataagagagaaaagaagagtaagaagaaatataagagccaccatggcccctaagaagaagcgtaaagtgagccggatgaaccacgaccaggagttcgacccccctaaggtgtaccctcccgtccccgccgagaagagaaagcccatccgggtcctgagcctgttcgatggcatcgccaccggtctgctggtgctgaaggacctgggcatccaggtggataggtacattgcctccgaggtgtgcgaggactccatcaccgtgggaatggtgcgtcatcagggcaagatcatgtacgtgggcgacgtgcggagcgtgacacagaagcatatccaggagtggggccctttcgacctggtgatcggcggcagcccttgcaatgacctgagcatcgtgaacccagcccggaagggcctgtacgagggaaccggcagactgttcttcgagttttacagactgctgcacgacgcccggcctaaggaaggcgacgaccggcccttcttttggctgttcgagaatgtggtggccatgggagtcagcgacaagcgggatattagccggttcctggagagcaaccccgtgatgatcgatgccaaggaagtgagcgccgcccaccgggccagatacttctggggcaatctgcctggcatgaacagacccctggccagcaccgtgaacgacaagctggagctgcaggagtgcctggagcacggccggatcgccaagttcagcaaggtgagaaccatcaccacccgaagcaacagcatcaaacaaggcaaggaccagcactttcctgtgttcatgaacgagaaggaggacatcctgtggtgtaccgagatggagagagtgttcgggttcccagtccactacacagatgtcagcaacatgtctagactggccagacagagactgctgggaagaagctggtccgtccctgtgatcagacacctgttcgcccctctgaaggagtacttcgcctgcgtgagcagcggcaacagcaacgccaacagccggggccccagcttctctagcggcctggtgccactgtccctgagagggagccacatgggccccatggagatctacaaaaccgtgagcgcctggaagcggcagcctgtgcgcgtgctgagcctgtttcggaatatcgataaagtcctgaaaagcctgggattcctggagagcggctctggctccggcggtggcaccctgaagtacgtggaggatgtgacaaacgtggtcagacgggatgtggagaagtggggccccttcgatctggtgtacggcagcacccaacccctgggcagctcttgtgaccggtgccctggctggtacatgtttcagttccaccggatcctgcagtacgccctgccgagacaggagtcccagcggccattcttttggattttcatggacaacttgctgctgaccgaggatgaccaggaaactaccactcggttcctgcagaccgaagccgtgaccctgcaggacgtgagaggccgggactaccagaacgccatgcgggtgtggtccaacatccctggactgaaaagcaagcacgcacctctgacccctaaagaagaggagtacctgcaggcccaggtgcggagcagaagcaagctggacgcccctaaggtggatctgctggtgaagaattgcctcctgcccctgagagagtacttcaagtatttcagccagaatagtctgcccctgggaggcagcggcggcggcagccaggagagcgtgagcttcaaggacgtgaccgtgggcttcacccaggaggagtggcagcacctggaccccagccagagggccctgtacagggacgtgatgctggagaactacagcaacctggtgagcgtgggctactgcgtgcacaagcccgaggtgatcttcaggctgcagcagggcgaggagccctggaagctggaggaggagttccccagccagagcttccccgaggtgtggaccgccggcggcccaagcagcggcgcccctcctcccagcggcggcaggcggcccaagcagcggcgcccctcctcccagcggcggcagcccagccggctccccaacctctaccgaggagggcacctctgagtccgccacccccgagagcggccctggcacctccaccgagcccagcgagggcagcgcacccggcagccctgccggcagccccacctccacagaggagggaaccagcaccgagcccagcgaaggcagcgccccaggcaccagcaccgagcctagtgagcaggagattaaacggatcaacaagatcagaagaagacttgtgaaagacagcaacaccaagaaggccggcaagacaggccccatgaaaaccctgctggttagagtgatgacacccgatctgagagagcggctggaaaacctgagaaagaagcctgaaaatatcccccagcccatcagcaatacatctagagccaacctgaataagctgctgaccgattacaccgaaatgaagaaggcgatcctgcatgtgtactgggaagagttccagaaggaccctgtgggcctgatgagccgggtggcccagcctgccagcaagaagatcgatcagaacaagctgaaacctgagatggacgagaagggcaacctgaccaccgccggctttgcctgctctcagtgtggccagcccctgttcgtgtacaagctggagcaggtgtctgagaagggcaaggcttacaccaactacttcggacggtgcaatgtggccgagcacgaaaagctgatcctgctggcccagctgaagcccgagaaggatagcgacgaagccgtgacatatagcctgggaaagtttgggcagagggccctggatttctacagcattcatgtgaccaaggagtccacccaccccgtgaagcccctggcccagatcgccggaaacagatacgcctccggacctgtgggaaaggccctgagcgacgcatgtatgggcacaatcgcctccttcctgtctaagtaccaggacatcatcatcgaacaccagaaggtggtgaagggcaaccagaagagactggagagcctgcgggagctggccggcaaggaaaacctggaataccctagcgtgaccctgccacctcagcctcacaccaaggagggcgttgatgcctacaacgaagtgatcgcccgggtgcgaatgtgggtgaacctgaacctgtggcagaagctgaagctaagcagagatgatgccaagcctctgctgagactgaagggattcccttcctttcctctggtcgagagacaggccaacgaagtggactggtgggacatggtgtgtaacgtgaagaagctgatcaacgagaaaaaggaggatggcaaggtgttttggcagaatctggctggctacaagagacaggaagccctgagaccatacctgagcagcgaggaagatcggaagaagggaaagaaattcgctcggtaccagctgggcgacctgctgctgcacctggaaaagaagcacggcgaggactggggaaaggtgtacgacgaggcctgggagcggattgacaagaaagtggaaggcctgagcaagcacatcaagctggaagaggaacggagaagcgaggacgcccagagcaaggccgccctgaccgactggctgcgggctaaggccagcttcgtgatcgagggcctgaaggaggccgacaaggacgagttctgcagatgcgagctgaagctgcagaagtggtacggggacctgcggggaaagcccttcgccatcgaagccgagaacagcatcctggacatcagcggcttcagcaagcagtacaactgtgccttcatctggcagaaggacggcgtgaagaagctgaacctgtacctgatcatcaactacttcaagggcggcaagctgcggttcaagaagatcaaacctgaagccttcgaagccaacagattctacaccgtgatcaacaaaaagagcggcgagatcgtgcccatggaggtgaacttcaacttcgacgaccccaacctgatcatcctgcctctggcctttggcaagagacagggcagagaattcatctggaacgacctgctgtccctggaaaccggcagcctgaagctggccaacggaagagtgatcgagaagacactgtacaacagaagaacccggcaggatgagcctgccctgttcgtggccctgaccttcgagcggcgggaggtcctggactcctccaatatcaaaccaatgaacctgatcggcgtggcaagaggcgaaaacatccccgccgtgatcgccctgaccgaccccgagggctgcccactgagccggtttaaggatagcctgggaaacccaacccacatcctgagaatcggcgagagctataaggagaagcagcggaccatccaggccaagaaggaggtggagcagcggagagccggcggctacagccggaagtacgccagcaaagccaagaatctggcagacgatatggtgagaaacaccgctagagatctgctgtactacgccgtgacccaggatgccatgctgatcttcgccaacctgagccggggcttcggccggcagggcaagcggaccttcatggccgagagacagtacacacggatggaggactggctgaccgccaagctggcctacgagggcctgagcaagacctacctgtccaagacactggcccagtacacctccaagacatgcagcaactgtgggtttaccatcaccagcgccgactacgacagggtgctggagaagctgaagaagacagcaacaggctggatgaccacaattaacggcaaggagctgaaggtggagggccagattacctactacaacagatacaagagacagaacgtagtcaaggacctgtccgtcgagctggatagactgagcgaagaatctgtgaacaacgacatctcctcctggacaaagggcagaagcggagaagctctgagcctcctgaagaaaagattctcccatagacccgtgcaggagaagttcgtgtgcctgaactgcggcttcgagacacacgcagccgagcaagccgccctgaacatcgccagatcctggctgttcctgcggagccaggagtacaagaaataccagacaaacaagacaaccggcaacaccgataagagagccttcgtcgagacctggcagtccttttaccggaagaagcttaaggaggtgtggaaacctgccgtgcggtctggcggatctggcggaggctccaccagccccaagaaaaagagaaaagtctaagctgccttctgcggggcttgccttctggccatgcccttcttctctcccttgcacctgtacctcttggtctttgaataaagcctgagtaggaaggctagcaaaaaaaaaaaaaaaaaaaaaaaaaaaaaaaaaaaaaaaaaaaaaaaaaaaaaaaaaaaaaaaaaaaaaaaaaaaaaaaagcccagccggctccccaacctctaccgaggagggcacctctgagtccgccacccccgagagcggccctggcacctccaccgagcccagcgagggcagcgcacccggcagccctgccggcagccccacctccacagaggagggaaccagcaccgagcccagcgaaggcagcgccccaggcaccagcaccgagcctagtgagcaggagattaaacggatcaacaagatcagaagaagacttgtgaaagacagcaacaccaagaaggccggcaagacaggccccatgaaaaccctgctggttagagtgatgacacccgatctgagagagcggctggaaaacctgagaaagaagcctgaaaatatcccccagcccatcagcaatacatctagagccaacctgaataagctgctgaccgattacaccgaaatgaagaaggcgatcctgcatgtgtactgggaagagttccagaaggaccctgtgggcctgatgagccgggtggcccagcctgccagcaagaagatcgatcagaacaagctgaaacctgagatggacgagaagggcaacctgaccaccgccggctttgcctgctctcagtgtggccagcccctgttcgtgtacaagctggagcaggtgtctgagaagggcaaggcttacaccaactacttcggacggtgcaatgtggccgagcacgaaaagctgatcctgctggcccagctgaagcccgagaaggatagcgacgaagccgtgacatatagcctgggaaagtttgggcagagggccctggatttctacagcattcatgtgaccaaggagtccacccaccccgtgaagcccctggcccagatcgccggaaacagatacgcctccggacctgtgggaaaggccctgagcgacgcatgtatgggcacaatcgcctccttcctgtctaagtaccaggacatcatcatcgaacaccagaaggtggtgaagggcaaccagaagagactggagagcctgcgggagctggccggcaaggaaaacctggaataccctagcgtgaccctgccacctcagcctcacaccaaggagggcgttgatgcctacaacgaagtgatcgcccgggtgcgaatgtgggtgaacctgaacctgtggcagaagctgaagctaagcagagatgatgccaagcctctgctgagactgaagggattcccttcctttcctctggtcgagagacaggccaacgaagtggactggtgggacatggtgtgtaacgtgaagaagctgatcaacgagaaaaaggaggatggcaaggtgttttggcagaatctggctggctacaagagacaggaagccctgagaccatacctgagcagcgaggaagatcggaagaagggaaagaaattcgctcggtaccagctgggcgacctgctgctgcacctggaaaagaagcacggcgaggactggggaaaggtgtacgacgaggcctgggagcggattgacaagaaagtggaaggcctgagcaagcacatcaagctggaagaggaacggagaagcgaggacgcccagagcaaggccgccctgaccgactggctgcgggctaaggccagcttcgtgatcgagggcctgaaggaggccgacaaggacgagttctgcagatgcgagctgaagctgcagaagtggtacggggacctgcggggaaagcccttcgccatcgaagccgagaacagcatcctggacatcagcggcttcagcaagcagtacaactgtgccttcatctggcagaaggacggcgtgaagaagctgaacctgtacctgatcatcaactacttcaagggcggcaagctgcggttcaagaagatcaaacctgaagccttcgaagccaacagattctacaccgtgatcaacaaaaagagcggcgagatcgtgcccatggaggtgaacttcaacttcgacgaccccaacctgatcatcctgcctctggcctttggcaagagacagggcagagaattcatctggaacgacctgctgtccctggaaaccggcagcctgaagctggccaacggaagagtgatcgagaagacactgtacaacagaagaacccggcaggatgagcctgccctgttcgtggccctgaccttcgagcggcgggaggtcctggactcctccaatatcaaaccaatgaacctgatcggcgtggcaagaggcgaaaacatccccgccgtgatcgccctgaccgaccccgagggctgcccactgagccggtttaaggatagcctgggaaacccaacccacatcctgagaatcggcgagagctataaggagaagcagcggaccatccaggccaagaaggaggtggagcagcggagagccggcggctacagccggaagtacgccagcaaagccaagaatctggcagacgatatggtgagaaacaccgctagagatctgctgtactacgccgtgacccaggatgccatgctgatcttcgccaacctgagccggggcttcggccggcagggcaagcggaccttcatggccgagagacagtacacacggatggaggactggctgaccgccaagctggcctacgagggcctgagcaagacctacctgtccaagacactggcccagtacacctccaagacatgcagcaactgtgggtttaccatcaccagcgccgactacgacagggtgctggagaagctgaagaagacagcaacaggctggatgaccacaattaacggcaaggagctgaaggtggagggccagattacctactacaacagatacaagagacagaacgtagtcaaggacctgtccgtcgagctggatagactgagcgaagaatctgtgaacaacgacatctcctcctggacaaagggcagaagcggagaagctctgagcctcctgaagaaaagattctcccatagacccgtgcaggagaagttcgtgtgcctgaactgcggcttcgagacacacgcagccgagcaagccgccctgaacatcgccagatcctggctgttcctgcggagccaggagtacaagaaataccagacaaacaagacaaccggcaacaccgataagagagccttcgtcgagacctggcagtccttttaccggaagaagcttaaggaggtgtggaaacctgccgtgcggtctggcggatctggcggaggctccaccagccccaagaaaaagagaaaagtctaagctgccttctgcggggcttgccttctggccatgcccttcttctctcccttgcacctgtacctcttggtctttgaataaagcctgagtaggaaggctagcaaaaaaaaaaaaaaaaaaaaaaaaaaaaaaaaaaaaaaaaaaaaaaaaaaaaaaaaaaaaaaaaaaaaaaaaaaaaaaaa

SEQ ID NO: 9826 - RNA, 8787 nt, synthetic construct
  source 1..8787: mol_type = other RNA
aggaaataagagagaaaagaagagtaagaagaaatataagagccaccatggcccctaagaagaagcgtaaagtgagccggatgaaccacgaccaggagttcgacccccctaaggtgtaccctcccgtccccgccgagaagagaaagcccatccgggtcctgagcctgttcgatggcatcgccaccggtctgctggtgctgaaggacctgggcatccaggtggataggtacattgcctccgaggtgtgcgaggactccatcaccgtgggaatggtgcgtcatcagggcaagatcatgtacgtgggcgacgtgcggagcgtgacacagaagcatatccaggagtggggccctttcgacctggtgatcggcggcagcccttgcaatgacctgagcatcgtgaacccagcccggaagggcctgtacgagggaaccggcagactgttcttcgagttttacagactgctgcacgacgcccggcctaaggaaggcgacgaccggcccttcttttggctgttcgagaatgtggtggccatgggagtcagcgacaagcgggatattagccggttcctggagagcaaccccgtgatgatcgatgccaaggaagtgagcgccgcccaccgggccagatacttctggggcaatctgcctggcatgaacagacccctggccagcaccgtgaacgacaagctggagctgcaggagtgcctggagcacggccggatcgccaagttcagcaaggtgagaaccatcaccacccgaagcaacagcatcaaacaaggcaaggaccagcactttcctgtgttcatgaacgagaaggaggacatcctgtggtgtaccgagatggagagagtgttcgggttcccagtccactacacagatgtcagcaacatgtctagactggccagacagagactgctgggaagaagctggtccgtccctgtgatcagacacctgttcgcccctctgaaggagtacttcgcctgcgtgagcagcggcaacagcaacgccaacagccggggccccagcttctctagcggcctggtgccactgtccctgagagggagccacatgggccccatggagatctacaaaaccgtgagcgcctggaagcggcagcctgtgcgcgtgctgagcctgtttcggaatatcgataaagtcctgaaaagcctgggattcctggagagcggctctggctccggcggtggcaccctgaagtacgtggaggatgtgacaaacgtggtcagacgggatgtggagaagtggggccccttcgatctggtgtacggcagcacccaacccctgggcagctcttgtgaccggtgccctggctggtacatgtttcagttccaccggatcctgcagtacgccctgccgagacaggagtcccagcggccattcttttggattttcatggacaacttgctgctgaccgaggatgaccaggaaactaccactcggttcctgcagaccgaagccgtgaccctgcaggacgtgagaggccgggactaccagaacgccatgcgggtgtggtccaacatccctggactgaaaagcaagcacgcacctctgacccctaaagaagaggagtacctgcaggcccaggtgcggagcagaagcaagctggacgcccctaaggtggatctgctggtgaagaattgcctcctgcccctgagagagtacttcaagtatttcagccagaatagtctgcccctgggaggcagcggcggcggcgagatggtgaccttcaaggacgtggccgtggtgttcaccgaggaggagctgggcctgctggacagcgcccagaggaagctgtacagggacgtgatgctggagaacttcaggaacctgctgctggtggcccaccagcccttcaagcccgacctgatcagccagctggagagggaggagaagctgctgatggtggagatggagacccccaaggacggctgcagcggcaggaagaaccagcagaagggcggcccaagcagcggcgcccctcctcccagcggcggcaggcggcccaagcagcggcgcccctcctcccagcggcggcagcccagccggctccccaacctctaccgaggagggcacctctgagtccgccacccccgagagcggccctggcacctccaccgagcccagcgagggcagcgcacccggcagccctgccggcagccccacctccacagaggagggaaccagcaccgagcccagcgaaggcagcgccccaggcaccagcaccgagcctagtgagcaggagattaaacggatcaacaagatcagaagaagacttgtgaaagacagcaacaccaagaaggccggcaagacaggccccatgaaaaccctgctggttagagtgatgacacccgatctgagagagcggctggaaaacctgagaaagaagcctgaaaatatcccccagcccatcagcaatacatctagagccaacctgaataagctgctgaccgattacaccgaaatgaagaaggcgatcctgcatgtgtactgggaagagttccagaaggaccctgtgggcctgatgagccgggtggcccagcctgccagcaagaagatcgatcagaacaagctgaaacctgagatggacgagaagggcaacctgaccaccgccggctttgcctgctctcagtgtggccagcccctgttcgtgtacaagctggagcaggtgtctgagaagggcaaggcttacaccaactacttcggacggtgcaatgtggccgagcacgaaaagctgatcctgctggcccagctgaagcccgagaaggatagcgacgaagccgtgacatatagcctgggaaagtttgggcagagggccctggatttctacagcattcatgtgaccaaggagtccacccaccccgtgaagcccctggcccagatcgccggaaacagatacgcctccggacctgtgggaaaggccctgagcgacgcatgtatgggcacaatcgcctccttcctgtctaagtaccaggacatcatcatcgaacaccagaaggtggtgaagggcaaccagaagagactggagagcctgcgggagctggccggcaaggaaaacctggaataccctagcgtgaccctgccacctcagcctcacaccaaggagggcgttgatgcctacaacgaagtgatcgcccgggtgcgaatgtgggtgaacctgaacctgtggcagaagctgaagctaagcagagatgatgccaagcctctgctgagactgaagggattcccttcctttcctctggtcgagagacaggccaacgaagtggactggtgggacatggtgtgtaacgtgaagaagctgatcaacgagaaaaaggaggatggcaaggtgttttggcagaatctggctggctacaagagacaggaagccctgagaccatacctgagcagcgaggaagatcggaagaagggaaagaaattcgctcggtaccagctgggcgacctgctgctgcacctggaaaagaagcacggcgaggactggggaaaggtgtacgacgaggcctgggagcggattgacaagaaagtggaaggcctgagcaagcacatcaagctggaagaggaacggagaagcgaggacgcccagagcaaggccgccctgaccgactggctgcgggctaaggccagcttcgtgatcgagggcctgaaggaggccgacaaggacgagttctgcagatgcgagctgaagctgcagaagtggtacggggacctgcggggaaagcccttcgccatcgaagccgagaacagcatcctggacatcagcggcttcagcaagcagtacaactgtgccttcatctggcagaaggacggcgtgaagaagctgaacctgtacctgatcatcaactacttcaagggcggcaagctgcggttcaagaagatcaaacctgaagccttcgaagccaacagattctacaccgtgatcaacaaaaagagcggcgagatcgtgcccatggaggtgaacttcaacttcgacgaccccaacctgatcatcctgcctctggcctttggcaagagacagggcagagaattcatctggaacgacctgctgtccctggaaaccggcagcctgaagctggccaacggaagagtgatcgagaagacactgtacaacagaagaacccggcaggatgagcctgccctgttcgtggccctgaccttcgagcggcgggaggtcctggactcctccaatatcaaaccaatgaacctgatcggcgtggcaagaggcgaaaacatccccgccgtgatcgccctgaccgaccccgagggctgcccactgagccggtttaaggatagcctgggaaacccaacccacatcctgagaatcggcgagagctataaggagaagcagcggaccatccaggccaagaaggaggtggagcagcggagagccggcggctacagccggaagtacgccagcaaagccaagaatctggcagacgatatggtgagaaacaccgctagagatctgctgtactacgccgtgacccaggatgccatgctgatcttcgccaacctgagccggggcttcggccggcagggcaagcggaccttcatggccgagagacagtacacacggatggaggactggctgaccgccaagctggcctacgagggcctgagcaagacctacctgtccaagacactggcccagtacacctccaagacatgcagcaactgtgggtttaccatcaccagcgccgactacgacagggtgctggagaagctgaagaagacagcaacaggctggatgaccacaattaacggcaaggagctgaaggtggagggccagattacctactacaacagatacaagagacagaacgtagtcaaggacctgtccgtcgagctggatagactgagcgaagaatctgtgaacaacgacatctcctcctggacaaagggcagaagcggagaagctctgagcctcctgaagaaaagattctcccatagacccgtgcaggagaagttcgtgtgcctgaactgcggcttcgagacacacgcagccgagcaagccgccctgaacatcgccagatcctggctgttcctgcggagccaggagtacaagaaataccagacaaacaagacaaccggcaacaccgataagagagccttcgtcgagacctggcagtccttttaccggaagaagcttaaggaggtgtggaaacctgccgtgcggtctggcggatctggcggaggctccaccagccccaagaaaaagagaaaagtctaagctgccttctgcggggcttgccttctggccatgcccttcttctctcccttgcacctgtacctcttggtctttgaataaagcctgagtaggaaggctagcaaaaaaaaaaaaaaaaaaaaaaaaaaaaaaaaaaaaaaaaaaaaaaaaaaaaaaaaaaaaaaaaaaaaaaaaaaaaaaaagcccagccggctccccaacctctaccgaggagggcacctctgagtccgccacccccgagagcggccctggcacctccaccgagcccagcgagggcagcgcacccggcagccctgccggcagccccacctccacagaggagggaaccagcaccgagcccagcgaaggcagcgccccaggcaccagcaccgagcctagtgagcaggagattaaacggatcaacaagatcagaagaagacttgtgaaagacagcaacaccaagaaggccggcaagacaggccccatgaaaaccctgctggttagagtgatgacacccgatctgagagagcggctggaaaacctgagaaagaagcctgaaaatatcccccagcccatcagcaatacatctagagccaacctgaataagctgctgaccgattacaccgaaatgaagaaggcgatcctgcatgtgtactgggaagagttccagaaggaccctgtgggcctgatgagccgggtggcccagcctgccagcaagaagatcgatcagaacaagctgaaacctgagatggacgagaagggcaacctgaccaccgccggctttgcctgctctcagtgtggccagcccctgttcgtgtacaagctggagcaggtgtctgagaagggcaaggcttacaccaactacttcggacggtgcaatgtggccgagcacgaaaagctgatcctgctggcccagctgaagcccgagaaggatagcgacgaagccgtgacatatagcctgggaaagtttgggcagagggccctggatttctacagcattcatgtgaccaaggagtccacccaccccgtgaagcccctggcccagatcgccggaaacagatacgcctccggacctgtgggaaaggccctgagcgacgcatgtatgggcacaatcgcctccttcctgtctaagtaccaggacatcatcatcgaacaccagaaggtggtgaagggcaaccagaagagactggagagcctgcgggagctggccggcaaggaaaacctggaataccctagcgtgaccctgccacctcagcctcacaccaaggagggcgttgatgcctacaacgaagtgatcgcccgggtgcgaatgtgggtgaacctgaacctgtggcagaagctgaagctaagcagagatgatgccaagcctctgctgagactgaagggattcccttcctttcctctggtcgagagacaggccaacgaagtggactggtgggacatggtgtgtaacgtgaagaagctgatcaacgagaaaaaggaggatggcaaggtgttttggcagaatctggctggctacaagagacaggaagccctgagaccatacctgagcagcgaggaagatcggaagaagggaaagaaattcgctcggtaccagctgggcgacctgctgctgcacctggaaaagaagcacggcgaggactggggaaaggtgtacgacgaggcctgggagcggattgacaagaaagtggaaggcctgagcaagcacatcaagctggaagaggaacggagaagcgaggacgcccagagcaaggccgccctgaccgactggctgcgggctaaggccagcttcgtgatcgagggcctgaaggaggccgacaaggacgagttctgcagatgcgagctgaagctgcagaagtggtacggggacctgcggggaaagcccttcgccatcgaagccgagaacagcatcctggacatcagcggcttcagcaagcagtacaactgtgccttcatctggcagaaggacggcgtgaagaagctgaacctgtacctgatcatcaactacttcaagggcggcaagctgcggttcaagaagatcaaacctgaagccttcgaagccaacagattctacaccgtgatcaacaaaaagagcggcgagatcgtgcccatggaggtgaacttcaacttcgacgaccccaacctgatcatcctgcctctggcctttggcaagagacagggcagagaattcatctggaacgacctgctgtccctggaaaccggcagcctgaagctggccaacggaagagtgatcgagaagacactgtacaacagaagaacccggcaggatgagcctgccctgttcgtggccctgaccttcgagcggcgggaggtcctggactcctccaatatcaaaccaatgaacctgatcggcgtggcaagaggcgaaaacatccccgccgtgatcgccctgaccgaccccgagggctgcccactgagccggtttaaggatagcctgggaaacccaacccacatcctgagaatcggcgagagctataaggagaagcagcggaccatccaggccaagaaggaggtggagcagcggagagccggcggctacagccggaagtacgccagcaaagccaagaatctggcagacgatatggtgagaaacaccgctagagatctgctgtactacgccgtgacccaggatgccatgctgatcttcgccaacctgagccggggcttcggccggcagggcaagcggaccttcatggccgagagacagtacacacggatggaggactggctgaccgccaagctggcctacgagggcctgagcaagacctacctgtccaagacactggcccagtacacctccaagacatgcagcaactgtgggtttaccatcaccagcgccgactacgacagggtgctggagaagctgaagaagacagcaacaggctggatgaccacaattaacggcaaggagctgaaggtggagggccagattacctactacaacagatacaagagacagaacgtagtcaaggacctgtccgtcgagctggatagactgagcgaagaatctgtgaacaacgacatctcctcctggacaaagggcagaagcggagaagctctgagcctcctgaagaaaagattctcccatagacccgtgcaggagaagttcgtgtgcctgaactgcggcttcgagacacacgcagccgagcaagccgccctgaacatcgccagatcctggctgttcctgcggagccaggagtacaagaaataccagacaaacaagacaaccggcaacaccgataagagagccttcgtcgagacctggcagtccttttaccggaagaagcttaaggaggtgtggaaacctgccgtgcggtctggcggatctggcggaggctccaccagccccaagaaaaagagaaaagtctaagctgccttctgcggggcttgccttctggccatgcccttcttctctcccttgcacctgtacctcttggtctttgaataaagcctgagtaggaaggctagcaaaaaaaaaaaaaaaaaaaaaaaaaaaaaaaaaaaaaaaaaaaaaaaaaaaaaaaaaaaaaaaaaaaaaaaaaaaaaaaa

SEQ ID NO: 9827 - RNA, 8787 nt, synthetic construct
  source 1..8787: mol_type = other RNA
aggaaataagagagaaaagaagagtaagaagaaatataagagccaccatggcccctaagaagaagcgtaaagtgagccggatgaaccacgaccaggagttcgacccccctaaggtgtaccctcccgtccccgccgagaagagaaagcccatccgggtcctgagcctgttcgatggcatcgccaccggtctgctggtgctgaaggacctgggcatccaggtggataggtacattgcctccgaggtgtgcgaggactccatcaccgtgggaatggtgcgtcatcagggcaagatcatgtacgtgggcgacgtgcggagcgtgacacagaagcatatccaggagtggggccctttcgacctggtgatcggcggcagcccttgcaatgacctgagcatcgtgaacccagcccggaagggcctgtacgagggaaccggcagactgttcttcgagttttacagactgctgcacgacgcccggcctaaggaaggcgacgaccggcccttcttttggctgttcgagaatgtggtggccatgggagtcagcgacaagcgggatattagccggttcctggagagcaaccccgtgatgatcgatgccaaggaagtgagcgccgcccaccgggccagatacttctggggcaatctgcctggcatgaacagacccctggccagcaccgtgaacgacaagctggagctgcaggagtgcctggagcacggccggatcgccaagttcagcaaggtgagaaccatcaccacccgaagcaacagcatcaaacaaggcaaggaccagcactttcctgtgttcatgaacgagaaggaggacatcctgtggtgtaccgagatggagagagtgttcgggttcccagtccactacacagatgtcagcaacatgtctagactggccagacagagactgctgggaagaagctggtccgtccctgtgatcagacacctgttcgcccctctgaaggagtacttcgcctgcgtgagcagcggcaacagcaacgccaacagccggggccccagcttctctagcggcctggtgccactgtccctgagagggagccacatgggccccatggagatctacaaaaccgtgagcgcctggaagcggcagcctgtgcgcgtgctgagcctgtttcggaatatcgataaagtcctgaaaagcctgggattcctggagagcggctctggctccggcggtggcaccctgaagtacgtggaggatgtgacaaacgtggtcagacgggatgtggagaagtggggccccttcgatctggtgtacggcagcacccaacccctgggcagctcttgtgaccggtgccctggctggtacatgtttcagttccaccggatcctgcagtacgccctgccgagacaggagtcccagcggccattcttttggattttcatggacaacttgctgctgaccgaggatgaccaggaaactaccactcggttcctgcagaccgaagccgtgaccctgcaggacgtgagaggccgggactaccagaacgccatgcgggtgtggtccaacatccctggactgaaaagcaagcacgcacctctgacccctaaagaagaggagtacctgcaggcccaggtgcggagcagaagcaagctggacgcccctaaggtggatctgctggtgaagaattgcctcctgcccctgagagagtacttcaagtatttcagccagaatagtctgcccctgggaggcagcggcggcggcatgcacctgaccgcctggccccagaagagcgtgaccttcgaggacgtggccgtgtacttcacccaggccgagtgggacggcctgagccccgcccagagggccctgtacagggacgtgatgctggagaactacggcaacgtggccagcctgggcttccccctgctgaagcccgccgtgatcagccagctggagggcggcggcgagctgggcggccccagccccctggccgccggcaccggcctgggcggcccaagcagcggcgcccctcctcccagcggcggcaggcggcccaagcagcggcgcccctcctcccagcggcggcagcccagccggctccccaacctctaccgaggagggcacctctgagtccgccacccccgagagcggccctggcacctccaccgagcccagcgagggcagcgcacccggcagccctgccggcagccccacctccacagaggagggaaccagcaccgagcccagcgaaggcagcgccccaggcaccagcaccgagcctagtgagcaggagattaaacggatcaacaagatcagaagaagacttgtgaaagacagcaacaccaagaaggccggcaagacaggccccatgaaaaccctgctggttagagtgatgacacccgatctgagagagcggctggaaaacctgagaaagaagcctgaaaatatcccccagcccatcagcaatacatctagagccaacctgaataagctgctgaccgattacaccgaaatgaagaaggcgatcctgcatgtgtactgggaagagttccagaaggaccctgtgggcctgatgagccgggtggcccagcctgccagcaagaagatcgatcagaacaagctgaaacctgagatggacgagaagggcaacctgaccaccgccggctttgcctgctctcagtgtggccagcccctgttcgtgtacaagctggagcaggtgtctgagaagggcaaggcttacaccaactacttcggacggtgcaatgtggccgagcacgaaaagctgatcctgctggcccagctgaagcccgagaaggatagcgacgaagccgtgacatatagcctgggaaagtttgggcagagggccctggatttctacagcattcatgtgaccaaggagtccacccaccccgtgaagcccctggcccagatcgccggaaacagatacgcctccggacctgtgggaaaggccctgagcgacgcatgtatgggcacaatcgcctccttcctgtctaagtaccaggacatcatcatcgaacaccagaaggtggtgaagggcaaccagaagagactggagagcctgcgggagctggccggcaaggaaaacctggaataccctagcgtgaccctgccacctcagcctcacaccaaggagggcgttgatgcctacaacgaagtgatcgcccgggtgcgaatgtgggtgaacctgaacctgtggcagaagctgaagctaagcagagatgatgccaagcctctgctgagactgaagggattcccttcctttcctctggtcgagagacaggccaacgaagtggactggtgggacatggtgtgtaacgtgaagaagctgatcaacgagaaaaaggaggatggcaaggtgttttggcagaatctggctggctacaagagacaggaagccctgagaccatacctgagcagcgaggaagatcggaagaagggaaagaaattcgctcggtaccagctgggcgacctgctgctgcacctggaaaagaagcacggcgaggactggggaaaggtgtacgacgaggcctgggagcggattgacaagaaagtggaaggcctgagcaagcacatcaagctggaagaggaacggagaagcgaggacgcccagagcaaggccgccctgaccgactggctgcgggctaaggccagcttcgtgatcgagggcctgaaggaggccgacaaggacgagttctgcagatgcgagctgaagctgcagaagtggtacggggacctgcggggaaagcccttcgccatcgaagccgagaacagcatcctggacatcagcggcttcagcaagcagtacaactgtgccttcatctggcagaaggacggcgtgaagaagctgaacctgtacctgatcatcaactacttcaagggcggcaagctgcggttcaagaagatcaaacctgaagccttcgaagccaacagattctacaccgtgatcaacaaaaagagcggcgagatcgtgcccatggaggtgaacttcaacttcgacgaccccaacctgatcatcctgcctctggcctttggcaagagacagggcagagaattcatctggaacgacctgctgtccctggaaaccggcagcctgaagctggccaacggaagagtgatcgagaagacactgtacaacagaagaacccggcaggatgagcctgccctgttcgtggccctgaccttcgagcggcgggaggtcctggactcctccaatatcaaaccaatgaacctgatcggcgtggcaagaggcgaaaacatccccgccgtgatcgccctgaccgaccccgagggctgcccactgagccggtttaaggatagcctgggaaacccaacccacatcctgagaatcggcgagagctataaggagaagcagcggaccatccaggccaagaaggaggtggagcagcggagagccggcggctacagccggaagtacgccagcaaagccaagaatctggcagacgatatggtgagaaacaccgctagagatctgctgtactacgccgtgacccaggatgccatgctgatcttcgccaacctgagccggggcttcggccggcagggcaagcggaccttcatggccgagagacagtacacacggatggaggactggctgaccgccaagctggcctacgagggcctgagcaagacctacctgtccaagacactggcccagtacacctccaagacatgcagcaactgtgggtttaccatcaccagcgccgactacgacagggtgctggagaagctgaagaagacagcaacaggctggatgaccacaattaacggcaaggagctgaaggtggagggccagattacctactacaacagatacaagagacagaacgtagtcaaggacctgtccgtcgagctggatagactgagcgaagaatctgtgaacaacgacatctcctcctggacaaagggcagaagcggagaagctctgagcctcctgaagaaaagattctcccatagacccgtgcaggagaagttcgtgtgcctgaactgcggcttcgagacacacgcagccgagcaagccgccctgaacatcgccagatcctggctgttcctgcggagccaggagtacaagaaataccagacaaacaagacaaccggcaacaccgataagagagccttcgtcgagacctggcagtccttttaccggaagaagcttaaggaggtgtggaaacctgccgtgcggtctggcggatctggcggaggctccaccagccccaagaaaaagagaaaagtctaagctgccttctgcggggcttgccttctggccatgcccttcttctctcccttgcacctgtacctcttggtctttgaataaagcctgagtaggaaggctagcaaaaaaaaaaaaaaaaaaaaaaaaaaaaaaaaaaaaaaaaaaaaaaaaaaaaaaaaaaaaaaaaaaaaaaaaaaaaaaaagcccagccggctccccaacctctaccgaggagggcacctctgagtccgccacccccgagagcggccctggcacctccaccgagcccagcgagggcagcgcacccggcagccctgccggcagccccacctccacagaggagggaaccagcaccgagcccagcgaaggcagcgccccaggcaccagcaccgagcctagtgagcaggagattaaacggatcaacaagatcagaagaagacttgtgaaagacagcaacaccaagaaggccggcaagacaggccccatgaaaaccctgctggttagagtgatgacacccgatctgagagagcggctggaaaacctgagaaagaagcctgaaaatatcccccagcccatcagcaatacatctagagccaacctgaataagctgctgaccgattacaccgaaatgaagaaggcgatcctgcatgtgtactgggaagagttccagaaggaccctgtgggcctgatgagccgggtggcccagcctgccagcaagaagatcgatcagaacaagctgaaacctgagatggacgagaagggcaacctgaccaccgccggctttgcctgctctcagtgtggccagcccctgttcgtgtacaagctggagcaggtgtctgagaagggcaaggcttacaccaactacttcggacggtgcaatgtggccgagcacgaaaagctgatcctgctggcccagctgaagcccgagaaggatagcgacgaagccgtgacatatagcctgggaaagtttgggcagagggccctggatttctacagcattcatgtgaccaaggagtccacccaccccgtgaagcccctggcccagatcgccggaaacagatacgcctccggacctgtgggaaaggccctgagcgacgcatgtatgggcacaatcgcctccttcctgtctaagtaccaggacatcatcatcgaacaccagaaggtggtgaagggcaaccagaagagactggagagcctgcgggagctggccggcaaggaaaacctggaataccctagcgtgaccctgccacctcagcctcacaccaaggagggcgttgatgcctacaacgaagtgatcgcccgggtgcgaatgtgggtgaacctgaacctgtggcagaagctgaagctaagcagagatgatgccaagcctctgctgagactgaagggattcccttcctttcctctggtcgagagacaggccaacgaagtggactggtgggacatggtgtgtaacgtgaagaagctgatcaacgagaaaaaggaggatggcaaggtgttttggcagaatctggctggctacaagagacaggaagccctgagaccatacctgagcagcgaggaagatcggaagaagggaaagaaattcgctcggtaccagctgggcgacctgctgctgcacctggaaaagaagcacggcgaggactggggaaaggtgtacgacgaggcctgggagcggattgacaagaaagtggaaggcctgagcaagcacatcaagctggaagaggaacggagaagcgaggacgcccagagcaaggccgccctgaccgactggctgcgggctaaggccagcttcgtgatcgagggcctgaaggaggccgacaaggacgagttctgcagatgcgagctgaagctgcagaagtggtacggggacctgcggggaaagcccttcgccatcgaagccgagaacagcatcctggacatcagcggcttcagcaagcagtacaactgtgccttcatctggcagaaggacggcgtgaagaagctgaacctgtacctgatcatcaactacttcaagggcggcaagctgcggttcaagaagatcaaacctgaagccttcgaagccaacagattctacaccgtgatcaacaaaaagagcggcgagatcgtgcccatggaggtgaacttcaacttcgacgaccccaacctgatcatcctgcctctggcctttggcaagagacagggcagagaattcatctggaacgacctgctgtccctggaaaccggcagcctgaagctggccaacggaagagtgatcgagaagacactgtacaacagaagaacccggcaggatgagcctgccctgttcgtggccctgaccttcgagcggcgggaggtcctggactcctccaatatcaaaccaatgaacctgatcggcgtggcaagaggcgaaaacatccccgccgtgatcgccctgaccgaccccgagggctgcccactgagccggtttaaggatagcctgggaaacccaacccacatcctgagaatcggcgagagctataaggagaagcagcggaccatccaggccaagaaggaggtggagcagcggagagccggcggctacagccggaagtacgccagcaaagccaagaatctggcagacgatatggtgagaaacaccgctagagatctgctgtactacgccgtgacccaggatgccatgctgatcttcgccaacctgagccggggcttcggccggcagggcaagcggaccttcatggccgagagacagtacacacggatggaggactggctgaccgccaagctggcctacgagggcctgagcaagacctacctgtccaagacactggcccagtacacctccaagacatgcagcaactgtgggtttaccatcaccagcgccgactacgacagggtgctggagaagctgaagaagacagcaacaggctggatgaccacaattaacggcaaggagctgaaggtggagggccagattacctactacaacagatacaagagacagaacgtagtcaaggacctgtccgtcgagctggatagactgagcgaagaatctgtgaacaacgacatctcctcctggacaaagggcagaagcggagaagctctgagcctcctgaagaaaagattctcccatagacccgtgcaggagaagttcgtgtgcctgaactgcggcttcgagacacacgcagccgagcaagccgccctgaacatcgccagatcctggctgttcctgcggagccaggagtacaagaaataccagacaaacaagacaaccggcaacaccgataagagagccttcgtcgagacctggcagtccttttaccggaagaagcttaaggaggtgtggaaacctgccgtgcggtctggcggatctggcggaggctccaccagccccaagaaaaagagaaaagtctaagctgccttctgcggggcttgccttctggccatgcccttcttctctcccttgcacctgtacctcttggtctttgaataaagcctgagtaggaaggctagcaaaaaaaaaaaaaaaaaaaaaaaaaaaaaaaaaaaaaaaaaaaaaaaaaaaaaaaaaaaaaaaaaaaaaaaaaaaaaaaa

SEQ ID NO: 9828 - RNA, 8787 nt, synthetic construct
  source 1..8787: mol_type = other RNA
aggaaataagagagaaaagaagagtaagaagaaatataagagccaccatggcccctaagaagaagcgtaaagtgagccggatgaaccacgaccaggagttcgacccccctaaggtgtaccctcccgtccccgccgagaagagaaagcccatccgggtcctgagcctgttcgatggcatcgccaccggtctgctggtgctgaaggacctgggcatccaggtggataggtacattgcctccgaggtgtgcgaggactccatcaccgtgggaatggtgcgtcatcagggcaagatcatgtacgtgggcgacgtgcggagcgtgacacagaagcatatccaggagtggggccctttcgacctggtgatcggcggcagcccttgcaatgacctgagcatcgtgaacccagcccggaagggcctgtacgagggaaccggcagactgttcttcgagttttacagactgctgcacgacgcccggcctaaggaaggcgacgaccggcccttcttttggctgttcgagaatgtggtggccatgggagtcagcgacaagcgggatattagccggttcctggagagcaaccccgtgatgatcgatgccaaggaagtgagcgccgcccaccgggccagatacttctggggcaatctgcctggcatgaacagacccctggccagcaccgtgaacgacaagctggagctgcaggagtgcctggagcacggccggatcgccaagttcagcaaggtgagaaccatcaccacccgaagcaacagcatcaaacaaggcaaggaccagcactttcctgtgttcatgaacgagaaggaggacatcctgtggtgtaccgagatggagagagtgttcgggttcccagtccactacacagatgtcagcaacatgtctagactggccagacagagactgctgggaagaagctggtccgtccctgtgatcagacacctgttcgcccctctgaaggagtacttcgcctgcgtgagcagcggcaacagcaacgccaacagccggggccccagcttctctagcggcctggtgccactgtccctgagagggagccacatgggccccatggagatctacaaaaccgtgagcgcctggaagcggcagcctgtgcgcgtgctgagcctgtttcggaatatcgataaagtcctgaaaagcctgggattcctggagagcggctctggctccggcggtggcaccctgaagtacgtggaggatgtgacaaacgtggtcagacgggatgtggagaagtggggccccttcgatctggtgtacggcagcacccaacccctgggcagctcttgtgaccggtgccctggctggtacatgtttcagttccaccggatcctgcagtacgccctgccgagacaggagtcccagcggccattcttttggattttcatggacaacttgctgctgaccgaggatgaccaggaaactaccactcggttcctgcagaccgaagccgtgaccctgcaggacgtgagaggccgggactaccagaacgccatgcgggtgtggtccaacatccctggactgaaaagcaagcacgcacctctgacccctaaagaagaggagtacctgcaggcccaggtgcggagcagaagcaagctggacgcccctaaggtggatctgctggtgaagaattgcctcctgcccctgagagagtacttcaagtatttcagccagaatagtctgcccctgggaggcagcggcggcggccccctggagagcgtgaccttcaaggacgtggccatcgacttcaccctggaggagtggaggctgatggaccccacccagaggaacctgcacaaggacgtgatgctggagaactacaggaacctggtgagcctgggcctggccgtgagcaagcccgacatgatcagccacctggagaacggcaagggcccctgggtgaccatgaggggcatcagcaggatcccctaccccgacatcgagcccaagggcggcccaagcagcggcgcccctcctcccagcggcggcaggcggcccaagcagcggcgcccctcctcccagcggcggcagcccagccggctccccaacctctaccgaggagggcacctctgagtccgccacccccgagagcggccctggcacctccaccgagcccagcgagggcagcgcacccggcagccctgccggcagccccacctccacagaggagggaaccagcaccgagcccagcgaaggcagcgccccaggcaccagcaccgagcctagtgagcaggagattaaacggatcaacaagatcagaagaagacttgtgaaagacagcaacaccaagaaggccggcaagacaggccccatgaaaaccctgctggttagagtgatgacacccgatctgagagagcggctggaaaacctgagaaagaagcctgaaaatatcccccagcccatcagcaatacatctagagccaacctgaataagctgctgaccgattacaccgaaatgaagaaggcgatcctgcatgtgtactgggaagagttccagaaggaccctgtgggcctgatgagccgggtggcccagcctgccagcaagaagatcgatcagaacaagctgaaacctgagatggacgagaagggcaacctgaccaccgccggctttgcctgctctcagtgtggccagcccctgttcgtgtacaagctggagcaggtgtctgagaagggcaaggcttacaccaactacttcggacggtgcaatgtggccgagcacgaaaagctgatcctgctggcccagctgaagcccgagaaggatagcgacgaagccgtgacatatagcctgggaaagtttgggcagagggccctggatttctacagcattcatgtgaccaaggagtccacccaccccgtgaagcccctggcccagatcgccggaaacagatacgcctccggacctgtgggaaaggccctgagcgacgcatgtatgggcacaatcgcctccttcctgtctaagtaccaggacatcatcatcgaacaccagaaggtggtgaagggcaaccagaagagactggagagcctgcgggagctggccggcaaggaaaacctggaataccctagcgtgaccctgccacctcagcctcacaccaaggagggcgttgatgcctacaacgaagtgatcgcccgggtgcgaatgtgggtgaacctgaacctgtggcagaagctgaagctaagcagagatgatgccaagcctctgctgagactgaagggattcccttcctttcctctggtcgagagacaggccaacgaagtggactggtgggacatggtgtgtaacgtgaagaagctgatcaacgagaaaaaggaggatggcaaggtgttttggcagaatctggctggctacaagagacaggaagccctgagaccatacctgagcagcgaggaagatcggaagaagggaaagaaattcgctcggtaccagctgggcgacctgctgctgcacctggaaaagaagcacggcgaggactggggaaaggtgtacgacgaggcctgggagcggattgacaagaaagtggaaggcctgagcaagcacatcaagctggaagaggaacggagaagcgaggacgcccagagcaaggccgccctgaccgactggctgcgggctaaggccagcttcgtgatcgagggcctgaaggaggccgacaaggacgagttctgcagatgcgagctgaagctgcagaagtggtacggggacctgcggggaaagcccttcgccatcgaagccgagaacagcatcctggacatcagcggcttcagcaagcagtacaactgtgccttcatctggcagaaggacggcgtgaagaagctgaacctgtacctgatcatcaactacttcaagggcggcaagctgcggttcaagaagatcaaacctgaagccttcgaagccaacagattctacaccgtgatcaacaaaaagagcggcgagatcgtgcccatggaggtgaacttcaacttcgacgaccccaacctgatcatcctgcctctggcctttggcaagagacagggcagagaattcatctggaacgacctgctgtccctggaaaccggcagcctgaagctggccaacggaagagtgatcgagaagacactgtacaacagaagaacccggcaggatgagcctgccctgttcgtggccctgaccttcgagcggcgggaggtcctggactcctccaatatcaaaccaatgaacctgatcggcgtggcaagaggcgaaaacatccccgccgtgatcgccctgaccgaccccgagggctgcccactgagccggtttaaggatagcctgggaaacccaacccacatcctgagaatcggcgagagctataaggagaagcagcggaccatccaggccaagaaggaggtggagcagcggagagccggcggctacagccggaagtacgccagcaaagccaagaatctggcagacgatatggtgagaaacaccgctagagatctgctgtactacgccgtgacccaggatgccatgctgatcttcgccaacctgagccggggcttcggccggcagggcaagcggaccttcatggccgagagacagtacacacggatggaggactggctgaccgccaagctggcctacgagggcctgagcaagacctacctgtccaagacactggcccagtacacctccaagacatgcagcaactgtgggtttaccatcaccagcgccgactacgacagggtgctggagaagctgaagaagacagcaacaggctggatgaccacaattaacggcaaggagctgaaggtggagggccagattacctactacaacagatacaagagacagaacgtagtcaaggacctgtccgtcgagctggatagactgagcgaagaatctgtgaacaacgacatctcctcctggacaaagggcagaagcggagaagctctgagcctcctgaagaaaagattctcccatagacccgtgcaggagaagttcgtgtgcctgaactgcggcttcgagacacacgcagccgagcaagccgccctgaacatcgccagatcctggctgttcctgcggagccaggagtacaagaaataccagacaaacaagacaaccggcaacaccgataagagagccttcgtcgagacctggcagtccttttaccggaagaagcttaaggaggtgtggaaacctgccgtgcggtctggcggatctggcggaggctccaccagccccaagaaaaagagaaaagtctaagctgccttctgcggggcttgccttctggccatgcccttcttctctcccttgcacctgtacctcttggtctttgaataaagcctgagtaggaaggctagcaaaaaaaaaaaaaaaaaaaaaaaaaaaaaaaaaaaaaaaaaaaaaaaaaaaaaaaaaaaaaaaaaaaaaaaaaaaaaaaagcccagccggctccccaacctctaccgaggagggcacctctgagtccgccacccccgagagcggccctggcacctccaccgagcccagcgagggcagcgcacccggcagccctgccggcagccccacctccacagaggagggaaccagcaccgagcccagcgaaggcagcgccccaggcaccagcaccgagcctagtgagcaggagattaaacggatcaacaagatcagaagaagacttgtgaaagacagcaacaccaagaaggccggcaagacaggccccatgaaaaccctgctggttagagtgatgacacccgatctgagagagcggctggaaaacctgagaaagaagcctgaaaatatcccccagcccatcagcaatacatctagagccaacctgaataagctgctgaccgattacaccgaaatgaagaaggcgatcctgcatgtgtactgggaagagttccagaaggaccctgtgggcctgatgagccgggtggcccagcctgccagcaagaagatcgatcagaacaagctgaaacctgagatggacgagaagggcaacctgaccaccgccggctttgcctgctctcagtgtggccagcccctgttcgtgtacaagctggagcaggtgtctgagaagggcaaggcttacaccaactacttcggacggtgcaatgtggccgagcacgaaaagctgatcctgctggcccagctgaagcccgagaaggatagcgacgaagccgtgacatatagcctgggaaagtttgggcagagggccctggatttctacagcattcatgtgaccaaggagtccacccaccccgtgaagcccctggcccagatcgccggaaacagatacgcctccggacctgtgggaaaggccctgagcgacgcatgtatgggcacaatcgcctccttcctgtctaagtaccaggacatcatcatcgaacaccagaaggtggtgaagggcaaccagaagagactggagagcctgcgggagctggccggcaaggaaaacctggaataccctagcgtgaccctgccacctcagcctcacaccaaggagggcgttgatgcctacaacgaagtgatcgcccgggtgcgaatgtgggtgaacctgaacctgtggcagaagctgaagctaagcagagatgatgccaagcctctgctgagactgaagggattcccttcctttcctctggtcgagagacaggccaacgaagtggactggtgggacatggtgtgtaacgtgaagaagctgatcaacgagaaaaaggaggatggcaaggtgttttggcagaatctggctggctacaagagacaggaagccctgagaccatacctgagcagcgaggaagatcggaagaagggaaagaaattcgctcggtaccagctgggcgacctgctgctgcacctggaaaagaagcacggcgaggactggggaaaggtgtacgacgaggcctgggagcggattgacaagaaagtggaaggcctgagcaagcacatcaagctggaagaggaacggagaagcgaggacgcccagagcaaggccgccctgaccgactggctgcgggctaaggccagcttcgtgatcgagggcctgaaggaggccgacaaggacgagttctgcagatgcgagctgaagctgcagaagtggtacggggacctgcggggaaagcccttcgccatcgaagccgagaacagcatcctggacatcagcggcttcagcaagcagtacaactgtgccttcatctggcagaaggacggcgtgaagaagctgaacctgtacctgatcatcaactacttcaagggcggcaagctgcggttcaagaagatcaaacctgaagccttcgaagccaacagattctacaccgtgatcaacaaaaagagcggcgagatcgtgcccatggaggtgaacttcaacttcgacgaccccaacctgatcatcctgcctctggcctttggcaagagacagggcagagaattcatctggaacgacctgctgtccctggaaaccggcagcctgaagctggccaacggaagagtgatcgagaagacactgtacaacagaagaacccggcaggatgagcctgccctgttcgtggccctgaccttcgagcggcgggaggtcctggactcctccaatatcaaaccaatgaacctgatcggcgtggcaagaggcgaaaacatccccgccgtgatcgccctgaccgaccccgagggctgcccactgagccggtttaaggatagcctgggaaacccaacccacatcctgagaatcggcgagagctataaggagaagcagcggaccatccaggccaagaaggaggtggagcagcggagagccggcggctacagccggaagtacgccagcaaagccaagaatctggcagacgatatggtgagaaacaccgctagagatctgctgtactacgccgtgacccaggatgccatgctgatcttcgccaacctgagccggggcttcggccggcagggcaagcggaccttcatggccgagagacagtacacacggatggaggactggctgaccgccaagctggcctacgagggcctgagcaagacctacctgtccaagacactggcccagtacacctccaagacatgcagcaactgtgggtttaccatcaccagcgccgactacgacagggtgctggagaagctgaagaagacagcaacaggctggatgaccacaattaacggcaaggagctgaaggtggagggccagattacctactacaacagatacaagagacagaacgtagtcaaggacctgtccgtcgagctggatagactgagcgaagaatctgtgaacaacgacatctcctcctggacaaagggcagaagcggagaagctctgagcctcctgaagaaaagattctcccatagacccgtgcaggagaagttcgtgtgcctgaactgcggcttcgagacacacgcagccgagcaagccgccctgaacatcgccagatcctggctgttcctgcggagccaggagtacaagaaataccagacaaacaagacaaccggcaacaccgataagagagccttcgtcgagacctggcagtccttttaccggaagaagcttaaggaggtgtggaaacctgccgtgcggtctggcggatctggcggaggctccaccagccccaagaaaaagagaaaagtctaagctgccttctgcggggcttgccttctggccatgcccttcttctctcccttgcacctgtacctcttggtctttgaataaagcctgagtaggaaggctagcaaaaaaaaaaaaaaaaaaaaaaaaaaaaaaaaaaaaaaaaaaaaaaaaaaaaaaaaaaaaaaaaaaaaaaaaaaaaaaaa

SEQ ID NO: 9829 - RNA, 8787 nt, synthetic construct
  source 1..8787: mol_type = other RNA
aggaaataagagagaaaagaagagtaagaagaaatataagagccaccatggcccctaagaagaagcgtaaagtgagccggatgaaccacgaccaggagttcgacccccctaaggtgtaccctcccgtccccgccgagaagagaaagcccatccgggtcctgagcctgttcgatggcatcgccaccggtctgctggtgctgaaggacctgggcatccaggtggataggtacattgcctccgaggtgtgcgaggactccatcaccgtgggaatggtgcgtcatcagggcaagatcatgtacgtgggcgacgtgcggagcgtgacacagaagcatatccaggagtggggccctttcgacctggtgatcggcggcagcccttgcaatgacctgagcatcgtgaacccagcccggaagggcctgtacgagggaaccggcagactgttcttcgagttttacagactgctgcacgacgcccggcctaaggaaggcgacgaccggcccttcttttggctgttcgagaatgtggtggccatgggagtcagcgacaagcgggatattagccggttcctggagagcaaccccgtgatgatcgatgccaaggaagtgagcgccgcccaccgggccagatacttctggggcaatctgcctggcatgaacagacccctggccagcaccgtgaacgacaagctggagctgcaggagtgcctggagcacggccggatcgccaagttcagcaaggtgagaaccatcaccacccgaagcaacagcatcaaacaaggcaaggaccagcactttcctgtgttcatgaacgagaaggaggacatcctgtggtgtaccgagatggagagagtgttcgggttcccagtccactacacagatgtcagcaacatgtctagactggccagacagagactgctgggaagaagctggtccgtccctgtgatcagacacctgttcgcccctctgaaggagtacttcgcctgcgtgagcagcggcaacagcaacgccaacagccggggccccagcttctctagcggcctggtgccactgtccctgagagggagccacatgggccccatggagatctacaaaaccgtgagcgcctggaagcggcagcctgtgcgcgtgctgagcctgtttcggaatatcgataaagtcctgaaaagcctgggattcctggagagcggctctggctccggcggtggcaccctgaagtacgtggaggatgtgacaaacgtggtcagacgggatgtggagaagtggggccccttcgatctggtgtacggcagcacccaacccctgggcagctcttgtgaccggtgccctggctggtacatgtttcagttccaccggatcctgcagtacgccctgccgagacaggagtcccagcggccattcttttggattttcatggacaacttgctgctgaccgaggatgaccaggaaactaccactcggttcctgcagaccgaagccgtgaccctgcaggacgtgagaggccgggactaccagaacgccatgcgggtgtggtccaacatccctggactgaaaagcaagcacgcacctctgacccctaaagaagaggagtacctgcaggcccaggtgcggagcagaagcaagctggacgcccctaaggtggatctgctggtgaagaattgcctcctgcccctgagagagtacttcaagtatttcagccagaatagtctgcccctgggaggcagcggcggcggcagggccctgacccccgtgagcatgaccgccgaggccaagtgcaccggcttcacccagggcagcgtgaccttcgaggacgtggccatctacttcagccaggaggagtggggcctgctggacgaggcccagaggctgctgtacagggacgtgatgctggagaacttcgccctgctgaccagcctggtgtgctggcacggcatggaggacgaggagacccccgagcagagcgtgagcgtgaacggcggcggcccaagcagcggcgcccctcctcccagcggcggcaggcggcccaagcagcggcgcccctcctcccagcggcggcagcccagccggctccccaacctctaccgaggagggcacctctgagtccgccacccccgagagcggccctggcacctccaccgagcccagcgagggcagcgcacccggcagccctgccggcagccccacctccacagaggagggaaccagcaccgagcccagcgaaggcagcgccccaggcaccagcaccgagcctagtgagcaggagattaaacggatcaacaagatcagaagaagacttgtgaaagacagcaacaccaagaaggccggcaagacaggccccatgaaaaccctgctggttagagtgatgacacccgatctgagagagcggctggaaaacctgagaaagaagcctgaaaatatcccccagcccatcagcaatacatctagagccaacctgaataagctgctgaccgattacaccgaaatgaagaaggcgatcctgcatgtgtactgggaagagttccagaaggaccctgtgggcctgatgagccgggtggcccagcctgccagcaagaagatcgatcagaacaagctgaaacctgagatggacgagaagggcaacctgaccaccgccggctttgcctgctctcagtgtggccagcccctgttcgtgtacaagctggagcaggtgtctgagaagggcaaggcttacaccaactacttcggacggtgcaatgtggccgagcacgaaaagctgatcctgctggcccagctgaagcccgagaaggatagcgacgaagccgtgacatatagcctgggaaagtttgggcagagggccctggatttctacagcattcatgtgaccaaggagtccacccaccccgtgaagcccctggcccagatcgccggaaacagatacgcctccggacctgtgggaaaggccctgagcgacgcatgtatgggcacaatcgcctccttcctgtctaagtaccaggacatcatcatcgaacaccagaaggtggtgaagggcaaccagaagagactggagagcctgcgggagctggccggcaaggaaaacctggaataccctagcgtgaccctgccacctcagcctcacaccaaggagggcgttgatgcctacaacgaagtgatcgcccgggtgcgaatgtgggtgaacctgaacctgtggcagaagctgaagctaagcagagatgatgccaagcctctgctgagactgaagggattcccttcctttcctctggtcgagagacaggccaacgaagtggactggtgggacatggtgtgtaacgtgaagaagctgatcaacgagaaaaaggaggatggcaaggtgttttggcagaatctggctggctacaagagacaggaagccctgagaccatacctgagcagcgaggaagatcggaagaagggaaagaaattcgctcggtaccagctgggcgacctgctgctgcacctggaaaagaagcacggcgaggactggggaaaggtgtacgacgaggcctgggagcggattgacaagaaagtggaaggcctgagcaagcacatcaagctggaagaggaacggagaagcgaggacgcccagagcaaggccgccctgaccgactggctgcgggctaaggccagcttcgtgatcgagggcctgaaggaggccgacaaggacgagttctgcagatgcgagctgaagctgcagaagtggtacggggacctgcggggaaagcccttcgccatcgaagccgagaacagcatcctggacatcagcggcttcagcaagcagtacaactgtgccttcatctggcagaaggacggcgtgaagaagctgaacctgtacctgatcatcaactacttcaagggcggcaagctgcggttcaagaagatcaaacctgaagccttcgaagccaacagattctacaccgtgatcaacaaaaagagcggcgagatcgtgcccatggaggtgaacttcaacttcgacgaccccaacctgatcatcctgcctctggcctttggcaagagacagggcagagaattcatctggaacgacctgctgtccctggaaaccggcagcctgaagctggccaacggaagagtgatcgagaagacactgtacaacagaagaacccggcaggatgagcctgccctgttcgtggccctgaccttcgagcggcgggaggtcctggactcctccaatatcaaaccaatgaacctgatcggcgtggcaagaggcgaaaacatccccgccgtgatcgccctgaccgaccccgagggctgcccactgagccggtttaaggatagcctgggaaacccaacccacatcctgagaatcggcgagagctataaggagaagcagcggaccatccaggccaagaaggaggtggagcagcggagagccggcggctacagccggaagtacgccagcaaagccaagaatctggcagacgatatggtgagaaacaccgctagagatctgctgtactacgccgtgacccaggatgccatgctgatcttcgccaacctgagccggggcttcggccggcagggcaagcggaccttcatggccgagagacagtacacacggatggaggactggctgaccgccaagctggcctacgagggcctgagcaagacctacctgtccaagacactggcccagtacacctccaagacatgcagcaactgtgggtttaccatcaccagcgccgactacgacagggtgctggagaagctgaagaagacagcaacaggctggatgaccacaattaacggcaaggagctgaaggtggagggccagattacctactacaacagatacaagagacagaacgtagtcaaggacctgtccgtcgagctggatagactgagcgaagaatctgtgaacaacgacatctcctcctggacaaagggcagaagcggagaagctctgagcctcctgaagaaaagattctcccatagacccgtgcaggagaagttcgtgtgcctgaactgcggcttcgagacacacgcagccgagcaagccgccctgaacatcgccagatcctggctgttcctgcggagccaggagtacaagaaataccagacaaacaagacaaccggcaacaccgataagagagccttcgtcgagacctggcagtccttttaccggaagaagcttaaggaggtgtggaaacctgccgtgcggtctggcggatctggcggaggctccaccagccccaagaaaaagagaaaagtctaagctgccttctgcggggcttgccttctggccatgcccttcttctctcccttgcacctgtacctcttggtctttgaataaagcctgagtaggaaggctagcaaaaaaaaaaaaaaaaaaaaaaaaaaaaaaaaaaaaaaaaaaaaaaaaaaaaaaaaaaaaaaaaaaaaaaaaaaaaaaaagcccagccggctccccaacctctaccgaggagggcacctctgagtccgccacccccgagagcggccctggcacctccaccgagcccagcgagggcagcgcacccggcagccctgccggcagccccacctccacagaggagggaaccagcaccgagcccagcgaaggcagcgccccaggcaccagcaccgagcctagtgagcaggagattaaacggatcaacaagatcagaagaagacttgtgaaagacagcaacaccaagaaggccggcaagacaggccccatgaaaaccctgctggttagagtgatgacacccgatctgagagagcggctggaaaacctgagaaagaagcctgaaaatatcccccagcccatcagcaatacatctagagccaacctgaataagctgctgaccgattacaccgaaatgaagaaggcgatcctgcatgtgtactgggaagagttccagaaggaccctgtgggcctgatgagccgggtggcccagcctgccagcaagaagatcgatcagaacaagctgaaacctgagatggacgagaagggcaacctgaccaccgccggctttgcctgctctcagtgtggccagcccctgttcgtgtacaagctggagcaggtgtctgagaagggcaaggcttacaccaactacttcggacggtgcaatgtggccgagcacgaaaagctgatcctgctggcccagctgaagcccgagaaggatagcgacgaagccgtgacatatagcctgggaaagtttgggcagagggccctggatttctacagcattcatgtgaccaaggagtccacccaccccgtgaagcccctggcccagatcgccggaaacagatacgcctccggacctgtgggaaaggccctgagcgacgcatgtatgggcacaatcgcctccttcctgtctaagtaccaggacatcatcatcgaacaccagaaggtggtgaagggcaaccagaagagactggagagcctgcgggagctggccggcaaggaaaacctggaataccctagcgtgaccctgccacctcagcctcacaccaaggagggcgttgatgcctacaacgaagtgatcgcccgggtgcgaatgtgggtgaacctgaacctgtggcagaagctgaagctaagcagagatgatgccaagcctctgctgagactgaagggattcccttcctttcctctggtcgagagacaggccaacgaagtggactggtgggacatggtgtgtaacgtgaagaagctgatcaacgagaaaaaggaggatggcaaggtgttttggcagaatctggctggctacaagagacaggaagccctgagaccatacctgagcagcgaggaagatcggaagaagggaaagaaattcgctcggtaccagctgggcgacctgctgctgcacctggaaaagaagcacggcgaggactggggaaaggtgtacgacgaggcctgggagcggattgacaagaaagtggaaggcctgagcaagcacatcaagctggaagaggaacggagaagcgaggacgcccagagcaaggccgccctgaccgactggctgcgggctaaggccagcttcgtgatcgagggcctgaaggaggccgacaaggacgagttctgcagatgcgagctgaagctgcagaagtggtacggggacctgcggggaaagcccttcgccatcgaagccgagaacagcatcctggacatcagcggcttcagcaagcagtacaactgtgccttcatctggcagaaggacggcgtgaagaagctgaacctgtacctgatcatcaactacttcaagggcggcaagctgcggttcaagaagatcaaacctgaagccttcgaagccaacagattctacaccgtgatcaacaaaaagagcggcgagatcgtgcccatggaggtgaacttcaacttcgacgaccccaacctgatcatcctgcctctggcctttggcaagagacagggcagagaattcatctggaacgacctgctgtccctggaaaccggcagcctgaagctggccaacggaagagtgatcgagaagacactgtacaacagaagaacccggcaggatgagcctgccctgttcgtggccctgaccttcgagcggcgggaggtcctggactcctccaatatcaaaccaatgaacctgatcggcgtggcaagaggcgaaaacatccccgccgtgatcgccctgaccgaccccgagggctgcccactgagccggtttaaggatagcctgggaaacccaacccacatcctgagaatcggcgagagctataaggagaagcagcggaccatccaggccaagaaggaggtggagcagcggagagccggcggctacagccggaagtacgccagcaaagccaagaatctggcagacgatatggtgagaaacaccgctagagatctgctgtactacgccgtgacccaggatgccatgctgatcttcgccaacctgagccggggcttcggccggcagggcaagcggaccttcatggccgagagacagtacacacggatggaggactggctgaccgccaagctggcctacgagggcctgagcaagacctacctgtccaagacactggcccagtacacctccaagacatgcagcaactgtgggtttaccatcaccagcgccgactacgacagggtgctggagaagctgaagaagacagcaacaggctggatgaccacaattaacggcaaggagctgaaggtggagggccagattacctactacaacagatacaagagacagaacgtagtcaaggacctgtccgtcgagctggatagactgagcgaagaatctgtgaacaacgacatctcctcctggacaaagggcagaagcggagaagctctgagcctcctgaagaaaagattctcccatagacccgtgcaggagaagttcgtgtgcctgaactgcggcttcgagacacacgcagccgagcaagccgccctgaacatcgccagatcctggctgttcctgcggagccaggagtacaagaaataccagacaaacaagacaaccggcaacaccgataagagagccttcgtcgagacctggcagtccttttaccggaagaagcttaaggaggtgtggaaacctgccgtgcggtctggcggatctggcggaggctccaccagccccaagaaaaagagaaaagtctaagctgccttctgcggggcttgccttctggccatgcccttcttctctcccttgcacctgtacctcttggtctttgaataaagcctgagtaggaaggctagcaaaaaaaaaaaaaaaaaaaaaaaaaaaaaaaaaaaaaaaaaaaaaaaaaaaaaaaaaaaaaaaaaaaaaaaaaaaaaaaa

SEQ ID NO: 9830 - RNA, 8787 nt, synthetic construct
  source 1..8787: mol_type = other RNA
aggaaataagagagaaaagaagagtaagaagaaatataagagccaccatggcccctaagaagaagcgtaaagtgagccggatgaaccacgaccaggagttcgacccccctaaggtgtaccctcccgtccccgccgagaagagaaagcccatccgggtcctgagcctgttcgatggcatcgccaccggtctgctggtgctgaaggacctgggcatccaggtggataggtacattgcctccgaggtgtgcgaggactccatcaccgtgggaatggtgcgtcatcagggcaagatcatgtacgtgggcgacgtgcggagcgtgacacagaagcatatccaggagtggggccctttcgacctggtgatcggcggcagcccttgcaatgacctgagcatcgtgaacccagcccggaagggcctgtacgagggaaccggcagactgttcttcgagttttacagactgctgcacgacgcccggcctaaggaaggcgacgaccggcccttcttttggctgttcgagaatgtggtggccatgggagtcagcgacaagcgggatattagccggttcctggagagcaaccccgtgatgatcgatgccaaggaagtgagcgccgcccaccgggccagatacttctggggcaatctgcctggcatgaacagacccctggccagcaccgtgaacgacaagctggagctgcaggagtgcctggagcacggccggatcgccaagttcagcaaggtgagaaccatcaccacccgaagcaacagcatcaaacaaggcaaggaccagcactttcctgtgttcatgaacgagaaggaggacatcctgtggtgtaccgagatggagagagtgttcgggttcccagtccactacacagatgtcagcaacatgtctagactggccagacagagactgctgggaagaagctggtccgtccctgtgatcagacacctgttcgcccctctgaaggagtacttcgcctgcgtgagcagcggcaacagcaacgccaacagccggggccccagcttctctagcggcctggtgccactgtccctgagagggagccacatgggccccatggagatctacaaaaccgtgagcgcctggaagcggcagcctgtgcgcgtgctgagcctgtttcggaatatcgataaagtcctgaaaagcctgggattcctggagagcggctctggctccggcggtggcaccctgaagtacgtggaggatgtgacaaacgtggtcagacgggatgtggagaagtggggccccttcgatctggtgtacggcagcacccaacccctgggcagctcttgtgaccggtgccctggctggtacatgtttcagttccaccggatcctgcagtacgccctgccgagacaggagtcccagcggccattcttttggattttcatggacaacttgctgctgaccgaggatgaccaggaaactaccactcggttcctgcagaccgaagccgtgaccctgcaggacgtgagaggccgggactaccagaacgccatgcgggtgtggtccaacatccctggactgaaaagcaagcacgcacctctgacccctaaagaagaggagtacctgcaggcccaggtgcggagcagaagcaagctggacgcccctaaggtggatctgctggtgaagaattgcctcctgcccctgagagagtacttcaagtatttcagccagaatagtctgcccctgggaggcagcggcggcggcgcctgcggcagcatcaccttcagggacgtggccatcgacttcagccaccaggagtgggagtacctgaacctggtgcagaagaccctgtaccaggaggtgatgatggagaactacgacaacctggtgctgctgggccacagcaagagcaagcccgacctgatcaccctgctggagcagggcaaggagccctggatgatcgtgagggaggagaccaggggcgagtgcaccgccgagctgcagagcggcggcccaagcagcggcgcccctcctcccagcggcggcaggcggcccaagcagcggcgcccctcctcccagcggcggcagcccagccggctccccaacctctaccgaggagggcacctctgagtccgccacccccgagagcggccctggcacctccaccgagcccagcgagggcagcgcacccggcagccctgccggcagccccacctccacagaggagggaaccagcaccgagcccagcgaaggcagcgccccaggcaccagcaccgagcctagtgagcaggagattaaacggatcaacaagatcagaagaagacttgtgaaagacagcaacaccaagaaggccggcaagacaggccccatgaaaaccctgctggttagagtgatgacacccgatctgagagagcggctggaaaacctgagaaagaagcctgaaaatatcccccagcccatcagcaatacatctagagccaacctgaataagctgctgaccgattacaccgaaatgaagaaggcgatcctgcatgtgtactgggaagagttccagaaggaccctgtgggcctgatgagccgggtggcccagcctgccagcaagaagatcgatcagaacaagctgaaacctgagatggacgagaagggcaacctgaccaccgccggctttgcctgctctcagtgtggccagcccctgttcgtgtacaagctggagcaggtgtctgagaagggcaaggcttacaccaactacttcggacggtgcaatgtggccgagcacgaaaagctgatcctgctggcccagctgaagcccgagaaggatagcgacgaagccgtgacatatagcctgggaaagtttgggcagagggccctggatttctacagcattcatgtgaccaaggagtccacccaccccgtgaagcccctggcccagatcgccggaaacagatacgcctccggacctgtgggaaaggccctgagcgacgcatgtatgggcacaatcgcctccttcctgtctaagtaccaggacatcatcatcgaacaccagaaggtggtgaagggcaaccagaagagactggagagcctgcgggagctggccggcaaggaaaacctggaataccctagcgtgaccctgccacctcagcctcacaccaaggagggcgttgatgcctacaacgaagtgatcgcccgggtgcgaatgtgggtgaacctgaacctgtggcagaagctgaagctaagcagagatgatgccaagcctctgctgagactgaagggattcccttcctttcctctggtcgagagacaggccaacgaagtggactggtgggacatggtgtgtaacgtgaagaagctgatcaacgagaaaaaggaggatggcaaggtgttttggcagaatctggctggctacaagagacaggaagccctgagaccatacctgagcagcgaggaagatcggaagaagggaaagaaattcgctcggtaccagctgggcgacctgctgctgcacctggaaaagaagcacggcgaggactggggaaaggtgtacgacgaggcctgggagcggattgacaagaaagtggaaggcctgagcaagcacatcaagctggaagaggaacggagaagcgaggacgcccagagcaaggccgccctgaccgactggctgcgggctaaggccagcttcgtgatcgagggcctgaaggaggccgacaaggacgagttctgcagatgcgagctgaagctgcagaagtggtacggggacctgcggggaaagcccttcgccatcgaagccgagaacagcatcctggacatcagcggcttcagcaagcagtacaactgtgccttcatctggcagaaggacggcgtgaagaagctgaacctgtacctgatcatcaactacttcaagggcggcaagctgcggttcaagaagatcaaacctgaagccttcgaagccaacagattctacaccgtgatcaacaaaaagagcggcgagatcgtgcccatggaggtgaacttcaacttcgacgaccccaacctgatcatcctgcctctggcctttggcaagagacagggcagagaattcatctggaacgacctgctgtccctggaaaccggcagcctgaagctggccaacggaagagtgatcgagaagacactgtacaacagaagaacccggcaggatgagcctgccctgttcgtggccctgaccttcgagcggcgggaggtcctggactcctccaatatcaaaccaatgaacctgatcggcgtggcaagaggcgaaaacatccccgccgtgatcgccctgaccgaccccgagggctgcccactgagccggtttaaggatagcctgggaaacccaacccacatcctgagaatcggcgagagctataaggagaagcagcggaccatccaggccaagaaggaggtggagcagcggagagccggcggctacagccggaagtacgccagcaaagccaagaatctggcagacgatatggtgagaaacaccgctagagatctgctgtactacgccgtgacccaggatgccatgctgatcttcgccaacctgagccggggcttcggccggcagggcaagcggaccttcatggccgagagacagtacacacggatggaggactggctgaccgccaagctggcctacgagggcctgagcaagacctacctgtccaagacactggcccagtacacctccaagacatgcagcaactgtgggtttaccatcaccagcgccgactacgacagggtgctggagaagctgaagaagacagcaacaggctggatgaccacaattaacggcaaggagctgaaggtggagggccagattacctactacaacagatacaagagacagaacgtagtcaaggacctgtccgtcgagctggatagactgagcgaagaatctgtgaacaacgacatctcctcctggacaaagggcagaagcggagaagctctgagcctcctgaagaaaagattctcccatagacccgtgcaggagaagttcgtgtgcctgaactgcggcttcgagacacacgcagccgagcaagccgccctgaacatcgccagatcctggctgttcctgcggagccaggagtacaagaaataccagacaaacaagacaaccggcaacaccgataagagagccttcgtcgagacctggcagtccttttaccggaagaagcttaaggaggtgtggaaacctgccgtgcggtctggcggatctggcggaggctccaccagccccaagaaaaagagaaaagtctaagctgccttctgcggggcttgccttctggccatgcccttcttctctcccttgcacctgtacctcttggtctttgaataaagcctgagtaggaaggctagcaaaaaaaaaaaaaaaaaaaaaaaaaaaaaaaaaaaaaaaaaaaaaaaaaaaaaaaaaaaaaaaaaaaaaaaaaaaaaaaagcccagccggctccccaacctctaccgaggagggcacctctgagtccgccacccccgagagcggccctggcacctccaccgagcccagcgagggcagcgcacccggcagccctgccggcagccccacctccacagaggagggaaccagcaccgagcccagcgaaggcagcgccccaggcaccagcaccgagcctagtgagcaggagattaaacggatcaacaagatcagaagaagacttgtgaaagacagcaacaccaagaaggccggcaagacaggccccatgaaaaccctgctggttagagtgatgacacccgatctgagagagcggctggaaaacctgagaaagaagcctgaaaatatcccccagcccatcagcaatacatctagagccaacctgaataagctgctgaccgattacaccgaaatgaagaaggcgatcctgcatgtgtactgggaagagttccagaaggaccctgtgggcctgatgagccgggtggcccagcctgccagcaagaagatcgatcagaacaagctgaaacctgagatggacgagaagggcaacctgaccaccgccggctttgcctgctctcagtgtggccagcccctgttcgtgtacaagctggagcaggtgtctgagaagggcaaggcttacaccaactacttcggacggtgcaatgtggccgagcacgaaaagctgatcctgctggcccagctgaagcccgagaaggatagcgacgaagccgtgacatatagcctgggaaagtttgggcagagggccctggatttctacagcattcatgtgaccaaggagtccacccaccccgtgaagcccctggcccagatcgccggaaacagatacgcctccggacctgtgggaaaggccctgagcgacgcatgtatgggcacaatcgcctccttcctgtctaagtaccaggacatcatcatcgaacaccagaaggtggtgaagggcaaccagaagagactggagagcctgcgggagctggccggcaaggaaaacctggaataccctagcgtgaccctgccacctcagcctcacaccaaggagggcgttgatgcctacaacgaagtgatcgcccgggtgcgaatgtgggtgaacctgaacctgtggcagaagctgaagctaagcagagatgatgccaagcctctgctgagactgaagggattcccttcctttcctctggtcgagagacaggccaacgaagtggactggtgggacatggtgtgtaacgtgaagaagctgatcaacgagaaaaaggaggatggcaaggtgttttggcagaatctggctggctacaagagacaggaagccctgagaccatacctgagcagcgaggaagatcggaagaagggaaagaaattcgctcggtaccagctgggcgacctgctgctgcacctggaaaagaagcacggcgaggactggggaaaggtgtacgacgaggcctgggagcggattgacaagaaagtggaaggcctgagcaagcacatcaagctggaagaggaacggagaagcgaggacgcccagagcaaggccgccctgaccgactggctgcgggctaaggccagcttcgtgatcgagggcctgaaggaggccgacaaggacgagttctgcagatgcgagctgaagctgcagaagtggtacggggacctgcggggaaagcccttcgccatcgaagccgagaacagcatcctggacatcagcggcttcagcaagcagtacaactgtgccttcatctggcagaaggacggcgtgaagaagctgaacctgtacctgatcatcaactacttcaagggcggcaagctgcggttcaagaagatcaaacctgaagccttcgaagccaacagattctacaccgtgatcaacaaaaagagcggcgagatcgtgcccatggaggtgaacttcaacttcgacgaccccaacctgatcatcctgcctctggcctttggcaagagacagggcagagaattcatctggaacgacctgctgtccctggaaaccggcagcctgaagctggccaacggaagagtgatcgagaagacactgtacaacagaagaacccggcaggatgagcctgccctgttcgtggccctgaccttcgagcggcgggaggtcctggactcctccaatatcaaaccaatgaacctgatcggcgtggcaagaggcgaaaacatccccgccgtgatcgccctgaccgaccccgagggctgcccactgagccggtttaaggatagcctgggaaacccaacccacatcctgagaatcggcgagagctataaggagaagcagcggaccatccaggccaagaaggaggtggagcagcggagagccggcggctacagccggaagtacgccagcaaagccaagaatctggcagacgatatggtgagaaacaccgctagagatctgctgtactacgccgtgacccaggatgccatgctgatcttcgccaacctgagccggggcttcggccggcagggcaagcggaccttcatggccgagagacagtacacacggatggaggactggctgaccgccaagctggcctacgagggcctgagcaagacctacctgtccaagacactggcccagtacacctccaagacatgcagcaactgtgggtttaccatcaccagcgccgactacgacagggtgctggagaagctgaagaagacagcaacaggctggatgaccacaattaacggcaaggagctgaaggtggagggccagattacctactacaacagatacaagagacagaacgtagtcaaggacctgtccgtcgagctggatagactgagcgaagaatctgtgaacaacgacatctcctcctggacaaagggcagaagcggagaagctctgagcctcctgaagaaaagattctcccatagacccgtgcaggagaagttcgtgtgcctgaactgcggcttcgagacacacgcagccgagcaagccgccctgaacatcgccagatcctggctgttcctgcggagccaggagtacaagaaataccagacaaacaagacaaccggcaacaccgataagagagccttcgtcgagacctggcagtccttttaccggaagaagcttaaggaggtgtggaaacctgccgtgcggtctggcggatctggcggaggctccaccagccccaagaaaaagagaaaagtctaagctgccttctgcggggcttgccttctggccatgcccttcttctctcccttgcacctgtacctcttggtctttgaataaagcctgagtaggaaggctagcaaaaaaaaaaaaaaaaaaaaaaaaaaaaaaaaaaaaaaaaaaaaaaaaaaaaaaaaaaaaaaaaaaaaaaaaaaaaaaaa

SEQ ID NO: 9831 - RNA, 8787 nt, synthetic construct
  source 1..8787: mol_type = other RNA
aggaaataagagagaaaagaagagtaagaagaaatataagagccaccatggcccctaagaagaagcgtaaagtgagccggatgaaccacgaccaggagttcgacccccctaaggtgtaccctcccgtccccgccgagaagagaaagcccatccgggtcctgagcctgttcgatggcatcgccaccggtctgctggtgctgaaggacctgggcatccaggtggataggtacattgcctccgaggtgtgcgaggactccatcaccgtgggaatggtgcgtcatcagggcaagatcatgtacgtgggcgacgtgcggagcgtgacacagaagcatatccaggagtggggccctttcgacctggtgatcggcggcagcccttgcaatgacctgagcatcgtgaacccagcccggaagggcctgtacgagggaaccggcagactgttcttcgagttttacagactgctgcacgacgcccggcctaaggaaggcgacgaccggcccttcttttggctgttcgagaatgtggtggccatgggagtcagcgacaagcgggatattagccggttcctggagagcaaccccgtgatgatcgatgccaaggaagtgagcgccgcccaccgggccagatacttctggggcaatctgcctggcatgaacagacccctggccagcaccgtgaacgacaagctggagctgcaggagtgcctggagcacggccggatcgccaagttcagcaaggtgagaaccatcaccacccgaagcaacagcatcaaacaaggcaaggaccagcactttcctgtgttcatgaacgagaaggaggacatcctgtggtgtaccgagatggagagagtgttcgggttcccagtccactacacagatgtcagcaacatgtctagactggccagacagagactgctgggaagaagctggtccgtccctgtgatcagacacctgttcgcccctctgaaggagtacttcgcctgcgtgagcagcggcaacagcaacgccaacagccggggccccagcttctctagcggcctggtgccactgtccctgagagggagccacatgggccccatggagatctacaaaaccgtgagcgcctggaagcggcagcctgtgcgcgtgctgagcctgtttcggaatatcgataaagtcctgaaaagcctgggattcctggagagcggctctggctccggcggtggcaccctgaagtacgtggaggatgtgacaaacgtggtcagacgggatgtggagaagtggggccccttcgatctggtgtacggcagcacccaacccctgggcagctcttgtgaccggtgccctggctggtacatgtttcagttccaccggatcctgcagtacgccctgccgagacaggagtcccagcggccattcttttggattttcatggacaacttgctgctgaccgaggatgaccaggaaactaccactcggttcctgcagaccgaagccgtgaccctgcaggacgtgagaggccgggactaccagaacgccatgcgggtgtggtccaacatccctggactgaaaagcaagcacgcacctctgacccctaaagaagaggagtacctgcaggcccaggtgcggagcagaagcaagctggacgcccctaaggtggatctgctggtgaagaattgcctcctgcccctgagagagtacttcaagtatttcagccagaatagtctgcccctgggaggcagcggcggcggcgacaaggccctgatggccttccacgacgtggccgtggccttcagccagatggagtgggagctgctgagccccgcccagaggatcctgtacagggaggtgatgctggagaactacagccacctggtgagcctgggcatcgccttcagcaagcccaagctgatcacccagctggagcagggcgccgagccctggagggacggcagcggctgcttcctggacctgtgccccgccgagcccaggaccggcggcccaagcagcggcgcccctcctcccagcggcggcaggcggcccaagcagcggcgcccctcctcccagcggcggcagcccagccggctccccaacctctaccgaggagggcacctctgagtccgccacccccgagagcggccctggcacctccaccgagcccagcgagggcagcgcacccggcagccctgccggcagccccacctccacagaggagggaaccagcaccgagcccagcgaaggcagcgccccaggcaccagcaccgagcctagtgagcaggagattaaacggatcaacaagatcagaagaagacttgtgaaagacagcaacaccaagaaggccggcaagacaggccccatgaaaaccctgctggttagagtgatgacacccgatctgagagagcggctggaaaacctgagaaagaagcctgaaaatatcccccagcccatcagcaatacatctagagccaacctgaataagctgctgaccgattacaccgaaatgaagaaggcgatcctgcatgtgtactgggaagagttccagaaggaccctgtgggcctgatgagccgggtggcccagcctgccagcaagaagatcgatcagaacaagctgaaacctgagatggacgagaagggcaacctgaccaccgccggctttgcctgctctcagtgtggccagcccctgttcgtgtacaagctggagcaggtgtctgagaagggcaaggcttacaccaactacttcggacggtgcaatgtggccgagcacgaaaagctgatcctgctggcccagctgaagcccgagaaggatagcgacgaagccgtgacatatagcctgggaaagtttgggcagagggccctggatttctacagcattcatgtgaccaaggagtccacccaccccgtgaagcccctggcccagatcgccggaaacagatacgcctccggacctgtgggaaaggccctgagcgacgcatgtatgggcacaatcgcctccttcctgtctaagtaccaggacatcatcatcgaacaccagaaggtggtgaagggcaaccagaagagactggagagcctgcgggagctggccggcaaggaaaacctggaataccctagcgtgaccctgccacctcagcctcacaccaaggagggcgttgatgcctacaacgaagtgatcgcccgggtgcgaatgtgggtgaacctgaacctgtggcagaagctgaagctaagcagagatgatgccaagcctctgctgagactgaagggattcccttcctttcctctggtcgagagacaggccaacgaagtggactggtgggacatggtgtgtaacgtgaagaagctgatcaacgagaaaaaggaggatggcaaggtgttttggcagaatctggctggctacaagagacaggaagccctgagaccatacctgagcagcgaggaagatcggaagaagggaaagaaattcgctcggtaccagctgggcgacctgctgctgcacctggaaaagaagcacggcgaggactggggaaaggtgtacgacgaggcctgggagcggattgacaagaaagtggaaggcctgagcaagcacatcaagctggaagaggaacggagaagcgaggacgcccagagcaaggccgccctgaccgactggctgcgggctaaggccagcttcgtgatcgagggcctgaaggaggccgacaaggacgagttctgcagatgcgagctgaagctgcagaagtggtacggggacctgcggggaaagcccttcgccatcgaagccgagaacagcatcctggacatcagcggcttcagcaagcagtacaactgtgccttcatctggcagaaggacggcgtgaagaagctgaacctgtacctgatcatcaactacttcaagggcggcaagctgcggttcaagaagatcaaacctgaagccttcgaagccaacagattctacaccgtgatcaacaaaaagagcggcgagatcgtgcccatggaggtgaacttcaacttcgacgaccccaacctgatcatcctgcctctggcctttggcaagagacagggcagagaattcatctggaacgacctgctgtccctggaaaccggcagcctgaagctggccaacggaagagtgatcgagaagacactgtacaacagaagaacccggcaggatgagcctgccctgttcgtggccctgaccttcgagcggcgggaggtcctggactcctccaatatcaaaccaatgaacctgatcggcgtggcaagaggcgaaaacatccccgccgtgatcgccctgaccgaccccgagggctgcccactgagccggtttaaggatagcctgggaaacccaacccacatcctgagaatcggcgagagctataaggagaagcagcggaccatccaggccaagaaggaggtggagcagcggagagccggcggctacagccggaagtacgccagcaaagccaagaatctggcagacgatatggtgagaaacaccgctagagatctgctgtactacgccgtgacccaggatgccatgctgatcttcgccaacctgagccggggcttcggccggcagggcaagcggaccttcatggccgagagacagtacacacggatggaggactggctgaccgccaagctggcctacgagggcctgagcaagacctacctgtccaagacactggcccagtacacctccaagacatgcagcaactgtgggtttaccatcaccagcgccgactacgacagggtgctggagaagctgaagaagacagcaacaggctggatgaccacaattaacggcaaggagctgaaggtggagggccagattacctactacaacagatacaagagacagaacgtagtcaaggacctgtccgtcgagctggatagactgagcgaagaatctgtgaacaacgacatctcctcctggacaaagggcagaagcggagaagctctgagcctcctgaagaaaagattctcccatagacccgtgcaggagaagttcgtgtgcctgaactgcggcttcgagacacacgcagccgagcaagccgccctgaacatcgccagatcctggctgttcctgcggagccaggagtacaagaaataccagacaaacaagacaaccggcaacaccgataagagagccttcgtcgagacctggcagtccttttaccggaagaagcttaaggaggtgtggaaacctgccgtgcggtctggcggatctggcggaggctccaccagccccaagaaaaagagaaaagtctaagctgccttctgcggggcttgccttctggccatgcccttcttctctcccttgcacctgtacctcttggtctttgaataaagcctgagtaggaaggctagcaaaaaaaaaaaaaaaaaaaaaaaaaaaaaaaaaaaaaaaaaaaaaaaaaaaaaaaaaaaaaaaaaaaaaaaaaaaaaaaagcccagccggctccccaacctctaccgaggagggcacctctgagtccgccacccccgagagcggccctggcacctccaccgagcccagcgagggcagcgcacccggcagccctgccggcagccccacctccacagaggagggaaccagcaccgagcccagcgaaggcagcgccccaggcaccagcaccgagcctagtgagcaggagattaaacggatcaacaagatcagaagaagacttgtgaaagacagcaacaccaagaaggccggcaagacaggccccatgaaaaccctgctggttagagtgatgacacccgatctgagagagcggctggaaaacctgagaaagaagcctgaaaatatcccccagcccatcagcaatacatctagagccaacctgaataagctgctgaccgattacaccgaaatgaagaaggcgatcctgcatgtgtactgggaagagttccagaaggaccctgtgggcctgatgagccgggtggcccagcctgccagcaagaagatcgatcagaacaagctgaaacctgagatggacgagaagggcaacctgaccaccgccggctttgcctgctctcagtgtggccagcccctgttcgtgtacaagctggagcaggtgtctgagaagggcaaggcttacaccaactacttcggacggtgcaatgtggccgagcacgaaaagctgatcctgctggcccagctgaagcccgagaaggatagcgacgaagccgtgacatatagcctgggaaagtttgggcagagggccctggatttctacagcattcatgtgaccaaggagtccacccaccccgtgaagcccctggcccagatcgccggaaacagatacgcctccggacctgtgggaaaggccctgagcgacgcatgtatgggcacaatcgcctccttcctgtctaagtaccaggacatcatcatcgaacaccagaaggtggtgaagggcaaccagaagagactggagagcctgcgggagctggccggcaaggaaaacctggaataccctagcgtgaccctgccacctcagcctcacaccaaggagggcgttgatgcctacaacgaagtgatcgcccgggtgcgaatgtgggtgaacctgaacctgtggcagaagctgaagctaagcagagatgatgccaagcctctgctgagactgaagggattcccttcctttcctctggtcgagagacaggccaacgaagtggactggtgggacatggtgtgtaacgtgaagaagctgatcaacgagaaaaaggaggatggcaaggtgttttggcagaatctggctggctacaagagacaggaagccctgagaccatacctgagcagcgaggaagatcggaagaagggaaagaaattcgctcggtaccagctgggcgacctgctgctgcacctggaaaagaagcacggcgaggactggggaaaggtgtacgacgaggcctgggagcggattgacaagaaagtggaaggcctgagcaagcacatcaagctggaagaggaacggagaagcgaggacgcccagagcaaggccgccctgaccgactggctgcgggctaaggccagcttcgtgatcgagggcctgaaggaggccgacaaggacgagttctgcagatgcgagctgaagctgcagaagtggtacggggacctgcggggaaagcccttcgccatcgaagccgagaacagcatcctggacatcagcggcttcagcaagcagtacaactgtgccttcatctggcagaaggacggcgtgaagaagctgaacctgtacctgatcatcaactacttcaagggcggcaagctgcggttcaagaagatcaaacctgaagccttcgaagccaacagattctacaccgtgatcaacaaaaagagcggcgagatcgtgcccatggaggtgaacttcaacttcgacgaccccaacctgatcatcctgcctctggcctttggcaagagacagggcagagaattcatctggaacgacctgctgtccctggaaaccggcagcctgaagctggccaacggaagagtgatcgagaagacactgtacaacagaagaacccggcaggatgagcctgccctgttcgtggccctgaccttcgagcggcgggaggtcctggactcctccaatatcaaaccaatgaacctgatcggcgtggcaagaggcgaaaacatccccgccgtgatcgccctgaccgaccccgagggctgcccactgagccggtttaaggatagcctgggaaacccaacccacatcctgagaatcggcgagagctataaggagaagcagcggaccatccaggccaagaaggaggtggagcagcggagagccggcggctacagccggaagtacgccagcaaagccaagaatctggcagacgatatggtgagaaacaccgctagagatctgctgtactacgccgtgacccaggatgccatgctgatcttcgccaacctgagccggggcttcggccggcagggcaagcggaccttcatggccgagagacagtacacacggatggaggactggctgaccgccaagctggcctacgagggcctgagcaagacctacctgtccaagacactggcccagtacacctccaagacatgcagcaactgtgggtttaccatcaccagcgccgactacgacagggtgctggagaagctgaagaagacagcaacaggctggatgaccacaattaacggcaaggagctgaaggtggagggccagattacctactacaacagatacaagagacagaacgtagtcaaggacctgtccgtcgagctggatagactgagcgaagaatctgtgaacaacgacatctcctcctggacaaagggcagaagcggagaagctctgagcctcctgaagaaaagattctcccatagacccgtgcaggagaagttcgtgtgcctgaactgcggcttcgagacacacgcagccgagcaagccgccctgaacatcgccagatcctggctgttcctgcggagccaggagtacaagaaataccagacaaacaagacaaccggcaacaccgataagagagccttcgtcgagacctggcagtccttttaccggaagaagcttaaggaggtgtggaaacctgccgtgcggtctggcggatctggcggaggctccaccagccccaagaaaaagagaaaagtctaagctgccttctgcggggcttgccttctggccatgcccttcttctctcccttgcacctgtacctcttggtctttgaataaagcctgagtaggaaggctagcaaaaaaaaaaaaaaaaaaaaaaaaaaaaaaaaaaaaaaaaaaaaaaaaaaaaaaaaaaaaaaaaaaaaaaaaaaaaaaaa

SEQ ID NO: 9832 - RNA, 8823 nt, synthetic construct
  source 1..8823: mol_type = other RNA
aggaaataagagagaaaagaagagtaagaagaaatataagagccaccatggcccctaagaagaagcgtaaagtgagccggatgaaccacgaccaggagttcgacccccctaaggtgtaccctcccgtccccgccgagaagagaaagcccatccgggtcctgagcctgttcgatggcatcgccaccggtctgctggtgctgaaggacctgggcatccaggtggataggtacattgcctccgaggtgtgcgaggactccatcaccgtgggaatggtgcgtcatcagggcaagatcatgtacgtgggcgacgtgcggagcgtgacacagaagcatatccaggagtggggccctttcgacctggtgatcggcggcagcccttgcaatgacctgagcatcgtgaacccagcccggaagggcctgtacgagggaaccggcagactgttcttcgagttttacagactgctgcacgacgcccggcctaaggaaggcgacgaccggcccttcttttggctgttcgagaatgtggtggccatgggagtcagcgacaagcgggatattagccggttcctggagagcaaccccgtgatgatcgatgccaaggaagtgagcgccgcccaccgggccagatacttctggggcaatctgcctggcatgaacagacccctggccagcaccgtgaacgacaagctggagctgcaggagtgcctggagcacggccggatcgccaagttcagcaaggtgagaaccatcaccacccgaagcaacagcatcaaacaaggcaaggaccagcactttcctgtgttcatgaacgagaaggaggacatcctgtggtgtaccgagatggagagagtgttcgggttcccagtccactacacagatgtcagcaacatgtctagactggccagacagagactgctgggaagaagctggtccgtccctgtgatcagacacctgttcgcccctctgaaggagtacttcgcctgcgtgagcagcggcaacagcaacgccaacagccggggccccagcttctctagcggcctggtgccactgtccctgagagggagccacatgggccccatggagatctacaaaaccgtgagcgcctggaagcggcagcctgtgcgcgtgctgagcctgtttcggaatatcgataaagtcctgaaaagcctgggattcctggagagcggctctggctccggcggtggcaccctgaagtacgtggaggatgtgacaaacgtggtcagacgggatgtggagaagtggggccccttcgatctggtgtacggcagcacccaacccctgggcagctcttgtgaccggtgccctggctggtacatgtttcagttccaccggatcctgcagtacgccctgccgagacaggagtcccagcggccattcttttggattttcatggacaacttgctgctgaccgaggatgaccaggaaactaccactcggttcctgcagaccgaagccgtgaccctgcaggacgtgagaggccgggactaccagaacgccatgcgggtgtggtccaacatccctggactgaaaagcaagcacgcacctctgacccctaaagaagaggagtacctgcaggcccaggtgcggagcagaagcaagctggacgcccctaaggtggatctgctggtgaagaattgcctcctgcccctgagagagtacttcaagtatttcagccagaatagtctgcccctgggaggcagcggcggcggcgtgagcttcgaggaggtggccgtgcacttcagcgaggaggagtggagccagctggaccccgcccagaaggccctgcacggcgaggtgatgctggagaacagcaggaacctggccagcctgggctacaacgagcacggcaacaagaactgcaaggagcagtgccagcccgtggaccccaacgagcagaacaggaacttcgccgaccagatgcagaccaagatcgacgagaccaaccagagccagagcgaggtggagaagaccttccacagcacccaccacggcggcccaagcagcggcgcccctcctcccagcggcggcaggcggcccaagcagcggcgcccctcctcccagcggcggcagcccagccggctccccaacctctaccgaggagggcacctctgagtccgccacccccgagagcggccctggcacctccaccgagcccagcgagggcagcgcacccggcagccctgccggcagccccacctccacagaggagggaaccagcaccgagcccagcgaaggcagcgccccaggcaccagcaccgagcctagtgagcaggagattaaacggatcaacaagatcagaagaagacttgtgaaagacagcaacaccaagaaggccggcaagacaggccccatgaaaaccctgctggttagagtgatgacacccgatctgagagagcggctggaaaacctgagaaagaagcctgaaaatatcccccagcccatcagcaatacatctagagccaacctgaataagctgctgaccgattacaccgaaatgaagaaggcgatcctgcatgtgtactgggaagagttccagaaggaccctgtgggcctgatgagccgggtggcccagcctgccagcaagaagatcgatcagaacaagctgaaacctgagatggacgagaagggcaacctgaccaccgccggctttgcctgctctcagtgtggccagcccctgttcgtgtacaagctggagcaggtgtctgagaagggcaaggcttacaccaactacttcggacggtgcaatgtggccgagcacgaaaagctgatcctgctggcccagctgaagcccgagaaggatagcgacgaagccgtgacatatagcctgggaaagtttgggcagagggccctggatttctacagcattcatgtgaccaaggagtccacccaccccgtgaagcccctggcccagatcgccggaaacagatacgcctccggacctgtgggaaaggccctgagcgacgcatgtatgggcacaatcgcctccttcctgtctaagtaccaggacatcatcatcgaacaccagaaggtggtgaagggcaaccagaagagactggagagcctgcgggagctggccggcaaggaaaacctggaataccctagcgtgaccctgccacctcagcctcacaccaaggagggcgttgatgcctacaacgaagtgatcgcccgggtgcgaatgtgggtgaacctgaacctgtggcagaagctgaagctaagcagagatgatgccaagcctctgctgagactgaagggattcccttcctttcctctggtcgagagacaggccaacgaagtggactggtgggacatggtgtgtaacgtgaagaagctgatcaacgagaaaaaggaggatggcaaggtgttttggcagaatctggctggctacaagagacaggaagccctgagaccatacctgagcagcgaggaagatcggaagaagggaaagaaattcgctcggtaccagctgggcgacctgctgctgcacctggaaaagaagcacggcgaggactggggaaaggtgtacgacgaggcctgggagcggattgacaagaaagtggaaggcctgagcaagcacatcaagctggaagaggaacggagaagcgaggacgcccagagcaaggccgccctgaccgactggctgcgggctaaggccagcttcgtgatcgagggcctgaaggaggccgacaaggacgagttctgcagatgcgagctgaagctgcagaagtggtacggggacctgcggggaaagcccttcgccatcgaagccgagaacagcatcctggacatcagcggcttcagcaagcagtacaactgtgccttcatctggcagaaggacggcgtgaagaagctgaacctgtacctgatcatcaactacttcaagggcggcaagctgcggttcaagaagatcaaacctgaagccttcgaagccaacagattctacaccgtgatcaacaaaaagagcggcgagatcgtgcccatggaggtgaacttcaacttcgacgaccccaacctgatcatcctgcctctggcctttggcaagagacagggcagagaattcatctggaacgacctgctgtccctggaaaccggcagcctgaagctggccaacggaagagtgatcgagaagacactgtacaacagaagaacccggcaggatgagcctgccctgttcgtggccctgaccttcgagcggcgggaggtcctggactcctccaatatcaaaccaatgaacctgatcggcgtggcaagaggcgaaaacatccccgccgtgatcgccctgaccgaccccgagggctgcccactgagccggtttaaggatagcctgggaaacccaacccacatcctgagaatcggcgagagctataaggagaagcagcggaccatccaggccaagaaggaggtggagcagcggagagccggcggctacagccggaagtacgccagcaaagccaagaatctggcagacgatatggtgagaaacaccgctagagatctgctgtactacgccgtgacccaggatgccatgctgatcttcgccaacctgagccggggcttcggccggcagggcaagcggaccttcatggccgagagacagtacacacggatggaggactggctgaccgccaagctggcctacgagggcctgagcaagacctacctgtccaagacactggcccagtacacctccaagacatgcagcaactgtgggtttaccatcaccagcgccgactacgacagggtgctggagaagctgaagaagacagcaacaggctggatgaccacaattaacggcaaggagctgaaggtggagggccagattacctactacaacagatacaagagacagaacgtagtcaaggacctgtccgtcgagctggatagactgagcgaagaatctgtgaacaacgacatctcctcctggacaaagggcagaagcggagaagctctgagcctcctgaagaaaagattctcccatagacccgtgcaggagaagttcgtgtgcctgaactgcggcttcgagacacacgcagccgagcaagccgccctgaacatcgccagatcctggctgttcctgcggagccaggagtacaagaaataccagacaaacaagacaaccggcaacaccgataagagagccttcgtcgagacctggcagtccttttaccggaagaagcttaaggaggtgtggaaacctgccgtgcggtctggcggatctggcggaggctccaccagccccaagaaaaagagaaaagtctaagctgccttctgcggggcttgccttctggccatgcccttcttctctcccttgcacctgtacctcttggtctttgaataaagcctgagtaggaaggctagcaaaaaaaaaaaaaaaaaaaaaaaaaaaaaaaaaaaaaaaaaaaaaaaaaaaaaaaaaaaaaaaaaaaaaaaaaaaaaaaagcccagccggctccccaacctctaccgaggagggcacctctgagtccgccacccccgagagcggccctggcacctccaccgagcccagcgagggcagcgcacccggcagccctgccggcagccccacctccacagaggagggaaccagcaccgagcccagcgaaggcagcgccccaggcaccagcaccgagcctagtgagcaggagattaaacggatcaacaagatcagaagaagacttgtgaaagacagcaacaccaagaaggccggcaagacaggccccatgaaaaccctgctggttagagtgatgacacccgatctgagagagcggctggaaaacctgagaaagaagcctgaaaatatcccccagcccatcagcaatacatctagagccaacctgaataagctgctgaccgattacaccgaaatgaagaaggcgatcctgcatgtgtactgggaagagttccagaaggaccctgtgggcctgatgagccgggtggcccagcctgccagcaagaagatcgatcagaacaagctgaaacctgagatggacgagaagggcaacctgaccaccgccggctttgcctgctctcagtgtggccagcccctgttcgtgtacaagctggagcaggtgtctgagaagggcaaggcttacaccaactacttcggacggtgcaatgtggccgagcacgaaaagctgatcctgctggcccagctgaagcccgagaaggatagcgacgaagccgtgacatatagcctgggaaagtttgggcagagggccctggatttctacagcattcatgtgaccaaggagtccacccaccccgtgaagcccctggcccagatcgccggaaacagatacgcctccggacctgtgggaaaggccctgagcgacgcatgtatgggcacaatcgcctccttcctgtctaagtaccaggacatcatcatcgaacaccagaaggtggtgaagggcaaccagaagagactggagagcctgcgggagctggccggcaaggaaaacctggaataccctagcgtgaccctgccacctcagcctcacaccaaggagggcgttgatgcctacaacgaagtgatcgcccgggtgcgaatgtgggtgaacctgaacctgtggcagaagctgaagctaagcagagatgatgccaagcctctgctgagactgaagggattcccttcctttcctctggtcgagagacaggccaacgaagtggactggtgggacatggtgtgtaacgtgaagaagctgatcaacgagaaaaaggaggatggcaaggtgttttggcagaatctggctggctacaagagacaggaagccctgagaccatacctgagcagcgaggaagatcggaagaagggaaagaaattcgctcggtaccagctgggcgacctgctgctgcacctggaaaagaagcacggcgaggactggggaaaggtgtacgacgaggcctgggagcggattgacaagaaagtggaaggcctgagcaagcacatcaagctggaagaggaacggagaagcgaggacgcccagagcaaggccgccctgaccgactggctgcgggctaaggccagcttcgtgatcgagggcctgaaggaggccgacaaggacgagttctgcagatgcgagctgaagctgcagaagtggtacggggacctgcggggaaagcccttcgccatcgaagccgagaacagcatcctggacatcagcggcttcagcaagcagtacaactgtgccttcatctggcagaaggacggcgtgaagaagctgaacctgtacctgatcatcaactacttcaagggcggcaagctgcggttcaagaagatcaaacctgaagccttcgaagccaacagattctacaccgtgatcaacaaaaagagcggcgagatcgtgcccatggaggtgaacttcaacttcgacgaccccaacctgatcatcctgcctctggcctttggcaagagacagggcagagaattcatctggaacgacctgctgtccctggaaaccggcagcctgaagctggccaacggaagagtgatcgagaagacactgtacaacagaagaacccggcaggatgagcctgccctgttcgtggccctgaccttcgagcggcgggaggtcctggactcctccaatatcaaaccaatgaacctgatcggcgtggcaagaggcgaaaacatccccgccgtgatcgccctgaccgaccccgagggctgcccactgagccggtttaaggatagcctgggaaacccaacccacatcctgagaatcggcgagagctataaggagaagcagcggaccatccaggccaagaaggaggtggagcagcggagagccggcggctacagccggaagtacgccagcaaagccaagaatctggcagacgatatggtgagaaacaccgctagagatctgctgtactacgccgtgacccaggatgccatgctgatcttcgccaacctgagccggggcttcggccggcagggcaagcggaccttcatggccgagagacagtacacacggatggaggactggctgaccgccaagctggcctacgagggcctgagcaagacctacctgtccaagacactggcccagtacacctccaagacatgcagcaactgtgggtttaccatcaccagcgccgactacgacagggtgctggagaagctgaagaagacagcaacaggctggatgaccacaattaacggcaaggagctgaaggtggagggccagattacctactacaacagatacaagagacagaacgtagtcaaggacctgtccgtcgagctggatagactgagcgaagaatctgtgaacaacgacatctcctcctggacaaagggcagaagcggagaagctctgagcctcctgaagaaaagattctcccatagacccgtgcaggagaagttcgtgtgcctgaactgcggcttcgagacacacgcagccgagcaagccgccctgaacatcgccagatcctggctgttcctgcggagccaggagtacaagaaataccagacaaacaagacaaccggcaacaccgataagagagccttcgtcgagacctggcagtccttttaccggaagaagcttaaggaggtgtggaaacctgccgtgcggtctggcggatctggcggaggctccaccagccccaagaaaaagagaaaagtctaagctgccttctgcggggcttgccttctggccatgcccttcttctctcccttgcacctgtacctcttggtctttgaataaagcctgagtaggaaggctagcaaaaaaaaaaaaaaaaaaaaaaaaaaaaaaaaaaaaaaaaaaaaaaaaaaaaaaaaaaaaaaaaaaaaaaaaaaaaaaaa

SEQ ID NO: 9833 - RNA, 8787 nt, synthetic construct
  source 1..8787: mol_type = other RNA
aggaaataagagagaaaagaagagtaagaagaaatataagagccaccatggcccctaagaagaagcgtaaagtgagccggatgaaccacgaccaggagttcgacccccctaaggtgtaccctcccgtccccgccgagaagagaaagcccatccgggtcctgagcctgttcgatggcatcgccaccggtctgctggtgctgaaggacctgggcatccaggtggataggtacattgcctccgaggtgtgcgaggactccatcaccgtgggaatggtgcgtcatcagggcaagatcatgtacgtgggcgacgtgcggagcgtgacacagaagcatatccaggagtggggccctttcgacctggtgatcggcggcagcccttgcaatgacctgagcatcgtgaacccagcccggaagggcctgtacgagggaaccggcagactgttcttcgagttttacagactgctgcacgacgcccggcctaaggaaggcgacgaccggcccttcttttggctgttcgagaatgtggtggccatgggagtcagcgacaagcgggatattagccggttcctggagagcaaccccgtgatgatcgatgccaaggaagtgagcgccgcccaccgggccagatacttctggggcaatctgcctggcatgaacagacccctggccagcaccgtgaacgacaagctggagctgcaggagtgcctggagcacggccggatcgccaagttcagcaaggtgagaaccatcaccacccgaagcaacagcatcaaacaaggcaaggaccagcactttcctgtgttcatgaacgagaaggaggacatcctgtggtgtaccgagatggagagagtgttcgggttcccagtccactacacagatgtcagcaacatgtctagactggccagacagagactgctgggaagaagctggtccgtccctgtgatcagacacctgttcgcccctctgaaggagtacttcgcctgcgtgagcagcggcaacagcaacgccaacagccggggccccagcttctctagcggcctggtgccactgtccctgagagggagccacatgggccccatggagatctacaaaaccgtgagcgcctggaagcggcagcctgtgcgcgtgctgagcctgtttcggaatatcgataaagtcctgaaaagcctgggattcctggagagcggctctggctccggcggtggcaccctgaagtacgtggaggatgtgacaaacgtggtcagacgggatgtggagaagtggggccccttcgatctggtgtacggcagcacccaacccctgggcagctcttgtgaccggtgccctggctggtacatgtttcagttccaccggatcctgcagtacgccctgccgagacaggagtcccagcggccattcttttggattttcatggacaacttgctgctgaccgaggatgaccaggaaactaccactcggttcctgcagaccgaagccgtgaccctgcaggacgtgagaggccgggactaccagaacgccatgcgggtgtggtccaacatccctggactgaaaagcaagcacgcacctctgacccctaaagaagaggagtacctgcaggcccaggtgcggagcagaagcaagctggacgcccctaaggtggatctgctggtgaagaattgcctcctgcccctgagagagtacttcaagtatttcagccagaatagtctgcccctgggaggcagcggcggcggcatgatgcaggcccaggagagcctgaccctggaggacgtggccgtggacttcacctgggaggagtggcagttcctgagccccgcccagaaggacctgtacagggacgtgatgctggagaactacagcaacctggtggccgtgggctaccaggccaggaagcccgacgccctgagcaagctggagaggggcgaggagccctgcaccaccgaggacgagatctacgccaggatctgcagcgacagcggcggcccaagcagcggcgcccctcctcccagcggcggcaggcggcccaagcagcggcgcccctcctcccagcggcggcagcccagccggctccccaacctctaccgaggagggcacctctgagtccgccacccccgagagcggccctggcacctccaccgagcccagcgagggcagcgcacccggcagccctgccggcagccccacctccacagaggagggaaccagcaccgagcccagcgaaggcagcgccccaggcaccagcaccgagcctagtgagcaggagattaaacggatcaacaagatcagaagaagacttgtgaaagacagcaacaccaagaaggccggcaagacaggccccatgaaaaccctgctggttagagtgatgacacccgatctgagagagcggctggaaaacctgagaaagaagcctgaaaatatcccccagcccatcagcaatacatctagagccaacctgaataagctgctgaccgattacaccgaaatgaagaaggcgatcctgcatgtgtactgggaagagttccagaaggaccctgtgggcctgatgagccgggtggcccagcctgccagcaagaagatcgatcagaacaagctgaaacctgagatggacgagaagggcaacctgaccaccgccggctttgcctgctctcagtgtggccagcccctgttcgtgtacaagctggagcaggtgtctgagaagggcaaggcttacaccaactacttcggacggtgcaatgtggccgagcacgaaaagctgatcctgctggcccagctgaagcccgagaaggatagcgacgaagccgtgacatatagcctgggaaagtttgggcagagggccctggatttctacagcattcatgtgaccaaggagtccacccaccccgtgaagcccctggcccagatcgccggaaacagatacgcctccggacctgtgggaaaggccctgagcgacgcatgtatgggcacaatcgcctccttcctgtctaagtaccaggacatcatcatcgaacaccagaaggtggtgaagggcaaccagaagagactggagagcctgcgggagctggccggcaaggaaaacctggaataccctagcgtgaccctgccacctcagcctcacaccaaggagggcgttgatgcctacaacgaagtgatcgcccgggtgcgaatgtgggtgaacctgaacctgtggcagaagctgaagctaagcagagatgatgccaagcctctgctgagactgaagggattcccttcctttcctctggtcgagagacaggccaacgaagtggactggtgggacatggtgtgtaacgtgaagaagctgatcaacgagaaaaaggaggatggcaaggtgttttggcagaatctggctggctacaagagacaggaagccctgagaccatacctgagcagcgaggaagatcggaagaagggaaagaaattcgctcggtaccagctgggcgacctgctgctgcacctggaaaagaagcacggcgaggactggggaaaggtgtacgacgaggcctgggagcggattgacaagaaagtggaaggcctgagcaagcacatcaagctggaagaggaacggagaagcgaggacgcccagagcaaggccgccctgaccgactggctgcgggctaaggccagcttcgtgatcgagggcctgaaggaggccgacaaggacgagttctgcagatgcgagctgaagctgcagaagtggtacggggacctgcggggaaagcccttcgccatcgaagccgagaacagcatcctggacatcagcggcttcagcaagcagtacaactgtgccttcatctggcagaaggacggcgtgaagaagctgaacctgtacctgatcatcaactacttcaagggcggcaagctgcggttcaagaagatcaaacctgaagccttcgaagccaacagattctacaccgtgatcaacaaaaagagcggcgagatcgtgcccatggaggtgaacttcaacttcgacgaccccaacctgatcatcctgcctctggcctttggcaagagacagggcagagaattcatctggaacgacctgctgtccctggaaaccggcagcctgaagctggccaacggaagagtgatcgagaagacactgtacaacagaagaacccggcaggatgagcctgccctgttcgtggccctgaccttcgagcggcgggaggtcctggactcctccaatatcaaaccaatgaacctgatcggcgtggcaagaggcgaaaacatccccgccgtgatcgccctgaccgaccccgagggctgcccactgagccggtttaaggatagcctgggaaacccaacccacatcctgagaatcggcgagagctataaggagaagcagcggaccatccaggccaagaaggaggtggagcagcggagagccggcggctacagccggaagtacgccagcaaagccaagaatctggcagacgatatggtgagaaacaccgctagagatctgctgtactacgccgtgacccaggatgccatgctgatcttcgccaacctgagccggggcttcggccggcagggcaagcggaccttcatggccgagagacagtacacacggatggaggactggctgaccgccaagctggcctacgagggcctgagcaagacctacctgtccaagacactggcccagtacacctccaagacatgcagcaactgtgggtttaccatcaccagcgccgactacgacagggtgctggagaagctgaagaagacagcaacaggctggatgaccacaattaacggcaaggagctgaaggtggagggccagattacctactacaacagatacaagagacagaacgtagtcaaggacctgtccgtcgagctggatagactgagcgaagaatctgtgaacaacgacatctcctcctggacaaagggcagaagcggagaagctctgagcctcctgaagaaaagattctcccatagacccgtgcaggagaagttcgtgtgcctgaactgcggcttcgagacacacgcagccgagcaagccgccctgaacatcgccagatcctggctgttcctgcggagccaggagtacaagaaataccagacaaacaagacaaccggcaacaccgataagagagccttcgtcgagacctggcagtccttttaccggaagaagcttaaggaggtgtggaaacctgccgtgcggtctggcggatctggcggaggctccaccagccccaagaaaaagagaaaagtctaagctgccttctgcggggcttgccttctggccatgcccttcttctctcccttgcacctgtacctcttggtctttgaataaagcctgagtaggaaggctagcaaaaaaaaaaaaaaaaaaaaaaaaaaaaaaaaaaaaaaaaaaaaaaaaaaaaaaaaaaaaaaaaaaaaaaaaaaaaaaaagcccagccggctccccaacctctaccgaggagggcacctctgagtccgccacccccgagagcggccctggcacctccaccgagcccagcgagggcagcgcacccggcagccctgccggcagccccacctccacagaggagggaaccagcaccgagcccagcgaaggcagcgccccaggcaccagcaccgagcctagtgagcaggagattaaacggatcaacaagatcagaagaagacttgtgaaagacagcaacaccaagaaggccggcaagacaggccccatgaaaaccctgctggttagagtgatgacacccgatctgagagagcggctggaaaacctgagaaagaagcctgaaaatatcccccagcccatcagcaatacatctagagccaacctgaataagctgctgaccgattacaccgaaatgaagaaggcgatcctgcatgtgtactgggaagagttccagaaggaccctgtgggcctgatgagccgggtggcccagcctgccagcaagaagatcgatcagaacaagctgaaacctgagatggacgagaagggcaacctgaccaccgccggctttgcctgctctcagtgtggccagcccctgttcgtgtacaagctggagcaggtgtctgagaagggcaaggcttacaccaactacttcggacggtgcaatgtggccgagcacgaaaagctgatcctgctggcccagctgaagcccgagaaggatagcgacgaagccgtgacatatagcctgggaaagtttgggcagagggccctggatttctacagcattcatgtgaccaaggagtccacccaccccgtgaagcccctggcccagatcgccggaaacagatacgcctccggacctgtgggaaaggccctgagcgacgcatgtatgggcacaatcgcctccttcctgtctaagtaccaggacatcatcatcgaacaccagaaggtggtgaagggcaaccagaagagactggagagcctgcgggagctggccggcaaggaaaacctggaataccctagcgtgaccctgccacctcagcctcacaccaaggagggcgttgatgcctacaacgaagtgatcgcccgggtgcgaatgtgggtgaacctgaacctgtggcagaagctgaagctaagcagagatgatgccaagcctctgctgagactgaagggattcccttcctttcctctggtcgagagacaggccaacgaagtggactggtgggacatggtgtgtaacgtgaagaagctgatcaacgagaaaaaggaggatggcaaggtgttttggcagaatctggctggctacaagagacaggaagccctgagaccatacctgagcagcgaggaagatcggaagaagggaaagaaattcgctcggtaccagctgggcgacctgctgctgcacctggaaaagaagcacggcgaggactggggaaaggtgtacgacgaggcctgggagcggattgacaagaaagtggaaggcctgagcaagcacatcaagctggaagaggaacggagaagcgaggacgcccagagcaaggccgccctgaccgactggctgcgggctaaggccagcttcgtgatcgagggcctgaaggaggccgacaaggacgagttctgcagatgcgagctgaagctgcagaagtggtacggggacctgcggggaaagcccttcgccatcgaagccgagaacagcatcctggacatcagcggcttcagcaagcagtacaactgtgccttcatctggcagaaggacggcgtgaagaagctgaacctgtacctgatcatcaactacttcaagggcggcaagctgcggttcaagaagatcaaacctgaagccttcgaagccaacagattctacaccgtgatcaacaaaaagagcggcgagatcgtgcccatggaggtgaacttcaacttcgacgaccccaacctgatcatcctgcctctggcctttggcaagagacagggcagagaattcatctggaacgacctgctgtccctggaaaccggcagcctgaagctggccaacggaagagtgatcgagaagacactgtacaacagaagaacccggcaggatgagcctgccctgttcgtggccctgaccttcgagcggcgggaggtcctggactcctccaatatcaaaccaatgaacctgatcggcgtggcaagaggcgaaaacatccccgccgtgatcgccctgaccgaccccgagggctgcccactgagccggtttaaggatagcctgggaaacccaacccacatcctgagaatcggcgagagctataaggagaagcagcggaccatccaggccaagaaggaggtggagcagcggagagccggcggctacagccggaagtacgccagcaaagccaagaatctggcagacgatatggtgagaaacaccgctagagatctgctgtactacgccgtgacccaggatgccatgctgatcttcgccaacctgagccggggcttcggccggcagggcaagcggaccttcatggccgagagacagtacacacggatggaggactggctgaccgccaagctggcctacgagggcctgagcaagacctacctgtccaagacactggcccagtacacctccaagacatgcagcaactgtgggtttaccatcaccagcgccgactacgacagggtgctggagaagctgaagaagacagcaacaggctggatgaccacaattaacggcaaggagctgaaggtggagggccagattacctactacaacagatacaagagacagaacgtagtcaaggacctgtccgtcgagctggatagactgagcgaagaatctgtgaacaacgacatctcctcctggacaaagggcagaagcggagaagctctgagcctcctgaagaaaagattctcccatagacccgtgcaggagaagttcgtgtgcctgaactgcggcttcgagacacacgcagccgagcaagccgccctgaacatcgccagatcctggctgttcctgcggagccaggagtacaagaaataccagacaaacaagacaaccggcaacaccgataagagagccttcgtcgagacctggcagtccttttaccggaagaagcttaaggaggtgtggaaacctgccgtgcggtctggcggatctggcggaggctccaccagccccaagaaaaagagaaaagtctaagctgccttctgcggggcttgccttctggccatgcccttcttctctcccttgcacctgtacctcttggtctttgaataaagcctgagtaggaaggctagcaaaaaaaaaaaaaaaaaaaaaaaaaaaaaaaaaaaaaaaaaaaaaaaaaaaaaaaaaaaaaaaaaaaaaaaaaaaaaaaa

SEQ ID NO: 9834 - RNA, 8787 nt, synthetic construct
  source 1..8787: mol_type = other RNA
aggaaataagagagaaaagaagagtaagaagaaatataagagccaccatggcccctaagaagaagcgtaaagtgagccggatgaaccacgaccaggagttcgacccccctaaggtgtaccctcccgtccccgccgagaagagaaagcccatccgggtcctgagcctgttcgatggcatcgccaccggtctgctggtgctgaaggacctgggcatccaggtggataggtacattgcctccgaggtgtgcgaggactccatcaccgtgggaatggtgcgtcatcagggcaagatcatgtacgtgggcgacgtgcggagcgtgacacagaagcatatccaggagtggggccctttcgacctggtgatcggcggcagcccttgcaatgacctgagcatcgtgaacccagcccggaagggcctgtacgagggaaccggcagactgttcttcgagttttacagactgctgcacgacgcccggcctaaggaaggcgacgaccggcccttcttttggctgttcgagaatgtggtggccatgggagtcagcgacaagcgggatattagccggttcctggagagcaaccccgtgatgatcgatgccaaggaagtgagcgccgcccaccgggccagatacttctggggcaatctgcctggcatgaacagacccctggccagcaccgtgaacgacaagctggagctgcaggagtgcctggagcacggccggatcgccaagttcagcaaggtgagaaccatcaccacccgaagcaacagcatcaaacaaggcaaggaccagcactttcctgtgttcatgaacgagaaggaggacatcctgtggtgtaccgagatggagagagtgttcgggttcccagtccactacacagatgtcagcaacatgtctagactggccagacagagactgctgggaagaagctggtccgtccctgtgatcagacacctgttcgcccctctgaaggagtacttcgcctgcgtgagcagcggcaacagcaacgccaacagccggggccccagcttctctagcggcctggtgccactgtccctgagagggagccacatgggccccatggagatctacaaaaccgtgagcgcctggaagcggcagcctgtgcgcgtgctgagcctgtttcggaatatcgataaagtcctgaaaagcctgggattcctggagagcggctctggctccggcggtggcaccctgaagtacgtggaggatgtgacaaacgtggtcagacgggatgtggagaagtggggccccttcgatctggtgtacggcagcacccaacccctgggcagctcttgtgaccggtgccctggctggtacatgtttcagttccaccggatcctgcagtacgccctgccgagacaggagtcccagcggccattcttttggattttcatggacaacttgctgctgaccgaggatgaccaggaaactaccactcggttcctgcagaccgaagccgtgaccctgcaggacgtgagaggccgggactaccagaacgccatgcgggtgtggtccaacatccctggactgaaaagcaagcacgcacctctgacccctaaagaagaggagtacctgcaggcccaggtgcggagcagaagcaagctggacgcccctaaggtggatctgctggtgaagaattgcctcctgcccctgagagagtacttcaagtatttcagccagaatagtctgcccctgggaggcagcggcggcggccaggagcccgtgaccttcgaggacgtggccgtgtacttcacccagaaccagtgggccaagctggaccccacccagagggccctgtacagggaggtgatgctggagaactacgccaacgtggccagcctggtggccttccccttccccaagcccgacctggtgagccagctggagaggggcgaggtgccctggggccccgacccctgggaggccgaggtgctgaggggcatctgccccggcggcggcggcccaagcagcggcgcccctcctcccagcggcggcaggcggcccaagcagcggcgcccctcctcccagcggcggcagcccagccggctccccaacctctaccgaggagggcacctctgagtccgccacccccgagagcggccctggcacctccaccgagcccagcgagggcagcgcacccggcagccctgccggcagccccacctccacagaggagggaaccagcaccgagcccagcgaaggcagcgccccaggcaccagcaccgagcctagtgagcaggagattaaacggatcaacaagatcagaagaagacttgtgaaagacagcaacaccaagaaggccggcaagacaggccccatgaaaaccctgctggttagagtgatgacacccgatctgagagagcggctggaaaacctgagaaagaagcctgaaaatatcccccagcccatcagcaatacatctagagccaacctgaataagctgctgaccgattacaccgaaatgaagaaggcgatcctgcatgtgtactgggaagagttccagaaggaccctgtgggcctgatgagccgggtggcccagcctgccagcaagaagatcgatcagaacaagctgaaacctgagatggacgagaagggcaacctgaccaccgccggctttgcctgctctcagtgtggccagcccctgttcgtgtacaagctggagcaggtgtctgagaagggcaaggcttacaccaactacttcggacggtgcaatgtggccgagcacgaaaagctgatcctgctggcccagctgaagcccgagaaggatagcgacgaagccgtgacatatagcctgggaaagtttgggcagagggccctggatttctacagcattcatgtgaccaaggagtccacccaccccgtgaagcccctggcccagatcgccggaaacagatacgcctccggacctgtgggaaaggccctgagcgacgcatgtatgggcacaatcgcctccttcctgtctaagtaccaggacatcatcatcgaacaccagaaggtggtgaagggcaaccagaagagactggagagcctgcgggagctggccggcaaggaaaacctggaataccctagcgtgaccctgccacctcagcctcacaccaaggagggcgttgatgcctacaacgaagtgatcgcccgggtgcgaatgtgggtgaacctgaacctgtggcagaagctgaagctaagcagagatgatgccaagcctctgctgagactgaagggattcccttcctttcctctggtcgagagacaggccaacgaagtggactggtgggacatggtgtgtaacgtgaagaagctgatcaacgagaaaaaggaggatggcaaggtgttttggcagaatctggctggctacaagagacaggaagccctgagaccatacctgagcagcgaggaagatcggaagaagggaaagaaattcgctcggtaccagctgggcgacctgctgctgcacctggaaaagaagcacggcgaggactggggaaaggtgtacgacgaggcctgggagcggattgacaagaaagtggaaggcctgagcaagcacatcaagctggaagaggaacggagaagcgaggacgcccagagcaaggccgccctgaccgactggctgcgggctaaggccagcttcgtgatcgagggcctgaaggaggccgacaaggacgagttctgcagatgcgagctgaagctgcagaagtggtacggggacctgcggggaaagcccttcgccatcgaagccgagaacagcatcctggacatcagcggcttcagcaagcagtacaactgtgccttcatctggcagaaggacggcgtgaagaagctgaacctgtacctgatcatcaactacttcaagggcggcaagctgcggttcaagaagatcaaacctgaagccttcgaagccaacagattctacaccgtgatcaacaaaaagagcggcgagatcgtgcccatggaggtgaacttcaacttcgacgaccccaacctgatcatcctgcctctggcctttggcaagagacagggcagagaattcatctggaacgacctgctgtccctggaaaccggcagcctgaagctggccaacggaagagtgatcgagaagacactgtacaacagaagaacccggcaggatgagcctgccctgttcgtggccctgaccttcgagcggcgggaggtcctggactcctccaatatcaaaccaatgaacctgatcggcgtggcaagaggcgaaaacatccccgccgtgatcgccctgaccgaccccgagggctgcccactgagccggtttaaggatagcctgggaaacccaacccacatcctgagaatcggcgagagctataaggagaagcagcggaccatccaggccaagaaggaggtggagcagcggagagccggcggctacagccggaagtacgccagcaaagccaagaatctggcagacgatatggtgagaaacaccgctagagatctgctgtactacgccgtgacccaggatgccatgctgatcttcgccaacctgagccggggcttcggccggcagggcaagcggaccttcatggccgagagacagtacacacggatggaggactggctgaccgccaagctggcctacgagggcctgagcaagacctacctgtccaagacactggcccagtacacctccaagacatgcagcaactgtgggtttaccatcaccagcgccgactacgacagggtgctggagaagctgaagaagacagcaacaggctggatgaccacaattaacggcaaggagctgaaggtggagggccagattacctactacaacagatacaagagacagaacgtagtcaaggacctgtccgtcgagctggatagactgagcgaagaatctgtgaacaacgacatctcctcctggacaaagggcagaagcggagaagctctgagcctcctgaagaaaagattctcccatagacccgtgcaggagaagttcgtgtgcctgaactgcggcttcgagacacacgcagccgagcaagccgccctgaacatcgccagatcctggctgttcctgcggagccaggagtacaagaaataccagacaaacaagacaaccggcaacaccgataagagagccttcgtcgagacctggcagtccttttaccggaagaagcttaaggaggtgtggaaacctgccgtgcggtctggcggatctggcggaggctccaccagccccaagaaaaagagaaaagtctaagctgccttctgcggggcttgccttctggccatgcccttcttctctcccttgcacctgtacctcttggtctttgaataaagcctgagtaggaaggctagcaaaaaaaaaaaaaaaaaaaaaaaaaaaaaaaaaaaaaaaaaaaaaaaaaaaaaaaaaaaaaaaaaaaaaaaaaaaaaaaagcccagccggctccccaacctctaccgaggagggcacctctgagtccgccacccccgagagcggccctggcacctccaccgagcccagcgagggcagcgcacccggcagccctgccggcagccccacctccacagaggagggaaccagcaccgagcccagcgaaggcagcgccccaggcaccagcaccgagcctagtgagcaggagattaaacggatcaacaagatcagaagaagacttgtgaaagacagcaacaccaagaaggccggcaagacaggccccatgaaaaccctgctggttagagtgatgacacccgatctgagagagcggctggaaaacctgagaaagaagcctgaaaatatcccccagcccatcagcaatacatctagagccaacctgaataagctgctgaccgattacaccgaaatgaagaaggcgatcctgcatgtgtactgggaagagttccagaaggaccctgtgggcctgatgagccgggtggcccagcctgccagcaagaagatcgatcagaacaagctgaaacctgagatggacgagaagggcaacctgaccaccgccggctttgcctgctctcagtgtggccagcccctgttcgtgtacaagctggagcaggtgtctgagaagggcaaggcttacaccaactacttcggacggtgcaatgtggccgagcacgaaaagctgatcctgctggcccagctgaagcccgagaaggatagcgacgaagccgtgacatatagcctgggaaagtttgggcagagggccctggatttctacagcattcatgtgaccaaggagtccacccaccccgtgaagcccctggcccagatcgccggaaacagatacgcctccggacctgtgggaaaggccctgagcgacgcatgtatgggcacaatcgcctccttcctgtctaagtaccaggacatcatcatcgaacaccagaaggtggtgaagggcaaccagaagagactggagagcctgcgggagctggccggcaaggaaaacctggaataccctagcgtgaccctgccacctcagcctcacaccaaggagggcgttgatgcctacaacgaagtgatcgcccgggtgcgaatgtgggtgaacctgaacctgtggcagaagctgaagctaagcagagatgatgccaagcctctgctgagactgaagggattcccttcctttcctctggtcgagagacaggccaacgaagtggactggtgggacatggtgtgtaacgtgaagaagctgatcaacgagaaaaaggaggatggcaaggtgttttggcagaatctggctggctacaagagacaggaagccctgagaccatacctgagcagcgaggaagatcggaagaagggaaagaaattcgctcggtaccagctgggcgacctgctgctgcacctggaaaagaagcacggcgaggactggggaaaggtgtacgacgaggcctgggagcggattgacaagaaagtggaaggcctgagcaagcacatcaagctggaagaggaacggagaagcgaggacgcccagagcaaggccgccctgaccgactggctgcgggctaaggccagcttcgtgatcgagggcctgaaggaggccgacaaggacgagttctgcagatgcgagctgaagctgcagaagtggtacggggacctgcggggaaagcccttcgccatcgaagccgagaacagcatcctggacatcagcggcttcagcaagcagtacaactgtgccttcatctggcagaaggacggcgtgaagaagctgaacctgtacctgatcatcaactacttcaagggcggcaagctgcggttcaagaagatcaaacctgaagccttcgaagccaacagattctacaccgtgatcaacaaaaagagcggcgagatcgtgcccatggaggtgaacttcaacttcgacgaccccaacctgatcatcctgcctctggcctttggcaagagacagggcagagaattcatctggaacgacctgctgtccctggaaaccggcagcctgaagctggccaacggaagagtgatcgagaagacactgtacaacagaagaacccggcaggatgagcctgccctgttcgtggccctgaccttcgagcggcgggaggtcctggactcctccaatatcaaaccaatgaacctgatcggcgtggcaagaggcgaaaacatccccgccgtgatcgccctgaccgaccccgagggctgcccactgagccggtttaaggatagcctgggaaacccaacccacatcctgagaatcggcgagagctataaggagaagcagcggaccatccaggccaagaaggaggtggagcagcggagagccggcggctacagccggaagtacgccagcaaagccaagaatctggcagacgatatggtgagaaacaccgctagagatctgctgtactacgccgtgacccaggatgccatgctgatcttcgccaacctgagccggggcttcggccggcagggcaagcggaccttcatggccgagagacagtacacacggatggaggactggctgaccgccaagctggcctacgagggcctgagcaagacctacctgtccaagacactggcccagtacacctccaagacatgcagcaactgtgggtttaccatcaccagcgccgactacgacagggtgctggagaagctgaagaagacagcaacaggctggatgaccacaattaacggcaaggagctgaaggtggagggccagattacctactacaacagatacaagagacagaacgtagtcaaggacctgtccgtcgagctggatagactgagcgaagaatctgtgaacaacgacatctcctcctggacaaagggcagaagcggagaagctctgagcctcctgaagaaaagattctcccatagacccgtgcaggagaagttcgtgtgcctgaactgcggcttcgagacacacgcagccgagcaagccgccctgaacatcgccagatcctggctgttcctgcggagccaggagtacaagaaataccagacaaacaagacaaccggcaacaccgataagagagccttcgtcgagacctggcagtccttttaccggaagaagcttaaggaggtgtggaaacctgccgtgcggtctggcggatctggcggaggctccaccagccccaagaaaaagagaaaagtctaagctgccttctgcggggcttgccttctggccatgcccttcttctctcccttgcacctgtacctcttggtctttgaataaagcctgagtaggaaggctagcaaaaaaaaaaaaaaaaaaaaaaaaaaaaaaaaaaaaaaaaaaaaaaaaaaaaaaaaaaaaaaaaaaaaaaaaaaaaaaaa

SEQ ID NO: 9835 - RNA, 8787 nt, synthetic construct
  source 1..8787: mol_type = other RNA
aggaaataagagagaaaagaagagtaagaagaaatataagagccaccatggcccctaagaagaagcgtaaagtgagccggatgaaccacgaccaggagttcgacccccctaaggtgtaccctcccgtccccgccgagaagagaaagcccatccgggtcctgagcctgttcgatggcatcgccaccggtctgctggtgctgaaggacctgggcatccaggtggataggtacattgcctccgaggtgtgcgaggactccatcaccgtgggaatggtgcgtcatcagggcaagatcatgtacgtgggcgacgtgcggagcgtgacacagaagcatatccaggagtggggccctttcgacctggtgatcggcggcagcccttgcaatgacctgagcatcgtgaacccagcccggaagggcctgtacgagggaaccggcagactgttcttcgagttttacagactgctgcacgacgcccggcctaaggaaggcgacgaccggcccttcttttggctgttcgagaatgtggtggccatgggagtcagcgacaagcgggatattagccggttcctggagagcaaccccgtgatgatcgatgccaaggaagtgagcgccgcccaccgggccagatacttctggggcaatctgcctggcatgaacagacccctggccagcaccgtgaacgacaagctggagctgcaggagtgcctggagcacggccggatcgccaagttcagcaaggtgagaaccatcaccacccgaagcaacagcatcaaacaaggcaaggaccagcactttcctgtgttcatgaacgagaaggaggacatcctgtggtgtaccgagatggagagagtgttcgggttcccagtccactacacagatgtcagcaacatgtctagactggccagacagagactgctgggaagaagctggtccgtccctgtgatcagacacctgttcgcccctctgaaggagtacttcgcctgcgtgagcagcggcaacagcaacgccaacagccggggccccagcttctctagcggcctggtgccactgtccctgagagggagccacatgggccccatggagatctacaaaaccgtgagcgcctggaagcggcagcctgtgcgcgtgctgagcctgtttcggaatatcgataaagtcctgaaaagcctgggattcctggagagcggctctggctccggcggtggcaccctgaagtacgtggaggatgtgacaaacgtggtcagacgggatgtggagaagtggggccccttcgatctggtgtacggcagcacccaacccctgggcagctcttgtgaccggtgccctggctggtacatgtttcagttccaccggatcctgcagtacgccctgccgagacaggagtcccagcggccattcttttggattttcatggacaacttgctgctgaccgaggatgaccaggaaactaccactcggttcctgcagaccgaagccgtgaccctgcaggacgtgagaggccgggactaccagaacgccatgcgggtgtggtccaacatccctggactgaaaagcaagcacgcacctctgacccctaaagaagaggagtacctgcaggcccaggtgcggagcagaagcaagctggacgcccctaaggtggatctgctggtgaagaattgcctcctgcccctgagagagtacttcaagtatttcagccagaatagtctgcccctgggaggcagcggcggcggcgagcccggcaccgtgagcttcggcgacgtggccgtgtacttcagcagggaggagtggggctgcctgaggcccgcccagagggccctgtacagggacgtgatgagggagacctacagccacctgggcgccctgggcgtgggcggcagcaagcccgccctgatcagctgggtggaggaggaggccgagctgtggggccccgccgcccaggaccccgaggtggccaagaggcccaccgaggccgacggcggcccaagcagcggcgcccctcctcccagcggcggcaggcggcccaagcagcggcgcccctcctcccagcggcggcagcccagccggctccccaacctctaccgaggagggcacctctgagtccgccacccccgagagcggccctggcacctccaccgagcccagcgagggcagcgcacccggcagccctgccggcagccccacctccacagaggagggaaccagcaccgagcccagcgaaggcagcgccccaggcaccagcaccgagcctagtgagcaggagattaaacggatcaacaagatcagaagaagacttgtgaaagacagcaacaccaagaaggccggcaagacaggccccatgaaaaccctgctggttagagtgatgacacccgatctgagagagcggctggaaaacctgagaaagaagcctgaaaatatcccccagcccatcagcaatacatctagagccaacctgaataagctgctgaccgattacaccgaaatgaagaaggcgatcctgcatgtgtactgggaagagttccagaaggaccctgtgggcctgatgagccgggtggcccagcctgccagcaagaagatcgatcagaacaagctgaaacctgagatggacgagaagggcaacctgaccaccgccggctttgcctgctctcagtgtggccagcccctgttcgtgtacaagctggagcaggtgtctgagaagggcaaggcttacaccaactacttcggacggtgcaatgtggccgagcacgaaaagctgatcctgctggcccagctgaagcccgagaaggatagcgacgaagccgtgacatatagcctgggaaagtttgggcagagggccctggatttctacagcattcatgtgaccaaggagtccacccaccccgtgaagcccctggcccagatcgccggaaacagatacgcctccggacctgtgggaaaggccctgagcgacgcatgtatgggcacaatcgcctccttcctgtctaagtaccaggacatcatcatcgaacaccagaaggtggtgaagggcaaccagaagagactggagagcctgcgggagctggccggcaaggaaaacctggaataccctagcgtgaccctgccacctcagcctcacaccaaggagggcgttgatgcctacaacgaagtgatcgcccgggtgcgaatgtgggtgaacctgaacctgtggcagaagctgaagctaagcagagatgatgccaagcctctgctgagactgaagggattcccttcctttcctctggtcgagagacaggccaacgaagtggactggtgggacatggtgtgtaacgtgaagaagctgatcaacgagaaaaaggaggatggcaaggtgttttggcagaatctggctggctacaagagacaggaagccctgagaccatacctgagcagcgaggaagatcggaagaagggaaagaaattcgctcggtaccagctgggcgacctgctgctgcacctggaaaagaagcacggcgaggactggggaaaggtgtacgacgaggcctgggagcggattgacaagaaagtggaaggcctgagcaagcacatcaagctggaagaggaacggagaagcgaggacgcccagagcaaggccgccctgaccgactggctgcgggctaaggccagcttcgtgatcgagggcctgaaggaggccgacaaggacgagttctgcagatgcgagctgaagctgcagaagtggtacggggacctgcggggaaagcccttcgccatcgaagccgagaacagcatcctggacatcagcggcttcagcaagcagtacaactgtgccttcatctggcagaaggacggcgtgaagaagctgaacctgtacctgatcatcaactacttcaagggcggcaagctgcggttcaagaagatcaaacctgaagccttcgaagccaacagattctacaccgtgatcaacaaaaagagcggcgagatcgtgcccatggaggtgaacttcaacttcgacgaccccaacctgatcatcctgcctctggcctttggcaagagacagggcagagaattcatctggaacgacctgctgtccctggaaaccggcagcctgaagctggccaacggaagagtgatcgagaagacactgtacaacagaagaacccggcaggatgagcctgccctgttcgtggccctgaccttcgagcggcgggaggtcctggactcctccaatatcaaaccaatgaacctgatcggcgtggcaagaggcgaaaacatccccgccgtgatcgccctgaccgaccccgagggctgcccactgagccggtttaaggatagcctgggaaacccaacccacatcctgagaatcggcgagagctataaggagaagcagcggaccatccaggccaagaaggaggtggagcagcggagagccggcggctacagccggaagtacgccagcaaagccaagaatctggcagacgatatggtgagaaacaccgctagagatctgctgtactacgccgtgacccaggatgccatgctgatcttcgccaacctgagccggggcttcggccggcagggcaagcggaccttcatggccgagagacagtacacacggatggaggactggctgaccgccaagctggcctacgagggcctgagcaagacctacctgtccaagacactggcccagtacacctccaagacatgcagcaactgtgggtttaccatcaccagcgccgactacgacagggtgctggagaagctgaagaagacagcaacaggctggatgaccacaattaacggcaaggagctgaaggtggagggccagattacctactacaacagatacaagagacagaacgtagtcaaggacctgtccgtcgagctggatagactgagcgaagaatctgtgaacaacgacatctcctcctggacaaagggcagaagcggagaagctctgagcctcctgaagaaaagattctcccatagacccgtgcaggagaagttcgtgtgcctgaactgcggcttcgagacacacgcagccgagcaagccgccctgaacatcgccagatcctggctgttcctgcggagccaggagtacaagaaataccagacaaacaagacaaccggcaacaccgataagagagccttcgtcgagacctggcagtccttttaccggaagaagcttaaggaggtgtggaaacctgccgtgcggtctggcggatctggcggaggctccaccagccccaagaaaaagagaaaagtctaagctgccttctgcggggcttgccttctggccatgcccttcttctctcccttgcacctgtacctcttggtctttgaataaagcctgagtaggaaggctagcaaaaaaaaaaaaaaaaaaaaaaaaaaaaaaaaaaaaaaaaaaaaaaaaaaaaaaaaaaaaaaaaaaaaaaaaaaaaaaaagcccagccggctccccaacctctaccgaggagggcacctctgagtccgccacccccgagagcggccctggcacctccaccgagcccagcgagggcagcgcacccggcagccctgccggcagccccacctccacagaggagggaaccagcaccgagcccagcgaaggcagcgccccaggcaccagcaccgagcctagtgagcaggagattaaacggatcaacaagatcagaagaagacttgtgaaagacagcaacaccaagaaggccggcaagacaggccccatgaaaaccctgctggttagagtgatgacacccgatctgagagagcggctggaaaacctgagaaagaagcctgaaaatatcccccagcccatcagcaatacatctagagccaacctgaataagctgctgaccgattacaccgaaatgaagaaggcgatcctgcatgtgtactgggaagagttccagaaggaccctgtgggcctgatgagccgggtggcccagcctgccagcaagaagatcgatcagaacaagctgaaacctgagatggacgagaagggcaacctgaccaccgccggctttgcctgctctcagtgtggccagcccctgttcgtgtacaagctggagcaggtgtctgagaagggcaaggcttacaccaactacttcggacggtgcaatgtggccgagcacgaaaagctgatcctgctggcccagctgaagcccgagaaggatagcgacgaagccgtgacatatagcctgggaaagtttgggcagagggccctggatttctacagcattcatgtgaccaaggagtccacccaccccgtgaagcccctggcccagatcgccggaaacagatacgcctccggacctgtgggaaaggccctgagcgacgcatgtatgggcacaatcgcctccttcctgtctaagtaccaggacatcatcatcgaacaccagaaggtggtgaagggcaaccagaagagactggagagcctgcgggagctggccggcaaggaaaacctggaataccctagcgtgaccctgccacctcagcctcacaccaaggagggcgttgatgcctacaacgaagtgatcgcccgggtgcgaatgtgggtgaacctgaacctgtggcagaagctgaagctaagcagagatgatgccaagcctctgctgagactgaagggattcccttcctttcctctggtcgagagacaggccaacgaagtggactggtgggacatggtgtgtaacgtgaagaagctgatcaacgagaaaaaggaggatggcaaggtgttttggcagaatctggctggctacaagagacaggaagccctgagaccatacctgagcagcgaggaagatcggaagaagggaaagaaattcgctcggtaccagctgggcgacctgctgctgcacctggaaaagaagcacggcgaggactggggaaaggtgtacgacgaggcctgggagcggattgacaagaaagtggaaggcctgagcaagcacatcaagctggaagaggaacggagaagcgaggacgcccagagcaaggccgccctgaccgactggctgcgggctaaggccagcttcgtgatcgagggcctgaaggaggccgacaaggacgagttctgcagatgcgagctgaagctgcagaagtggtacggggacctgcggggaaagcccttcgccatcgaagccgagaacagcatcctggacatcagcggcttcagcaagcagtacaactgtgccttcatctggcagaaggacggcgtgaagaagctgaacctgtacctgatcatcaactacttcaagggcggcaagctgcggttcaagaagatcaaacctgaagccttcgaagccaacagattctacaccgtgatcaacaaaaagagcggcgagatcgtgcccatggaggtgaacttcaacttcgacgaccccaacctgatcatcctgcctctggcctttggcaagagacagggcagagaattcatctggaacgacctgctgtccctggaaaccggcagcctgaagctggccaacggaagagtgatcgagaagacactgtacaacagaagaacccggcaggatgagcctgccctgttcgtggccctgaccttcgagcggcgggaggtcctggactcctccaatatcaaaccaatgaacctgatcggcgtggcaagaggcgaaaacatccccgccgtgatcgccctgaccgaccccgagggctgcccactgagccggtttaaggatagcctgggaaacccaacccacatcctgagaatcggcgagagctataaggagaagcagcggaccatccaggccaagaaggaggtggagcagcggagagccggcggctacagccggaagtacgccagcaaagccaagaatctggcagacgatatggtgagaaacaccgctagagatctgctgtactacgccgtgacccaggatgccatgctgatcttcgccaacctgagccggggcttcggccggcagggcaagcggaccttcatggccgagagacagtacacacggatggaggactggctgaccgccaagctggcctacgagggcctgagcaagacctacctgtccaagacactggcccagtacacctccaagacatgcagcaactgtgggtttaccatcaccagcgccgactacgacagggtgctggagaagctgaagaagacagcaacaggctggatgaccacaattaacggcaaggagctgaaggtggagggccagattacctactacaacagatacaagagacagaacgtagtcaaggacctgtccgtcgagctggatagactgagcgaagaatctgtgaacaacgacatctcctcctggacaaagggcagaagcggagaagctctgagcctcctgaagaaaagattctcccatagacccgtgcaggagaagttcgtgtgcctgaactgcggcttcgagacacacgcagccgagcaagccgccctgaacatcgccagatcctggctgttcctgcggagccaggagtacaagaaataccagacaaacaagacaaccggcaacaccgataagagagccttcgtcgagacctggcagtccttttaccggaagaagcttaaggaggtgtggaaacctgccgtgcggtctggcggatctggcggaggctccaccagccccaagaaaaagagaaaagtctaagctgccttctgcggggcttgccttctggccatgcccttcttctctcccttgcacctgtacctcttggtctttgaataaagcctgagtaggaaggctagcaaaaaaaaaaaaaaaaaaaaaaaaaaaaaaaaaaaaaaaaaaaaaaaaaaaaaaaaaaaaaaaaaaaaaaaaaaaaaaaa

SEQ ID NO: 9836 - RNA, 8787 nt, synthetic construct
  source 1..8787: mol_type = other RNA
aggaaataagagagaaaagaagagtaagaagaaatataagagccaccatggcccctaagaagaagcgtaaagtgagccggatgaaccacgaccaggagttcgacccccctaaggtgtaccctcccgtccccgccgagaagagaaagcccatccgggtcctgagcctgttcgatggcatcgccaccggtctgctggtgctgaaggacctgggcatccaggtggataggtacattgcctccgaggtgtgcgaggactccatcaccgtgggaatggtgcgtcatcagggcaagatcatgtacgtgggcgacgtgcggagcgtgacacagaagcatatccaggagtggggccctttcgacctggtgatcggcggcagcccttgcaatgacctgagcatcgtgaacccagcccggaagggcctgtacgagggaaccggcagactgttcttcgagttttacagactgctgcacgacgcccggcctaaggaaggcgacgaccggcccttcttttggctgttcgagaatgtggtggccatgggagtcagcgacaagcgggatattagccggttcctggagagcaaccccgtgatgatcgatgccaaggaagtgagcgccgcccaccgggccagatacttctggggcaatctgcctggcatgaacagacccctggccagcaccgtgaacgacaagctggagctgcaggagtgcctggagcacggccggatcgccaagttcagcaaggtgagaaccatcaccacccgaagcaacagcatcaaacaaggcaaggaccagcactttcctgtgttcatgaacgagaaggaggacatcctgtggtgtaccgagatggagagagtgttcgggttcccagtccactacacagatgtcagcaacatgtctagactggccagacagagactgctgggaagaagctggtccgtccctgtgatcagacacctgttcgcccctctgaaggagtacttcgcctgcgtgagcagcggcaacagcaacgccaacagccggggccccagcttctctagcggcctggtgccactgtccctgagagggagccacatgggccccatggagatctacaaaaccgtgagcgcctggaagcggcagcctgtgcgcgtgctgagcctgtttcggaatatcgataaagtcctgaaaagcctgggattcctggagagcggctctggctccggcggtggcaccctgaagtacgtggaggatgtgacaaacgtggtcagacgggatgtggagaagtggggccccttcgatctggtgtacggcagcacccaacccctgggcagctcttgtgaccggtgccctggctggtacatgtttcagttccaccggatcctgcagtacgccctgccgagacaggagtcccagcggccattcttttggattttcatggacaacttgctgctgaccgaggatgaccaggaaactaccactcggttcctgcagaccgaagccgtgaccctgcaggacgtgagaggccgggactaccagaacgccatgcgggtgtggtccaacatccctggactgaaaagcaagcacgcacctctgacccctaaagaagaggagtacctgcaggcccaggtgcggagcagaagcaagctggacgcccctaaggtggatctgctggtgaagaattgcctcctgcccctgagagagtacttcaagtatttcagccagaatagtctgcccctgggaggcagcggcggcggcaagcccggcgccgtgagcttcgccgacgtggccgtgtacttcagccccgaggagtggggctgcctgaggcccgcccagagggccctgtacagggaggtgatgagggagacctacggcctgctgggcgccctgggcgtgggcggcgccaagcccgccctgatcagctgggtggaggaggaggccgagctgtggggccccggcgcccaggaccccgaggtggccatgtgccagacccaggccgacggcggcccaagcagcggcgcccctcctcccagcggcggcaggcggcccaagcagcggcgcccctcctcccagcggcggcagcccagccggctccccaacctctaccgaggagggcacctctgagtccgccacccccgagagcggccctggcacctccaccgagcccagcgagggcagcgcacccggcagccctgccggcagccccacctccacagaggagggaaccagcaccgagcccagcgaaggcagcgccccaggcaccagcaccgagcctagtgagcaggagattaaacggatcaacaagatcagaagaagacttgtgaaagacagcaacaccaagaaggccggcaagacaggccccatgaaaaccctgctggttagagtgatgacacccgatctgagagagcggctggaaaacctgagaaagaagcctgaaaatatcccccagcccatcagcaatacatctagagccaacctgaataagctgctgaccgattacaccgaaatgaagaaggcgatcctgcatgtgtactgggaagagttccagaaggaccctgtgggcctgatgagccgggtggcccagcctgccagcaagaagatcgatcagaacaagctgaaacctgagatggacgagaagggcaacctgaccaccgccggctttgcctgctctcagtgtggccagcccctgttcgtgtacaagctggagcaggtgtctgagaagggcaaggcttacaccaactacttcggacggtgcaatgtggccgagcacgaaaagctgatcctgctggcccagctgaagcccgagaaggatagcgacgaagccgtgacatatagcctgggaaagtttgggcagagggccctggatttctacagcattcatgtgaccaaggagtccacccaccccgtgaagcccctggcccagatcgccggaaacagatacgcctccggacctgtgggaaaggccctgagcgacgcatgtatgggcacaatcgcctccttcctgtctaagtaccaggacatcatcatcgaacaccagaaggtggtgaagggcaaccagaagagactggagagcctgcgggagctggccggcaaggaaaacctggaataccctagcgtgaccctgccacctcagcctcacaccaaggagggcgttgatgcctacaacgaagtgatcgcccgggtgcgaatgtgggtgaacctgaacctgtggcagaagctgaagctaagcagagatgatgccaagcctctgctgagactgaagggattcccttcctttcctctggtcgagagacaggccaacgaagtggactggtgggacatggtgtgtaacgtgaagaagctgatcaacgagaaaaaggaggatggcaaggtgttttggcagaatctggctggctacaagagacaggaagccctgagaccatacctgagcagcgaggaagatcggaagaagggaaagaaattcgctcggtaccagctgggcgacctgctgctgcacctggaaaagaagcacggcgaggactggggaaaggtgtacgacgaggcctgggagcggattgacaagaaagtggaaggcctgagcaagcacatcaagctggaagaggaacggagaagcgaggacgcccagagcaaggccgccctgaccgactggctgcgggctaaggccagcttcgtgatcgagggcctgaaggaggccgacaaggacgagttctgcagatgcgagctgaagctgcagaagtggtacggggacctgcggggaaagcccttcgccatcgaagccgagaacagcatcctggacatcagcggcttcagcaagcagtacaactgtgccttcatctggcagaaggacggcgtgaagaagctgaacctgtacctgatcatcaactacttcaagggcggcaagctgcggttcaagaagatcaaacctgaagccttcgaagccaacagattctacaccgtgatcaacaaaaagagcggcgagatcgtgcccatggaggtgaacttcaacttcgacgaccccaacctgatcatcctgcctctggcctttggcaagagacagggcagagaattcatctggaacgacctgctgtccctggaaaccggcagcctgaagctggccaacggaagagtgatcgagaagacactgtacaacagaagaacccggcaggatgagcctgccctgttcgtggccctgaccttcgagcggcgggaggtcctggactcctccaatatcaaaccaatgaacctgatcggcgtggcaagaggcgaaaacatccccgccgtgatcgccctgaccgaccccgagggctgcccactgagccggtttaaggatagcctgggaaacccaacccacatcctgagaatcggcgagagctataaggagaagcagcggaccatccaggccaagaaggaggtggagcagcggagagccggcggctacagccggaagtacgccagcaaagccaagaatctggcagacgatatggtgagaaacaccgctagagatctgctgtactacgccgtgacccaggatgccatgctgatcttcgccaacctgagccggggcttcggccggcagggcaagcggaccttcatggccgagagacagtacacacggatggaggactggctgaccgccaagctggcctacgagggcctgagcaagacctacctgtccaagacactggcccagtacacctccaagacatgcagcaactgtgggtttaccatcaccagcgccgactacgacagggtgctggagaagctgaagaagacagcaacaggctggatgaccacaattaacggcaaggagctgaaggtggagggccagattacctactacaacagatacaagagacagaacgtagtcaaggacctgtccgtcgagctggatagactgagcgaagaatctgtgaacaacgacatctcctcctggacaaagggcagaagcggagaagctctgagcctcctgaagaaaagattctcccatagacccgtgcaggagaagttcgtgtgcctgaactgcggcttcgagacacacgcagccgagcaagccgccctgaacatcgccagatcctggctgttcctgcggagccaggagtacaagaaataccagacaaacaagacaaccggcaacaccgataagagagccttcgtcgagacctggcagtccttttaccggaagaagcttaaggaggtgtggaaacctgccgtgcggtctggcggatctggcggaggctccaccagccccaagaaaaagagaaaagtctaagctgccttctgcggggcttgccttctggccatgcccttcttctctcccttgcacctgtacctcttggtctttgaataaagcctgagtaggaaggctagcaaaaaaaaaaaaaaaaaaaaaaaaaaaaaaaaaaaaaaaaaaaaaaaaaaaaaaaaaaaaaaaaaaaaaaaaaaaaaaaagcccagccggctccccaacctctaccgaggagggcacctctgagtccgccacccccgagagcggccctggcacctccaccgagcccagcgagggcagcgcacccggcagccctgccggcagccccacctccacagaggagggaaccagcaccgagcccagcgaaggcagcgccccaggcaccagcaccgagcctagtgagcaggagattaaacggatcaacaagatcagaagaagacttgtgaaagacagcaacaccaagaaggccggcaagacaggccccatgaaaaccctgctggttagagtgatgacacccgatctgagagagcggctggaaaacctgagaaagaagcctgaaaatatcccccagcccatcagcaatacatctagagccaacctgaataagctgctgaccgattacaccgaaatgaagaaggcgatcctgcatgtgtactgggaagagttccagaaggaccctgtgggcctgatgagccgggtggcccagcctgccagcaagaagatcgatcagaacaagctgaaacctgagatggacgagaagggcaacctgaccaccgccggctttgcctgctctcagtgtggccagcccctgttcgtgtacaagctggagcaggtgtctgagaagggcaaggcttacaccaactacttcggacggtgcaatgtggccgagcacgaaaagctgatcctgctggcccagctgaagcccgagaaggatagcgacgaagccgtgacatatagcctgggaaagtttgggcagagggccctggatttctacagcattcatgtgaccaaggagtccacccaccccgtgaagcccctggcccagatcgccggaaacagatacgcctccggacctgtgggaaaggccctgagcgacgcatgtatgggcacaatcgcctccttcctgtctaagtaccaggacatcatcatcgaacaccagaaggtggtgaagggcaaccagaagagactggagagcctgcgggagctggccggcaaggaaaacctggaataccctagcgtgaccctgccacctcagcctcacaccaaggagggcgttgatgcctacaacgaagtgatcgcccgggtgcgaatgtgggtgaacctgaacctgtggcagaagctgaagctaagcagagatgatgccaagcctctgctgagactgaagggattcccttcctttcctctggtcgagagacaggccaacgaagtggactggtgggacatggtgtgtaacgtgaagaagctgatcaacgagaaaaaggaggatggcaaggtgttttggcagaatctggctggctacaagagacaggaagccctgagaccatacctgagcagcgaggaagatcggaagaagggaaagaaattcgctcggtaccagctgggcgacctgctgctgcacctggaaaagaagcacggcgaggactggggaaaggtgtacgacgaggcctgggagcggattgacaagaaagtggaaggcctgagcaagcacatcaagctggaagaggaacggagaagcgaggacgcccagagcaaggccgccctgaccgactggctgcgggctaaggccagcttcgtgatcgagggcctgaaggaggccgacaaggacgagttctgcagatgcgagctgaagctgcagaagtggtacggggacctgcggggaaagcccttcgccatcgaagccgagaacagcatcctggacatcagcggcttcagcaagcagtacaactgtgccttcatctggcagaaggacggcgtgaagaagctgaacctgtacctgatcatcaactacttcaagggcggcaagctgcggttcaagaagatcaaacctgaagccttcgaagccaacagattctacaccgtgatcaacaaaaagagcggcgagatcgtgcccatggaggtgaacttcaacttcgacgaccccaacctgatcatcctgcctctggcctttggcaagagacagggcagagaattcatctggaacgacctgctgtccctggaaaccggcagcctgaagctggccaacggaagagtgatcgagaagacactgtacaacagaagaacccggcaggatgagcctgccctgttcgtggccctgaccttcgagcggcgggaggtcctggactcctccaatatcaaaccaatgaacctgatcggcgtggcaagaggcgaaaacatccccgccgtgatcgccctgaccgaccccgagggctgcccactgagccggtttaaggatagcctgggaaacccaacccacatcctgagaatcggcgagagctataaggagaagcagcggaccatccaggccaagaaggaggtggagcagcggagagccggcggctacagccggaagtacgccagcaaagccaagaatctggcagacgatatggtgagaaacaccgctagagatctgctgtactacgccgtgacccaggatgccatgctgatcttcgccaacctgagccggggcttcggccggcagggcaagcggaccttcatggccgagagacagtacacacggatggaggactggctgaccgccaagctggcctacgagggcctgagcaagacctacctgtccaagacactggcccagtacacctccaagacatgcagcaactgtgggtttaccatcaccagcgccgactacgacagggtgctggagaagctgaagaagacagcaacaggctggatgaccacaattaacggcaaggagctgaaggtggagggccagattacctactacaacagatacaagagacagaacgtagtcaaggacctgtccgtcgagctggatagactgagcgaagaatctgtgaacaacgacatctcctcctggacaaagggcagaagcggagaagctctgagcctcctgaagaaaagattctcccatagacccgtgcaggagaagttcgtgtgcctgaactgcggcttcgagacacacgcagccgagcaagccgccctgaacatcgccagatcctggctgttcctgcggagccaggagtacaagaaataccagacaaacaagacaaccggcaacaccgataagagagccttcgtcgagacctggcagtccttttaccggaagaagcttaaggaggtgtggaaacctgccgtgcggtctggcggatctggcggaggctccaccagccccaagaaaaagagaaaagtctaagctgccttctgcggggcttgccttctggccatgcccttcttctctcccttgcacctgtacctcttggtctttgaataaagcctgagtaggaaggctagcaaaaaaaaaaaaaaaaaaaaaaaaaaaaaaaaaaaaaaaaaaaaaaaaaaaaaaaaaaaaaaaaaaaaaaaaaaaaaaaa

SEQ ID NO: 9837 - RNA, 8787 nt, synthetic construct
  source 1..8787: mol_type = other RNA
aggaaataagagagaaaagaagagtaagaagaaatataagagccaccatggcccctaagaagaagcgtaaagtgagccggatgaaccacgaccaggagttcgacccccctaaggtgtaccctcccgtccccgccgagaagagaaagcccatccgggtcctgagcctgttcgatggcatcgccaccggtctgctggtgctgaaggacctgggcatccaggtggataggtacattgcctccgaggtgtgcgaggactccatcaccgtgggaatggtgcgtcatcagggcaagatcatgtacgtgggcgacgtgcggagcgtgacacagaagcatatccaggagtggggccctttcgacctggtgatcggcggcagcccttgcaatgacctgagcatcgtgaacccagcccggaagggcctgtacgagggaaccggcagactgttcttcgagttttacagactgctgcacgacgcccggcctaaggaaggcgacgaccggcccttcttttggctgttcgagaatgtggtggccatgggagtcagcgacaagcgggatattagccggttcctggagagcaaccccgtgatgatcgatgccaaggaagtgagcgccgcccaccgggccagatacttctggggcaatctgcctggcatgaacagacccctggccagcaccgtgaacgacaagctggagctgcaggagtgcctggagcacggccggatcgccaagttcagcaaggtgagaaccatcaccacccgaagcaacagcatcaaacaaggcaaggaccagcactttcctgtgttcatgaacgagaaggaggacatcctgtggtgtaccgagatggagagagtgttcgggttcccagtccactacacagatgtcagcaacatgtctagactggccagacagagactgctgggaagaagctggtccgtccctgtgatcagacacctgttcgcccctctgaaggagtacttcgcctgcgtgagcagcggcaacagcaacgccaacagccggggccccagcttctctagcggcctggtgccactgtccctgagagggagccacatgggccccatggagatctacaaaaccgtgagcgcctggaagcggcagcctgtgcgcgtgctgagcctgtttcggaatatcgataaagtcctgaaaagcctgggattcctggagagcggctctggctccggcggtggcaccctgaagtacgtggaggatgtgacaaacgtggtcagacgggatgtggagaagtggggccccttcgatctggtgtacggcagcacccaacccctgggcagctcttgtgaccggtgccctggctggtacatgtttcagttccaccggatcctgcagtacgccctgccgagacaggagtcccagcggccattcttttggattttcatggacaacttgctgctgaccgaggatgaccaggaaactaccactcggttcctgcagaccgaagccgtgaccctgcaggacgtgagaggccgggactaccagaacgccatgcgggtgtggtccaacatccctggactgaaaagcaagcacgcacctctgacccctaaagaagaggagtacctgcaggcccaggtgcggagcagaagcaagctggacgcccctaaggtggatctgctggtgaagaattgcctcctgcccctgagagagtacttcaagtatttcagccagaatagtctgcccctgggaggcagcggcggcggcgcccaggaggtggtgaccttcaaggacgtggccgtggacttcaccagggaggagtggtgcctgctgagccccccccagaaggagctgtacaaggaggtgatgctggagaacgcccagaacctgctgagcgtgggcctgcccggcccccccgaggacgtgatcagctacctgaagcagaggaaggacccctggatgctggagcaggagggcctgaggagctgctgccccgagggcgagatcaggggcggcccaagcagcggcgcccctcctcccagcggcggcaggcggcccaagcagcggcgcccctcctcccagcggcggcagcccagccggctccccaacctctaccgaggagggcacctctgagtccgccacccccgagagcggccctggcacctccaccgagcccagcgagggcagcgcacccggcagccctgccggcagccccacctccacagaggagggaaccagcaccgagcccagcgaaggcagcgccccaggcaccagcaccgagcctagtgagcaggagattaaacggatcaacaagatcagaagaagacttgtgaaagacagcaacaccaagaaggccggcaagacaggccccatgaaaaccctgctggttagagtgatgacacccgatctgagagagcggctggaaaacctgagaaagaagcctgaaaatatcccccagcccatcagcaatacatctagagccaacctgaataagctgctgaccgattacaccgaaatgaagaaggcgatcctgcatgtgtactgggaagagttccagaaggaccctgtgggcctgatgagccgggtggcccagcctgccagcaagaagatcgatcagaacaagctgaaacctgagatggacgagaagggcaacctgaccaccgccggctttgcctgctctcagtgtggccagcccctgttcgtgtacaagctggagcaggtgtctgagaagggcaaggcttacaccaactacttcggacggtgcaatgtggccgagcacgaaaagctgatcctgctggcccagctgaagcccgagaaggatagcgacgaagccgtgacatatagcctgggaaagtttgggcagagggccctggatttctacagcattcatgtgaccaaggagtccacccaccccgtgaagcccctggcccagatcgccggaaacagatacgcctccggacctgtgggaaaggccctgagcgacgcatgtatgggcacaatcgcctccttcctgtctaagtaccaggacatcatcatcgaacaccagaaggtggtgaagggcaaccagaagagactggagagcctgcgggagctggccggcaaggaaaacctggaataccctagcgtgaccctgccacctcagcctcacaccaaggagggcgttgatgcctacaacgaagtgatcgcccgggtgcgaatgtgggtgaacctgaacctgtggcagaagctgaagctaagcagagatgatgccaagcctctgctgagactgaagggattcccttcctttcctctggtcgagagacaggccaacgaagtggactggtgggacatggtgtgtaacgtgaagaagctgatcaacgagaaaaaggaggatggcaaggtgttttggcagaatctggctggctacaagagacaggaagccctgagaccatacctgagcagcgaggaagatcggaagaagggaaagaaattcgctcggtaccagctgggcgacctgctgctgcacctggaaaagaagcacggcgaggactggggaaaggtgtacgacgaggcctgggagcggattgacaagaaagtggaaggcctgagcaagcacatcaagctggaagaggaacggagaagcgaggacgcccagagcaaggccgccctgaccgactggctgcgggctaaggccagcttcgtgatcgagggcctgaaggaggccgacaaggacgagttctgcagatgcgagctgaagctgcagaagtggtacggggacctgcggggaaagcccttcgccatcgaagccgagaacagcatcctggacatcagcggcttcagcaagcagtacaactgtgccttcatctggcagaaggacggcgtgaagaagctgaacctgtacctgatcatcaactacttcaagggcggcaagctgcggttcaagaagatcaaacctgaagccttcgaagccaacagattctacaccgtgatcaacaaaaagagcggcgagatcgtgcccatggaggtgaacttcaacttcgacgaccccaacctgatcatcctgcctctggcctttggcaagagacagggcagagaattcatctggaacgacctgctgtccctggaaaccggcagcctgaagctggccaacggaagagtgatcgagaagacactgtacaacagaagaacccggcaggatgagcctgccctgttcgtggccctgaccttcgagcggcgggaggtcctggactcctccaatatcaaaccaatgaacctgatcggcgtggcaagaggcgaaaacatccccgccgtgatcgccctgaccgaccccgagggctgcccactgagccggtttaaggatagcctgggaaacccaacccacatcctgagaatcggcgagagctataaggagaagcagcggaccatccaggccaagaaggaggtggagcagcggagagccggcggctacagccggaagtacgccagcaaagccaagaatctggcagacgatatggtgagaaacaccgctagagatctgctgtactacgccgtgacccaggatgccatgctgatcttcgccaacctgagccggggcttcggccggcagggcaagcggaccttcatggccgagagacagtacacacggatggaggactggctgaccgccaagctggcctacgagggcctgagcaagacctacctgtccaagacactggcccagtacacctccaagacatgcagcaactgtgggtttaccatcaccagcgccgactacgacagggtgctggagaagctgaagaagacagcaacaggctggatgaccacaattaacggcaaggagctgaaggtggagggccagattacctactacaacagatacaagagacagaacgtagtcaaggacctgtccgtcgagctggatagactgagcgaagaatctgtgaacaacgacatctcctcctggacaaagggcagaagcggagaagctctgagcctcctgaagaaaagattctcccatagacccgtgcaggagaagttcgtgtgcctgaactgcggcttcgagacacacgcagccgagcaagccgccctgaacatcgccagatcctggctgttcctgcggagccaggagtacaagaaataccagacaaacaagacaaccggcaacaccgataagagagccttcgtcgagacctggcagtccttttaccggaagaagcttaaggaggtgtggaaacctgccgtgcggtctggcggatctggcggaggctccaccagccccaagaaaaagagaaaagtctaagctgccttctgcggggcttgccttctggccatgcccttcttctctcccttgcacctgtacctcttggtctttgaataaagcctgagtaggaaggctagcaaaaaaaaaaaaaaaaaaaaaaaaaaaaaaaaaaaaaaaaaaaaaaaaaaaaaaaaaaaaaaaaaaaaaaaaaaaaaaaagcccagccggctccccaacctctaccgaggagggcacctctgagtccgccacccccgagagcggccctggcacctccaccgagcccagcgagggcagcgcacccggcagccctgccggcagccccacctccacagaggagggaaccagcaccgagcccagcgaaggcagcgccccaggcaccagcaccgagcctagtgagcaggagattaaacggatcaacaagatcagaagaagacttgtgaaagacagcaacaccaagaaggccggcaagacaggccccatgaaaaccctgctggttagagtgatgacacccgatctgagagagcggctggaaaacctgagaaagaagcctgaaaatatcccccagcccatcagcaatacatctagagccaacctgaataagctgctgaccgattacaccgaaatgaagaaggcgatcctgcatgtgtactgggaagagttccagaaggaccctgtgggcctgatgagccgggtggcccagcctgccagcaagaagatcgatcagaacaagctgaaacctgagatggacgagaagggcaacctgaccaccgccggctttgcctgctctcagtgtggccagcccctgttcgtgtacaagctggagcaggtgtctgagaagggcaaggcttacaccaactacttcggacggtgcaatgtggccgagcacgaaaagctgatcctgctggcccagctgaagcccgagaaggatagcgacgaagccgtgacatatagcctgggaaagtttgggcagagggccctggatttctacagcattcatgtgaccaaggagtccacccaccccgtgaagcccctggcccagatcgccggaaacagatacgcctccggacctgtgggaaaggccctgagcgacgcatgtatgggcacaatcgcctccttcctgtctaagtaccaggacatcatcatcgaacaccagaaggtggtgaagggcaaccagaagagactggagagcctgcgggagctggccggcaaggaaaacctggaataccctagcgtgaccctgccacctcagcctcacaccaaggagggcgttgatgcctacaacgaagtgatcgcccgggtgcgaatgtgggtgaacctgaacctgtggcagaagctgaagctaagcagagatgatgccaagcctctgctgagactgaagggattcccttcctttcctctggtcgagagacaggccaacgaagtggactggtgggacatggtgtgtaacgtgaagaagctgatcaacgagaaaaaggaggatggcaaggtgttttggcagaatctggctggctacaagagacaggaagccctgagaccatacctgagcagcgaggaagatcggaagaagggaaagaaattcgctcggtaccagctgggcgacctgctgctgcacctggaaaagaagcacggcgaggactggggaaaggtgtacgacgaggcctgggagcggattgacaagaaagtggaaggcctgagcaagcacatcaagctggaagaggaacggagaagcgaggacgcccagagcaaggccgccctgaccgactggctgcgggctaaggccagcttcgtgatcgagggcctgaaggaggccgacaaggacgagttctgcagatgcgagctgaagctgcagaagtggtacggggacctgcggggaaagcccttcgccatcgaagccgagaacagcatcctggacatcagcggcttcagcaagcagtacaactgtgccttcatctggcagaaggacggcgtgaagaagctgaacctgtacctgatcatcaactacttcaagggcggcaagctgcggttcaagaagatcaaacctgaagccttcgaagccaacagattctacaccgtgatcaacaaaaagagcggcgagatcgtgcccatggaggtgaacttcaacttcgacgaccccaacctgatcatcctgcctctggcctttggcaagagacagggcagagaattcatctggaacgacctgctgtccctggaaaccggcagcctgaagctggccaacggaagagtgatcgagaagacactgtacaacagaagaacccggcaggatgagcctgccctgttcgtggccctgaccttcgagcggcgggaggtcctggactcctccaatatcaaaccaatgaacctgatcggcgtggcaagaggcgaaaacatccccgccgtgatcgccctgaccgaccccgagggctgcccactgagccggtttaaggatagcctgggaaacccaacccacatcctgagaatcggcgagagctataaggagaagcagcggaccatccaggccaagaaggaggtggagcagcggagagccggcggctacagccggaagtacgccagcaaagccaagaatctggcagacgatatggtgagaaacaccgctagagatctgctgtactacgccgtgacccaggatgccatgctgatcttcgccaacctgagccggggcttcggccggcagggcaagcggaccttcatggccgagagacagtacacacggatggaggactggctgaccgccaagctggcctacgagggcctgagcaagacctacctgtccaagacactggcccagtacacctccaagacatgcagcaactgtgggtttaccatcaccagcgccgactacgacagggtgctggagaagctgaagaagacagcaacaggctggatgaccacaattaacggcaaggagctgaaggtggagggccagattacctactacaacagatacaagagacagaacgtagtcaaggacctgtccgtcgagctggatagactgagcgaagaatctgtgaacaacgacatctcctcctggacaaagggcagaagcggagaagctctgagcctcctgaagaaaagattctcccatagacccgtgcaggagaagttcgtgtgcctgaactgcggcttcgagacacacgcagccgagcaagccgccctgaacatcgccagatcctggctgttcctgcggagccaggagtacaagaaataccagacaaacaagacaaccggcaacaccgataagagagccttcgtcgagacctggcagtccttttaccggaagaagcttaaggaggtgtggaaacctgccgtgcggtctggcggatctggcggaggctccaccagccccaagaaaaagagaaaagtctaagctgccttctgcggggcttgccttctggccatgcccttcttctctcccttgcacctgtacctcttggtctttgaataaagcctgagtaggaaggctagcaaaaaaaaaaaaaaaaaaaaaaaaaaaaaaaaaaaaaaaaaaaaaaaaaaaaaaaaaaaaaaaaaaaaaaaaaaaaaaaa

SEQ ID NO: 9838 - RNA, 8787 nt, synthetic construct
  source 1..8787: mol_type = other RNA
aggaaataagagagaaaagaagagtaagaagaaatataagagccaccatggcccctaagaagaagcgtaaagtgagccggatgaaccacgaccaggagttcgacccccctaaggtgtaccctcccgtccccgccgagaagagaaagcccatccgggtcctgagcctgttcgatggcatcgccaccggtctgctggtgctgaaggacctgggcatccaggtggataggtacattgcctccgaggtgtgcgaggactccatcaccgtgggaatggtgcgtcatcagggcaagatcatgtacgtgggcgacgtgcggagcgtgacacagaagcatatccaggagtggggccctttcgacctggtgatcggcggcagcccttgcaatgacctgagcatcgtgaacccagcccggaagggcctgtacgagggaaccggcagactgttcttcgagttttacagactgctgcacgacgcccggcctaaggaaggcgacgaccggcccttcttttggctgttcgagaatgtggtggccatgggagtcagcgacaagcgggatattagccggttcctggagagcaaccccgtgatgatcgatgccaaggaagtgagcgccgcccaccgggccagatacttctggggcaatctgcctggcatgaacagacccctggccagcaccgtgaacgacaagctggagctgcaggagtgcctggagcacggccggatcgccaagttcagcaaggtgagaaccatcaccacccgaagcaacagcatcaaacaaggcaaggaccagcactttcctgtgttcatgaacgagaaggaggacatcctgtggtgtaccgagatggagagagtgttcgggttcccagtccactacacagatgtcagcaacatgtctagactggccagacagagactgctgggaagaagctggtccgtccctgtgatcagacacctgttcgcccctctgaaggagtacttcgcctgcgtgagcagcggcaacagcaacgccaacagccggggccccagcttctctagcggcctggtgccactgtccctgagagggagccacatgggccccatggagatctacaaaaccgtgagcgcctggaagcggcagcctgtgcgcgtgctgagcctgtttcggaatatcgataaagtcctgaaaagcctgggattcctggagagcggctctggctccggcggtggcaccctgaagtacgtggaggatgtgacaaacgtggtcagacgggatgtggagaagtggggccccttcgatctggtgtacggcagcacccaacccctgggcagctcttgtgaccggtgccctggctggtacatgtttcagttccaccggatcctgcagtacgccctgccgagacaggagtcccagcggccattcttttggattttcatggacaacttgctgctgaccgaggatgaccaggaaactaccactcggttcctgcagaccgaagccgtgaccctgcaggacgtgagaggccgggactaccagaacgccatgcgggtgtggtccaacatccctggactgaaaagcaagcacgcacctctgacccctaaagaagaggagtacctgcaggcccaggtgcggagcagaagcaagctggacgcccctaaggtggatctgctggtgaagaattgcctcctgcccctgagagagtacttcaagtatttcagccagaatagtctgcccctgggaggcagcggcggcggcgccaaggcccccgtgaccttcggcgacctggccatctacttcagccaggaggagtgggagtggctgagccccatccagaaggacctgtacgaggacgtgatgctggagaactaccagaacctggtgagcctgggcctgagcttcaggaggcccaacgtgatcagcctgctggagaagggcaaggccccctggatggtggaccccgtgaagaggaggaggggcctggacctgggcagcaagtgcggcggcccaagcagcggcgcccctcctcccagcggcggcaggcggcccaagcagcggcgcccctcctcccagcggcggcagcccagccggctccccaacctctaccgaggagggcacctctgagtccgccacccccgagagcggccctggcacctccaccgagcccagcgagggcagcgcacccggcagccctgccggcagccccacctccacagaggagggaaccagcaccgagcccagcgaaggcagcgccccaggcaccagcaccgagcctagtgagcaggagattaaacggatcaacaagatcagaagaagacttgtgaaagacagcaacaccaagaaggccggcaagacaggccccatgaaaaccctgctggttagagtgatgacacccgatctgagagagcggctggaaaacctgagaaagaagcctgaaaatatcccccagcccatcagcaatacatctagagccaacctgaataagctgctgaccgattacaccgaaatgaagaaggcgatcctgcatgtgtactgggaagagttccagaaggaccctgtgggcctgatgagccgggtggcccagcctgccagcaagaagatcgatcagaacaagctgaaacctgagatggacgagaagggcaacctgaccaccgccggctttgcctgctctcagtgtggccagcccctgttcgtgtacaagctggagcaggtgtctgagaagggcaaggcttacaccaactacttcggacggtgcaatgtggccgagcacgaaaagctgatcctgctggcccagctgaagcccgagaaggatagcgacgaagccgtgacatatagcctgggaaagtttgggcagagggccctggatttctacagcattcatgtgaccaaggagtccacccaccccgtgaagcccctggcccagatcgccggaaacagatacgcctccggacctgtgggaaaggccctgagcgacgcatgtatgggcacaatcgcctccttcctgtctaagtaccaggacatcatcatcgaacaccagaaggtggtgaagggcaaccagaagagactggagagcctgcgggagctggccggcaaggaaaacctggaataccctagcgtgaccctgccacctcagcctcacaccaaggagggcgttgatgcctacaacgaagtgatcgcccgggtgcgaatgtgggtgaacctgaacctgtggcagaagctgaagctaagcagagatgatgccaagcctctgctgagactgaagggattcccttcctttcctctggtcgagagacaggccaacgaagtggactggtgggacatggtgtgtaacgtgaagaagctgatcaacgagaaaaaggaggatggcaaggtgttttggcagaatctggctggctacaagagacaggaagccctgagaccatacctgagcagcgaggaagatcggaagaagggaaagaaattcgctcggtaccagctgggcgacctgctgctgcacctggaaaagaagcacggcgaggactggggaaaggtgtacgacgaggcctgggagcggattgacaagaaagtggaaggcctgagcaagcacatcaagctggaagaggaacggagaagcgaggacgcccagagcaaggccgccctgaccgactggctgcgggctaaggccagcttcgtgatcgagggcctgaaggaggccgacaaggacgagttctgcagatgcgagctgaagctgcagaagtggtacggggacctgcggggaaagcccttcgccatcgaagccgagaacagcatcctggacatcagcggcttcagcaagcagtacaactgtgccttcatctggcagaaggacggcgtgaagaagctgaacctgtacctgatcatcaactacttcaagggcggcaagctgcggttcaagaagatcaaacctgaagccttcgaagccaacagattctacaccgtgatcaacaaaaagagcggcgagatcgtgcccatggaggtgaacttcaacttcgacgaccccaacctgatcatcctgcctctggcctttggcaagagacagggcagagaattcatctggaacgacctgctgtccctggaaaccggcagcctgaagctggccaacggaagagtgatcgagaagacactgtacaacagaagaacccggcaggatgagcctgccctgttcgtggccctgaccttcgagcggcgggaggtcctggactcctccaatatcaaaccaatgaacctgatcggcgtggcaagaggcgaaaacatccccgccgtgatcgccctgaccgaccccgagggctgcccactgagccggtttaaggatagcctgggaaacccaacccacatcctgagaatcggcgagagctataaggagaagcagcggaccatccaggccaagaaggaggtggagcagcggagagccggcggctacagccggaagtacgccagcaaagccaagaatctggcagacgatatggtgagaaacaccgctagagatctgctgtactacgccgtgacccaggatgccatgctgatcttcgccaacctgagccggggcttcggccggcagggcaagcggaccttcatggccgagagacagtacacacggatggaggactggctgaccgccaagctggcctacgagggcctgagcaagacctacctgtccaagacactggcccagtacacctccaagacatgcagcaactgtgggtttaccatcaccagcgccgactacgacagggtgctggagaagctgaagaagacagcaacaggctggatgaccacaattaacggcaaggagctgaaggtggagggccagattacctactacaacagatacaagagacagaacgtagtcaaggacctgtccgtcgagctggatagactgagcgaagaatctgtgaacaacgacatctcctcctggacaaagggcagaagcggagaagctctgagcctcctgaagaaaagattctcccatagacccgtgcaggagaagttcgtgtgcctgaactgcggcttcgagacacacgcagccgagcaagccgccctgaacatcgccagatcctggctgttcctgcggagccaggagtacaagaaataccagacaaacaagacaaccggcaacaccgataagagagccttcgtcgagacctggcagtccttttaccggaagaagcttaaggaggtgtggaaacctgccgtgcggtctggcggatctggcggaggctccaccagccccaagaaaaagagaaaagtctaagctgccttctgcggggcttgccttctggccatgcccttcttctctcccttgcacctgtacctcttggtctttgaataaagcctgagtaggaaggctagcaaaaaaaaaaaaaaaaaaaaaaaaaaaaaaaaaaaaaaaaaaaaaaaaaaaaaaaaaaaaaaaaaaaaaaaaaaaaaaaagcccagccggctccccaacctctaccgaggagggcacctctgagtccgccacccccgagagcggccctggcacctccaccgagcccagcgagggcagcgcacccggcagccctgccggcagccccacctccacagaggagggaaccagcaccgagcccagcgaaggcagcgccccaggcaccagcaccgagcctagtgagcaggagattaaacggatcaacaagatcagaagaagacttgtgaaagacagcaacaccaagaaggccggcaagacaggccccatgaaaaccctgctggttagagtgatgacacccgatctgagagagcggctggaaaacctgagaaagaagcctgaaaatatcccccagcccatcagcaatacatctagagccaacctgaataagctgctgaccgattacaccgaaatgaagaaggcgatcctgcatgtgtactgggaagagttccagaaggaccctgtgggcctgatgagccgggtggcccagcctgccagcaagaagatcgatcagaacaagctgaaacctgagatggacgagaagggcaacctgaccaccgccggctttgcctgctctcagtgtggccagcccctgttcgtgtacaagctggagcaggtgtctgagaagggcaaggcttacaccaactacttcggacggtgcaatgtggccgagcacgaaaagctgatcctgctggcccagctgaagcccgagaaggatagcgacgaagccgtgacatatagcctgggaaagtttgggcagagggccctggatttctacagcattcatgtgaccaaggagtccacccaccccgtgaagcccctggcccagatcgccggaaacagatacgcctccggacctgtgggaaaggccctgagcgacgcatgtatgggcacaatcgcctccttcctgtctaagtaccaggacatcatcatcgaacaccagaaggtggtgaagggcaaccagaagagactggagagcctgcgggagctggccggcaaggaaaacctggaataccctagcgtgaccctgccacctcagcctcacaccaaggagggcgttgatgcctacaacgaagtgatcgcccgggtgcgaatgtgggtgaacctgaacctgtggcagaagctgaagctaagcagagatgatgccaagcctctgctgagactgaagggattcccttcctttcctctggtcgagagacaggccaacgaagtggactggtgggacatggtgtgtaacgtgaagaagctgatcaacgagaaaaaggaggatggcaaggtgttttggcagaatctggctggctacaagagacaggaagccctgagaccatacctgagcagcgaggaagatcggaagaagggaaagaaattcgctcggtaccagctgggcgacctgctgctgcacctggaaaagaagcacggcgaggactggggaaaggtgtacgacgaggcctgggagcggattgacaagaaagtggaaggcctgagcaagcacatcaagctggaagaggaacggagaagcgaggacgcccagagcaaggccgccctgaccgactggctgcgggctaaggccagcttcgtgatcgagggcctgaaggaggccgacaaggacgagttctgcagatgcgagctgaagctgcagaagtggtacggggacctgcggggaaagcccttcgccatcgaagccgagaacagcatcctggacatcagcggcttcagcaagcagtacaactgtgccttcatctggcagaaggacggcgtgaagaagctgaacctgtacctgatcatcaactacttcaagggcggcaagctgcggttcaagaagatcaaacctgaagccttcgaagccaacagattctacaccgtgatcaacaaaaagagcggcgagatcgtgcccatggaggtgaacttcaacttcgacgaccccaacctgatcatcctgcctctggcctttggcaagagacagggcagagaattcatctggaacgacctgctgtccctggaaaccggcagcctgaagctggccaacggaagagtgatcgagaagacactgtacaacagaagaacccggcaggatgagcctgccctgttcgtggccctgaccttcgagcggcgggaggtcctggactcctccaatatcaaaccaatgaacctgatcggcgtggcaagaggcgaaaacatccccgccgtgatcgccctgaccgaccccgagggctgcccactgagccggtttaaggatagcctgggaaacccaacccacatcctgagaatcggcgagagctataaggagaagcagcggaccatccaggccaagaaggaggtggagcagcggagagccggcggctacagccggaagtacgccagcaaagccaagaatctggcagacgatatggtgagaaacaccgctagagatctgctgtactacgccgtgacccaggatgccatgctgatcttcgccaacctgagccggggcttcggccggcagggcaagcggaccttcatggccgagagacagtacacacggatggaggactggctgaccgccaagctggcctacgagggcctgagcaagacctacctgtccaagacactggcccagtacacctccaagacatgcagcaactgtgggtttaccatcaccagcgccgactacgacagggtgctggagaagctgaagaagacagcaacaggctggatgaccacaattaacggcaaggagctgaaggtggagggccagattacctactacaacagatacaagagacagaacgtagtcaaggacctgtccgtcgagctggatagactgagcgaagaatctgtgaacaacgacatctcctcctggacaaagggcagaagcggagaagctctgagcctcctgaagaaaagattctcccatagacccgtgcaggagaagttcgtgtgcctgaactgcggcttcgagacacacgcagccgagcaagccgccctgaacatcgccagatcctggctgttcctgcggagccaggagtacaagaaataccagacaaacaagacaaccggcaacaccgataagagagccttcgtcgagacctggcagtccttttaccggaagaagcttaaggaggtgtggaaacctgccgtgcggtctggcggatctggcggaggctccaccagccccaagaaaaagagaaaagtctaagctgccttctgcggggcttgccttctggccatgcccttcttctctcccttgcacctgtacctcttggtctttgaataaagcctgagtaggaaggctagcaaaaaaaaaaaaaaaaaaaaaaaaaaaaaaaaaaaaaaaaaaaaaaaaaaaaaaaaaaaaaaaaaaaaaaaaaaaaaaaa

SEQ ID NO: 9839 - RNA, 8787 nt, synthetic construct
  source 1..8787: mol_type = other RNA
aggaaataagagagaaaagaagagtaagaagaaatataagagccaccatggcccctaagaagaagcgtaaagtgagccggatgaaccacgaccaggagttcgacccccctaaggtgtaccctcccgtccccgccgagaagagaaagcccatccgggtcctgagcctgttcgatggcatcgccaccggtctgctggtgctgaaggacctgggcatccaggtggataggtacattgcctccgaggtgtgcgaggactccatcaccgtgggaatggtgcgtcatcagggcaagatcatgtacgtgggcgacgtgcggagcgtgacacagaagcatatccaggagtggggccctttcgacctggtgatcggcggcagcccttgcaatgacctgagcatcgtgaacccagcccggaagggcctgtacgagggaaccggcagactgttcttcgagttttacagactgctgcacgacgcccggcctaaggaaggcgacgaccggcccttcttttggctgttcgagaatgtggtggccatgggagtcagcgacaagcgggatattagccggttcctggagagcaaccccgtgatgatcgatgccaaggaagtgagcgccgcccaccgggccagatacttctggggcaatctgcctggcatgaacagacccctggccagcaccgtgaacgacaagctggagctgcaggagtgcctggagcacggccggatcgccaagttcagcaaggtgagaaccatcaccacccgaagcaacagcatcaaacaaggcaaggaccagcactttcctgtgttcatgaacgagaaggaggacatcctgtggtgtaccgagatggagagagtgttcgggttcccagtccactacacagatgtcagcaacatgtctagactggccagacagagactgctgggaagaagctggtccgtccctgtgatcagacacctgttcgcccctctgaaggagtacttcgcctgcgtgagcagcggcaacagcaacgccaacagccggggccccagcttctctagcggcctggtgccactgtccctgagagggagccacatgggccccatggagatctacaaaaccgtgagcgcctggaagcggcagcctgtgcgcgtgctgagcctgtttcggaatatcgataaagtcctgaaaagcctgggattcctggagagcggctctggctccggcggtggcaccctgaagtacgtggaggatgtgacaaacgtggtcagacgggatgtggagaagtggggccccttcgatctggtgtacggcagcacccaacccctgggcagctcttgtgaccggtgccctggctggtacatgtttcagttccaccggatcctgcagtacgccctgccgagacaggagtcccagcggccattcttttggattttcatggacaacttgctgctgaccgaggatgaccaggaaactaccactcggttcctgcagaccgaagccgtgaccctgcaggacgtgagaggccgggactaccagaacgccatgcgggtgtggtccaacatccctggactgaaaagcaagcacgcacctctgacccctaaagaagaggagtacctgcaggcccaggtgcggagcagaagcaagctggacgcccctaaggtggatctgctggtgaagaattgcctcctgcccctgagagagtacttcaagtatttcagccagaatagtctgcccctgggaggcagcggcggcggcatggccttcagggacgtggccgtggacttcacccaggacgagtggaggctgctgagccccgcccagaggaccctgtacagggaggtgatgctggagaactacagcaacctggtgagcctgggcatcagcttcagcaagcccgagatcatcacccagctggagcagggcaaggagacctggagggaggagaagaagtgcccccccgccacctgccccgccgaccccgagcccgagctgtgcctgggcggcccaagcagcggcgcccctcctcccagcggcggcaggcggcccaagcagcggcgcccctcctcccagcggcggcagcccagccggctccccaacctctaccgaggagggcacctctgagtccgccacccccgagagcggccctggcacctccaccgagcccagcgagggcagcgcacccggcagccctgccggcagccccacctccacagaggagggaaccagcaccgagcccagcgaaggcagcgccccaggcaccagcaccgagcctagtgagcaggagattaaacggatcaacaagatcagaagaagacttgtgaaagacagcaacaccaagaaggccggcaagacaggccccatgaaaaccctgctggttagagtgatgacacccgatctgagagagcggctggaaaacctgagaaagaagcctgaaaatatcccccagcccatcagcaatacatctagagccaacctgaataagctgctgaccgattacaccgaaatgaagaaggcgatcctgcatgtgtactgggaagagttccagaaggaccctgtgggcctgatgagccgggtggcccagcctgccagcaagaagatcgatcagaacaagctgaaacctgagatggacgagaagggcaacctgaccaccgccggctttgcctgctctcagtgtggccagcccctgttcgtgtacaagctggagcaggtgtctgagaagggcaaggcttacaccaactacttcggacggtgcaatgtggccgagcacgaaaagctgatcctgctggcccagctgaagcccgagaaggatagcgacgaagccgtgacatatagcctgggaaagtttgggcagagggccctggatttctacagcattcatgtgaccaaggagtccacccaccccgtgaagcccctggcccagatcgccggaaacagatacgcctccggacctgtgggaaaggccctgagcgacgcatgtatgggcacaatcgcctccttcctgtctaagtaccaggacatcatcatcgaacaccagaaggtggtgaagggcaaccagaagagactggagagcctgcgggagctggccggcaaggaaaacctggaataccctagcgtgaccctgccacctcagcctcacaccaaggagggcgttgatgcctacaacgaagtgatcgcccgggtgcgaatgtgggtgaacctgaacctgtggcagaagctgaagctaagcagagatgatgccaagcctctgctgagactgaagggattcccttcctttcctctggtcgagagacaggccaacgaagtggactggtgggacatggtgtgtaacgtgaagaagctgatcaacgagaaaaaggaggatggcaaggtgttttggcagaatctggctggctacaagagacaggaagccctgagaccatacctgagcagcgaggaagatcggaagaagggaaagaaattcgctcggtaccagctgggcgacctgctgctgcacctggaaaagaagcacggcgaggactggggaaaggtgtacgacgaggcctgggagcggattgacaagaaagtggaaggcctgagcaagcacatcaagctggaagaggaacggagaagcgaggacgcccagagcaaggccgccctgaccgactggctgcgggctaaggccagcttcgtgatcgagggcctgaaggaggccgacaaggacgagttctgcagatgcgagctgaagctgcagaagtggtacggggacctgcggggaaagcccttcgccatcgaagccgagaacagcatcctggacatcagcggcttcagcaagcagtacaactgtgccttcatctggcagaaggacggcgtgaagaagctgaacctgtacctgatcatcaactacttcaagggcggcaagctgcggttcaagaagatcaaacctgaagccttcgaagccaacagattctacaccgtgatcaacaaaaagagcggcgagatcgtgcccatggaggtgaacttcaacttcgacgaccccaacctgatcatcctgcctctggcctttggcaagagacagggcagagaattcatctggaacgacctgctgtccctggaaaccggcagcctgaagctggccaacggaagagtgatcgagaagacactgtacaacagaagaacccggcaggatgagcctgccctgttcgtggccctgaccttcgagcggcgggaggtcctggactcctccaatatcaaaccaatgaacctgatcggcgtggcaagaggcgaaaacatccccgccgtgatcgccctgaccgaccccgagggctgcccactgagccggtttaaggatagcctgggaaacccaacccacatcctgagaatcggcgagagctataaggagaagcagcggaccatccaggccaagaaggaggtggagcagcggagagccggcggctacagccggaagtacgccagcaaagccaagaatctggcagacgatatggtgagaaacaccgctagagatctgctgtactacgccgtgacccaggatgccatgctgatcttcgccaacctgagccggggcttcggccggcagggcaagcggaccttcatggccgagagacagtacacacggatggaggactggctgaccgccaagctggcctacgagggcctgagcaagacctacctgtccaagacactggcccagtacacctccaagacatgcagcaactgtgggtttaccatcaccagcgccgactacgacagggtgctggagaagctgaagaagacagcaacaggctggatgaccacaattaacggcaaggagctgaaggtggagggccagattacctactacaacagatacaagagacagaacgtagtcaaggacctgtccgtcgagctggatagactgagcgaagaatctgtgaacaacgacatctcctcctggacaaagggcagaagcggagaagctctgagcctcctgaagaaaagattctcccatagacccgtgcaggagaagttcgtgtgcctgaactgcggcttcgagacacacgcagccgagcaagccgccctgaacatcgccagatcctggctgttcctgcggagccaggagtacaagaaataccagacaaacaagacaaccggcaacaccgataagagagccttcgtcgagacctggcagtccttttaccggaagaagcttaaggaggtgtggaaacctgccgtgcggtctggcggatctggcggaggctccaccagccccaagaaaaagagaaaagtctaagctgccttctgcggggcttgccttctggccatgcccttcttctctcccttgcacctgtacctcttggtctttgaataaagcctgagtaggaaggctagcaaaaaaaaaaaaaaaaaaaaaaaaaaaaaaaaaaaaaaaaaaaaaaaaaaaaaaaaaaaaaaaaaaaaaaaaaaaaaaaagcccagccggctccccaacctctaccgaggagggcacctctgagtccgccacccccgagagcggccctggcacctccaccgagcccagcgagggcagcgcacccggcagccctgccggcagccccacctccacagaggagggaaccagcaccgagcccagcgaaggcagcgccccaggcaccagcaccgagcctagtgagcaggagattaaacggatcaacaagatcagaagaagacttgtgaaagacagcaacaccaagaaggccggcaagacaggccccatgaaaaccctgctggttagagtgatgacacccgatctgagagagcggctggaaaacctgagaaagaagcctgaaaatatcccccagcccatcagcaatacatctagagccaacctgaataagctgctgaccgattacaccgaaatgaagaaggcgatcctgcatgtgtactgggaagagttccagaaggaccctgtgggcctgatgagccgggtggcccagcctgccagcaagaagatcgatcagaacaagctgaaacctgagatggacgagaagggcaacctgaccaccgccggctttgcctgctctcagtgtggccagcccctgttcgtgtacaagctggagcaggtgtctgagaagggcaaggcttacaccaactacttcggacggtgcaatgtggccgagcacgaaaagctgatcctgctggcccagctgaagcccgagaaggatagcgacgaagccgtgacatatagcctgggaaagtttgggcagagggccctggatttctacagcattcatgtgaccaaggagtccacccaccccgtgaagcccctggcccagatcgccggaaacagatacgcctccggacctgtgggaaaggccctgagcgacgcatgtatgggcacaatcgcctccttcctgtctaagtaccaggacatcatcatcgaacaccagaaggtggtgaagggcaaccagaagagactggagagcctgcgggagctggccggcaaggaaaacctggaataccctagcgtgaccctgccacctcagcctcacaccaaggagggcgttgatgcctacaacgaagtgatcgcccgggtgcgaatgtgggtgaacctgaacctgtggcagaagctgaagctaagcagagatgatgccaagcctctgctgagactgaagggattcccttcctttcctctggtcgagagacaggccaacgaagtggactggtgggacatggtgtgtaacgtgaagaagctgatcaacgagaaaaaggaggatggcaaggtgttttggcagaatctggctggctacaagagacaggaagccctgagaccatacctgagcagcgaggaagatcggaagaagggaaagaaattcgctcggtaccagctgggcgacctgctgctgcacctggaaaagaagcacggcgaggactggggaaaggtgtacgacgaggcctgggagcggattgacaagaaagtggaaggcctgagcaagcacatcaagctggaagaggaacggagaagcgaggacgcccagagcaaggccgccctgaccgactggctgcgggctaaggccagcttcgtgatcgagggcctgaaggaggccgacaaggacgagttctgcagatgcgagctgaagctgcagaagtggtacggggacctgcggggaaagcccttcgccatcgaagccgagaacagcatcctggacatcagcggcttcagcaagcagtacaactgtgccttcatctggcagaaggacggcgtgaagaagctgaacctgtacctgatcatcaactacttcaagggcggcaagctgcggttcaagaagatcaaacctgaagccttcgaagccaacagattctacaccgtgatcaacaaaaagagcggcgagatcgtgcccatggaggtgaacttcaacttcgacgaccccaacctgatcatcctgcctctggcctttggcaagagacagggcagagaattcatctggaacgacctgctgtccctggaaaccggcagcctgaagctggccaacggaagagtgatcgagaagacactgtacaacagaagaacccggcaggatgagcctgccctgttcgtggccctgaccttcgagcggcgggaggtcctggactcctccaatatcaaaccaatgaacctgatcggcgtggcaagaggcgaaaacatccccgccgtgatcgccctgaccgaccccgagggctgcccactgagccggtttaaggatagcctgggaaacccaacccacatcctgagaatcggcgagagctataaggagaagcagcggaccatccaggccaagaaggaggtggagcagcggagagccggcggctacagccggaagtacgccagcaaagccaagaatctggcagacgatatggtgagaaacaccgctagagatctgctgtactacgccgtgacccaggatgccatgctgatcttcgccaacctgagccggggcttcggccggcagggcaagcggaccttcatggccgagagacagtacacacggatggaggactggctgaccgccaagctggcctacgagggcctgagcaagacctacctgtccaagacactggcccagtacacctccaagacatgcagcaactgtgggtttaccatcaccagcgccgactacgacagggtgctggagaagctgaagaagacagcaacaggctggatgaccacaattaacggcaaggagctgaaggtggagggccagattacctactacaacagatacaagagacagaacgtagtcaaggacctgtccgtcgagctggatagactgagcgaagaatctgtgaacaacgacatctcctcctggacaaagggcagaagcggagaagctctgagcctcctgaagaaaagattctcccatagacccgtgcaggagaagttcgtgtgcctgaactgcggcttcgagacacacgcagccgagcaagccgccctgaacatcgccagatcctggctgttcctgcggagccaggagtacaagaaataccagacaaacaagacaaccggcaacaccgataagagagccttcgtcgagacctggcagtccttttaccggaagaagcttaaggaggtgtggaaacctgccgtgcggtctggcggatctggcggaggctccaccagccccaagaaaaagagaaaagtctaagctgccttctgcggggcttgccttctggccatgcccttcttctctcccttgcacctgtacctcttggtctttgaataaagcctgagtaggaaggctagcaaaaaaaaaaaaaaaaaaaaaaaaaaaaaaaaaaaaaaaaaaaaaaaaaaaaaaaaaaaaaaaaaaaaaaaaaaaaaaaa

SEQ ID NO: 9840 - RNA, 8787 nt, synthetic construct
  source 1..8787: mol_type = other RNA
aggaaataagagagaaaagaagagtaagaagaaatataagagccaccatggcccctaagaagaagcgtaaagtgagccggatgaaccacgaccaggagttcgacccccctaaggtgtaccctcccgtccccgccgagaagagaaagcccatccgggtcctgagcctgttcgatggcatcgccaccggtctgctggtgctgaaggacctgggcatccaggtggataggtacattgcctccgaggtgtgcgaggactccatcaccgtgggaatggtgcgtcatcagggcaagatcatgtacgtgggcgacgtgcggagcgtgacacagaagcatatccaggagtggggccctttcgacctggtgatcggcggcagcccttgcaatgacctgagcatcgtgaacccagcccggaagggcctgtacgagggaaccggcagactgttcttcgagttttacagactgctgcacgacgcccggcctaaggaaggcgacgaccggcccttcttttggctgttcgagaatgtggtggccatgggagtcagcgacaagcgggatattagccggttcctggagagcaaccccgtgatgatcgatgccaaggaagtgagcgccgcccaccgggccagatacttctggggcaatctgcctggcatgaacagacccctggccagcaccgtgaacgacaagctggagctgcaggagtgcctggagcacggccggatcgccaagttcagcaaggtgagaaccatcaccacccgaagcaacagcatcaaacaaggcaaggaccagcactttcctgtgttcatgaacgagaaggaggacatcctgtggtgtaccgagatggagagagtgttcgggttcccagtccactacacagatgtcagcaacatgtctagactggccagacagagactgctgggaagaagctggtccgtccctgtgatcagacacctgttcgcccctctgaaggagtacttcgcctgcgtgagcagcggcaacagcaacgccaacagccggggccccagcttctctagcggcctggtgccactgtccctgagagggagccacatgggccccatggagatctacaaaaccgtgagcgcctggaagcggcagcctgtgcgcgtgctgagcctgtttcggaatatcgataaagtcctgaaaagcctgggattcctggagagcggctctggctccggcggtggcaccctgaagtacgtggaggatgtgacaaacgtggtcagacgggatgtggagaagtggggccccttcgatctggtgtacggcagcacccaacccctgggcagctcttgtgaccggtgccctggctggtacatgtttcagttccaccggatcctgcagtacgccctgccgagacaggagtcccagcggccattcttttggattttcatggacaacttgctgctgaccgaggatgaccaggaaactaccactcggttcctgcagaccgaagccgtgaccctgcaggacgtgagaggccgggactaccagaacgccatgcgggtgtggtccaacatccctggactgaaaagcaagcacgcacctctgacccctaaagaagaggagtacctgcaggcccaggtgcggagcagaagcaagctggacgcccctaaggtggatctgctggtgaagaattgcctcctgcccctgagagagtacttcaagtatttcagccagaatagtctgcccctgggaggcagcggcggcggcttctgggagagcgtgaccttccaggacgtggccgtggacttcacctgggaggagtggggccacctgggccccgcccagaaggagctgtacagggaggtgatgctggagaactacaggaacctggtgtgcctgggcctggccgtgagcaagcccgacgtgatctgccagctggagcagggcggcgccccctggtggcccgagggcggcgtgcccggcagcagctgcgccgtgtgggacaccaggggcggcccaagcagcggcgcccctcctcccagcggcggcaggcggcccaagcagcggcgcccctcctcccagcggcggcagcccagccggctccccaacctctaccgaggagggcacctctgagtccgccacccccgagagcggccctggcacctccaccgagcccagcgagggcagcgcacccggcagccctgccggcagccccacctccacagaggagggaaccagcaccgagcccagcgaaggcagcgccccaggcaccagcaccgagcctagtgagcaggagattaaacggatcaacaagatcagaagaagacttgtgaaagacagcaacaccaagaaggccggcaagacaggccccatgaaaaccctgctggttagagtgatgacacccgatctgagagagcggctggaaaacctgagaaagaagcctgaaaatatcccccagcccatcagcaatacatctagagccaacctgaataagctgctgaccgattacaccgaaatgaagaaggcgatcctgcatgtgtactgggaagagttccagaaggaccctgtgggcctgatgagccgggtggcccagcctgccagcaagaagatcgatcagaacaagctgaaacctgagatggacgagaagggcaacctgaccaccgccggctttgcctgctctcagtgtggccagcccctgttcgtgtacaagctggagcaggtgtctgagaagggcaaggcttacaccaactacttcggacggtgcaatgtggccgagcacgaaaagctgatcctgctggcccagctgaagcccgagaaggatagcgacgaagccgtgacatatagcctgggaaagtttgggcagagggccctggatttctacagcattcatgtgaccaaggagtccacccaccccgtgaagcccctggcccagatcgccggaaacagatacgcctccggacctgtgggaaaggccctgagcgacgcatgtatgggcacaatcgcctccttcctgtctaagtaccaggacatcatcatcgaacaccagaaggtggtgaagggcaaccagaagagactggagagcctgcgggagctggccggcaaggaaaacctggaataccctagcgtgaccctgccacctcagcctcacaccaaggagggcgttgatgcctacaacgaagtgatcgcccgggtgcgaatgtgggtgaacctgaacctgtggcagaagctgaagctaagcagagatgatgccaagcctctgctgagactgaagggattcccttcctttcctctggtcgagagacaggccaacgaagtggactggtgggacatggtgtgtaacgtgaagaagctgatcaacgagaaaaaggaggatggcaaggtgttttggcagaatctggctggctacaagagacaggaagccctgagaccatacctgagcagcgaggaagatcggaagaagggaaagaaattcgctcggtaccagctgggcgacctgctgctgcacctggaaaagaagcacggcgaggactggggaaaggtgtacgacgaggcctgggagcggattgacaagaaagtggaaggcctgagcaagcacatcaagctggaagaggaacggagaagcgaggacgcccagagcaaggccgccctgaccgactggctgcgggctaaggccagcttcgtgatcgagggcctgaaggaggccgacaaggacgagttctgcagatgcgagctgaagctgcagaagtggtacggggacctgcggggaaagcccttcgccatcgaagccgagaacagcatcctggacatcagcggcttcagcaagcagtacaactgtgccttcatctggcagaaggacggcgtgaagaagctgaacctgtacctgatcatcaactacttcaagggcggcaagctgcggttcaagaagatcaaacctgaagccttcgaagccaacagattctacaccgtgatcaacaaaaagagcggcgagatcgtgcccatggaggtgaacttcaacttcgacgaccccaacctgatcatcctgcctctggcctttggcaagagacagggcagagaattcatctggaacgacctgctgtccctggaaaccggcagcctgaagctggccaacggaagagtgatcgagaagacactgtacaacagaagaacccggcaggatgagcctgccctgttcgtggccctgaccttcgagcggcgggaggtcctggactcctccaatatcaaaccaatgaacctgatcggcgtggcaagaggcgaaaacatccccgccgtgatcgccctgaccgaccccgagggctgcccactgagccggtttaaggatagcctgggaaacccaacccacatcctgagaatcggcgagagctataaggagaagcagcggaccatccaggccaagaaggaggtggagcagcggagagccggcggctacagccggaagtacgccagcaaagccaagaatctggcagacgatatggtgagaaacaccgctagagatctgctgtactacgccgtgacccaggatgccatgctgatcttcgccaacctgagccggggcttcggccggcagggcaagcggaccttcatggccgagagacagtacacacggatggaggactggctgaccgccaagctggcctacgagggcctgagcaagacctacctgtccaagacactggcccagtacacctccaagacatgcagcaactgtgggtttaccatcaccagcgccgactacgacagggtgctggagaagctgaagaagacagcaacaggctggatgaccacaattaacggcaaggagctgaaggtggagggccagattacctactacaacagatacaagagacagaacgtagtcaaggacctgtccgtcgagctggatagactgagcgaagaatctgtgaacaacgacatctcctcctggacaaagggcagaagcggagaagctctgagcctcctgaagaaaagattctcccatagacccgtgcaggagaagttcgtgtgcctgaactgcggcttcgagacacacgcagccgagcaagccgccctgaacatcgccagatcctggctgttcctgcggagccaggagtacaagaaataccagacaaacaagacaaccggcaacaccgataagagagccttcgtcgagacctggcagtccttttaccggaagaagcttaaggaggtgtggaaacctgccgtgcggtctggcggatctggcggaggctccaccagccccaagaaaaagagaaaagtctaagctgccttctgcggggcttgccttctggccatgcccttcttctctcccttgcacctgtacctcttggtctttgaataaagcctgagtaggaaggctagcaaaaaaaaaaaaaaaaaaaaaaaaaaaaaaaaaaaaaaaaaaaaaaaaaaaaaaaaaaaaaaaaaaaaaaaaaaaaaaaagcccagccggctccccaacctctaccgaggagggcacctctgagtccgccacccccgagagcggccctggcacctccaccgagcccagcgagggcagcgcacccggcagccctgccggcagccccacctccacagaggagggaaccagcaccgagcccagcgaaggcagcgccccaggcaccagcaccgagcctagtgagcaggagattaaacggatcaacaagatcagaagaagacttgtgaaagacagcaacaccaagaaggccggcaagacaggccccatgaaaaccctgctggttagagtgatgacacccgatctgagagagcggctggaaaacctgagaaagaagcctgaaaatatcccccagcccatcagcaatacatctagagccaacctgaataagctgctgaccgattacaccgaaatgaagaaggcgatcctgcatgtgtactgggaagagttccagaaggaccctgtgggcctgatgagccgggtggcccagcctgccagcaagaagatcgatcagaacaagctgaaacctgagatggacgagaagggcaacctgaccaccgccggctttgcctgctctcagtgtggccagcccctgttcgtgtacaagctggagcaggtgtctgagaagggcaaggcttacaccaactacttcggacggtgcaatgtggccgagcacgaaaagctgatcctgctggcccagctgaagcccgagaaggatagcgacgaagccgtgacatatagcctgggaaagtttgggcagagggccctggatttctacagcattcatgtgaccaaggagtccacccaccccgtgaagcccctggcccagatcgccggaaacagatacgcctccggacctgtgggaaaggccctgagcgacgcatgtatgggcacaatcgcctccttcctgtctaagtaccaggacatcatcatcgaacaccagaaggtggtgaagggcaaccagaagagactggagagcctgcgggagctggccggcaaggaaaacctggaataccctagcgtgaccctgccacctcagcctcacaccaaggagggcgttgatgcctacaacgaagtgatcgcccgggtgcgaatgtgggtgaacctgaacctgtggcagaagctgaagctaagcagagatgatgccaagcctctgctgagactgaagggattcccttcctttcctctggtcgagagacaggccaacgaagtggactggtgggacatggtgtgtaacgtgaagaagctgatcaacgagaaaaaggaggatggcaaggtgttttggcagaatctggctggctacaagagacaggaagccctgagaccatacctgagcagcgaggaagatcggaagaagggaaagaaattcgctcggtaccagctgggcgacctgctgctgcacctggaaaagaagcacggcgaggactggggaaaggtgtacgacgaggcctgggagcggattgacaagaaagtggaaggcctgagcaagcacatcaagctggaagaggaacggagaagcgaggacgcccagagcaaggccgccctgaccgactggctgcgggctaaggccagcttcgtgatcgagggcctgaaggaggccgacaaggacgagttctgcagatgcgagctgaagctgcagaagtggtacggggacctgcggggaaagcccttcgccatcgaagccgagaacagcatcctggacatcagcggcttcagcaagcagtacaactgtgccttcatctggcagaaggacggcgtgaagaagctgaacctgtacctgatcatcaactacttcaagggcggcaagctgcggttcaagaagatcaaacctgaagccttcgaagccaacagattctacaccgtgatcaacaaaaagagcggcgagatcgtgcccatggaggtgaacttcaacttcgacgaccccaacctgatcatcctgcctctggcctttggcaagagacagggcagagaattcatctggaacgacctgctgtccctggaaaccggcagcctgaagctggccaacggaagagtgatcgagaagacactgtacaacagaagaacccggcaggatgagcctgccctgttcgtggccctgaccttcgagcggcgggaggtcctggactcctccaatatcaaaccaatgaacctgatcggcgtggcaagaggcgaaaacatccccgccgtgatcgccctgaccgaccccgagggctgcccactgagccggtttaaggatagcctgggaaacccaacccacatcctgagaatcggcgagagctataaggagaagcagcggaccatccaggccaagaaggaggtggagcagcggagagccggcggctacagccggaagtacgccagcaaagccaagaatctggcagacgatatggtgagaaacaccgctagagatctgctgtactacgccgtgacccaggatgccatgctgatcttcgccaacctgagccggggcttcggccggcagggcaagcggaccttcatggccgagagacagtacacacggatggaggactggctgaccgccaagctggcctacgagggcctgagcaagacctacctgtccaagacactggcccagtacacctccaagacatgcagcaactgtgggtttaccatcaccagcgccgactacgacagggtgctggagaagctgaagaagacagcaacaggctggatgaccacaattaacggcaaggagctgaaggtggagggccagattacctactacaacagatacaagagacagaacgtagtcaaggacctgtccgtcgagctggatagactgagcgaagaatctgtgaacaacgacatctcctcctggacaaagggcagaagcggagaagctctgagcctcctgaagaaaagattctcccatagacccgtgcaggagaagttcgtgtgcctgaactgcggcttcgagacacacgcagccgagcaagccgccctgaacatcgccagatcctggctgttcctgcggagccaggagtacaagaaataccagacaaacaagacaaccggcaacaccgataagagagccttcgtcgagacctggcagtccttttaccggaagaagcttaaggaggtgtggaaacctgccgtgcggtctggcggatctggcggaggctccaccagccccaagaaaaagagaaaagtctaagctgccttctgcggggcttgccttctggccatgcccttcttctctcccttgcacctgtacctcttggtctttgaataaagcctgagtaggaaggctagcaaaaaaaaaaaaaaaaaaaaaaaaaaaaaaaaaaaaaaaaaaaaaaaaaaaaaaaaaaaaaaaaaaaaaaaaaaaaaaaa

SEQ ID NO: 9841 - RNA, 8787 nt, synthetic construct
  source 1..8787: mol_type = other RNA
aggaaataagagagaaaagaagagtaagaagaaatataagagccaccatggcccctaagaagaagcgtaaagtgagccggatgaaccacgaccaggagttcgacccccctaaggtgtaccctcccgtccccgccgagaagagaaagcccatccgggtcctgagcctgttcgatggcatcgccaccggtctgctggtgctgaaggacctgggcatccaggtggataggtacattgcctccgaggtgtgcgaggactccatcaccgtgggaatggtgcgtcatcagggcaagatcatgtacgtgggcgacgtgcggagcgtgacacagaagcatatccaggagtggggccctttcgacctggtgatcggcggcagcccttgcaatgacctgagcatcgtgaacccagcccggaagggcctgtacgagggaaccggcagactgttcttcgagttttacagactgctgcacgacgcccggcctaaggaaggcgacgaccggcccttcttttggctgttcgagaatgtggtggccatgggagtcagcgacaagcgggatattagccggttcctggagagcaaccccgtgatgatcgatgccaaggaagtgagcgccgcccaccgggccagatacttctggggcaatctgcctggcatgaacagacccctggccagcaccgtgaacgacaagctggagctgcaggagtgcctggagcacggccggatcgccaagttcagcaaggtgagaaccatcaccacccgaagcaacagcatcaaacaaggcaaggaccagcactttcctgtgttcatgaacgagaaggaggacatcctgtggtgtaccgagatggagagagtgttcgggttcccagtccactacacagatgtcagcaacatgtctagactggccagacagagactgctgggaagaagctggtccgtccctgtgatcagacacctgttcgcccctctgaaggagtacttcgcctgcgtgagcagcggcaacagcaacgccaacagccggggccccagcttctctagcggcctggtgccactgtccctgagagggagccacatgggccccatggagatctacaaaaccgtgagcgcctggaagcggcagcctgtgcgcgtgctgagcctgtttcggaatatcgataaagtcctgaaaagcctgggattcctggagagcggctctggctccggcggtggcaccctgaagtacgtggaggatgtgacaaacgtggtcagacgggatgtggagaagtggggccccttcgatctggtgtacggcagcacccaacccctgggcagctcttgtgaccggtgccctggctggtacatgtttcagttccaccggatcctgcagtacgccctgccgagacaggagtcccagcggccattcttttggattttcatggacaacttgctgctgaccgaggatgaccaggaaactaccactcggttcctgcagaccgaagccgtgaccctgcaggacgtgagaggccgggactaccagaacgccatgcgggtgtggtccaacatccctggactgaaaagcaagcacgcacctctgacccctaaagaagaggagtacctgcaggcccaggtgcggagcagaagcaagctggacgcccctaaggtggatctgctggtgaagaattgcctcctgcccctgagagagtacttcaagtatttcagccagaatagtctgcccctgggaggcagcggcggcggcagccaggtgagcgtgaccttcgaggacgtggccgtgctgttcaccagggacgagtggaggaagctgggccccagccagaggaacgtgtaccaggaggtgatgctggagaactacagcaacctggtgagcctgggcctgctgttcagcaagcccagggtgatcagcctgctgcaggagggcgaggacccctggaaggtggagaaggagagccccggcggccccagcctgggctggaacagcagcggcggcccaagcagcggcgcccctcctcccagcggcggcaggcggcccaagcagcggcgcccctcctcccagcggcggcagcccagccggctccccaacctctaccgaggagggcacctctgagtccgccacccccgagagcggccctggcacctccaccgagcccagcgagggcagcgcacccggcagccctgccggcagccccacctccacagaggagggaaccagcaccgagcccagcgaaggcagcgccccaggcaccagcaccgagcctagtgagcaggagattaaacggatcaacaagatcagaagaagacttgtgaaagacagcaacaccaagaaggccggcaagacaggccccatgaaaaccctgctggttagagtgatgacacccgatctgagagagcggctggaaaacctgagaaagaagcctgaaaatatcccccagcccatcagcaatacatctagagccaacctgaataagctgctgaccgattacaccgaaatgaagaaggcgatcctgcatgtgtactgggaagagttccagaaggaccctgtgggcctgatgagccgggtggcccagcctgccagcaagaagatcgatcagaacaagctgaaacctgagatggacgagaagggcaacctgaccaccgccggctttgcctgctctcagtgtggccagcccctgttcgtgtacaagctggagcaggtgtctgagaagggcaaggcttacaccaactacttcggacggtgcaatgtggccgagcacgaaaagctgatcctgctggcccagctgaagcccgagaaggatagcgacgaagccgtgacatatagcctgggaaagtttgggcagagggccctggatttctacagcattcatgtgaccaaggagtccacccaccccgtgaagcccctggcccagatcgccggaaacagatacgcctccggacctgtgggaaaggccctgagcgacgcatgtatgggcacaatcgcctccttcctgtctaagtaccaggacatcatcatcgaacaccagaaggtggtgaagggcaaccagaagagactggagagcctgcgggagctggccggcaaggaaaacctggaataccctagcgtgaccctgccacctcagcctcacaccaaggagggcgttgatgcctacaacgaagtgatcgcccgggtgcgaatgtgggtgaacctgaacctgtggcagaagctgaagctaagcagagatgatgccaagcctctgctgagactgaagggattcccttcctttcctctggtcgagagacaggccaacgaagtggactggtgggacatggtgtgtaacgtgaagaagctgatcaacgagaaaaaggaggatggcaaggtgttttggcagaatctggctggctacaagagacaggaagccctgagaccatacctgagcagcgaggaagatcggaagaagggaaagaaattcgctcggtaccagctgggcgacctgctgctgcacctggaaaagaagcacggcgaggactggggaaaggtgtacgacgaggcctgggagcggattgacaagaaagtggaaggcctgagcaagcacatcaagctggaagaggaacggagaagcgaggacgcccagagcaaggccgccctgaccgactggctgcgggctaaggccagcttcgtgatcgagggcctgaaggaggccgacaaggacgagttctgcagatgcgagctgaagctgcagaagtggtacggggacctgcggggaaagcccttcgccatcgaagccgagaacagcatcctggacatcagcggcttcagcaagcagtacaactgtgccttcatctggcagaaggacggcgtgaagaagctgaacctgtacctgatcatcaactacttcaagggcggcaagctgcggttcaagaagatcaaacctgaagccttcgaagccaacagattctacaccgtgatcaacaaaaagagcggcgagatcgtgcccatggaggtgaacttcaacttcgacgaccccaacctgatcatcctgcctctggcctttggcaagagacagggcagagaattcatctggaacgacctgctgtccctggaaaccggcagcctgaagctggccaacggaagagtgatcgagaagacactgtacaacagaagaacccggcaggatgagcctgccctgttcgtggccctgaccttcgagcggcgggaggtcctggactcctccaatatcaaaccaatgaacctgatcggcgtggcaagaggcgaaaacatccccgccgtgatcgccctgaccgaccccgagggctgcccactgagccggtttaaggatagcctgggaaacccaacccacatcctgagaatcggcgagagctataaggagaagcagcggaccatccaggccaagaaggaggtggagcagcggagagccggcggctacagccggaagtacgccagcaaagccaagaatctggcagacgatatggtgagaaacaccgctagagatctgctgtactacgccgtgacccaggatgccatgctgatcttcgccaacctgagccggggcttcggccggcagggcaagcggaccttcatggccgagagacagtacacacggatggaggactggctgaccgccaagctggcctacgagggcctgagcaagacctacctgtccaagacactggcccagtacacctccaagacatgcagcaactgtgggtttaccatcaccagcgccgactacgacagggtgctggagaagctgaagaagacagcaacaggctggatgaccacaattaacggcaaggagctgaaggtggagggccagattacctactacaacagatacaagagacagaacgtagtcaaggacctgtccgtcgagctggatagactgagcgaagaatctgtgaacaacgacatctcctcctggacaaagggcagaagcggagaagctctgagcctcctgaagaaaagattctcccatagacccgtgcaggagaagttcgtgtgcctgaactgcggcttcgagacacacgcagccgagcaagccgccctgaacatcgccagatcctggctgttcctgcggagccaggagtacaagaaataccagacaaacaagacaaccggcaacaccgataagagagccttcgtcgagacctggcagtccttttaccggaagaagcttaaggaggtgtggaaacctgccgtgcggtctggcggatctggcggaggctccaccagccccaagaaaaagagaaaagtctaagctgccttctgcggggcttgccttctggccatgcccttcttctctcccttgcacctgtacctcttggtctttgaataaagcctgagtaggaaggctagcaaaaaaaaaaaaaaaaaaaaaaaaaaaaaaaaaaaaaaaaaaaaaaaaaaaaaaaaaaaaaaaaaaaaaaaaaaaaaaaagcccagccggctccccaacctctaccgaggagggcacctctgagtccgccacccccgagagcggccctggcacctccaccgagcccagcgagggcagcgcacccggcagccctgccggcagccccacctccacagaggagggaaccagcaccgagcccagcgaaggcagcgccccaggcaccagcaccgagcctagtgagcaggagattaaacggatcaacaagatcagaagaagacttgtgaaagacagcaacaccaagaaggccggcaagacaggccccatgaaaaccctgctggttagagtgatgacacccgatctgagagagcggctggaaaacctgagaaagaagcctgaaaatatcccccagcccatcagcaatacatctagagccaacctgaataagctgctgaccgattacaccgaaatgaagaaggcgatcctgcatgtgtactgggaagagttccagaaggaccctgtgggcctgatgagccgggtggcccagcctgccagcaagaagatcgatcagaacaagctgaaacctgagatggacgagaagggcaacctgaccaccgccggctttgcctgctctcagtgtggccagcccctgttcgtgtacaagctggagcaggtgtctgagaagggcaaggcttacaccaactacttcggacggtgcaatgtggccgagcacgaaaagctgatcctgctggcccagctgaagcccgagaaggatagcgacgaagccgtgacatatagcctgggaaagtttgggcagagggccctggatttctacagcattcatgtgaccaaggagtccacccaccccgtgaagcccctggcccagatcgccggaaacagatacgcctccggacctgtgggaaaggccctgagcgacgcatgtatgggcacaatcgcctccttcctgtctaagtaccaggacatcatcatcgaacaccagaaggtggtgaagggcaaccagaagagactggagagcctgcgggagctggccggcaaggaaaacctggaataccctagcgtgaccctgccacctcagcctcacaccaaggagggcgttgatgcctacaacgaagtgatcgcccgggtgcgaatgtgggtgaacctgaacctgtggcagaagctgaagctaagcagagatgatgccaagcctctgctgagactgaagggattcccttcctttcctctggtcgagagacaggccaacgaagtggactggtgggacatggtgtgtaacgtgaagaagctgatcaacgagaaaaaggaggatggcaaggtgttttggcagaatctggctggctacaagagacaggaagccctgagaccatacctgagcagcgaggaagatcggaagaagggaaagaaattcgctcggtaccagctgggcgacctgctgctgcacctggaaaagaagcacggcgaggactggggaaaggtgtacgacgaggcctgggagcggattgacaagaaagtggaaggcctgagcaagcacatcaagctggaagaggaacggagaagcgaggacgcccagagcaaggccgccctgaccgactggctgcgggctaaggccagcttcgtgatcgagggcctgaaggaggccgacaaggacgagttctgcagatgcgagctgaagctgcagaagtggtacggggacctgcggggaaagcccttcgccatcgaagccgagaacagcatcctggacatcagcggcttcagcaagcagtacaactgtgccttcatctggcagaaggacggcgtgaagaagctgaacctgtacctgatcatcaactacttcaagggcggcaagctgcggttcaagaagatcaaacctgaagccttcgaagccaacagattctacaccgtgatcaacaaaaagagcggcgagatcgtgcccatggaggtgaacttcaacttcgacgaccccaacctgatcatcctgcctctggcctttggcaagagacagggcagagaattcatctggaacgacctgctgtccctggaaaccggcagcctgaagctggccaacggaagagtgatcgagaagacactgtacaacagaagaacccggcaggatgagcctgccctgttcgtggccctgaccttcgagcggcgggaggtcctggactcctccaatatcaaaccaatgaacctgatcggcgtggcaagaggcgaaaacatccccgccgtgatcgccctgaccgaccccgagggctgcccactgagccggtttaaggatagcctgggaaacccaacccacatcctgagaatcggcgagagctataaggagaagcagcggaccatccaggccaagaaggaggtggagcagcggagagccggcggctacagccggaagtacgccagcaaagccaagaatctggcagacgatatggtgagaaacaccgctagagatctgctgtactacgccgtgacccaggatgccatgctgatcttcgccaacctgagccggggcttcggccggcagggcaagcggaccttcatggccgagagacagtacacacggatggaggactggctgaccgccaagctggcctacgagggcctgagcaagacctacctgtccaagacactggcccagtacacctccaagacatgcagcaactgtgggtttaccatcaccagcgccgactacgacagggtgctggagaagctgaagaagacagcaacaggctggatgaccacaattaacggcaaggagctgaaggtggagggccagattacctactacaacagatacaagagacagaacgtagtcaaggacctgtccgtcgagctggatagactgagcgaagaatctgtgaacaacgacatctcctcctggacaaagggcagaagcggagaagctctgagcctcctgaagaaaagattctcccatagacccgtgcaggagaagttcgtgtgcctgaactgcggcttcgagacacacgcagccgagcaagccgccctgaacatcgccagatcctggctgttcctgcggagccaggagtacaagaaataccagacaaacaagacaaccggcaacaccgataagagagccttcgtcgagacctggcagtccttttaccggaagaagcttaaggaggtgtggaaacctgccgtgcggtctggcggatctggcggaggctccaccagccccaagaaaaagagaaaagtctaagctgccttctgcggggcttgccttctggccatgcccttcttctctcccttgcacctgtacctcttggtctttgaataaagcctgagtaggaaggctagcaaaaaaaaaaaaaaaaaaaaaaaaaaaaaaaaaaaaaaaaaaaaaaaaaaaaaaaaaaaaaaaaaaaaaaaaaaaaaaaa

SEQ ID NO: 9842 - RNA, 8787 nt, synthetic construct
  source 1..8787: mol_type = other RNA
aggaaataagagagaaaagaagagtaagaagaaatataagagccaccatggcccctaagaagaagcgtaaagtgagccggatgaaccacgaccaggagttcgacccccctaaggtgtaccctcccgtccccgccgagaagagaaagcccatccgggtcctgagcctgttcgatggcatcgccaccggtctgctggtgctgaaggacctgggcatccaggtggataggtacattgcctccgaggtgtgcgaggactccatcaccgtgggaatggtgcgtcatcagggcaagatcatgtacgtgggcgacgtgcggagcgtgacacagaagcatatccaggagtggggccctttcgacctggtgatcggcggcagcccttgcaatgacctgagcatcgtgaacccagcccggaagggcctgtacgagggaaccggcagactgttcttcgagttttacagactgctgcacgacgcccggcctaaggaaggcgacgaccggcccttcttttggctgttcgagaatgtggtggccatgggagtcagcgacaagcgggatattagccggttcctggagagcaaccccgtgatgatcgatgccaaggaagtgagcgccgcccaccgggccagatacttctggggcaatctgcctggcatgaacagacccctggccagcaccgtgaacgacaagctggagctgcaggagtgcctggagcacggccggatcgccaagttcagcaaggtgagaaccatcaccacccgaagcaacagcatcaaacaaggcaaggaccagcactttcctgtgttcatgaacgagaaggaggacatcctgtggtgtaccgagatggagagagtgttcgggttcccagtccactacacagatgtcagcaacatgtctagactggccagacagagactgctgggaagaagctggtccgtccctgtgatcagacacctgttcgcccctctgaaggagtacttcgcctgcgtgagcagcggcaacagcaacgccaacagccggggccccagcttctctagcggcctggtgccactgtccctgagagggagccacatgggccccatggagatctacaaaaccgtgagcgcctggaagcggcagcctgtgcgcgtgctgagcctgtttcggaatatcgataaagtcctgaaaagcctgggattcctggagagcggctctggctccggcggtggcaccctgaagtacgtggaggatgtgacaaacgtggtcagacgggatgtggagaagtggggccccttcgatctggtgtacggcagcacccaacccctgggcagctcttgtgaccggtgccctggctggtacatgtttcagttccaccggatcctgcagtacgccctgccgagacaggagtcccagcggccattcttttggattttcatggacaacttgctgctgaccgaggatgaccaggaaactaccactcggttcctgcagaccgaagccgtgaccctgcaggacgtgagaggccgggactaccagaacgccatgcgggtgtggtccaacatccctggactgaaaagcaagcacgcacctctgacccctaaagaagaggagtacctgcaggcccaggtgcggagcagaagcaagctggacgcccctaaggtggatctgctggtgaagaattgcctcctgcccctgagagagtacttcaagtatttcagccagaatagtctgcccctgggaggcagcggcggcggcccccaggagagcgtgaccttcgaggacgtggccgtgaacttcagccacgaggagtggcagtgcctgacccacgcccagaggcacctgtacaaggacgtgatgctggagaactacggcaacatggtgagcctgggcttcagcttcagcaagccccccctgatcagcaggctggagcagggcaccgagccctacgtgcaggacaggcaggactgggagttcctgagctgcagctaccccgtgagcggcggcccaagcagcggcgcccctcctcccagcggcggcaggcggcccaagcagcggcgcccctcctcccagcggcggcagcccagccggctccccaacctctaccgaggagggcacctctgagtccgccacccccgagagcggccctggcacctccaccgagcccagcgagggcagcgcacccggcagccctgccggcagccccacctccacagaggagggaaccagcaccgagcccagcgaaggcagcgccccaggcaccagcaccgagcctagtgagcaggagattaaacggatcaacaagatcagaagaagacttgtgaaagacagcaacaccaagaaggccggcaagacaggccccatgaaaaccctgctggttagagtgatgacacccgatctgagagagcggctggaaaacctgagaaagaagcctgaaaatatcccccagcccatcagcaatacatctagagccaacctgaataagctgctgaccgattacaccgaaatgaagaaggcgatcctgcatgtgtactgggaagagttccagaaggaccctgtgggcctgatgagccgggtggcccagcctgccagcaagaagatcgatcagaacaagctgaaacctgagatggacgagaagggcaacctgaccaccgccggctttgcctgctctcagtgtggccagcccctgttcgtgtacaagctggagcaggtgtctgagaagggcaaggcttacaccaactacttcggacggtgcaatgtggccgagcacgaaaagctgatcctgctggcccagctgaagcccgagaaggatagcgacgaagccgtgacatatagcctgggaaagtttgggcagagggccctggatttctacagcattcatgtgaccaaggagtccacccaccccgtgaagcccctggcccagatcgccggaaacagatacgcctccggacctgtgggaaaggccctgagcgacgcatgtatgggcacaatcgcctccttcctgtctaagtaccaggacatcatcatcgaacaccagaaggtggtgaagggcaaccagaagagactggagagcctgcgggagctggccggcaaggaaaacctggaataccctagcgtgaccctgccacctcagcctcacaccaaggagggcgttgatgcctacaacgaagtgatcgcccgggtgcgaatgtgggtgaacctgaacctgtggcagaagctgaagctaagcagagatgatgccaagcctctgctgagactgaagggattcccttcctttcctctggtcgagagacaggccaacgaagtggactggtgggacatggtgtgtaacgtgaagaagctgatcaacgagaaaaaggaggatggcaaggtgttttggcagaatctggctggctacaagagacaggaagccctgagaccatacctgagcagcgaggaagatcggaagaagggaaagaaattcgctcggtaccagctgggcgacctgctgctgcacctggaaaagaagcacggcgaggactggggaaaggtgtacgacgaggcctgggagcggattgacaagaaagtggaaggcctgagcaagcacatcaagctggaagaggaacggagaagcgaggacgcccagagcaaggccgccctgaccgactggctgcgggctaaggccagcttcgtgatcgagggcctgaaggaggccgacaaggacgagttctgcagatgcgagctgaagctgcagaagtggtacggggacctgcggggaaagcccttcgccatcgaagccgagaacagcatcctggacatcagcggcttcagcaagcagtacaactgtgccttcatctggcagaaggacggcgtgaagaagctgaacctgtacctgatcatcaactacttcaagggcggcaagctgcggttcaagaagatcaaacctgaagccttcgaagccaacagattctacaccgtgatcaacaaaaagagcggcgagatcgtgcccatggaggtgaacttcaacttcgacgaccccaacctgatcatcctgcctctggcctttggcaagagacagggcagagaattcatctggaacgacctgctgtccctggaaaccggcagcctgaagctggccaacggaagagtgatcgagaagacactgtacaacagaagaacccggcaggatgagcctgccctgttcgtggccctgaccttcgagcggcgggaggtcctggactcctccaatatcaaaccaatgaacctgatcggcgtggcaagaggcgaaaacatccccgccgtgatcgccctgaccgaccccgagggctgcccactgagccggtttaaggatagcctgggaaacccaacccacatcctgagaatcggcgagagctataaggagaagcagcggaccatccaggccaagaaggaggtggagcagcggagagccggcggctacagccggaagtacgccagcaaagccaagaatctggcagacgatatggtgagaaacaccgctagagatctgctgtactacgccgtgacccaggatgccatgctgatcttcgccaacctgagccggggcttcggccggcagggcaagcggaccttcatggccgagagacagtacacacggatggaggactggctgaccgccaagctggcctacgagggcctgagcaagacctacctgtccaagacactggcccagtacacctccaagacatgcagcaactgtgggtttaccatcaccagcgccgactacgacagggtgctggagaagctgaagaagacagcaacaggctggatgaccacaattaacggcaaggagctgaaggtggagggccagattacctactacaacagatacaagagacagaacgtagtcaaggacctgtccgtcgagctggatagactgagcgaagaatctgtgaacaacgacatctcctcctggacaaagggcagaagcggagaagctctgagcctcctgaagaaaagattctcccatagacccgtgcaggagaagttcgtgtgcctgaactgcggcttcgagacacacgcagccgagcaagccgccctgaacatcgccagatcctggctgttcctgcggagccaggagtacaagaaataccagacaaacaagacaaccggcaacaccgataagagagccttcgtcgagacctggcagtccttttaccggaagaagcttaaggaggtgtggaaacctgccgtgcggtctggcggatctggcggaggctccaccagccccaagaaaaagagaaaagtctaagctgccttctgcggggcttgccttctggccatgcccttcttctctcccttgcacctgtacctcttggtctttgaataaagcctgagtaggaaggctagcaaaaaaaaaaaaaaaaaaaaaaaaaaaaaaaaaaaaaaaaaaaaaaaaaaaaaaaaaaaaaaaaaaaaaaaaaaaaaaaagcccagccggctccccaacctctaccgaggagggcacctctgagtccgccacccccgagagcggccctggcacctccaccgagcccagcgagggcagcgcacccggcagccctgccggcagccccacctccacagaggagggaaccagcaccgagcccagcgaaggcagcgccccaggcaccagcaccgagcctagtgagcaggagattaaacggatcaacaagatcagaagaagacttgtgaaagacagcaacaccaagaaggccggcaagacaggccccatgaaaaccctgctggttagagtgatgacacccgatctgagagagcggctggaaaacctgagaaagaagcctgaaaatatcccccagcccatcagcaatacatctagagccaacctgaataagctgctgaccgattacaccgaaatgaagaaggcgatcctgcatgtgtactgggaagagttccagaaggaccctgtgggcctgatgagccgggtggcccagcctgccagcaagaagatcgatcagaacaagctgaaacctgagatggacgagaagggcaacctgaccaccgccggctttgcctgctctcagtgtggccagcccctgttcgtgtacaagctggagcaggtgtctgagaagggcaaggcttacaccaactacttcggacggtgcaatgtggccgagcacgaaaagctgatcctgctggcccagctgaagcccgagaaggatagcgacgaagccgtgacatatagcctgggaaagtttgggcagagggccctggatttctacagcattcatgtgaccaaggagtccacccaccccgtgaagcccctggcccagatcgccggaaacagatacgcctccggacctgtgggaaaggccctgagcgacgcatgtatgggcacaatcgcctccttcctgtctaagtaccaggacatcatcatcgaacaccagaaggtggtgaagggcaaccagaagagactggagagcctgcgggagctggccggcaaggaaaacctggaataccctagcgtgaccctgccacctcagcctcacaccaaggagggcgttgatgcctacaacgaagtgatcgcccgggtgcgaatgtgggtgaacctgaacctgtggcagaagctgaagctaagcagagatgatgccaagcctctgctgagactgaagggattcccttcctttcctctggtcgagagacaggccaacgaagtggactggtgggacatggtgtgtaacgtgaagaagctgatcaacgagaaaaaggaggatggcaaggtgttttggcagaatctggctggctacaagagacaggaagccctgagaccatacctgagcagcgaggaagatcggaagaagggaaagaaattcgctcggtaccagctgggcgacctgctgctgcacctggaaaagaagcacggcgaggactggggaaaggtgtacgacgaggcctgggagcggattgacaagaaagtggaaggcctgagcaagcacatcaagctggaagaggaacggagaagcgaggacgcccagagcaaggccgccctgaccgactggctgcgggctaaggccagcttcgtgatcgagggcctgaaggaggccgacaaggacgagttctgcagatgcgagctgaagctgcagaagtggtacggggacctgcggggaaagcccttcgccatcgaagccgagaacagcatcctggacatcagcggcttcagcaagcagtacaactgtgccttcatctggcagaaggacggcgtgaagaagctgaacctgtacctgatcatcaactacttcaagggcggcaagctgcggttcaagaagatcaaacctgaagccttcgaagccaacagattctacaccgtgatcaacaaaaagagcggcgagatcgtgcccatggaggtgaacttcaacttcgacgaccccaacctgatcatcctgcctctggcctttggcaagagacagggcagagaattcatctggaacgacctgctgtccctggaaaccggcagcctgaagctggccaacggaagagtgatcgagaagacactgtacaacagaagaacccggcaggatgagcctgccctgttcgtggccctgaccttcgagcggcgggaggtcctggactcctccaatatcaaaccaatgaacctgatcggcgtggcaagaggcgaaaacatccccgccgtgatcgccctgaccgaccccgagggctgcccactgagccggtttaaggatagcctgggaaacccaacccacatcctgagaatcggcgagagctataaggagaagcagcggaccatccaggccaagaaggaggtggagcagcggagagccggcggctacagccggaagtacgccagcaaagccaagaatctggcagacgatatggtgagaaacaccgctagagatctgctgtactacgccgtgacccaggatgccatgctgatcttcgccaacctgagccggggcttcggccggcagggcaagcggaccttcatggccgagagacagtacacacggatggaggactggctgaccgccaagctggcctacgagggcctgagcaagacctacctgtccaagacactggcccagtacacctccaagacatgcagcaactgtgggtttaccatcaccagcgccgactacgacagggtgctggagaagctgaagaagacagcaacaggctggatgaccacaattaacggcaaggagctgaaggtggagggccagattacctactacaacagatacaagagacagaacgtagtcaaggacctgtccgtcgagctggatagactgagcgaagaatctgtgaacaacgacatctcctcctggacaaagggcagaagcggagaagctctgagcctcctgaagaaaagattctcccatagacccgtgcaggagaagttcgtgtgcctgaactgcggcttcgagacacacgcagccgagcaagccgccctgaacatcgccagatcctggctgttcctgcggagccaggagtacaagaaataccagacaaacaagacaaccggcaacaccgataagagagccttcgtcgagacctggcagtccttttaccggaagaagcttaaggaggtgtggaaacctgccgtgcggtctggcggatctggcggaggctccaccagccccaagaaaaagagaaaagtctaagctgccttctgcggggcttgccttctggccatgcccttcttctctcccttgcacctgtacctcttggtctttgaataaagcctgagtaggaaggctagcaaaaaaaaaaaaaaaaaaaaaaaaaaaaaaaaaaaaaaaaaaaaaaaaaaaaaaaaaaaaaaaaaaaaaaaaaaaaaaaa

SEQ ID NO: 9843 - RNA, 8787 nt, synthetic construct
  source 1..8787: mol_type = other RNA
aggaaataagagagaaaagaagagtaagaagaaatataagagccaccatggcccctaagaagaagcgtaaagtgagccggatgaaccacgaccaggagttcgacccccctaaggtgtaccctcccgtccccgccgagaagagaaagcccatccgggtcctgagcctgttcgatggcatcgccaccggtctgctggtgctgaaggacctgggcatccaggtggataggtacattgcctccgaggtgtgcgaggactccatcaccgtgggaatggtgcgtcatcagggcaagatcatgtacgtgggcgacgtgcggagcgtgacacagaagcatatccaggagtggggccctttcgacctggtgatcggcggcagcccttgcaatgacctgagcatcgtgaacccagcccggaagggcctgtacgagggaaccggcagactgttcttcgagttttacagactgctgcacgacgcccggcctaaggaaggcgacgaccggcccttcttttggctgttcgagaatgtggtggccatgggagtcagcgacaagcgggatattagccggttcctggagagcaaccccgtgatgatcgatgccaaggaagtgagcgccgcccaccgggccagatacttctggggcaatctgcctggcatgaacagacccctggccagcaccgtgaacgacaagctggagctgcaggagtgcctggagcacggccggatcgccaagttcagcaaggtgagaaccatcaccacccgaagcaacagcatcaaacaaggcaaggaccagcactttcctgtgttcatgaacgagaaggaggacatcctgtggtgtaccgagatggagagagtgttcgggttcccagtccactacacagatgtcagcaacatgtctagactggccagacagagactgctgggaagaagctggtccgtccctgtgatcagacacctgttcgcccctctgaaggagtacttcgcctgcgtgagcagcggcaacagcaacgccaacagccggggccccagcttctctagcggcctggtgccactgtccctgagagggagccacatgggccccatggagatctacaaaaccgtgagcgcctggaagcggcagcctgtgcgcgtgctgagcctgtttcggaatatcgataaagtcctgaaaagcctgggattcctggagagcggctctggctccggcggtggcaccctgaagtacgtggaggatgtgacaaacgtggtcagacgggatgtggagaagtggggccccttcgatctggtgtacggcagcacccaacccctgggcagctcttgtgaccggtgccctggctggtacatgtttcagttccaccggatcctgcagtacgccctgccgagacaggagtcccagcggccattcttttggattttcatggacaacttgctgctgaccgaggatgaccaggaaactaccactcggttcctgcagaccgaagccgtgaccctgcaggacgtgagaggccgggactaccagaacgccatgcgggtgtggtccaacatccctggactgaaaagcaagcacgcacctctgacccctaaagaagaggagtacctgcaggcccaggtgcggagcagaagcaagctggacgcccctaaggtggatctgctggtgaagaattgcctcctgcccctgagagagtacttcaagtatttcagccagaatagtctgcccctgggaggcagcggcggcggcatggccgccgccgccctgaggctgcccgcccagggcaccgtgaccttcgaggacgtggccgtgaagttcagccaggaggagtggagcctgctgagcgaggcccagaggtgcctgtaccacgacgtgatgctggagaacctggccctgatcagcagcctgggctgctggtacggcgccaacgacgagacccccagcaagcagaccctgagcatccagcagcagagccccctgaggagccactggggcggcccaagcagcggcgcccctcctcccagcggcggcaggcggcccaagcagcggcgcccctcctcccagcggcggcagcccagccggctccccaacctctaccgaggagggcacctctgagtccgccacccccgagagcggccctggcacctccaccgagcccagcgagggcagcgcacccggcagccctgccggcagccccacctccacagaggagggaaccagcaccgagcccagcgaaggcagcgccccaggcaccagcaccgagcctagtgagcaggagattaaacggatcaacaagatcagaagaagacttgtgaaagacagcaacaccaagaaggccggcaagacaggccccatgaaaaccctgctggttagagtgatgacacccgatctgagagagcggctggaaaacctgagaaagaagcctgaaaatatcccccagcccatcagcaatacatctagagccaacctgaataagctgctgaccgattacaccgaaatgaagaaggcgatcctgcatgtgtactgggaagagttccagaaggaccctgtgggcctgatgagccgggtggcccagcctgccagcaagaagatcgatcagaacaagctgaaacctgagatggacgagaagggcaacctgaccaccgccggctttgcctgctctcagtgtggccagcccctgttcgtgtacaagctggagcaggtgtctgagaagggcaaggcttacaccaactacttcggacggtgcaatgtggccgagcacgaaaagctgatcctgctggcccagctgaagcccgagaaggatagcgacgaagccgtgacatatagcctgggaaagtttgggcagagggccctggatttctacagcattcatgtgaccaaggagtccacccaccccgtgaagcccctggcccagatcgccggaaacagatacgcctccggacctgtgggaaaggccctgagcgacgcatgtatgggcacaatcgcctccttcctgtctaagtaccaggacatcatcatcgaacaccagaaggtggtgaagggcaaccagaagagactggagagcctgcgggagctggccggcaaggaaaacctggaataccctagcgtgaccctgccacctcagcctcacaccaaggagggcgttgatgcctacaacgaagtgatcgcccgggtgcgaatgtgggtgaacctgaacctgtggcagaagctgaagctaagcagagatgatgccaagcctctgctgagactgaagggattcccttcctttcctctggtcgagagacaggccaacgaagtggactggtgggacatggtgtgtaacgtgaagaagctgatcaacgagaaaaaggaggatggcaaggtgttttggcagaatctggctggctacaagagacaggaagccctgagaccatacctgagcagcgaggaagatcggaagaagggaaagaaattcgctcggtaccagctgggcgacctgctgctgcacctggaaaagaagcacggcgaggactggggaaaggtgtacgacgaggcctgggagcggattgacaagaaagtggaaggcctgagcaagcacatcaagctggaagaggaacggagaagcgaggacgcccagagcaaggccgccctgaccgactggctgcgggctaaggccagcttcgtgatcgagggcctgaaggaggccgacaaggacgagttctgcagatgcgagctgaagctgcagaagtggtacggggacctgcggggaaagcccttcgccatcgaagccgagaacagcatcctggacatcagcggcttcagcaagcagtacaactgtgccttcatctggcagaaggacggcgtgaagaagctgaacctgtacctgatcatcaactacttcaagggcggcaagctgcggttcaagaagatcaaacctgaagccttcgaagccaacagattctacaccgtgatcaacaaaaagagcggcgagatcgtgcccatggaggtgaacttcaacttcgacgaccccaacctgatcatcctgcctctggcctttggcaagagacagggcagagaattcatctggaacgacctgctgtccctggaaaccggcagcctgaagctggccaacggaagagtgatcgagaagacactgtacaacagaagaacccggcaggatgagcctgccctgttcgtggccctgaccttcgagcggcgggaggtcctggactcctccaatatcaaaccaatgaacctgatcggcgtggcaagaggcgaaaacatccccgccgtgatcgccctgaccgaccccgagggctgcccactgagccggtttaaggatagcctgggaaacccaacccacatcctgagaatcggcgagagctataaggagaagcagcggaccatccaggccaagaaggaggtggagcagcggagagccggcggctacagccggaagtacgccagcaaagccaagaatctggcagacgatatggtgagaaacaccgctagagatctgctgtactacgccgtgacccaggatgccatgctgatcttcgccaacctgagccggggcttcggccggcagggcaagcggaccttcatggccgagagacagtacacacggatggaggactggctgaccgccaagctggcctacgagggcctgagcaagacctacctgtccaagacactggcccagtacacctccaagacatgcagcaactgtgggtttaccatcaccagcgccgactacgacagggtgctggagaagctgaagaagacagcaacaggctggatgaccacaattaacggcaaggagctgaaggtggagggccagattacctactacaacagatacaagagacagaacgtagtcaaggacctgtccgtcgagctggatagactgagcgaagaatctgtgaacaacgacatctcctcctggacaaagggcagaagcggagaagctctgagcctcctgaagaaaagattctcccatagacccgtgcaggagaagttcgtgtgcctgaactgcggcttcgagacacacgcagccgagcaagccgccctgaacatcgccagatcctggctgttcctgcggagccaggagtacaagaaataccagacaaacaagacaaccggcaacaccgataagagagccttcgtcgagacctggcagtccttttaccggaagaagcttaaggaggtgtggaaacctgccgtgcggtctggcggatctggcggaggctccaccagccccaagaaaaagagaaaagtctaagctgccttctgcggggcttgccttctggccatgcccttcttctctcccttgcacctgtacctcttggtctttgaataaagcctgagtaggaaggctagcaaaaaaaaaaaaaaaaaaaaaaaaaaaaaaaaaaaaaaaaaaaaaaaaaaaaaaaaaaaaaaaaaaaaaaaaaaaaaaaagcccagccggctccccaacctctaccgaggagggcacctctgagtccgccacccccgagagcggccctggcacctccaccgagcccagcgagggcagcgcacccggcagccctgccggcagccccacctccacagaggagggaaccagcaccgagcccagcgaaggcagcgccccaggcaccagcaccgagcctagtgagcaggagattaaacggatcaacaagatcagaagaagacttgtgaaagacagcaacaccaagaaggccggcaagacaggccccatgaaaaccctgctggttagagtgatgacacccgatctgagagagcggctggaaaacctgagaaagaagcctgaaaatatcccccagcccatcagcaatacatctagagccaacctgaataagctgctgaccgattacaccgaaatgaagaaggcgatcctgcatgtgtactgggaagagttccagaaggaccctgtgggcctgatgagccgggtggcccagcctgccagcaagaagatcgatcagaacaagctgaaacctgagatggacgagaagggcaacctgaccaccgccggctttgcctgctctcagtgtggccagcccctgttcgtgtacaagctggagcaggtgtctgagaagggcaaggcttacaccaactacttcggacggtgcaatgtggccgagcacgaaaagctgatcctgctggcccagctgaagcccgagaaggatagcgacgaagccgtgacatatagcctgggaaagtttgggcagagggccctggatttctacagcattcatgtgaccaaggagtccacccaccccgtgaagcccctggcccagatcgccggaaacagatacgcctccggacctgtgggaaaggccctgagcgacgcatgtatgggcacaatcgcctccttcctgtctaagtaccaggacatcatcatcgaacaccagaaggtggtgaagggcaaccagaagagactggagagcctgcgggagctggccggcaaggaaaacctggaataccctagcgtgaccctgccacctcagcctcacaccaaggagggcgttgatgcctacaacgaagtgatcgcccgggtgcgaatgtgggtgaacctgaacctgtggcagaagctgaagctaagcagagatgatgccaagcctctgctgagactgaagggattcccttcctttcctctggtcgagagacaggccaacgaagtggactggtgggacatggtgtgtaacgtgaagaagctgatcaacgagaaaaaggaggatggcaaggtgttttggcagaatctggctggctacaagagacaggaagccctgagaccatacctgagcagcgaggaagatcggaagaagggaaagaaattcgctcggtaccagctgggcgacctgctgctgcacctggaaaagaagcacggcgaggactggggaaaggtgtacgacgaggcctgggagcggattgacaagaaagtggaaggcctgagcaagcacatcaagctggaagaggaacggagaagcgaggacgcccagagcaaggccgccctgaccgactggctgcgggctaaggccagcttcgtgatcgagggcctgaaggaggccgacaaggacgagttctgcagatgcgagctgaagctgcagaagtggtacggggacctgcggggaaagcccttcgccatcgaagccgagaacagcatcctggacatcagcggcttcagcaagcagtacaactgtgccttcatctggcagaaggacggcgtgaagaagctgaacctgtacctgatcatcaactacttcaagggcggcaagctgcggttcaagaagatcaaacctgaagccttcgaagccaacagattctacaccgtgatcaacaaaaagagcggcgagatcgtgcccatggaggtgaacttcaacttcgacgaccccaacctgatcatcctgcctctggcctttggcaagagacagggcagagaattcatctggaacgacctgctgtccctggaaaccggcagcctgaagctggccaacggaagagtgatcgagaagacactgtacaacagaagaacccggcaggatgagcctgccctgttcgtggccctgaccttcgagcggcgggaggtcctggactcctccaatatcaaaccaatgaacctgatcggcgtggcaagaggcgaaaacatccccgccgtgatcgccctgaccgaccccgagggctgcccactgagccggtttaaggatagcctgggaaacccaacccacatcctgagaatcggcgagagctataaggagaagcagcggaccatccaggccaagaaggaggtggagcagcggagagccggcggctacagccggaagtacgccagcaaagccaagaatctggcagacgatatggtgagaaacaccgctagagatctgctgtactacgccgtgacccaggatgccatgctgatcttcgccaacctgagccggggcttcggccggcagggcaagcggaccttcatggccgagagacagtacacacggatggaggactggctgaccgccaagctggcctacgagggcctgagcaagacctacctgtccaagacactggcccagtacacctccaagacatgcagcaactgtgggtttaccatcaccagcgccgactacgacagggtgctggagaagctgaagaagacagcaacaggctggatgaccacaattaacggcaaggagctgaaggtggagggccagattacctactacaacagatacaagagacagaacgtagtcaaggacctgtccgtcgagctggatagactgagcgaagaatctgtgaacaacgacatctcctcctggacaaagggcagaagcggagaagctctgagcctcctgaagaaaagattctcccatagacccgtgcaggagaagttcgtgtgcctgaactgcggcttcgagacacacgcagccgagcaagccgccctgaacatcgccagatcctggctgttcctgcggagccaggagtacaagaaataccagacaaacaagacaaccggcaacaccgataagagagccttcgtcgagacctggcagtccttttaccggaagaagcttaaggaggtgtggaaacctgccgtgcggtctggcggatctggcggaggctccaccagccccaagaaaaagagaaaagtctaagctgccttctgcggggcttgccttctggccatgcccttcttctctcccttgcacctgtacctcttggtctttgaataaagcctgagtaggaaggctagcaaaaaaaaaaaaaaaaaaaaaaaaaaaaaaaaaaaaaaaaaaaaaaaaaaaaaaaaaaaaaaaaaaaaaaaaaaaaaaaa

SEQ ID NO: 9844 - RNA, 8787 nt, synthetic construct
  source 1..8787: mol_type = other RNA
aggaaataagagagaaaagaagagtaagaagaaatataagagccaccatggcccctaagaagaagcgtaaagtgagccggatgaaccacgaccaggagttcgacccccctaaggtgtaccctcccgtccccgccgagaagagaaagcccatccgggtcctgagcctgttcgatggcatcgccaccggtctgctggtgctgaaggacctgggcatccaggtggataggtacattgcctccgaggtgtgcgaggactccatcaccgtgggaatggtgcgtcatcagggcaagatcatgtacgtgggcgacgtgcggagcgtgacacagaagcatatccaggagtggggccctttcgacctggtgatcggcggcagcccttgcaatgacctgagcatcgtgaacccagcccggaagggcctgtacgagggaaccggcagactgttcttcgagttttacagactgctgcacgacgcccggcctaaggaaggcgacgaccggcccttcttttggctgttcgagaatgtggtggccatgggagtcagcgacaagcgggatattagccggttcctggagagcaaccccgtgatgatcgatgccaaggaagtgagcgccgcccaccgggccagatacttctggggcaatctgcctggcatgaacagacccctggccagcaccgtgaacgacaagctggagctgcaggagtgcctggagcacggccggatcgccaagttcagcaaggtgagaaccatcaccacccgaagcaacagcatcaaacaaggcaaggaccagcactttcctgtgttcatgaacgagaaggaggacatcctgtggtgtaccgagatggagagagtgttcgggttcccagtccactacacagatgtcagcaacatgtctagactggccagacagagactgctgggaagaagctggtccgtccctgtgatcagacacctgttcgcccctctgaaggagtacttcgcctgcgtgagcagcggcaacagcaacgccaacagccggggccccagcttctctagcggcctggtgccactgtccctgagagggagccacatgggccccatggagatctacaaaaccgtgagcgcctggaagcggcagcctgtgcgcgtgctgagcctgtttcggaatatcgataaagtcctgaaaagcctgggattcctggagagcggctctggctccggcggtggcaccctgaagtacgtggaggatgtgacaaacgtggtcagacgggatgtggagaagtggggccccttcgatctggtgtacggcagcacccaacccctgggcagctcttgtgaccggtgccctggctggtacatgtttcagttccaccggatcctgcagtacgccctgccgagacaggagtcccagcggccattcttttggattttcatggacaacttgctgctgaccgaggatgaccaggaaactaccactcggttcctgcagaccgaagccgtgaccctgcaggacgtgagaggccgggactaccagaacgccatgcgggtgtggtccaacatccctggactgaaaagcaagcacgcacctctgacccctaaagaagaggagtacctgcaggcccaggtgcggagcagaagcaagctggacgcccctaaggtggatctgctggtgaagaattgcctcctgcccctgagagagtacttcaagtatttcagccagaatagtctgcccctgggaggcagcggcggcggcgagcccggcgccgtgagcttcgccgacgtggccgtgtacttctgcagggaggagtggggctgcctgaggcccgcccagagggccctgtacagggacgtgatgagggagacctacggccacctgagcgccctgggcatcggcggcaacaagcccgccctgatcagctgggtggaggaggaggccgagctgtgggaccccgccgcccaggaccccgaggtggccaagtgccagaccgaggccgacggcggcccaagcagcggcgcccctcctcccagcggcggcaggcggcccaagcagcggcgcccctcctcccagcggcggcagcccagccggctccccaacctctaccgaggagggcacctctgagtccgccacccccgagagcggccctggcacctccaccgagcccagcgagggcagcgcacccggcagccctgccggcagccccacctccacagaggagggaaccagcaccgagcccagcgaaggcagcgccccaggcaccagcaccgagcctagtgagcaggagattaaacggatcaacaagatcagaagaagacttgtgaaagacagcaacaccaagaaggccggcaagacaggccccatgaaaaccctgctggttagagtgatgacacccgatctgagagagcggctggaaaacctgagaaagaagcctgaaaatatcccccagcccatcagcaatacatctagagccaacctgaataagctgctgaccgattacaccgaaatgaagaaggcgatcctgcatgtgtactgggaagagttccagaaggaccctgtgggcctgatgagccgggtggcccagcctgccagcaagaagatcgatcagaacaagctgaaacctgagatggacgagaagggcaacctgaccaccgccggctttgcctgctctcagtgtggccagcccctgttcgtgtacaagctggagcaggtgtctgagaagggcaaggcttacaccaactacttcggacggtgcaatgtggccgagcacgaaaagctgatcctgctggcccagctgaagcccgagaaggatagcgacgaagccgtgacatatagcctgggaaagtttgggcagagggccctggatttctacagcattcatgtgaccaaggagtccacccaccccgtgaagcccctggcccagatcgccggaaacagatacgcctccggacctgtgggaaaggccctgagcgacgcatgtatgggcacaatcgcctccttcctgtctaagtaccaggacatcatcatcgaacaccagaaggtggtgaagggcaaccagaagagactggagagcctgcgggagctggccggcaaggaaaacctggaataccctagcgtgaccctgccacctcagcctcacaccaaggagggcgttgatgcctacaacgaagtgatcgcccgggtgcgaatgtgggtgaacctgaacctgtggcagaagctgaagctaagcagagatgatgccaagcctctgctgagactgaagggattcccttcctttcctctggtcgagagacaggccaacgaagtggactggtgggacatggtgtgtaacgtgaagaagctgatcaacgagaaaaaggaggatggcaaggtgttttggcagaatctggctggctacaagagacaggaagccctgagaccatacctgagcagcgaggaagatcggaagaagggaaagaaattcgctcggtaccagctgggcgacctgctgctgcacctggaaaagaagcacggcgaggactggggaaaggtgtacgacgaggcctgggagcggattgacaagaaagtggaaggcctgagcaagcacatcaagctggaagaggaacggagaagcgaggacgcccagagcaaggccgccctgaccgactggctgcgggctaaggccagcttcgtgatcgagggcctgaaggaggccgacaaggacgagttctgcagatgcgagctgaagctgcagaagtggtacggggacctgcggggaaagcccttcgccatcgaagccgagaacagcatcctggacatcagcggcttcagcaagcagtacaactgtgccttcatctggcagaaggacggcgtgaagaagctgaacctgtacctgatcatcaactacttcaagggcggcaagctgcggttcaagaagatcaaacctgaagccttcgaagccaacagattctacaccgtgatcaacaaaaagagcggcgagatcgtgcccatggaggtgaacttcaacttcgacgaccccaacctgatcatcctgcctctggcctttggcaagagacagggcagagaattcatctggaacgacctgctgtccctggaaaccggcagcctgaagctggccaacggaagagtgatcgagaagacactgtacaacagaagaacccggcaggatgagcctgccctgttcgtggccctgaccttcgagcggcgggaggtcctggactcctccaatatcaaaccaatgaacctgatcggcgtggcaagaggcgaaaacatccccgccgtgatcgccctgaccgaccccgagggctgcccactgagccggtttaaggatagcctgggaaacccaacccacatcctgagaatcggcgagagctataaggagaagcagcggaccatccaggccaagaaggaggtggagcagcggagagccggcggctacagccggaagtacgccagcaaagccaagaatctggcagacgatatggtgagaaacaccgctagagatctgctgtactacgccgtgacccaggatgccatgctgatcttcgccaacctgagccggggcttcggccggcagggcaagcggaccttcatggccgagagacagtacacacggatggaggactggctgaccgccaagctggcctacgagggcctgagcaagacctacctgtccaagacactggcccagtacacctccaagacatgcagcaactgtgggtttaccatcaccagcgccgactacgacagggtgctggagaagctgaagaagacagcaacaggctggatgaccacaattaacggcaaggagctgaaggtggagggccagattacctactacaacagatacaagagacagaacgtagtcaaggacctgtccgtcgagctggatagactgagcgaagaatctgtgaacaacgacatctcctcctggacaaagggcagaagcggagaagctctgagcctcctgaagaaaagattctcccatagacccgtgcaggagaagttcgtgtgcctgaactgcggcttcgagacacacgcagccgagcaagccgccctgaacatcgccagatcctggctgttcctgcggagccaggagtacaagaaataccagacaaacaagacaaccggcaacaccgataagagagccttcgtcgagacctggcagtccttttaccggaagaagcttaaggaggtgtggaaacctgccgtgcggtctggcggatctggcggaggctccaccagccccaagaaaaagagaaaagtctaagctgccttctgcggggcttgccttctggccatgcccttcttctctcccttgcacctgtacctcttggtctttgaataaagcctgagtaggaaggctagcaaaaaaaaaaaaaaaaaaaaaaaaaaaaaaaaaaaaaaaaaaaaaaaaaaaaaaaaaaaaaaaaaaaaaaaaaaaaaaaagcccagccggctccccaacctctaccgaggagggcacctctgagtccgccacccccgagagcggccctggcacctccaccgagcccagcgagggcagcgcacccggcagccctgccggcagccccacctccacagaggagggaaccagcaccgagcccagcgaaggcagcgccccaggcaccagcaccgagcctagtgagcaggagattaaacggatcaacaagatcagaagaagacttgtgaaagacagcaacaccaagaaggccggcaagacaggccccatgaaaaccctgctggttagagtgatgacacccgatctgagagagcggctggaaaacctgagaaagaagcctgaaaatatcccccagcccatcagcaatacatctagagccaacctgaataagctgctgaccgattacaccgaaatgaagaaggcgatcctgcatgtgtactgggaagagttccagaaggaccctgtgggcctgatgagccgggtggcccagcctgccagcaagaagatcgatcagaacaagctgaaacctgagatggacgagaagggcaacctgaccaccgccggctttgcctgctctcagtgtggccagcccctgttcgtgtacaagctggagcaggtgtctgagaagggcaaggcttacaccaactacttcggacggtgcaatgtggccgagcacgaaaagctgatcctgctggcccagctgaagcccgagaaggatagcgacgaagccgtgacatatagcctgggaaagtttgggcagagggccctggatttctacagcattcatgtgaccaaggagtccacccaccccgtgaagcccctggcccagatcgccggaaacagatacgcctccggacctgtgggaaaggccctgagcgacgcatgtatgggcacaatcgcctccttcctgtctaagtaccaggacatcatcatcgaacaccagaaggtggtgaagggcaaccagaagagactggagagcctgcgggagctggccggcaaggaaaacctggaataccctagcgtgaccctgccacctcagcctcacaccaaggagggcgttgatgcctacaacgaagtgatcgcccgggtgcgaatgtgggtgaacctgaacctgtggcagaagctgaagctaagcagagatgatgccaagcctctgctgagactgaagggattcccttcctttcctctggtcgagagacaggccaacgaagtggactggtgggacatggtgtgtaacgtgaagaagctgatcaacgagaaaaaggaggatggcaaggtgttttggcagaatctggctggctacaagagacaggaagccctgagaccatacctgagcagcgaggaagatcggaagaagggaaagaaattcgctcggtaccagctgggcgacctgctgctgcacctggaaaagaagcacggcgaggactggggaaaggtgtacgacgaggcctgggagcggattgacaagaaagtggaaggcctgagcaagcacatcaagctggaagaggaacggagaagcgaggacgcccagagcaaggccgccctgaccgactggctgcgggctaaggccagcttcgtgatcgagggcctgaaggaggccgacaaggacgagttctgcagatgcgagctgaagctgcagaagtggtacggggacctgcggggaaagcccttcgccatcgaagccgagaacagcatcctggacatcagcggcttcagcaagcagtacaactgtgccttcatctggcagaaggacggcgtgaagaagctgaacctgtacctgatcatcaactacttcaagggcggcaagctgcggttcaagaagatcaaacctgaagccttcgaagccaacagattctacaccgtgatcaacaaaaagagcggcgagatcgtgcccatggaggtgaacttcaacttcgacgaccccaacctgatcatcctgcctctggcctttggcaagagacagggcagagaattcatctggaacgacctgctgtccctggaaaccggcagcctgaagctggccaacggaagagtgatcgagaagacactgtacaacagaagaacccggcaggatgagcctgccctgttcgtggccctgaccttcgagcggcgggaggtcctggactcctccaatatcaaaccaatgaacctgatcggcgtggcaagaggcgaaaacatccccgccgtgatcgccctgaccgaccccgagggctgcccactgagccggtttaaggatagcctgggaaacccaacccacatcctgagaatcggcgagagctataaggagaagcagcggaccatccaggccaagaaggaggtggagcagcggagagccggcggctacagccggaagtacgccagcaaagccaagaatctggcagacgatatggtgagaaacaccgctagagatctgctgtactacgccgtgacccaggatgccatgctgatcttcgccaacctgagccggggcttcggccggcagggcaagcggaccttcatggccgagagacagtacacacggatggaggactggctgaccgccaagctggcctacgagggcctgagcaagacctacctgtccaagacactggcccagtacacctccaagacatgcagcaactgtgggtttaccatcaccagcgccgactacgacagggtgctggagaagctgaagaagacagcaacaggctggatgaccacaattaacggcaaggagctgaaggtggagggccagattacctactacaacagatacaagagacagaacgtagtcaaggacctgtccgtcgagctggatagactgagcgaagaatctgtgaacaacgacatctcctcctggacaaagggcagaagcggagaagctctgagcctcctgaagaaaagattctcccatagacccgtgcaggagaagttcgtgtgcctgaactgcggcttcgagacacacgcagccgagcaagccgccctgaacatcgccagatcctggctgttcctgcggagccaggagtacaagaaataccagacaaacaagacaaccggcaacaccgataagagagccttcgtcgagacctggcagtccttttaccggaagaagcttaaggaggtgtggaaacctgccgtgcggtctggcggatctggcggaggctccaccagccccaagaaaaagagaaaagtctaagctgccttctgcggggcttgccttctggccatgcccttcttctctcccttgcacctgtacctcttggtctttgaataaagcctgagtaggaaggctagcaaaaaaaaaaaaaaaaaaaaaaaaaaaaaaaaaaaaaaaaaaaaaaaaaaaaaaaaaaaaaaaaaaaaaaaaaaaaaaaa

SEQ ID NO: 9845 - RNA, 8787 nt, synthetic construct
  source 1..8787: mol_type = other RNA
aggaaataagagagaaaagaagagtaagaagaaatataagagccaccatggcccctaagaagaagcgtaaagtgagccggatgaaccacgaccaggagttcgacccccctaaggtgtaccctcccgtccccgccgagaagagaaagcccatccgggtcctgagcctgttcgatggcatcgccaccggtctgctggtgctgaaggacctgggcatccaggtggataggtacattgcctccgaggtgtgcgaggactccatcaccgtgggaatggtgcgtcatcagggcaagatcatgtacgtgggcgacgtgcggagcgtgacacagaagcatatccaggagtggggccctttcgacctggtgatcggcggcagcccttgcaatgacctgagcatcgtgaacccagcccggaagggcctgtacgagggaaccggcagactgttcttcgagttttacagactgctgcacgacgcccggcctaaggaaggcgacgaccggcccttcttttggctgttcgagaatgtggtggccatgggagtcagcgacaagcgggatattagccggttcctggagagcaaccccgtgatgatcgatgccaaggaagtgagcgccgcccaccgggccagatacttctggggcaatctgcctggcatgaacagacccctggccagcaccgtgaacgacaagctggagctgcaggagtgcctggagcacggccggatcgccaagttcagcaaggtgagaaccatcaccacccgaagcaacagcatcaaacaaggcaaggaccagcactttcctgtgttcatgaacgagaaggaggacatcctgtggtgtaccgagatggagagagtgttcgggttcccagtccactacacagatgtcagcaacatgtctagactggccagacagagactgctgggaagaagctggtccgtccctgtgatcagacacctgttcgcccctctgaaggagtacttcgcctgcgtgagcagcggcaacagcaacgccaacagccggggccccagcttctctagcggcctggtgccactgtccctgagagggagccacatgggccccatggagatctacaaaaccgtgagcgcctggaagcggcagcctgtgcgcgtgctgagcctgtttcggaatatcgataaagtcctgaaaagcctgggattcctggagagcggctctggctccggcggtggcaccctgaagtacgtggaggatgtgacaaacgtggtcagacgggatgtggagaagtggggccccttcgatctggtgtacggcagcacccaacccctgggcagctcttgtgaccggtgccctggctggtacatgtttcagttccaccggatcctgcagtacgccctgccgagacaggagtcccagcggccattcttttggattttcatggacaacttgctgctgaccgaggatgaccaggaaactaccactcggttcctgcagaccgaagccgtgaccctgcaggacgtgagaggccgggactaccagaacgccatgcgggtgtggtccaacatccctggactgaaaagcaagcacgcacctctgacccctaaagaagaggagtacctgcaggcccaggtgcggagcagaagcaagctggacgcccctaaggtggatctgctggtgaagaattgcctcctgcccctgagagagtacttcaagtatttcagccagaatagtctgcccctgggaggcagcggcggcggcagctacggcagcctgagcttcgaggacgtgaccgtgggcttcagccaggaggagtggcagcacctggaccccgcccagaggaccctgtacagggacgtgatgctggagaactacagccacctggtggccgtgggctgctgcgtgcccaagcccgacgtgatcttcaggctggagcagggccagcagccctggctgatcgaggaggagagcctggaccagagctgccccgaggtgtgcagggtgggcggcccaagcagcggcgcccctcctcccagcggcggcaggcggcccaagcagcggcgcccctcctcccagcggcggcagcccagccggctccccaacctctaccgaggagggcacctctgagtccgccacccccgagagcggccctggcacctccaccgagcccagcgagggcagcgcacccggcagccctgccggcagccccacctccacagaggagggaaccagcaccgagcccagcgaaggcagcgccccaggcaccagcaccgagcctagtgagcaggagattaaacggatcaacaagatcagaagaagacttgtgaaagacagcaacaccaagaaggccggcaagacaggccccatgaaaaccctgctggttagagtgatgacacccgatctgagagagcggctggaaaacctgagaaagaagcctgaaaatatcccccagcccatcagcaatacatctagagccaacctgaataagctgctgaccgattacaccgaaatgaagaaggcgatcctgcatgtgtactgggaagagttccagaaggaccctgtgggcctgatgagccgggtggcccagcctgccagcaagaagatcgatcagaacaagctgaaacctgagatggacgagaagggcaacctgaccaccgccggctttgcctgctctcagtgtggccagcccctgttcgtgtacaagctggagcaggtgtctgagaagggcaaggcttacaccaactacttcggacggtgcaatgtggccgagcacgaaaagctgatcctgctggcccagctgaagcccgagaaggatagcgacgaagccgtgacatatagcctgggaaagtttgggcagagggccctggatttctacagcattcatgtgaccaaggagtccacccaccccgtgaagcccctggcccagatcgccggaaacagatacgcctccggacctgtgggaaaggccctgagcgacgcatgtatgggcacaatcgcctccttcctgtctaagtaccaggacatcatcatcgaacaccagaaggtggtgaagggcaaccagaagagactggagagcctgcgggagctggccggcaaggaaaacctggaataccctagcgtgaccctgccacctcagcctcacaccaaggagggcgttgatgcctacaacgaagtgatcgcccgggtgcgaatgtgggtgaacctgaacctgtggcagaagctgaagctaagcagagatgatgccaagcctctgctgagactgaagggattcccttcctttcctctggtcgagagacaggccaacgaagtggactggtgggacatggtgtgtaacgtgaagaagctgatcaacgagaaaaaggaggatggcaaggtgttttggcagaatctggctggctacaagagacaggaagccctgagaccatacctgagcagcgaggaagatcggaagaagggaaagaaattcgctcggtaccagctgggcgacctgctgctgcacctggaaaagaagcacggcgaggactggggaaaggtgtacgacgaggcctgggagcggattgacaagaaagtggaaggcctgagcaagcacatcaagctggaagaggaacggagaagcgaggacgcccagagcaaggccgccctgaccgactggctgcgggctaaggccagcttcgtgatcgagggcctgaaggaggccgacaaggacgagttctgcagatgcgagctgaagctgcagaagtggtacggggacctgcggggaaagcccttcgccatcgaagccgagaacagcatcctggacatcagcggcttcagcaagcagtacaactgtgccttcatctggcagaaggacggcgtgaagaagctgaacctgtacctgatcatcaactacttcaagggcggcaagctgcggttcaagaagatcaaacctgaagccttcgaagccaacagattctacaccgtgatcaacaaaaagagcggcgagatcgtgcccatggaggtgaacttcaacttcgacgaccccaacctgatcatcctgcctctggcctttggcaagagacagggcagagaattcatctggaacgacctgctgtccctggaaaccggcagcctgaagctggccaacggaagagtgatcgagaagacactgtacaacagaagaacccggcaggatgagcctgccctgttcgtggccctgaccttcgagcggcgggaggtcctggactcctccaatatcaaaccaatgaacctgatcggcgtggcaagaggcgaaaacatccccgccgtgatcgccctgaccgaccccgagggctgcccactgagccggtttaaggatagcctgggaaacccaacccacatcctgagaatcggcgagagctataaggagaagcagcggaccatccaggccaagaaggaggtggagcagcggagagccggcggctacagccggaagtacgccagcaaagccaagaatctggcagacgatatggtgagaaacaccgctagagatctgctgtactacgccgtgacccaggatgccatgctgatcttcgccaacctgagccggggcttcggccggcagggcaagcggaccttcatggccgagagacagtacacacggatggaggactggctgaccgccaagctggcctacgagggcctgagcaagacctacctgtccaagacactggcccagtacacctccaagacatgcagcaactgtgggtttaccatcaccagcgccgactacgacagggtgctggagaagctgaagaagacagcaacaggctggatgaccacaattaacggcaaggagctgaaggtggagggccagattacctactacaacagatacaagagacagaacgtagtcaaggacctgtccgtcgagctggatagactgagcgaagaatctgtgaacaacgacatctcctcctggacaaagggcagaagcggagaagctctgagcctcctgaagaaaagattctcccatagacccgtgcaggagaagttcgtgtgcctgaactgcggcttcgagacacacgcagccgagcaagccgccctgaacatcgccagatcctggctgttcctgcggagccaggagtacaagaaataccagacaaacaagacaaccggcaacaccgataagagagccttcgtcgagacctggcagtccttttaccggaagaagcttaaggaggtgtggaaacctgccgtgcggtctggcggatctggcggaggctccaccagccccaagaaaaagagaaaagtctaagctgccttctgcggggcttgccttctggccatgcccttcttctctcccttgcacctgtacctcttggtctttgaataaagcctgagtaggaaggctagcaaaaaaaaaaaaaaaaaaaaaaaaaaaaaaaaaaaaaaaaaaaaaaaaaaaaaaaaaaaaaaaaaaaaaaaaaaaaaaaagcccagccggctccccaacctctaccgaggagggcacctctgagtccgccacccccgagagcggccctggcacctccaccgagcccagcgagggcagcgcacccggcagccctgccggcagccccacctccacagaggagggaaccagcaccgagcccagcgaaggcagcgccccaggcaccagcaccgagcctagtgagcaggagattaaacggatcaacaagatcagaagaagacttgtgaaagacagcaacaccaagaaggccggcaagacaggccccatgaaaaccctgctggttagagtgatgacacccgatctgagagagcggctggaaaacctgagaaagaagcctgaaaatatcccccagcccatcagcaatacatctagagccaacctgaataagctgctgaccgattacaccgaaatgaagaaggcgatcctgcatgtgtactgggaagagttccagaaggaccctgtgggcctgatgagccgggtggcccagcctgccagcaagaagatcgatcagaacaagctgaaacctgagatggacgagaagggcaacctgaccaccgccggctttgcctgctctcagtgtggccagcccctgttcgtgtacaagctggagcaggtgtctgagaagggcaaggcttacaccaactacttcggacggtgcaatgtggccgagcacgaaaagctgatcctgctggcccagctgaagcccgagaaggatagcgacgaagccgtgacatatagcctgggaaagtttgggcagagggccctggatttctacagcattcatgtgaccaaggagtccacccaccccgtgaagcccctggcccagatcgccggaaacagatacgcctccggacctgtgggaaaggccctgagcgacgcatgtatgggcacaatcgcctccttcctgtctaagtaccaggacatcatcatcgaacaccagaaggtggtgaagggcaaccagaagagactggagagcctgcgggagctggccggcaaggaaaacctggaataccctagcgtgaccctgccacctcagcctcacaccaaggagggcgttgatgcctacaacgaagtgatcgcccgggtgcgaatgtgggtgaacctgaacctgtggcagaagctgaagctaagcagagatgatgccaagcctctgctgagactgaagggattcccttcctttcctctggtcgagagacaggccaacgaagtggactggtgggacatggtgtgtaacgtgaagaagctgatcaacgagaaaaaggaggatggcaaggtgttttggcagaatctggctggctacaagagacaggaagccctgagaccatacctgagcagcgaggaagatcggaagaagggaaagaaattcgctcggtaccagctgggcgacctgctgctgcacctggaaaagaagcacggcgaggactggggaaaggtgtacgacgaggcctgggagcggattgacaagaaagtggaaggcctgagcaagcacatcaagctggaagaggaacggagaagcgaggacgcccagagcaaggccgccctgaccgactggctgcgggctaaggccagcttcgtgatcgagggcctgaaggaggccgacaaggacgagttctgcagatgcgagctgaagctgcagaagtggtacggggacctgcggggaaagcccttcgccatcgaagccgagaacagcatcctggacatcagcggcttcagcaagcagtacaactgtgccttcatctggcagaaggacggcgtgaagaagctgaacctgtacctgatcatcaactacttcaagggcggcaagctgcggttcaagaagatcaaacctgaagccttcgaagccaacagattctacaccgtgatcaacaaaaagagcggcgagatcgtgcccatggaggtgaacttcaacttcgacgaccccaacctgatcatcctgcctctggcctttggcaagagacagggcagagaattcatctggaacgacctgctgtccctggaaaccggcagcctgaagctggccaacggaagagtgatcgagaagacactgtacaacagaagaacccggcaggatgagcctgccctgttcgtggccctgaccttcgagcggcgggaggtcctggactcctccaatatcaaaccaatgaacctgatcggcgtggcaagaggcgaaaacatccccgccgtgatcgccctgaccgaccccgagggctgcccactgagccggtttaaggatagcctgggaaacccaacccacatcctgagaatcggcgagagctataaggagaagcagcggaccatccaggccaagaaggaggtggagcagcggagagccggcggctacagccggaagtacgccagcaaagccaagaatctggcagacgatatggtgagaaacaccgctagagatctgctgtactacgccgtgacccaggatgccatgctgatcttcgccaacctgagccggggcttcggccggcagggcaagcggaccttcatggccgagagacagtacacacggatggaggactggctgaccgccaagctggcctacgagggcctgagcaagacctacctgtccaagacactggcccagtacacctccaagacatgcagcaactgtgggtttaccatcaccagcgccgactacgacagggtgctggagaagctgaagaagacagcaacaggctggatgaccacaattaacggcaaggagctgaaggtggagggccagattacctactacaacagatacaagagacagaacgtagtcaaggacctgtccgtcgagctggatagactgagcgaagaatctgtgaacaacgacatctcctcctggacaaagggcagaagcggagaagctctgagcctcctgaagaaaagattctcccatagacccgtgcaggagaagttcgtgtgcctgaactgcggcttcgagacacacgcagccgagcaagccgccctgaacatcgccagatcctggctgttcctgcggagccaggagtacaagaaataccagacaaacaagacaaccggcaacaccgataagagagccttcgtcgagacctggcagtccttttaccggaagaagcttaaggaggtgtggaaacctgccgtgcggtctggcggatctggcggaggctccaccagccccaagaaaaagagaaaagtctaagctgccttctgcggggcttgccttctggccatgcccttcttctctcccttgcacctgtacctcttggtctttgaataaagcctgagtaggaaggctagcaaaaaaaaaaaaaaaaaaaaaaaaaaaaaaaaaaaaaaaaaaaaaaaaaaaaaaaaaaaaaaaaaaaaaaaaaaaaaaaa

SEQ ID NO: 9846 - RNA, 8787 nt, synthetic construct
  source 1..8787: mol_type = other RNA
aggaaataagagagaaaagaagagtaagaagaaatataagagccaccatggcccctaagaagaagcgtaaagtgagccggatgaaccacgaccaggagttcgacccccctaaggtgtaccctcccgtccccgccgagaagagaaagcccatccgggtcctgagcctgttcgatggcatcgccaccggtctgctggtgctgaaggacctgggcatccaggtggataggtacattgcctccgaggtgtgcgaggactccatcaccgtgggaatggtgcgtcatcagggcaagatcatgtacgtgggcgacgtgcggagcgtgacacagaagcatatccaggagtggggccctttcgacctggtgatcggcggcagcccttgcaatgacctgagcatcgtgaacccagcccggaagggcctgtacgagggaaccggcagactgttcttcgagttttacagactgctgcacgacgcccggcctaaggaaggcgacgaccggcccttcttttggctgttcgagaatgtggtggccatgggagtcagcgacaagcgggatattagccggttcctggagagcaaccccgtgatgatcgatgccaaggaagtgagcgccgcccaccgggccagatacttctggggcaatctgcctggcatgaacagacccctggccagcaccgtgaacgacaagctggagctgcaggagtgcctggagcacggccggatcgccaagttcagcaaggtgagaaccatcaccacccgaagcaacagcatcaaacaaggcaaggaccagcactttcctgtgttcatgaacgagaaggaggacatcctgtggtgtaccgagatggagagagtgttcgggttcccagtccactacacagatgtcagcaacatgtctagactggccagacagagactgctgggaagaagctggtccgtccctgtgatcagacacctgttcgcccctctgaaggagtacttcgcctgcgtgagcagcggcaacagcaacgccaacagccggggccccagcttctctagcggcctggtgccactgtccctgagagggagccacatgggccccatggagatctacaaaaccgtgagcgcctggaagcggcagcctgtgcgcgtgctgagcctgtttcggaatatcgataaagtcctgaaaagcctgggattcctggagagcggctctggctccggcggtggcaccctgaagtacgtggaggatgtgacaaacgtggtcagacgggatgtggagaagtggggccccttcgatctggtgtacggcagcacccaacccctgggcagctcttgtgaccggtgccctggctggtacatgtttcagttccaccggatcctgcagtacgccctgccgagacaggagtcccagcggccattcttttggattttcatggacaacttgctgctgaccgaggatgaccaggaaactaccactcggttcctgcagaccgaagccgtgaccctgcaggacgtgagaggccgggactaccagaacgccatgcgggtgtggtccaacatccctggactgaaaagcaagcacgcacctctgacccctaaagaagaggagtacctgcaggcccaggtgcggagcagaagcaagctggacgcccctaaggtggatctgctggtgaagaattgcctcctgcccctgagagagtacttcaagtatttcagccagaatagtctgcccctgggaggcagcggcggcggcagcctggagcccgacagcttcggcgacgtggccgtgctgttcagccaggaggagtgggccaggctggcccccgcccagagggagctgtacagggacgtgatgctggagacctacagccacctggtgagcctgggcctggccgtgagcaagcccgacgtgatcagcttcctggagcagggcaaggagccctggctgggcgagaaggccgccgccggcggcctgggccccgagctggagagcaggggcggcccaagcagcggcgcccctcctcccagcggcggcaggcggcccaagcagcggcgcccctcctcccagcggcggcagcccagccggctccccaacctctaccgaggagggcacctctgagtccgccacccccgagagcggccctggcacctccaccgagcccagcgagggcagcgcacccggcagccctgccggcagccccacctccacagaggagggaaccagcaccgagcccagcgaaggcagcgccccaggcaccagcaccgagcctagtgagcaggagattaaacggatcaacaagatcagaagaagacttgtgaaagacagcaacaccaagaaggccggcaagacaggccccatgaaaaccctgctggttagagtgatgacacccgatctgagagagcggctggaaaacctgagaaagaagcctgaaaatatcccccagcccatcagcaatacatctagagccaacctgaataagctgctgaccgattacaccgaaatgaagaaggcgatcctgcatgtgtactgggaagagttccagaaggaccctgtgggcctgatgagccgggtggcccagcctgccagcaagaagatcgatcagaacaagctgaaacctgagatggacgagaagggcaacctgaccaccgccggctttgcctgctctcagtgtggccagcccctgttcgtgtacaagctggagcaggtgtctgagaagggcaaggcttacaccaactacttcggacggtgcaatgtggccgagcacgaaaagctgatcctgctggcccagctgaagcccgagaaggatagcgacgaagccgtgacatatagcctgggaaagtttgggcagagggccctggatttctacagcattcatgtgaccaaggagtccacccaccccgtgaagcccctggcccagatcgccggaaacagatacgcctccggacctgtgggaaaggccctgagcgacgcatgtatgggcacaatcgcctccttcctgtctaagtaccaggacatcatcatcgaacaccagaaggtggtgaagggcaaccagaagagactggagagcctgcgggagctggccggcaaggaaaacctggaataccctagcgtgaccctgccacctcagcctcacaccaaggagggcgttgatgcctacaacgaagtgatcgcccgggtgcgaatgtgggtgaacctgaacctgtggcagaagctgaagctaagcagagatgatgccaagcctctgctgagactgaagggattcccttcctttcctctggtcgagagacaggccaacgaagtggactggtgggacatggtgtgtaacgtgaagaagctgatcaacgagaaaaaggaggatggcaaggtgttttggcagaatctggctggctacaagagacaggaagccctgagaccatacctgagcagcgaggaagatcggaagaagggaaagaaattcgctcggtaccagctgggcgacctgctgctgcacctggaaaagaagcacggcgaggactggggaaaggtgtacgacgaggcctgggagcggattgacaagaaagtggaaggcctgagcaagcacatcaagctggaagaggaacggagaagcgaggacgcccagagcaaggccgccctgaccgactggctgcgggctaaggccagcttcgtgatcgagggcctgaaggaggccgacaaggacgagttctgcagatgcgagctgaagctgcagaagtggtacggggacctgcggggaaagcccttcgccatcgaagccgagaacagcatcctggacatcagcggcttcagcaagcagtacaactgtgccttcatctggcagaaggacggcgtgaagaagctgaacctgtacctgatcatcaactacttcaagggcggcaagctgcggttcaagaagatcaaacctgaagccttcgaagccaacagattctacaccgtgatcaacaaaaagagcggcgagatcgtgcccatggaggtgaacttcaacttcgacgaccccaacctgatcatcctgcctctggcctttggcaagagacagggcagagaattcatctggaacgacctgctgtccctggaaaccggcagcctgaagctggccaacggaagagtgatcgagaagacactgtacaacagaagaacccggcaggatgagcctgccctgttcgtggccctgaccttcgagcggcgggaggtcctggactcctccaatatcaaaccaatgaacctgatcggcgtggcaagaggcgaaaacatccccgccgtgatcgccctgaccgaccccgagggctgcccactgagccggtttaaggatagcctgggaaacccaacccacatcctgagaatcggcgagagctataaggagaagcagcggaccatccaggccaagaaggaggtggagcagcggagagccggcggctacagccggaagtacgccagcaaagccaagaatctggcagacgatatggtgagaaacaccgctagagatctgctgtactacgccgtgacccaggatgccatgctgatcttcgccaacctgagccggggcttcggccggcagggcaagcggaccttcatggccgagagacagtacacacggatggaggactggctgaccgccaagctggcctacgagggcctgagcaagacctacctgtccaagacactggcccagtacacctccaagacatgcagcaactgtgggtttaccatcaccagcgccgactacgacagggtgctggagaagctgaagaagacagcaacaggctggatgaccacaattaacggcaaggagctgaaggtggagggccagattacctactacaacagatacaagagacagaacgtagtcaaggacctgtccgtcgagctggatagactgagcgaagaatctgtgaacaacgacatctcctcctggacaaagggcagaagcggagaagctctgagcctcctgaagaaaagattctcccatagacccgtgcaggagaagttcgtgtgcctgaactgcggcttcgagacacacgcagccgagcaagccgccctgaacatcgccagatcctggctgttcctgcggagccaggagtacaagaaataccagacaaacaagacaaccggcaacaccgataagagagccttcgtcgagacctggcagtccttttaccggaagaagcttaaggaggtgtggaaacctgccgtgcggtctggcggatctggcggaggctccaccagccccaagaaaaagagaaaagtctaagctgccttctgcggggcttgccttctggccatgcccttcttctctcccttgcacctgtacctcttggtctttgaataaagcctgagtaggaaggctagcaaaaaaaaaaaaaaaaaaaaaaaaaaaaaaaaaaaaaaaaaaaaaaaaaaaaaaaaaaaaaaaaaaaaaaaaaaaaaaaagcccagccggctccccaacctctaccgaggagggcacctctgagtccgccacccccgagagcggccctggcacctccaccgagcccagcgagggcagcgcacccggcagccctgccggcagccccacctccacagaggagggaaccagcaccgagcccagcgaaggcagcgccccaggcaccagcaccgagcctagtgagcaggagattaaacggatcaacaagatcagaagaagacttgtgaaagacagcaacaccaagaaggccggcaagacaggccccatgaaaaccctgctggttagagtgatgacacccgatctgagagagcggctggaaaacctgagaaagaagcctgaaaatatcccccagcccatcagcaatacatctagagccaacctgaataagctgctgaccgattacaccgaaatgaagaaggcgatcctgcatgtgtactgggaagagttccagaaggaccctgtgggcctgatgagccgggtggcccagcctgccagcaagaagatcgatcagaacaagctgaaacctgagatggacgagaagggcaacctgaccaccgccggctttgcctgctctcagtgtggccagcccctgttcgtgtacaagctggagcaggtgtctgagaagggcaaggcttacaccaactacttcggacggtgcaatgtggccgagcacgaaaagctgatcctgctggcccagctgaagcccgagaaggatagcgacgaagccgtgacatatagcctgggaaagtttgggcagagggccctggatttctacagcattcatgtgaccaaggagtccacccaccccgtgaagcccctggcccagatcgccggaaacagatacgcctccggacctgtgggaaaggccctgagcgacgcatgtatgggcacaatcgcctccttcctgtctaagtaccaggacatcatcatcgaacaccagaaggtggtgaagggcaaccagaagagactggagagcctgcgggagctggccggcaaggaaaacctggaataccctagcgtgaccctgccacctcagcctcacaccaaggagggcgttgatgcctacaacgaagtgatcgcccgggtgcgaatgtgggtgaacctgaacctgtggcagaagctgaagctaagcagagatgatgccaagcctctgctgagactgaagggattcccttcctttcctctggtcgagagacaggccaacgaagtggactggtgggacatggtgtgtaacgtgaagaagctgatcaacgagaaaaaggaggatggcaaggtgttttggcagaatctggctggctacaagagacaggaagccctgagaccatacctgagcagcgaggaagatcggaagaagggaaagaaattcgctcggtaccagctgggcgacctgctgctgcacctggaaaagaagcacggcgaggactggggaaaggtgtacgacgaggcctgggagcggattgacaagaaagtggaaggcctgagcaagcacatcaagctggaagaggaacggagaagcgaggacgcccagagcaaggccgccctgaccgactggctgcgggctaaggccagcttcgtgatcgagggcctgaaggaggccgacaaggacgagttctgcagatgcgagctgaagctgcagaagtggtacggggacctgcggggaaagcccttcgccatcgaagccgagaacagcatcctggacatcagcggcttcagcaagcagtacaactgtgccttcatctggcagaaggacggcgtgaagaagctgaacctgtacctgatcatcaactacttcaagggcggcaagctgcggttcaagaagatcaaacctgaagccttcgaagccaacagattctacaccgtgatcaacaaaaagagcggcgagatcgtgcccatggaggtgaacttcaacttcgacgaccccaacctgatcatcctgcctctggcctttggcaagagacagggcagagaattcatctggaacgacctgctgtccctggaaaccggcagcctgaagctggccaacggaagagtgatcgagaagacactgtacaacagaagaacccggcaggatgagcctgccctgttcgtggccctgaccttcgagcggcgggaggtcctggactcctccaatatcaaaccaatgaacctgatcggcgtggcaagaggcgaaaacatccccgccgtgatcgccctgaccgaccccgagggctgcccactgagccggtttaaggatagcctgggaaacccaacccacatcctgagaatcggcgagagctataaggagaagcagcggaccatccaggccaagaaggaggtggagcagcggagagccggcggctacagccggaagtacgccagcaaagccaagaatctggcagacgatatggtgagaaacaccgctagagatctgctgtactacgccgtgacccaggatgccatgctgatcttcgccaacctgagccggggcttcggccggcagggcaagcggaccttcatggccgagagacagtacacacggatggaggactggctgaccgccaagctggcctacgagggcctgagcaagacctacctgtccaagacactggcccagtacacctccaagacatgcagcaactgtgggtttaccatcaccagcgccgactacgacagggtgctggagaagctgaagaagacagcaacaggctggatgaccacaattaacggcaaggagctgaaggtggagggccagattacctactacaacagatacaagagacagaacgtagtcaaggacctgtccgtcgagctggatagactgagcgaagaatctgtgaacaacgacatctcctcctggacaaagggcagaagcggagaagctctgagcctcctgaagaaaagattctcccatagacccgtgcaggagaagttcgtgtgcctgaactgcggcttcgagacacacgcagccgagcaagccgccctgaacatcgccagatcctggctgttcctgcggagccaggagtacaagaaataccagacaaacaagacaaccggcaacaccgataagagagccttcgtcgagacctggcagtccttttaccggaagaagcttaaggaggtgtggaaacctgccgtgcggtctggcggatctggcggaggctccaccagccccaagaaaaagagaaaagtctaagctgccttctgcggggcttgccttctggccatgcccttcttctctcccttgcacctgtacctcttggtctttgaataaagcctgagtaggaaggctagcaaaaaaaaaaaaaaaaaaaaaaaaaaaaaaaaaaaaaaaaaaaaaaaaaaaaaaaaaaaaaaaaaaaaaaaaaaaaaaaa

SEQ ID NO: 9847 - RNA, 8787 nt, synthetic construct
  source 1..8787: mol_type = other RNA
aggaaataagagagaaaagaagagtaagaagaaatataagagccaccatggcccctaagaagaagcgtaaagtgagccggatgaaccacgaccaggagttcgacccccctaaggtgtaccctcccgtccccgccgagaagagaaagcccatccgggtcctgagcctgttcgatggcatcgccaccggtctgctggtgctgaaggacctgggcatccaggtggataggtacattgcctccgaggtgtgcgaggactccatcaccgtgggaatggtgcgtcatcagggcaagatcatgtacgtgggcgacgtgcggagcgtgacacagaagcatatccaggagtggggccctttcgacctggtgatcggcggcagcccttgcaatgacctgagcatcgtgaacccagcccggaagggcctgtacgagggaaccggcagactgttcttcgagttttacagactgctgcacgacgcccggcctaaggaaggcgacgaccggcccttcttttggctgttcgagaatgtggtggccatgggagtcagcgacaagcgggatattagccggttcctggagagcaaccccgtgatgatcgatgccaaggaagtgagcgccgcccaccgggccagatacttctggggcaatctgcctggcatgaacagacccctggccagcaccgtgaacgacaagctggagctgcaggagtgcctggagcacggccggatcgccaagttcagcaaggtgagaaccatcaccacccgaagcaacagcatcaaacaaggcaaggaccagcactttcctgtgttcatgaacgagaaggaggacatcctgtggtgtaccgagatggagagagtgttcgggttcccagtccactacacagatgtcagcaacatgtctagactggccagacagagactgctgggaagaagctggtccgtccctgtgatcagacacctgttcgcccctctgaaggagtacttcgcctgcgtgagcagcggcaacagcaacgccaacagccggggccccagcttctctagcggcctggtgccactgtccctgagagggagccacatgggccccatggagatctacaaaaccgtgagcgcctggaagcggcagcctgtgcgcgtgctgagcctgtttcggaatatcgataaagtcctgaaaagcctgggattcctggagagcggctctggctccggcggtggcaccctgaagtacgtggaggatgtgacaaacgtggtcagacgggatgtggagaagtggggccccttcgatctggtgtacggcagcacccaacccctgggcagctcttgtgaccggtgccctggctggtacatgtttcagttccaccggatcctgcagtacgccctgccgagacaggagtcccagcggccattcttttggattttcatggacaacttgctgctgaccgaggatgaccaggaaactaccactcggttcctgcagaccgaagccgtgaccctgcaggacgtgagaggccgggactaccagaacgccatgcgggtgtggtccaacatccctggactgaaaagcaagcacgcacctctgacccctaaagaagaggagtacctgcaggcccaggtgcggagcagaagcaagctggacgcccctaaggtggatctgctggtgaagaattgcctcctgcccctgagagagtacttcaagtatttcagccagaatagtctgcccctgggaggcagcggcggcggcgcccacgacctggtggtgttcagggacgtgagcgtggacttcagccaggaggagtgggagtgcctgaacagctaccagaggaacctgtacagggacgtgatcctggagaactacagcaacctggtgagcctggccggctgcagcatcagcaagcccgacgtgatcaccctgctggagcagggcaaggagccctggatggtggtgaggaacgagaagaggaggtggaacctggacctggagagcggcggcccaagcagcggcgcccctcctcccagcggcggcaggcggcccaagcagcggcgcccctcctcccagcggcggcagcccagccggctccccaacctctaccgaggagggcacctctgagtccgccacccccgagagcggccctggcacctccaccgagcccagcgagggcagcgcacccggcagccctgccggcagccccacctccacagaggagggaaccagcaccgagcccagcgaaggcagcgccccaggcaccagcaccgagcctagtgagcaggagattaaacggatcaacaagatcagaagaagacttgtgaaagacagcaacaccaagaaggccggcaagacaggccccatgaaaaccctgctggttagagtgatgacacccgatctgagagagcggctggaaaacctgagaaagaagcctgaaaatatcccccagcccatcagcaatacatctagagccaacctgaataagctgctgaccgattacaccgaaatgaagaaggcgatcctgcatgtgtactgggaagagttccagaaggaccctgtgggcctgatgagccgggtggcccagcctgccagcaagaagatcgatcagaacaagctgaaacctgagatggacgagaagggcaacctgaccaccgccggctttgcctgctctcagtgtggccagcccctgttcgtgtacaagctggagcaggtgtctgagaagggcaaggcttacaccaactacttcggacggtgcaatgtggccgagcacgaaaagctgatcctgctggcccagctgaagcccgagaaggatagcgacgaagccgtgacatatagcctgggaaagtttgggcagagggccctggatttctacagcattcatgtgaccaaggagtccacccaccccgtgaagcccctggcccagatcgccggaaacagatacgcctccggacctgtgggaaaggccctgagcgacgcatgtatgggcacaatcgcctccttcctgtctaagtaccaggacatcatcatcgaacaccagaaggtggtgaagggcaaccagaagagactggagagcctgcgggagctggccggcaaggaaaacctggaataccctagcgtgaccctgccacctcagcctcacaccaaggagggcgttgatgcctacaacgaagtgatcgcccgggtgcgaatgtgggtgaacctgaacctgtggcagaagctgaagctaagcagagatgatgccaagcctctgctgagactgaagggattcccttcctttcctctggtcgagagacaggccaacgaagtggactggtgggacatggtgtgtaacgtgaagaagctgatcaacgagaaaaaggaggatggcaaggtgttttggcagaatctggctggctacaagagacaggaagccctgagaccatacctgagcagcgaggaagatcggaagaagggaaagaaattcgctcggtaccagctgggcgacctgctgctgcacctggaaaagaagcacggcgaggactggggaaaggtgtacgacgaggcctgggagcggattgacaagaaagtggaaggcctgagcaagcacatcaagctggaagaggaacggagaagcgaggacgcccagagcaaggccgccctgaccgactggctgcgggctaaggccagcttcgtgatcgagggcctgaaggaggccgacaaggacgagttctgcagatgcgagctgaagctgcagaagtggtacggggacctgcggggaaagcccttcgccatcgaagccgagaacagcatcctggacatcagcggcttcagcaagcagtacaactgtgccttcatctggcagaaggacggcgtgaagaagctgaacctgtacctgatcatcaactacttcaagggcggcaagctgcggttcaagaagatcaaacctgaagccttcgaagccaacagattctacaccgtgatcaacaaaaagagcggcgagatcgtgcccatggaggtgaacttcaacttcgacgaccccaacctgatcatcctgcctctggcctttggcaagagacagggcagagaattcatctggaacgacctgctgtccctggaaaccggcagcctgaagctggccaacggaagagtgatcgagaagacactgtacaacagaagaacccggcaggatgagcctgccctgttcgtggccctgaccttcgagcggcgggaggtcctggactcctccaatatcaaaccaatgaacctgatcggcgtggcaagaggcgaaaacatccccgccgtgatcgccctgaccgaccccgagggctgcccactgagccggtttaaggatagcctgggaaacccaacccacatcctgagaatcggcgagagctataaggagaagcagcggaccatccaggccaagaaggaggtggagcagcggagagccggcggctacagccggaagtacgccagcaaagccaagaatctggcagacgatatggtgagaaacaccgctagagatctgctgtactacgccgtgacccaggatgccatgctgatcttcgccaacctgagccggggcttcggccggcagggcaagcggaccttcatggccgagagacagtacacacggatggaggactggctgaccgccaagctggcctacgagggcctgagcaagacctacctgtccaagacactggcccagtacacctccaagacatgcagcaactgtgggtttaccatcaccagcgccgactacgacagggtgctggagaagctgaagaagacagcaacaggctggatgaccacaattaacggcaaggagctgaaggtggagggccagattacctactacaacagatacaagagacagaacgtagtcaaggacctgtccgtcgagctggatagactgagcgaagaatctgtgaacaacgacatctcctcctggacaaagggcagaagcggagaagctctgagcctcctgaagaaaagattctcccatagacccgtgcaggagaagttcgtgtgcctgaactgcggcttcgagacacacgcagccgagcaagccgccctgaacatcgccagatcctggctgttcctgcggagccaggagtacaagaaataccagacaaacaagacaaccggcaacaccgataagagagccttcgtcgagacctggcagtccttttaccggaagaagcttaaggaggtgtggaaacctgccgtgcggtctggcggatctggcggaggctccaccagccccaagaaaaagagaaaagtctaagctgccttctgcggggcttgccttctggccatgcccttcttctctcccttgcacctgtacctcttggtctttgaataaagcctgagtaggaaggctagcaaaaaaaaaaaaaaaaaaaaaaaaaaaaaaaaaaaaaaaaaaaaaaaaaaaaaaaaaaaaaaaaaaaaaaaaaaaaaaaagcccagccggctccccaacctctaccgaggagggcacctctgagtccgccacccccgagagcggccctggcacctccaccgagcccagcgagggcagcgcacccggcagccctgccggcagccccacctccacagaggagggaaccagcaccgagcccagcgaaggcagcgccccaggcaccagcaccgagcctagtgagcaggagattaaacggatcaacaagatcagaagaagacttgtgaaagacagcaacaccaagaaggccggcaagacaggccccatgaaaaccctgctggttagagtgatgacacccgatctgagagagcggctggaaaacctgagaaagaagcctgaaaatatcccccagcccatcagcaatacatctagagccaacctgaataagctgctgaccgattacaccgaaatgaagaaggcgatcctgcatgtgtactgggaagagttccagaaggaccctgtgggcctgatgagccgggtggcccagcctgccagcaagaagatcgatcagaacaagctgaaacctgagatggacgagaagggcaacctgaccaccgccggctttgcctgctctcagtgtggccagcccctgttcgtgtacaagctggagcaggtgtctgagaagggcaaggcttacaccaactacttcggacggtgcaatgtggccgagcacgaaaagctgatcctgctggcccagctgaagcccgagaaggatagcgacgaagccgtgacatatagcctgggaaagtttgggcagagggccctggatttctacagcattcatgtgaccaaggagtccacccaccccgtgaagcccctggcccagatcgccggaaacagatacgcctccggacctgtgggaaaggccctgagcgacgcatgtatgggcacaatcgcctccttcctgtctaagtaccaggacatcatcatcgaacaccagaaggtggtgaagggcaaccagaagagactggagagcctgcgggagctggccggcaaggaaaacctggaataccctagcgtgaccctgccacctcagcctcacaccaaggagggcgttgatgcctacaacgaagtgatcgcccgggtgcgaatgtgggtgaacctgaacctgtggcagaagctgaagctaagcagagatgatgccaagcctctgctgagactgaagggattcccttcctttcctctggtcgagagacaggccaacgaagtggactggtgggacatggtgtgtaacgtgaagaagctgatcaacgagaaaaaggaggatggcaaggtgttttggcagaatctggctggctacaagagacaggaagccctgagaccatacctgagcagcgaggaagatcggaagaagggaaagaaattcgctcggtaccagctgggcgacctgctgctgcacctggaaaagaagcacggcgaggactggggaaaggtgtacgacgaggcctgggagcggattgacaagaaagtggaaggcctgagcaagcacatcaagctggaagaggaacggagaagcgaggacgcccagagcaaggccgccctgaccgactggctgcgggctaaggccagcttcgtgatcgagggcctgaaggaggccgacaaggacgagttctgcagatgcgagctgaagctgcagaagtggtacggggacctgcggggaaagcccttcgccatcgaagccgagaacagcatcctggacatcagcggcttcagcaagcagtacaactgtgccttcatctggcagaaggacggcgtgaagaagctgaacctgtacctgatcatcaactacttcaagggcggcaagctgcggttcaagaagatcaaacctgaagccttcgaagccaacagattctacaccgtgatcaacaaaaagagcggcgagatcgtgcccatggaggtgaacttcaacttcgacgaccccaacctgatcatcctgcctctggcctttggcaagagacagggcagagaattcatctggaacgacctgctgtccctggaaaccggcagcctgaagctggccaacggaagagtgatcgagaagacactgtacaacagaagaacccggcaggatgagcctgccctgttcgtggccctgaccttcgagcggcgggaggtcctggactcctccaatatcaaaccaatgaacctgatcggcgtggcaagaggcgaaaacatccccgccgtgatcgccctgaccgaccccgagggctgcccactgagccggtttaaggatagcctgggaaacccaacccacatcctgagaatcggcgagagctataaggagaagcagcggaccatccaggccaagaaggaggtggagcagcggagagccggcggctacagccggaagtacgccagcaaagccaagaatctggcagacgatatggtgagaaacaccgctagagatctgctgtactacgccgtgacccaggatgccatgctgatcttcgccaacctgagccggggcttcggccggcagggcaagcggaccttcatggccgagagacagtacacacggatggaggactggctgaccgccaagctggcctacgagggcctgagcaagacctacctgtccaagacactggcccagtacacctccaagacatgcagcaactgtgggtttaccatcaccagcgccgactacgacagggtgctggagaagctgaagaagacagcaacaggctggatgaccacaattaacggcaaggagctgaaggtggagggccagattacctactacaacagatacaagagacagaacgtagtcaaggacctgtccgtcgagctggatagactgagcgaagaatctgtgaacaacgacatctcctcctggacaaagggcagaagcggagaagctctgagcctcctgaagaaaagattctcccatagacccgtgcaggagaagttcgtgtgcctgaactgcggcttcgagacacacgcagccgagcaagccgccctgaacatcgccagatcctggctgttcctgcggagccaggagtacaagaaataccagacaaacaagacaaccggcaacaccgataagagagccttcgtcgagacctggcagtccttttaccggaagaagcttaaggaggtgtggaaacctgccgtgcggtctggcggatctggcggaggctccaccagccccaagaaaaagagaaaagtctaagctgccttctgcggggcttgccttctggccatgcccttcttctctcccttgcacctgtacctcttggtctttgaataaagcctgagtaggaaggctagcaaaaaaaaaaaaaaaaaaaaaaaaaaaaaaaaaaaaaaaaaaaaaaaaaaaaaaaaaaaaaaaaaaaaaaaaaaaaaaaa

SEQ ID NO: 9848 - RNA, 8787 nt, synthetic construct
  source 1..8787: mol_type = other RNA
aggaaataagagagaaaagaagagtaagaagaaatataagagccaccatggcccctaagaagaagcgtaaagtgagccggatgaaccacgaccaggagttcgacccccctaaggtgtaccctcccgtccccgccgagaagagaaagcccatccgggtcctgagcctgttcgatggcatcgccaccggtctgctggtgctgaaggacctgggcatccaggtggataggtacattgcctccgaggtgtgcgaggactccatcaccgtgggaatggtgcgtcatcagggcaagatcatgtacgtgggcgacgtgcggagcgtgacacagaagcatatccaggagtggggccctttcgacctggtgatcggcggcagcccttgcaatgacctgagcatcgtgaacccagcccggaagggcctgtacgagggaaccggcagactgttcttcgagttttacagactgctgcacgacgcccggcctaaggaaggcgacgaccggcccttcttttggctgttcgagaatgtggtggccatgggagtcagcgacaagcgggatattagccggttcctggagagcaaccccgtgatgatcgatgccaaggaagtgagcgccgcccaccgggccagatacttctggggcaatctgcctggcatgaacagacccctggccagcaccgtgaacgacaagctggagctgcaggagtgcctggagcacggccggatcgccaagttcagcaaggtgagaaccatcaccacccgaagcaacagcatcaaacaaggcaaggaccagcactttcctgtgttcatgaacgagaaggaggacatcctgtggtgtaccgagatggagagagtgttcgggttcccagtccactacacagatgtcagcaacatgtctagactggccagacagagactgctgggaagaagctggtccgtccctgtgatcagacacctgttcgcccctctgaaggagtacttcgcctgcgtgagcagcggcaacagcaacgccaacagccggggccccagcttctctagcggcctggtgccactgtccctgagagggagccacatgggccccatggagatctacaaaaccgtgagcgcctggaagcggcagcctgtgcgcgtgctgagcctgtttcggaatatcgataaagtcctgaaaagcctgggattcctggagagcggctctggctccggcggtggcaccctgaagtacgtggaggatgtgacaaacgtggtcagacgggatgtggagaagtggggccccttcgatctggtgtacggcagcacccaacccctgggcagctcttgtgaccggtgccctggctggtacatgtttcagttccaccggatcctgcagtacgccctgccgagacaggagtcccagcggccattcttttggattttcatggacaacttgctgctgaccgaggatgaccaggaaactaccactcggttcctgcagaccgaagccgtgaccctgcaggacgtgagaggccgggactaccagaacgccatgcgggtgtggtccaacatccctggactgaaaagcaagcacgcacctctgacccctaaagaagaggagtacctgcaggcccaggtgcggagcagaagcaagctggacgcccctaaggtggatctgctggtgaagaattgcctcctgcccctgagagagtacttcaagtatttcagccagaatagtctgcccctgggaggcagcggcggcggcagcgtgatgttcagcgacgtgagcatcgacttcagcctggaggagtgggagttcctgaacctggagcagagggacctgtacagggacgtgatgctggagaactacagcaacctggtgagcctgggctgcttcatcagcaagcccgacgtgatcagcctgctggagcagggcaaggagccctggaaggtggtgaggcagggcaggaggcagtaccccgacctggagaccaactacgagatcaagggcggcccaagcagcggcgcccctcctcccagcggcggcaggcggcccaagcagcggcgcccctcctcccagcggcggcagcccagccggctccccaacctctaccgaggagggcacctctgagtccgccacccccgagagcggccctggcacctccaccgagcccagcgagggcagcgcacccggcagccctgccggcagccccacctccacagaggagggaaccagcaccgagcccagcgaaggcagcgccccaggcaccagcaccgagcctagtgagcaggagattaaacggatcaacaagatcagaagaagacttgtgaaagacagcaacaccaagaaggccggcaagacaggccccatgaaaaccctgctggttagagtgatgacacccgatctgagagagcggctggaaaacctgagaaagaagcctgaaaatatcccccagcccatcagcaatacatctagagccaacctgaataagctgctgaccgattacaccgaaatgaagaaggcgatcctgcatgtgtactgggaagagttccagaaggaccctgtgggcctgatgagccgggtggcccagcctgccagcaagaagatcgatcagaacaagctgaaacctgagatggacgagaagggcaacctgaccaccgccggctttgcctgctctcagtgtggccagcccctgttcgtgtacaagctggagcaggtgtctgagaagggcaaggcttacaccaactacttcggacggtgcaatgtggccgagcacgaaaagctgatcctgctggcccagctgaagcccgagaaggatagcgacgaagccgtgacatatagcctgggaaagtttgggcagagggccctggatttctacagcattcatgtgaccaaggagtccacccaccccgtgaagcccctggcccagatcgccggaaacagatacgcctccggacctgtgggaaaggccctgagcgacgcatgtatgggcacaatcgcctccttcctgtctaagtaccaggacatcatcatcgaacaccagaaggtggtgaagggcaaccagaagagactggagagcctgcgggagctggccggcaaggaaaacctggaataccctagcgtgaccctgccacctcagcctcacaccaaggagggcgttgatgcctacaacgaagtgatcgcccgggtgcgaatgtgggtgaacctgaacctgtggcagaagctgaagctaagcagagatgatgccaagcctctgctgagactgaagggattcccttcctttcctctggtcgagagacaggccaacgaagtggactggtgggacatggtgtgtaacgtgaagaagctgatcaacgagaaaaaggaggatggcaaggtgttttggcagaatctggctggctacaagagacaggaagccctgagaccatacctgagcagcgaggaagatcggaagaagggaaagaaattcgctcggtaccagctgggcgacctgctgctgcacctggaaaagaagcacggcgaggactggggaaaggtgtacgacgaggcctgggagcggattgacaagaaagtggaaggcctgagcaagcacatcaagctggaagaggaacggagaagcgaggacgcccagagcaaggccgccctgaccgactggctgcgggctaaggccagcttcgtgatcgagggcctgaaggaggccgacaaggacgagttctgcagatgcgagctgaagctgcagaagtggtacggggacctgcggggaaagcccttcgccatcgaagccgagaacagcatcctggacatcagcggcttcagcaagcagtacaactgtgccttcatctggcagaaggacggcgtgaagaagctgaacctgtacctgatcatcaactacttcaagggcggcaagctgcggttcaagaagatcaaacctgaagccttcgaagccaacagattctacaccgtgatcaacaaaaagagcggcgagatcgtgcccatggaggtgaacttcaacttcgacgaccccaacctgatcatcctgcctctggcctttggcaagagacagggcagagaattcatctggaacgacctgctgtccctggaaaccggcagcctgaagctggccaacggaagagtgatcgagaagacactgtacaacagaagaacccggcaggatgagcctgccctgttcgtggccctgaccttcgagcggcgggaggtcctggactcctccaatatcaaaccaatgaacctgatcggcgtggcaagaggcgaaaacatccccgccgtgatcgccctgaccgaccccgagggctgcccactgagccggtttaaggatagcctgggaaacccaacccacatcctgagaatcggcgagagctataaggagaagcagcggaccatccaggccaagaaggaggtggagcagcggagagccggcggctacagccggaagtacgccagcaaagccaagaatctggcagacgatatggtgagaaacaccgctagagatctgctgtactacgccgtgacccaggatgccatgctgatcttcgccaacctgagccggggcttcggccggcagggcaagcggaccttcatggccgagagacagtacacacggatggaggactggctgaccgccaagctggcctacgagggcctgagcaagacctacctgtccaagacactggcccagtacacctccaagacatgcagcaactgtgggtttaccatcaccagcgccgactacgacagggtgctggagaagctgaagaagacagcaacaggctggatgaccacaattaacggcaaggagctgaaggtggagggccagattacctactacaacagatacaagagacagaacgtagtcaaggacctgtccgtcgagctggatagactgagcgaagaatctgtgaacaacgacatctcctcctggacaaagggcagaagcggagaagctctgagcctcctgaagaaaagattctcccatagacccgtgcaggagaagttcgtgtgcctgaactgcggcttcgagacacacgcagccgagcaagccgccctgaacatcgccagatcctggctgttcctgcggagccaggagtacaagaaataccagacaaacaagacaaccggcaacaccgataagagagccttcgtcgagacctggcagtccttttaccggaagaagcttaaggaggtgtggaaacctgccgtgcggtctggcggatctggcggaggctccaccagccccaagaaaaagagaaaagtctaagctgccttctgcggggcttgccttctggccatgcccttcttctctcccttgcacctgtacctcttggtctttgaataaagcctgagtaggaaggctagcaaaaaaaaaaaaaaaaaaaaaaaaaaaaaaaaaaaaaaaaaaaaaaaaaaaaaaaaaaaaaaaaaaaaaaaaaaaaaaaagcccagccggctccccaacctctaccgaggagggcacctctgagtccgccacccccgagagcggccctggcacctccaccgagcccagcgagggcagcgcacccggcagccctgccggcagccccacctccacagaggagggaaccagcaccgagcccagcgaaggcagcgccccaggcaccagcaccgagcctagtgagcaggagattaaacggatcaacaagatcagaagaagacttgtgaaagacagcaacaccaagaaggccggcaagacaggccccatgaaaaccctgctggttagagtgatgacacccgatctgagagagcggctggaaaacctgagaaagaagcctgaaaatatcccccagcccatcagcaatacatctagagccaacctgaataagctgctgaccgattacaccgaaatgaagaaggcgatcctgcatgtgtactgggaagagttccagaaggaccctgtgggcctgatgagccgggtggcccagcctgccagcaagaagatcgatcagaacaagctgaaacctgagatggacgagaagggcaacctgaccaccgccggctttgcctgctctcagtgtggccagcccctgttcgtgtacaagctggagcaggtgtctgagaagggcaaggcttacaccaactacttcggacggtgcaatgtggccgagcacgaaaagctgatcctgctggcccagctgaagcccgagaaggatagcgacgaagccgtgacatatagcctgggaaagtttgggcagagggccctggatttctacagcattcatgtgaccaaggagtccacccaccccgtgaagcccctggcccagatcgccggaaacagatacgcctccggacctgtgggaaaggccctgagcgacgcatgtatgggcacaatcgcctccttcctgtctaagtaccaggacatcatcatcgaacaccagaaggtggtgaagggcaaccagaagagactggagagcctgcgggagctggccggcaaggaaaacctggaataccctagcgtgaccctgccacctcagcctcacaccaaggagggcgttgatgcctacaacgaagtgatcgcccgggtgcgaatgtgggtgaacctgaacctgtggcagaagctgaagctaagcagagatgatgccaagcctctgctgagactgaagggattcccttcctttcctctggtcgagagacaggccaacgaagtggactggtgggacatggtgtgtaacgtgaagaagctgatcaacgagaaaaaggaggatggcaaggtgttttggcagaatctggctggctacaagagacaggaagccctgagaccatacctgagcagcgaggaagatcggaagaagggaaagaaattcgctcggtaccagctgggcgacctgctgctgcacctggaaaagaagcacggcgaggactggggaaaggtgtacgacgaggcctgggagcggattgacaagaaagtggaaggcctgagcaagcacatcaagctggaagaggaacggagaagcgaggacgcccagagcaaggccgccctgaccgactggctgcgggctaaggccagcttcgtgatcgagggcctgaaggaggccgacaaggacgagttctgcagatgcgagctgaagctgcagaagtggtacggggacctgcggggaaagcccttcgccatcgaagccgagaacagcatcctggacatcagcggcttcagcaagcagtacaactgtgccttcatctggcagaaggacggcgtgaagaagctgaacctgtacctgatcatcaactacttcaagggcggcaagctgcggttcaagaagatcaaacctgaagccttcgaagccaacagattctacaccgtgatcaacaaaaagagcggcgagatcgtgcccatggaggtgaacttcaacttcgacgaccccaacctgatcatcctgcctctggcctttggcaagagacagggcagagaattcatctggaacgacctgctgtccctggaaaccggcagcctgaagctggccaacggaagagtgatcgagaagacactgtacaacagaagaacccggcaggatgagcctgccctgttcgtggccctgaccttcgagcggcgggaggtcctggactcctccaatatcaaaccaatgaacctgatcggcgtggcaagaggcgaaaacatccccgccgtgatcgccctgaccgaccccgagggctgcccactgagccggtttaaggatagcctgggaaacccaacccacatcctgagaatcggcgagagctataaggagaagcagcggaccatccaggccaagaaggaggtggagcagcggagagccggcggctacagccggaagtacgccagcaaagccaagaatctggcagacgatatggtgagaaacaccgctagagatctgctgtactacgccgtgacccaggatgccatgctgatcttcgccaacctgagccggggcttcggccggcagggcaagcggaccttcatggccgagagacagtacacacggatggaggactggctgaccgccaagctggcctacgagggcctgagcaagacctacctgtccaagacactggcccagtacacctccaagacatgcagcaactgtgggtttaccatcaccagcgccgactacgacagggtgctggagaagctgaagaagacagcaacaggctggatgaccacaattaacggcaaggagctgaaggtggagggccagattacctactacaacagatacaagagacagaacgtagtcaaggacctgtccgtcgagctggatagactgagcgaagaatctgtgaacaacgacatctcctcctggacaaagggcagaagcggagaagctctgagcctcctgaagaaaagattctcccatagacccgtgcaggagaagttcgtgtgcctgaactgcggcttcgagacacacgcagccgagcaagccgccctgaacatcgccagatcctggctgttcctgcggagccaggagtacaagaaataccagacaaacaagacaaccggcaacaccgataagagagccttcgtcgagacctggcagtccttttaccggaagaagcttaaggaggtgtggaaacctgccgtgcggtctggcggatctggcggaggctccaccagccccaagaaaaagagaaaagtctaagctgccttctgcggggcttgccttctggccatgcccttcttctctcccttgcacctgtacctcttggtctttgaataaagcctgagtaggaaggctagcaaaaaaaaaaaaaaaaaaaaaaaaaaaaaaaaaaaaaaaaaaaaaaaaaaaaaaaaaaaaaaaaaaaaaaaaaaaaaaaa

SEQ ID NO: 9849 - RNA, 8787 nt, synthetic construct
  source 1..8787: mol_type = other RNA
aggaaataagagagaaaagaagagtaagaagaaatataagagccaccatggcccctaagaagaagcgtaaagtgagccggatgaaccacgaccaggagttcgacccccctaaggtgtaccctcccgtccccgccgagaagagaaagcccatccgggtcctgagcctgttcgatggcatcgccaccggtctgctggtgctgaaggacctgggcatccaggtggataggtacattgcctccgaggtgtgcgaggactccatcaccgtgggaatggtgcgtcatcagggcaagatcatgtacgtgggcgacgtgcggagcgtgacacagaagcatatccaggagtggggccctttcgacctggtgatcggcggcagcccttgcaatgacctgagcatcgtgaacccagcccggaagggcctgtacgagggaaccggcagactgttcttcgagttttacagactgctgcacgacgcccggcctaaggaaggcgacgaccggcccttcttttggctgttcgagaatgtggtggccatgggagtcagcgacaagcgggatattagccggttcctggagagcaaccccgtgatgatcgatgccaaggaagtgagcgccgcccaccgggccagatacttctggggcaatctgcctggcatgaacagacccctggccagcaccgtgaacgacaagctggagctgcaggagtgcctggagcacggccggatcgccaagttcagcaaggtgagaaccatcaccacccgaagcaacagcatcaaacaaggcaaggaccagcactttcctgtgttcatgaacgagaaggaggacatcctgtggtgtaccgagatggagagagtgttcgggttcccagtccactacacagatgtcagcaacatgtctagactggccagacagagactgctgggaagaagctggtccgtccctgtgatcagacacctgttcgcccctctgaaggagtacttcgcctgcgtgagcagcggcaacagcaacgccaacagccggggccccagcttctctagcggcctggtgccactgtccctgagagggagccacatgggccccatggagatctacaaaaccgtgagcgcctggaagcggcagcctgtgcgcgtgctgagcctgtttcggaatatcgataaagtcctgaaaagcctgggattcctggagagcggctctggctccggcggtggcaccctgaagtacgtggaggatgtgacaaacgtggtcagacgggatgtggagaagtggggccccttcgatctggtgtacggcagcacccaacccctgggcagctcttgtgaccggtgccctggctggtacatgtttcagttccaccggatcctgcagtacgccctgccgagacaggagtcccagcggccattcttttggattttcatggacaacttgctgctgaccgaggatgaccaggaaactaccactcggttcctgcagaccgaagccgtgaccctgcaggacgtgagaggccgggactaccagaacgccatgcgggtgtggtccaacatccctggactgaaaagcaagcacgcacctctgacccctaaagaagaggagtacctgcaggcccaggtgcggagcagaagcaagctggacgcccctaaggtggatctgctggtgaagaattgcctcctgcccctgagagagtacttcaagtatttcagccagaatagtctgcccctgggaggcagcggcggcggcgccgtgacccagctgaccttcgaggacgtggccgtggacttcacccccgaggagtggaggtgcctgacccccgcccagagggccctgtacagggacgtgatgctggacacctacaggaacctggtgagcgtgggcgtgagcccccccagcatgagcgtgatcctgcccctggagttccaggaggagccctgggtggcccagagccacgtgaccaccctgggcggcctgaacggctgggagggcggcggcccaagcagcggcgcccctcctcccagcggcggcaggcggcccaagcagcggcgcccctcctcccagcggcggcagcccagccggctccccaacctctaccgaggagggcacctctgagtccgccacccccgagagcggccctggcacctccaccgagcccagcgagggcagcgcacccggcagccctgccggcagccccacctccacagaggagggaaccagcaccgagcccagcgaaggcagcgccccaggcaccagcaccgagcctagtgagcaggagattaaacggatcaacaagatcagaagaagacttgtgaaagacagcaacaccaagaaggccggcaagacaggccccatgaaaaccctgctggttagagtgatgacacccgatctgagagagcggctggaaaacctgagaaagaagcctgaaaatatcccccagcccatcagcaatacatctagagccaacctgaataagctgctgaccgattacaccgaaatgaagaaggcgatcctgcatgtgtactgggaagagttccagaaggaccctgtgggcctgatgagccgggtggcccagcctgccagcaagaagatcgatcagaacaagctgaaacctgagatggacgagaagggcaacctgaccaccgccggctttgcctgctctcagtgtggccagcccctgttcgtgtacaagctggagcaggtgtctgagaagggcaaggcttacaccaactacttcggacggtgcaatgtggccgagcacgaaaagctgatcctgctggcccagctgaagcccgagaaggatagcgacgaagccgtgacatatagcctgggaaagtttgggcagagggccctggatttctacagcattcatgtgaccaaggagtccacccaccccgtgaagcccctggcccagatcgccggaaacagatacgcctccggacctgtgggaaaggccctgagcgacgcatgtatgggcacaatcgcctccttcctgtctaagtaccaggacatcatcatcgaacaccagaaggtggtgaagggcaaccagaagagactggagagcctgcgggagctggccggcaaggaaaacctggaataccctagcgtgaccctgccacctcagcctcacaccaaggagggcgttgatgcctacaacgaagtgatcgcccgggtgcgaatgtgggtgaacctgaacctgtggcagaagctgaagctaagcagagatgatgccaagcctctgctgagactgaagggattcccttcctttcctctggtcgagagacaggccaacgaagtggactggtgggacatggtgtgtaacgtgaagaagctgatcaacgagaaaaaggaggatggcaaggtgttttggcagaatctggctggctacaagagacaggaagccctgagaccatacctgagcagcgaggaagatcggaagaagggaaagaaattcgctcggtaccagctgggcgacctgctgctgcacctggaaaagaagcacggcgaggactggggaaaggtgtacgacgaggcctgggagcggattgacaagaaagtggaaggcctgagcaagcacatcaagctggaagaggaacggagaagcgaggacgcccagagcaaggccgccctgaccgactggctgcgggctaaggccagcttcgtgatcgagggcctgaaggaggccgacaaggacgagttctgcagatgcgagctgaagctgcagaagtggtacggggacctgcggggaaagcccttcgccatcgaagccgagaacagcatcctggacatcagcggcttcagcaagcagtacaactgtgccttcatctggcagaaggacggcgtgaagaagctgaacctgtacctgatcatcaactacttcaagggcggcaagctgcggttcaagaagatcaaacctgaagccttcgaagccaacagattctacaccgtgatcaacaaaaagagcggcgagatcgtgcccatggaggtgaacttcaacttcgacgaccccaacctgatcatcctgcctctggcctttggcaagagacagggcagagaattcatctggaacgacctgctgtccctggaaaccggcagcctgaagctggccaacggaagagtgatcgagaagacactgtacaacagaagaacccggcaggatgagcctgccctgttcgtggccctgaccttcgagcggcgggaggtcctggactcctccaatatcaaaccaatgaacctgatcggcgtggcaagaggcgaaaacatccccgccgtgatcgccctgaccgaccccgagggctgcccactgagccggtttaaggatagcctgggaaacccaacccacatcctgagaatcggcgagagctataaggagaagcagcggaccatccaggccaagaaggaggtggagcagcggagagccggcggctacagccggaagtacgccagcaaagccaagaatctggcagacgatatggtgagaaacaccgctagagatctgctgtactacgccgtgacccaggatgccatgctgatcttcgccaacctgagccggggcttcggccggcagggcaagcggaccttcatggccgagagacagtacacacggatggaggactggctgaccgccaagctggcctacgagggcctgagcaagacctacctgtccaagacactggcccagtacacctccaagacatgcagcaactgtgggtttaccatcaccagcgccgactacgacagggtgctggagaagctgaagaagacagcaacaggctggatgaccacaattaacggcaaggagctgaaggtggagggccagattacctactacaacagatacaagagacagaacgtagtcaaggacctgtccgtcgagctggatagactgagcgaagaatctgtgaacaacgacatctcctcctggacaaagggcagaagcggagaagctctgagcctcctgaagaaaagattctcccatagacccgtgcaggagaagttcgtgtgcctgaactgcggcttcgagacacacgcagccgagcaagccgccctgaacatcgccagatcctggctgttcctgcggagccaggagtacaagaaataccagacaaacaagacaaccggcaacaccgataagagagccttcgtcgagacctggcagtccttttaccggaagaagcttaaggaggtgtggaaacctgccgtgcggtctggcggatctggcggaggctccaccagccccaagaaaaagagaaaagtctaagctgccttctgcggggcttgccttctggccatgcccttcttctctcccttgcacctgtacctcttggtctttgaataaagcctgagtaggaaggctagcaaaaaaaaaaaaaaaaaaaaaaaaaaaaaaaaaaaaaaaaaaaaaaaaaaaaaaaaaaaaaaaaaaaaaaaaaaaaaaaagcccagccggctccccaacctctaccgaggagggcacctctgagtccgccacccccgagagcggccctggcacctccaccgagcccagcgagggcagcgcacccggcagccctgccggcagccccacctccacagaggagggaaccagcaccgagcccagcgaaggcagcgccccaggcaccagcaccgagcctagtgagcaggagattaaacggatcaacaagatcagaagaagacttgtgaaagacagcaacaccaagaaggccggcaagacaggccccatgaaaaccctgctggttagagtgatgacacccgatctgagagagcggctggaaaacctgagaaagaagcctgaaaatatcccccagcccatcagcaatacatctagagccaacctgaataagctgctgaccgattacaccgaaatgaagaaggcgatcctgcatgtgtactgggaagagttccagaaggaccctgtgggcctgatgagccgggtggcccagcctgccagcaagaagatcgatcagaacaagctgaaacctgagatggacgagaagggcaacctgaccaccgccggctttgcctgctctcagtgtggccagcccctgttcgtgtacaagctggagcaggtgtctgagaagggcaaggcttacaccaactacttcggacggtgcaatgtggccgagcacgaaaagctgatcctgctggcccagctgaagcccgagaaggatagcgacgaagccgtgacatatagcctgggaaagtttgggcagagggccctggatttctacagcattcatgtgaccaaggagtccacccaccccgtgaagcccctggcccagatcgccggaaacagatacgcctccggacctgtgggaaaggccctgagcgacgcatgtatgggcacaatcgcctccttcctgtctaagtaccaggacatcatcatcgaacaccagaaggtggtgaagggcaaccagaagagactggagagcctgcgggagctggccggcaaggaaaacctggaataccctagcgtgaccctgccacctcagcctcacaccaaggagggcgttgatgcctacaacgaagtgatcgcccgggtgcgaatgtgggtgaacctgaacctgtggcagaagctgaagctaagcagagatgatgccaagcctctgctgagactgaagggattcccttcctttcctctggtcgagagacaggccaacgaagtggactggtgggacatggtgtgtaacgtgaagaagctgatcaacgagaaaaaggaggatggcaaggtgttttggcagaatctggctggctacaagagacaggaagccctgagaccatacctgagcagcgaggaagatcggaagaagggaaagaaattcgctcggtaccagctgggcgacctgctgctgcacctggaaaagaagcacggcgaggactggggaaaggtgtacgacgaggcctgggagcggattgacaagaaagtggaaggcctgagcaagcacatcaagctggaagaggaacggagaagcgaggacgcccagagcaaggccgccctgaccgactggctgcgggctaaggccagcttcgtgatcgagggcctgaaggaggccgacaaggacgagttctgcagatgcgagctgaagctgcagaagtggtacggggacctgcggggaaagcccttcgccatcgaagccgagaacagcatcctggacatcagcggcttcagcaagcagtacaactgtgccttcatctggcagaaggacggcgtgaagaagctgaacctgtacctgatcatcaactacttcaagggcggcaagctgcggttcaagaagatcaaacctgaagccttcgaagccaacagattctacaccgtgatcaacaaaaagagcggcgagatcgtgcccatggaggtgaacttcaacttcgacgaccccaacctgatcatcctgcctctggcctttggcaagagacagggcagagaattcatctggaacgacctgctgtccctggaaaccggcagcctgaagctggccaacggaagagtgatcgagaagacactgtacaacagaagaacccggcaggatgagcctgccctgttcgtggccctgaccttcgagcggcgggaggtcctggactcctccaatatcaaaccaatgaacctgatcggcgtggcaagaggcgaaaacatccccgccgtgatcgccctgaccgaccccgagggctgcccactgagccggtttaaggatagcctgggaaacccaacccacatcctgagaatcggcgagagctataaggagaagcagcggaccatccaggccaagaaggaggtggagcagcggagagccggcggctacagccggaagtacgccagcaaagccaagaatctggcagacgatatggtgagaaacaccgctagagatctgctgtactacgccgtgacccaggatgccatgctgatcttcgccaacctgagccggggcttcggccggcagggcaagcggaccttcatggccgagagacagtacacacggatggaggactggctgaccgccaagctggcctacgagggcctgagcaagacctacctgtccaagacactggcccagtacacctccaagacatgcagcaactgtgggtttaccatcaccagcgccgactacgacagggtgctggagaagctgaagaagacagcaacaggctggatgaccacaattaacggcaaggagctgaaggtggagggccagattacctactacaacagatacaagagacagaacgtagtcaaggacctgtccgtcgagctggatagactgagcgaagaatctgtgaacaacgacatctcctcctggacaaagggcagaagcggagaagctctgagcctcctgaagaaaagattctcccatagacccgtgcaggagaagttcgtgtgcctgaactgcggcttcgagacacacgcagccgagcaagccgccctgaacatcgccagatcctggctgttcctgcggagccaggagtacaagaaataccagacaaacaagacaaccggcaacaccgataagagagccttcgtcgagacctggcagtccttttaccggaagaagcttaaggaggtgtggaaacctgccgtgcggtctggcggatctggcggaggctccaccagccccaagaaaaagagaaaagtctaagctgccttctgcggggcttgccttctggccatgcccttcttctctcccttgcacctgtacctcttggtctttgaataaagcctgagtaggaaggctagcaaaaaaaaaaaaaaaaaaaaaaaaaaaaaaaaaaaaaaaaaaaaaaaaaaaaaaaaaaaaaaaaaaaaaaaaaaaaaaaa

SEQ ID NO: 9850 - RNA, 8787 nt, synthetic construct
  source 1..8787: mol_type = other RNA
aggaaataagagagaaaagaagagtaagaagaaatataagagccaccatggcccctaagaagaagcgtaaagtgagccggatgaaccacgaccaggagttcgacccccctaaggtgtaccctcccgtccccgccgagaagagaaagcccatccgggtcctgagcctgttcgatggcatcgccaccggtctgctggtgctgaaggacctgggcatccaggtggataggtacattgcctccgaggtgtgcgaggactccatcaccgtgggaatggtgcgtcatcagggcaagatcatgtacgtgggcgacgtgcggagcgtgacacagaagcatatccaggagtggggccctttcgacctggtgatcggcggcagcccttgcaatgacctgagcatcgtgaacccagcccggaagggcctgtacgagggaaccggcagactgttcttcgagttttacagactgctgcacgacgcccggcctaaggaaggcgacgaccggcccttcttttggctgttcgagaatgtggtggccatgggagtcagcgacaagcgggatattagccggttcctggagagcaaccccgtgatgatcgatgccaaggaagtgagcgccgcccaccgggccagatacttctggggcaatctgcctggcatgaacagacccctggccagcaccgtgaacgacaagctggagctgcaggagtgcctggagcacggccggatcgccaagttcagcaaggtgagaaccatcaccacccgaagcaacagcatcaaacaaggcaaggaccagcactttcctgtgttcatgaacgagaaggaggacatcctgtggtgtaccgagatggagagagtgttcgggttcccagtccactacacagatgtcagcaacatgtctagactggccagacagagactgctgggaagaagctggtccgtccctgtgatcagacacctgttcgcccctctgaaggagtacttcgcctgcgtgagcagcggcaacagcaacgccaacagccggggccccagcttctctagcggcctggtgccactgtccctgagagggagccacatgggccccatggagatctacaaaaccgtgagcgcctggaagcggcagcctgtgcgcgtgctgagcctgtttcggaatatcgataaagtcctgaaaagcctgggattcctggagagcggctctggctccggcggtggcaccctgaagtacgtggaggatgtgacaaacgtggtcagacgggatgtggagaagtggggccccttcgatctggtgtacggcagcacccaacccctgggcagctcttgtgaccggtgccctggctggtacatgtttcagttccaccggatcctgcagtacgccctgccgagacaggagtcccagcggccattcttttggattttcatggacaacttgctgctgaccgaggatgaccaggaaactaccactcggttcctgcagaccgaagccgtgaccctgcaggacgtgagaggccgggactaccagaacgccatgcgggtgtggtccaacatccctggactgaaaagcaagcacgcacctctgacccctaaagaagaggagtacctgcaggcccaggtgcggagcagaagcaagctggacgcccctaaggtggatctgctggtgaagaattgcctcctgcccctgagagagtacttcaagtatttcagccagaatagtctgcccctgggaggcagcggcggcggccaccaggaggtggtgaccttcgaggacgtggccgtgtacttcaccaggaccgagtgggccggcctgagccccgcccagagggccctgtacaggagcgtgatgctggagatctacaggagcctgaccagcctgggctaccccgtgcccaagcccgccctgatcagcctgctggagaggggcgacctgcccgtgggcctggagacccaggacaacccccccgcccagggcaccagggacatctacggcggcccaagcagcggcgcccctcctcccagcggcggcaggcggcccaagcagcggcgcccctcctcccagcggcggcagcccagccggctccccaacctctaccgaggagggcacctctgagtccgccacccccgagagcggccctggcacctccaccgagcccagcgagggcagcgcacccggcagccctgccggcagccccacctccacagaggagggaaccagcaccgagcccagcgaaggcagcgccccaggcaccagcaccgagcctagtgagcaggagattaaacggatcaacaagatcagaagaagacttgtgaaagacagcaacaccaagaaggccggcaagacaggccccatgaaaaccctgctggttagagtgatgacacccgatctgagagagcggctggaaaacctgagaaagaagcctgaaaatatcccccagcccatcagcaatacatctagagccaacctgaataagctgctgaccgattacaccgaaatgaagaaggcgatcctgcatgtgtactgggaagagttccagaaggaccctgtgggcctgatgagccgggtggcccagcctgccagcaagaagatcgatcagaacaagctgaaacctgagatggacgagaagggcaacctgaccaccgccggctttgcctgctctcagtgtggccagcccctgttcgtgtacaagctggagcaggtgtctgagaagggcaaggcttacaccaactacttcggacggtgcaatgtggccgagcacgaaaagctgatcctgctggcccagctgaagcccgagaaggatagcgacgaagccgtgacatatagcctgggaaagtttgggcagagggccctggatttctacagcattcatgtgaccaaggagtccacccaccccgtgaagcccctggcccagatcgccggaaacagatacgcctccggacctgtgggaaaggccctgagcgacgcatgtatgggcacaatcgcctccttcctgtctaagtaccaggacatcatcatcgaacaccagaaggtggtgaagggcaaccagaagagactggagagcctgcgggagctggccggcaaggaaaacctggaataccctagcgtgaccctgccacctcagcctcacaccaaggagggcgttgatgcctacaacgaagtgatcgcccgggtgcgaatgtgggtgaacctgaacctgtggcagaagctgaagctaagcagagatgatgccaagcctctgctgagactgaagggattcccttcctttcctctggtcgagagacaggccaacgaagtggactggtgggacatggtgtgtaacgtgaagaagctgatcaacgagaaaaaggaggatggcaaggtgttttggcagaatctggctggctacaagagacaggaagccctgagaccatacctgagcagcgaggaagatcggaagaagggaaagaaattcgctcggtaccagctgggcgacctgctgctgcacctggaaaagaagcacggcgaggactggggaaaggtgtacgacgaggcctgggagcggattgacaagaaagtggaaggcctgagcaagcacatcaagctggaagaggaacggagaagcgaggacgcccagagcaaggccgccctgaccgactggctgcgggctaaggccagcttcgtgatcgagggcctgaaggaggccgacaaggacgagttctgcagatgcgagctgaagctgcagaagtggtacggggacctgcggggaaagcccttcgccatcgaagccgagaacagcatcctggacatcagcggcttcagcaagcagtacaactgtgccttcatctggcagaaggacggcgtgaagaagctgaacctgtacctgatcatcaactacttcaagggcggcaagctgcggttcaagaagatcaaacctgaagccttcgaagccaacagattctacaccgtgatcaacaaaaagagcggcgagatcgtgcccatggaggtgaacttcaacttcgacgaccccaacctgatcatcctgcctctggcctttggcaagagacagggcagagaattcatctggaacgacctgctgtccctggaaaccggcagcctgaagctggccaacggaagagtgatcgagaagacactgtacaacagaagaacccggcaggatgagcctgccctgttcgtggccctgaccttcgagcggcgggaggtcctggactcctccaatatcaaaccaatgaacctgatcggcgtggcaagaggcgaaaacatccccgccgtgatcgccctgaccgaccccgagggctgcccactgagccggtttaaggatagcctgggaaacccaacccacatcctgagaatcggcgagagctataaggagaagcagcggaccatccaggccaagaaggaggtggagcagcggagagccggcggctacagccggaagtacgccagcaaagccaagaatctggcagacgatatggtgagaaacaccgctagagatctgctgtactacgccgtgacccaggatgccatgctgatcttcgccaacctgagccggggcttcggccggcagggcaagcggaccttcatggccgagagacagtacacacggatggaggactggctgaccgccaagctggcctacgagggcctgagcaagacctacctgtccaagacactggcccagtacacctccaagacatgcagcaactgtgggtttaccatcaccagcgccgactacgacagggtgctggagaagctgaagaagacagcaacaggctggatgaccacaattaacggcaaggagctgaaggtggagggccagattacctactacaacagatacaagagacagaacgtagtcaaggacctgtccgtcgagctggatagactgagcgaagaatctgtgaacaacgacatctcctcctggacaaagggcagaagcggagaagctctgagcctcctgaagaaaagattctcccatagacccgtgcaggagaagttcgtgtgcctgaactgcggcttcgagacacacgcagccgagcaagccgccctgaacatcgccagatcctggctgttcctgcggagccaggagtacaagaaataccagacaaacaagacaaccggcaacaccgataagagagccttcgtcgagacctggcagtccttttaccggaagaagcttaaggaggtgtggaaacctgccgtgcggtctggcggatctggcggaggctccaccagccccaagaaaaagagaaaagtctaagctgccttctgcggggcttgccttctggccatgcccttcttctctcccttgcacctgtacctcttggtctttgaataaagcctgagtaggaaggctagcaaaaaaaaaaaaaaaaaaaaaaaaaaaaaaaaaaaaaaaaaaaaaaaaaaaaaaaaaaaaaaaaaaaaaaaaaaaaaaaagcccagccggctccccaacctctaccgaggagggcacctctgagtccgccacccccgagagcggccctggcacctccaccgagcccagcgagggcagcgcacccggcagccctgccggcagccccacctccacagaggagggaaccagcaccgagcccagcgaaggcagcgccccaggcaccagcaccgagcctagtgagcaggagattaaacggatcaacaagatcagaagaagacttgtgaaagacagcaacaccaagaaggccggcaagacaggccccatgaaaaccctgctggttagagtgatgacacccgatctgagagagcggctggaaaacctgagaaagaagcctgaaaatatcccccagcccatcagcaatacatctagagccaacctgaataagctgctgaccgattacaccgaaatgaagaaggcgatcctgcatgtgtactgggaagagttccagaaggaccctgtgggcctgatgagccgggtggcccagcctgccagcaagaagatcgatcagaacaagctgaaacctgagatggacgagaagggcaacctgaccaccgccggctttgcctgctctcagtgtggccagcccctgttcgtgtacaagctggagcaggtgtctgagaagggcaaggcttacaccaactacttcggacggtgcaatgtggccgagcacgaaaagctgatcctgctggcccagctgaagcccgagaaggatagcgacgaagccgtgacatatagcctgggaaagtttgggcagagggccctggatttctacagcattcatgtgaccaaggagtccacccaccccgtgaagcccctggcccagatcgccggaaacagatacgcctccggacctgtgggaaaggccctgagcgacgcatgtatgggcacaatcgcctccttcctgtctaagtaccaggacatcatcatcgaacaccagaaggtggtgaagggcaaccagaagagactggagagcctgcgggagctggccggcaaggaaaacctggaataccctagcgtgaccctgccacctcagcctcacaccaaggagggcgttgatgcctacaacgaagtgatcgcccgggtgcgaatgtgggtgaacctgaacctgtggcagaagctgaagctaagcagagatgatgccaagcctctgctgagactgaagggattcccttcctttcctctggtcgagagacaggccaacgaagtggactggtgggacatggtgtgtaacgtgaagaagctgatcaacgagaaaaaggaggatggcaaggtgttttggcagaatctggctggctacaagagacaggaagccctgagaccatacctgagcagcgaggaagatcggaagaagggaaagaaattcgctcggtaccagctgggcgacctgctgctgcacctggaaaagaagcacggcgaggactggggaaaggtgtacgacgaggcctgggagcggattgacaagaaagtggaaggcctgagcaagcacatcaagctggaagaggaacggagaagcgaggacgcccagagcaaggccgccctgaccgactggctgcgggctaaggccagcttcgtgatcgagggcctgaaggaggccgacaaggacgagttctgcagatgcgagctgaagctgcagaagtggtacggggacctgcggggaaagcccttcgccatcgaagccgagaacagcatcctggacatcagcggcttcagcaagcagtacaactgtgccttcatctggcagaaggacggcgtgaagaagctgaacctgtacctgatcatcaactacttcaagggcggcaagctgcggttcaagaagatcaaacctgaagccttcgaagccaacagattctacaccgtgatcaacaaaaagagcggcgagatcgtgcccatggaggtgaacttcaacttcgacgaccccaacctgatcatcctgcctctggcctttggcaagagacagggcagagaattcatctggaacgacctgctgtccctggaaaccggcagcctgaagctggccaacggaagagtgatcgagaagacactgtacaacagaagaacccggcaggatgagcctgccctgttcgtggccctgaccttcgagcggcgggaggtcctggactcctccaatatcaaaccaatgaacctgatcggcgtggcaagaggcgaaaacatccccgccgtgatcgccctgaccgaccccgagggctgcccactgagccggtttaaggatagcctgggaaacccaacccacatcctgagaatcggcgagagctataaggagaagcagcggaccatccaggccaagaaggaggtggagcagcggagagccggcggctacagccggaagtacgccagcaaagccaagaatctggcagacgatatggtgagaaacaccgctagagatctgctgtactacgccgtgacccaggatgccatgctgatcttcgccaacctgagccggggcttcggccggcagggcaagcggaccttcatggccgagagacagtacacacggatggaggactggctgaccgccaagctggcctacgagggcctgagcaagacctacctgtccaagacactggcccagtacacctccaagacatgcagcaactgtgggtttaccatcaccagcgccgactacgacagggtgctggagaagctgaagaagacagcaacaggctggatgaccacaattaacggcaaggagctgaaggtggagggccagattacctactacaacagatacaagagacagaacgtagtcaaggacctgtccgtcgagctggatagactgagcgaagaatctgtgaacaacgacatctcctcctggacaaagggcagaagcggagaagctctgagcctcctgaagaaaagattctcccatagacccgtgcaggagaagttcgtgtgcctgaactgcggcttcgagacacacgcagccgagcaagccgccctgaacatcgccagatcctggctgttcctgcggagccaggagtacaagaaataccagacaaacaagacaaccggcaacaccgataagagagccttcgtcgagacctggcagtccttttaccggaagaagcttaaggaggtgtggaaacctgccgtgcggtctggcggatctggcggaggctccaccagccccaagaaaaagagaaaagtctaagctgccttctgcggggcttgccttctggccatgcccttcttctctcccttgcacctgtacctcttggtctttgaataaagcctgagtaggaaggctagcaaaaaaaaaaaaaaaaaaaaaaaaaaaaaaaaaaaaaaaaaaaaaaaaaaaaaaaaaaaaaaaaaaaaaaaaaaaaaaaa

SEQ ID NO: 9851 - RNA, 8787 nt, synthetic construct
  source 1..8787: mol_type = other RNA
aggaaataagagagaaaagaagagtaagaagaaatataagagccaccatggcccctaagaagaagcgtaaagtgagccggatgaaccacgaccaggagttcgacccccctaaggtgtaccctcccgtccccgccgagaagagaaagcccatccgggtcctgagcctgttcgatggcatcgccaccggtctgctggtgctgaaggacctgggcatccaggtggataggtacattgcctccgaggtgtgcgaggactccatcaccgtgggaatggtgcgtcatcagggcaagatcatgtacgtgggcgacgtgcggagcgtgacacagaagcatatccaggagtggggccctttcgacctggtgatcggcggcagcccttgcaatgacctgagcatcgtgaacccagcccggaagggcctgtacgagggaaccggcagactgttcttcgagttttacagactgctgcacgacgcccggcctaaggaaggcgacgaccggcccttcttttggctgttcgagaatgtggtggccatgggagtcagcgacaagcgggatattagccggttcctggagagcaaccccgtgatgatcgatgccaaggaagtgagcgccgcccaccgggccagatacttctggggcaatctgcctggcatgaacagacccctggccagcaccgtgaacgacaagctggagctgcaggagtgcctggagcacggccggatcgccaagttcagcaaggtgagaaccatcaccacccgaagcaacagcatcaaacaaggcaaggaccagcactttcctgtgttcatgaacgagaaggaggacatcctgtggtgtaccgagatggagagagtgttcgggttcccagtccactacacagatgtcagcaacatgtctagactggccagacagagactgctgggaagaagctggtccgtccctgtgatcagacacctgttcgcccctctgaaggagtacttcgcctgcgtgagcagcggcaacagcaacgccaacagccggggccccagcttctctagcggcctggtgccactgtccctgagagggagccacatgggccccatggagatctacaaaaccgtgagcgcctggaagcggcagcctgtgcgcgtgctgagcctgtttcggaatatcgataaagtcctgaaaagcctgggattcctggagagcggctctggctccggcggtggcaccctgaagtacgtggaggatgtgacaaacgtggtcagacgggatgtggagaagtggggccccttcgatctggtgtacggcagcacccaacccctgggcagctcttgtgaccggtgccctggctggtacatgtttcagttccaccggatcctgcagtacgccctgccgagacaggagtcccagcggccattcttttggattttcatggacaacttgctgctgaccgaggatgaccaggaaactaccactcggttcctgcagaccgaagccgtgaccctgcaggacgtgagaggccgggactaccagaacgccatgcgggtgtggtccaacatccctggactgaaaagcaagcacgcacctctgacccctaaagaagaggagtacctgcaggcccaggtgcggagcagaagcaagctggacgcccctaaggtggatctgctggtgaagaattgcctcctgcccctgagagagtacttcaagtatttcagccagaatagtctgcccctgggaggcagcggcggcggcgcccaggagagcgtgatgttcagcgacgtgagcgtggacttcagccaggaggagtgggagtgcctgaacgacgaccagagggacctgtacagggacgtgatgctggagaactacagcaacctggtgagcatgggccacagcgtgagcaagcccaacgtgatcagctacctggagcagggcaaggagccctggctggtggacagggagctgaccaggggccagtggcccgtgctggagagcaggggcggcccaagcagcggcgcccctcctcccagcggcggcaggcggcccaagcagcggcgcccctcctcccagcggcggcagcccagccggctccccaacctctaccgaggagggcacctctgagtccgccacccccgagagcggccctggcacctccaccgagcccagcgagggcagcgcacccggcagccctgccggcagccccacctccacagaggagggaaccagcaccgagcccagcgaaggcagcgccccaggcaccagcaccgagcctagtgagcaggagattaaacggatcaacaagatcagaagaagacttgtgaaagacagcaacaccaagaaggccggcaagacaggccccatgaaaaccctgctggttagagtgatgacacccgatctgagagagcggctggaaaacctgagaaagaagcctgaaaatatcccccagcccatcagcaatacatctagagccaacctgaataagctgctgaccgattacaccgaaatgaagaaggcgatcctgcatgtgtactgggaagagttccagaaggaccctgtgggcctgatgagccgggtggcccagcctgccagcaagaagatcgatcagaacaagctgaaacctgagatggacgagaagggcaacctgaccaccgccggctttgcctgctctcagtgtggccagcccctgttcgtgtacaagctggagcaggtgtctgagaagggcaaggcttacaccaactacttcggacggtgcaatgtggccgagcacgaaaagctgatcctgctggcccagctgaagcccgagaaggatagcgacgaagccgtgacatatagcctgggaaagtttgggcagagggccctggatttctacagcattcatgtgaccaaggagtccacccaccccgtgaagcccctggcccagatcgccggaaacagatacgcctccggacctgtgggaaaggccctgagcgacgcatgtatgggcacaatcgcctccttcctgtctaagtaccaggacatcatcatcgaacaccagaaggtggtgaagggcaaccagaagagactggagagcctgcgggagctggccggcaaggaaaacctggaataccctagcgtgaccctgccacctcagcctcacaccaaggagggcgttgatgcctacaacgaagtgatcgcccgggtgcgaatgtgggtgaacctgaacctgtggcagaagctgaagctaagcagagatgatgccaagcctctgctgagactgaagggattcccttcctttcctctggtcgagagacaggccaacgaagtggactggtgggacatggtgtgtaacgtgaagaagctgatcaacgagaaaaaggaggatggcaaggtgttttggcagaatctggctggctacaagagacaggaagccctgagaccatacctgagcagcgaggaagatcggaagaagggaaagaaattcgctcggtaccagctgggcgacctgctgctgcacctggaaaagaagcacggcgaggactggggaaaggtgtacgacgaggcctgggagcggattgacaagaaagtggaaggcctgagcaagcacatcaagctggaagaggaacggagaagcgaggacgcccagagcaaggccgccctgaccgactggctgcgggctaaggccagcttcgtgatcgagggcctgaaggaggccgacaaggacgagttctgcagatgcgagctgaagctgcagaagtggtacggggacctgcggggaaagcccttcgccatcgaagccgagaacagcatcctggacatcagcggcttcagcaagcagtacaactgtgccttcatctggcagaaggacggcgtgaagaagctgaacctgtacctgatcatcaactacttcaagggcggcaagctgcggttcaagaagatcaaacctgaagccttcgaagccaacagattctacaccgtgatcaacaaaaagagcggcgagatcgtgcccatggaggtgaacttcaacttcgacgaccccaacctgatcatcctgcctctggcctttggcaagagacagggcagagaattcatctggaacgacctgctgtccctggaaaccggcagcctgaagctggccaacggaagagtgatcgagaagacactgtacaacagaagaacccggcaggatgagcctgccctgttcgtggccctgaccttcgagcggcgggaggtcctggactcctccaatatcaaaccaatgaacctgatcggcgtggcaagaggcgaaaacatccccgccgtgatcgccctgaccgaccccgagggctgcccactgagccggtttaaggatagcctgggaaacccaacccacatcctgagaatcggcgagagctataaggagaagcagcggaccatccaggccaagaaggaggtggagcagcggagagccggcggctacagccggaagtacgccagcaaagccaagaatctggcagacgatatggtgagaaacaccgctagagatctgctgtactacgccgtgacccaggatgccatgctgatcttcgccaacctgagccggggcttcggccggcagggcaagcggaccttcatggccgagagacagtacacacggatggaggactggctgaccgccaagctggcctacgagggcctgagcaagacctacctgtccaagacactggcccagtacacctccaagacatgcagcaactgtgggtttaccatcaccagcgccgactacgacagggtgctggagaagctgaagaagacagcaacaggctggatgaccacaattaacggcaaggagctgaaggtggagggccagattacctactacaacagatacaagagacagaacgtagtcaaggacctgtccgtcgagctggatagactgagcgaagaatctgtgaacaacgacatctcctcctggacaaagggcagaagcggagaagctctgagcctcctgaagaaaagattctcccatagacccgtgcaggagaagttcgtgtgcctgaactgcggcttcgagacacacgcagccgagcaagccgccctgaacatcgccagatcctggctgttcctgcggagccaggagtacaagaaataccagacaaacaagacaaccggcaacaccgataagagagccttcgtcgagacctggcagtccttttaccggaagaagcttaaggaggtgtggaaacctgccgtgcggtctggcggatctggcggaggctccaccagccccaagaaaaagagaaaagtctaagctgccttctgcggggcttgccttctggccatgcccttcttctctcccttgcacctgtacctcttggtctttgaataaagcctgagtaggaaggctagcaaaaaaaaaaaaaaaaaaaaaaaaaaaaaaaaaaaaaaaaaaaaaaaaaaaaaaaaaaaaaaaaaaaaaaaaaaaaaaaagcccagccggctccccaacctctaccgaggagggcacctctgagtccgccacccccgagagcggccctggcacctccaccgagcccagcgagggcagcgcacccggcagccctgccggcagccccacctccacagaggagggaaccagcaccgagcccagcgaaggcagcgccccaggcaccagcaccgagcctagtgagcaggagattaaacggatcaacaagatcagaagaagacttgtgaaagacagcaacaccaagaaggccggcaagacaggccccatgaaaaccctgctggttagagtgatgacacccgatctgagagagcggctggaaaacctgagaaagaagcctgaaaatatcccccagcccatcagcaatacatctagagccaacctgaataagctgctgaccgattacaccgaaatgaagaaggcgatcctgcatgtgtactgggaagagttccagaaggaccctgtgggcctgatgagccgggtggcccagcctgccagcaagaagatcgatcagaacaagctgaaacctgagatggacgagaagggcaacctgaccaccgccggctttgcctgctctcagtgtggccagcccctgttcgtgtacaagctggagcaggtgtctgagaagggcaaggcttacaccaactacttcggacggtgcaatgtggccgagcacgaaaagctgatcctgctggcccagctgaagcccgagaaggatagcgacgaagccgtgacatatagcctgggaaagtttgggcagagggccctggatttctacagcattcatgtgaccaaggagtccacccaccccgtgaagcccctggcccagatcgccggaaacagatacgcctccggacctgtgggaaaggccctgagcgacgcatgtatgggcacaatcgcctccttcctgtctaagtaccaggacatcatcatcgaacaccagaaggtggtgaagggcaaccagaagagactggagagcctgcgggagctggccggcaaggaaaacctggaataccctagcgtgaccctgccacctcagcctcacaccaaggagggcgttgatgcctacaacgaagtgatcgcccgggtgcgaatgtgggtgaacctgaacctgtggcagaagctgaagctaagcagagatgatgccaagcctctgctgagactgaagggattcccttcctttcctctggtcgagagacaggccaacgaagtggactggtgggacatggtgtgtaacgtgaagaagctgatcaacgagaaaaaggaggatggcaaggtgttttggcagaatctggctggctacaagagacaggaagccctgagaccatacctgagcagcgaggaagatcggaagaagggaaagaaattcgctcggtaccagctgggcgacctgctgctgcacctggaaaagaagcacggcgaggactggggaaaggtgtacgacgaggcctgggagcggattgacaagaaagtggaaggcctgagcaagcacatcaagctggaagaggaacggagaagcgaggacgcccagagcaaggccgccctgaccgactggctgcgggctaaggccagcttcgtgatcgagggcctgaaggaggccgacaaggacgagttctgcagatgcgagctgaagctgcagaagtggtacggggacctgcggggaaagcccttcgccatcgaagccgagaacagcatcctggacatcagcggcttcagcaagcagtacaactgtgccttcatctggcagaaggacggcgtgaagaagctgaacctgtacctgatcatcaactacttcaagggcggcaagctgcggttcaagaagatcaaacctgaagccttcgaagccaacagattctacaccgtgatcaacaaaaagagcggcgagatcgtgcccatggaggtgaacttcaacttcgacgaccccaacctgatcatcctgcctctggcctttggcaagagacagggcagagaattcatctggaacgacctgctgtccctggaaaccggcagcctgaagctggccaacggaagagtgatcgagaagacactgtacaacagaagaacccggcaggatgagcctgccctgttcgtggccctgaccttcgagcggcgggaggtcctggactcctccaatatcaaaccaatgaacctgatcggcgtggcaagaggcgaaaacatccccgccgtgatcgccctgaccgaccccgagggctgcccactgagccggtttaaggatagcctgggaaacccaacccacatcctgagaatcggcgagagctataaggagaagcagcggaccatccaggccaagaaggaggtggagcagcggagagccggcggctacagccggaagtacgccagcaaagccaagaatctggcagacgatatggtgagaaacaccgctagagatctgctgtactacgccgtgacccaggatgccatgctgatcttcgccaacctgagccggggcttcggccggcagggcaagcggaccttcatggccgagagacagtacacacggatggaggactggctgaccgccaagctggcctacgagggcctgagcaagacctacctgtccaagacactggcccagtacacctccaagacatgcagcaactgtgggtttaccatcaccagcgccgactacgacagggtgctggagaagctgaagaagacagcaacaggctggatgaccacaattaacggcaaggagctgaaggtggagggccagattacctactacaacagatacaagagacagaacgtagtcaaggacctgtccgtcgagctggatagactgagcgaagaatctgtgaacaacgacatctcctcctggacaaagggcagaagcggagaagctctgagcctcctgaagaaaagattctcccatagacccgtgcaggagaagttcgtgtgcctgaactgcggcttcgagacacacgcagccgagcaagccgccctgaacatcgccagatcctggctgttcctgcggagccaggagtacaagaaataccagacaaacaagacaaccggcaacaccgataagagagccttcgtcgagacctggcagtccttttaccggaagaagcttaaggaggtgtggaaacctgccgtgcggtctggcggatctggcggaggctccaccagccccaagaaaaagagaaaagtctaagctgccttctgcggggcttgccttctggccatgcccttcttctctcccttgcacctgtacctcttggtctttgaataaagcctgagtaggaaggctagcaaaaaaaaaaaaaaaaaaaaaaaaaaaaaaaaaaaaaaaaaaaaaaaaaaaaaaaaaaaaaaaaaaaaaaaaaaaaaaaa

SEQ ID NO: 9852 - RNA, 8787 nt, synthetic construct
  source 1..8787: mol_type = other RNA
aggaaataagagagaaaagaagagtaagaagaaatataagagccaccatggcccctaagaagaagcgtaaagtgagccggatgaaccacgaccaggagttcgacccccctaaggtgtaccctcccgtccccgccgagaagagaaagcccatccgggtcctgagcctgttcgatggcatcgccaccggtctgctggtgctgaaggacctgggcatccaggtggataggtacattgcctccgaggtgtgcgaggactccatcaccgtgggaatggtgcgtcatcagggcaagatcatgtacgtgggcgacgtgcggagcgtgacacagaagcatatccaggagtggggccctttcgacctggtgatcggcggcagcccttgcaatgacctgagcatcgtgaacccagcccggaagggcctgtacgagggaaccggcagactgttcttcgagttttacagactgctgcacgacgcccggcctaaggaaggcgacgaccggcccttcttttggctgttcgagaatgtggtggccatgggagtcagcgacaagcgggatattagccggttcctggagagcaaccccgtgatgatcgatgccaaggaagtgagcgccgcccaccgggccagatacttctggggcaatctgcctggcatgaacagacccctggccagcaccgtgaacgacaagctggagctgcaggagtgcctggagcacggccggatcgccaagttcagcaaggtgagaaccatcaccacccgaagcaacagcatcaaacaaggcaaggaccagcactttcctgtgttcatgaacgagaaggaggacatcctgtggtgtaccgagatggagagagtgttcgggttcccagtccactacacagatgtcagcaacatgtctagactggccagacagagactgctgggaagaagctggtccgtccctgtgatcagacacctgttcgcccctctgaaggagtacttcgcctgcgtgagcagcggcaacagcaacgccaacagccggggccccagcttctctagcggcctggtgccactgtccctgagagggagccacatgggccccatggagatctacaaaaccgtgagcgcctggaagcggcagcctgtgcgcgtgctgagcctgtttcggaatatcgataaagtcctgaaaagcctgggattcctggagagcggctctggctccggcggtggcaccctgaagtacgtggaggatgtgacaaacgtggtcagacgggatgtggagaagtggggccccttcgatctggtgtacggcagcacccaacccctgggcagctcttgtgaccggtgccctggctggtacatgtttcagttccaccggatcctgcagtacgccctgccgagacaggagtcccagcggccattcttttggattttcatggacaacttgctgctgaccgaggatgaccaggaaactaccactcggttcctgcagaccgaagccgtgaccctgcaggacgtgagaggccgggactaccagaacgccatgcgggtgtggtccaacatccctggactgaaaagcaagcacgcacctctgacccctaaagaagaggagtacctgcaggcccaggtgcggagcagaagcaagctggacgcccctaaggtggatctgctggtgaagaattgcctcctgcccctgagagagtacttcaagtatttcagccagaatagtctgcccctgggaggcagcggcggcggcatggtgagcttcgaggacgtggccgtgcccctgagccaggaggagtggaactgcctgatccccgcccagaggggcctgtacagggacgtgatgctggagacctacggcaacctggtgagcctgggcctgcaggccagcaagcccgacgtgatcagcaggctggagcagggcgacgagccctggaccccccacatcctgaggacccagggcagctggagctggaggcacaagagggagggctacggcggcccaagcagcggcgcccctcctcccagcggcggcaggcggcccaagcagcggcgcccctcctcccagcggcggcagcccagccggctccccaacctctaccgaggagggcacctctgagtccgccacccccgagagcggccctggcacctccaccgagcccagcgagggcagcgcacccggcagccctgccggcagccccacctccacagaggagggaaccagcaccgagcccagcgaaggcagcgccccaggcaccagcaccgagcctagtgagcaggagattaaacggatcaacaagatcagaagaagacttgtgaaagacagcaacaccaagaaggccggcaagacaggccccatgaaaaccctgctggttagagtgatgacacccgatctgagagagcggctggaaaacctgagaaagaagcctgaaaatatcccccagcccatcagcaatacatctagagccaacctgaataagctgctgaccgattacaccgaaatgaagaaggcgatcctgcatgtgtactgggaagagttccagaaggaccctgtgggcctgatgagccgggtggcccagcctgccagcaagaagatcgatcagaacaagctgaaacctgagatggacgagaagggcaacctgaccaccgccggctttgcctgctctcagtgtggccagcccctgttcgtgtacaagctggagcaggtgtctgagaagggcaaggcttacaccaactacttcggacggtgcaatgtggccgagcacgaaaagctgatcctgctggcccagctgaagcccgagaaggatagcgacgaagccgtgacatatagcctgggaaagtttgggcagagggccctggatttctacagcattcatgtgaccaaggagtccacccaccccgtgaagcccctggcccagatcgccggaaacagatacgcctccggacctgtgggaaaggccctgagcgacgcatgtatgggcacaatcgcctccttcctgtctaagtaccaggacatcatcatcgaacaccagaaggtggtgaagggcaaccagaagagactggagagcctgcgggagctggccggcaaggaaaacctggaataccctagcgtgaccctgccacctcagcctcacaccaaggagggcgttgatgcctacaacgaagtgatcgcccgggtgcgaatgtgggtgaacctgaacctgtggcagaagctgaagctaagcagagatgatgccaagcctctgctgagactgaagggattcccttcctttcctctggtcgagagacaggccaacgaagtggactggtgggacatggtgtgtaacgtgaagaagctgatcaacgagaaaaaggaggatggcaaggtgttttggcagaatctggctggctacaagagacaggaagccctgagaccatacctgagcagcgaggaagatcggaagaagggaaagaaattcgctcggtaccagctgggcgacctgctgctgcacctggaaaagaagcacggcgaggactggggaaaggtgtacgacgaggcctgggagcggattgacaagaaagtggaaggcctgagcaagcacatcaagctggaagaggaacggagaagcgaggacgcccagagcaaggccgccctgaccgactggctgcgggctaaggccagcttcgtgatcgagggcctgaaggaggccgacaaggacgagttctgcagatgcgagctgaagctgcagaagtggtacggggacctgcggggaaagcccttcgccatcgaagccgagaacagcatcctggacatcagcggcttcagcaagcagtacaactgtgccttcatctggcagaaggacggcgtgaagaagctgaacctgtacctgatcatcaactacttcaagggcggcaagctgcggttcaagaagatcaaacctgaagccttcgaagccaacagattctacaccgtgatcaacaaaaagagcggcgagatcgtgcccatggaggtgaacttcaacttcgacgaccccaacctgatcatcctgcctctggcctttggcaagagacagggcagagaattcatctggaacgacctgctgtccctggaaaccggcagcctgaagctggccaacggaagagtgatcgagaagacactgtacaacagaagaacccggcaggatgagcctgccctgttcgtggccctgaccttcgagcggcgggaggtcctggactcctccaatatcaaaccaatgaacctgatcggcgtggcaagaggcgaaaacatccccgccgtgatcgccctgaccgaccccgagggctgcccactgagccggtttaaggatagcctgggaaacccaacccacatcctgagaatcggcgagagctataaggagaagcagcggaccatccaggccaagaaggaggtggagcagcggagagccggcggctacagccggaagtacgccagcaaagccaagaatctggcagacgatatggtgagaaacaccgctagagatctgctgtactacgccgtgacccaggatgccatgctgatcttcgccaacctgagccggggcttcggccggcagggcaagcggaccttcatggccgagagacagtacacacggatggaggactggctgaccgccaagctggcctacgagggcctgagcaagacctacctgtccaagacactggcccagtacacctccaagacatgcagcaactgtgggtttaccatcaccagcgccgactacgacagggtgctggagaagctgaagaagacagcaacaggctggatgaccacaattaacggcaaggagctgaaggtggagggccagattacctactacaacagatacaagagacagaacgtagtcaaggacctgtccgtcgagctggatagactgagcgaagaatctgtgaacaacgacatctcctcctggacaaagggcagaagcggagaagctctgagcctcctgaagaaaagattctcccatagacccgtgcaggagaagttcgtgtgcctgaactgcggcttcgagacacacgcagccgagcaagccgccctgaacatcgccagatcctggctgttcctgcggagccaggagtacaagaaataccagacaaacaagacaaccggcaacaccgataagagagccttcgtcgagacctggcagtccttttaccggaagaagcttaaggaggtgtggaaacctgccgtgcggtctggcggatctggcggaggctccaccagccccaagaaaaagagaaaagtctaagctgccttctgcggggcttgccttctggccatgcccttcttctctcccttgcacctgtacctcttggtctttgaataaagcctgagtaggaaggctagcaaaaaaaaaaaaaaaaaaaaaaaaaaaaaaaaaaaaaaaaaaaaaaaaaaaaaaaaaaaaaaaaaaaaaaaaaaaaaaaagcccagccggctccccaacctctaccgaggagggcacctctgagtccgccacccccgagagcggccctggcacctccaccgagcccagcgagggcagcgcacccggcagccctgccggcagccccacctccacagaggagggaaccagcaccgagcccagcgaaggcagcgccccaggcaccagcaccgagcctagtgagcaggagattaaacggatcaacaagatcagaagaagacttgtgaaagacagcaacaccaagaaggccggcaagacaggccccatgaaaaccctgctggttagagtgatgacacccgatctgagagagcggctggaaaacctgagaaagaagcctgaaaatatcccccagcccatcagcaatacatctagagccaacctgaataagctgctgaccgattacaccgaaatgaagaaggcgatcctgcatgtgtactgggaagagttccagaaggaccctgtgggcctgatgagccgggtggcccagcctgccagcaagaagatcgatcagaacaagctgaaacctgagatggacgagaagggcaacctgaccaccgccggctttgcctgctctcagtgtggccagcccctgttcgtgtacaagctggagcaggtgtctgagaagggcaaggcttacaccaactacttcggacggtgcaatgtggccgagcacgaaaagctgatcctgctggcccagctgaagcccgagaaggatagcgacgaagccgtgacatatagcctgggaaagtttgggcagagggccctggatttctacagcattcatgtgaccaaggagtccacccaccccgtgaagcccctggcccagatcgccggaaacagatacgcctccggacctgtgggaaaggccctgagcgacgcatgtatgggcacaatcgcctccttcctgtctaagtaccaggacatcatcatcgaacaccagaaggtggtgaagggcaaccagaagagactggagagcctgcgggagctggccggcaaggaaaacctggaataccctagcgtgaccctgccacctcagcctcacaccaaggagggcgttgatgcctacaacgaagtgatcgcccgggtgcgaatgtgggtgaacctgaacctgtggcagaagctgaagctaagcagagatgatgccaagcctctgctgagactgaagggattcccttcctttcctctggtcgagagacaggccaacgaagtggactggtgggacatggtgtgtaacgtgaagaagctgatcaacgagaaaaaggaggatggcaaggtgttttggcagaatctggctggctacaagagacaggaagccctgagaccatacctgagcagcgaggaagatcggaagaagggaaagaaattcgctcggtaccagctgggcgacctgctgctgcacctggaaaagaagcacggcgaggactggggaaaggtgtacgacgaggcctgggagcggattgacaagaaagtggaaggcctgagcaagcacatcaagctggaagaggaacggagaagcgaggacgcccagagcaaggccgccctgaccgactggctgcgggctaaggccagcttcgtgatcgagggcctgaaggaggccgacaaggacgagttctgcagatgcgagctgaagctgcagaagtggtacggggacctgcggggaaagcccttcgccatcgaagccgagaacagcatcctggacatcagcggcttcagcaagcagtacaactgtgccttcatctggcagaaggacggcgtgaagaagctgaacctgtacctgatcatcaactacttcaagggcggcaagctgcggttcaagaagatcaaacctgaagccttcgaagccaacagattctacaccgtgatcaacaaaaagagcggcgagatcgtgcccatggaggtgaacttcaacttcgacgaccccaacctgatcatcctgcctctggcctttggcaagagacagggcagagaattcatctggaacgacctgctgtccctggaaaccggcagcctgaagctggccaacggaagagtgatcgagaagacactgtacaacagaagaacccggcaggatgagcctgccctgttcgtggccctgaccttcgagcggcgggaggtcctggactcctccaatatcaaaccaatgaacctgatcggcgtggcaagaggcgaaaacatccccgccgtgatcgccctgaccgaccccgagggctgcccactgagccggtttaaggatagcctgggaaacccaacccacatcctgagaatcggcgagagctataaggagaagcagcggaccatccaggccaagaaggaggtggagcagcggagagccggcggctacagccggaagtacgccagcaaagccaagaatctggcagacgatatggtgagaaacaccgctagagatctgctgtactacgccgtgacccaggatgccatgctgatcttcgccaacctgagccggggcttcggccggcagggcaagcggaccttcatggccgagagacagtacacacggatggaggactggctgaccgccaagctggcctacgagggcctgagcaagacctacctgtccaagacactggcccagtacacctccaagacatgcagcaactgtgggtttaccatcaccagcgccgactacgacagggtgctggagaagctgaagaagacagcaacaggctggatgaccacaattaacggcaaggagctgaaggtggagggccagattacctactacaacagatacaagagacagaacgtagtcaaggacctgtccgtcgagctggatagactgagcgaagaatctgtgaacaacgacatctcctcctggacaaagggcagaagcggagaagctctgagcctcctgaagaaaagattctcccatagacccgtgcaggagaagttcgtgtgcctgaactgcggcttcgagacacacgcagccgagcaagccgccctgaacatcgccagatcctggctgttcctgcggagccaggagtacaagaaataccagacaaacaagacaaccggcaacaccgataagagagccttcgtcgagacctggcagtccttttaccggaagaagcttaaggaggtgtggaaacctgccgtgcggtctggcggatctggcggaggctccaccagccccaagaaaaagagaaaagtctaagctgccttctgcggggcttgccttctggccatgcccttcttctctcccttgcacctgtacctcttggtctttgaataaagcctgagtaggaaggctagcaaaaaaaaaaaaaaaaaaaaaaaaaaaaaaaaaaaaaaaaaaaaaaaaaaaaaaaaaaaaaaaaaaaaaaaaaaaaaaaa

SEQ ID NO: 9853 - RNA, 8787 nt, synthetic construct
  source 1..8787: mol_type = other RNA
aggaaataagagagaaaagaagagtaagaagaaatataagagccaccatggcccctaagaagaagcgtaaagtgagccggatgaaccacgaccaggagttcgacccccctaaggtgtaccctcccgtccccgccgagaagagaaagcccatccgggtcctgagcctgttcgatggcatcgccaccggtctgctggtgctgaaggacctgggcatccaggtggataggtacattgcctccgaggtgtgcgaggactccatcaccgtgggaatggtgcgtcatcagggcaagatcatgtacgtgggcgacgtgcggagcgtgacacagaagcatatccaggagtggggccctttcgacctggtgatcggcggcagcccttgcaatgacctgagcatcgtgaacccagcccggaagggcctgtacgagggaaccggcagactgttcttcgagttttacagactgctgcacgacgcccggcctaaggaaggcgacgaccggcccttcttttggctgttcgagaatgtggtggccatgggagtcagcgacaagcgggatattagccggttcctggagagcaaccccgtgatgatcgatgccaaggaagtgagcgccgcccaccgggccagatacttctggggcaatctgcctggcatgaacagacccctggccagcaccgtgaacgacaagctggagctgcaggagtgcctggagcacggccggatcgccaagttcagcaaggtgagaaccatcaccacccgaagcaacagcatcaaacaaggcaaggaccagcactttcctgtgttcatgaacgagaaggaggacatcctgtggtgtaccgagatggagagagtgttcgggttcccagtccactacacagatgtcagcaacatgtctagactggccagacagagactgctgggaagaagctggtccgtccctgtgatcagacacctgttcgcccctctgaaggagtacttcgcctgcgtgagcagcggcaacagcaacgccaacagccggggccccagcttctctagcggcctggtgccactgtccctgagagggagccacatgggccccatggagatctacaaaaccgtgagcgcctggaagcggcagcctgtgcgcgtgctgagcctgtttcggaatatcgataaagtcctgaaaagcctgggattcctggagagcggctctggctccggcggtggcaccctgaagtacgtggaggatgtgacaaacgtggtcagacgggatgtggagaagtggggccccttcgatctggtgtacggcagcacccaacccctgggcagctcttgtgaccggtgccctggctggtacatgtttcagttccaccggatcctgcagtacgccctgccgagacaggagtcccagcggccattcttttggattttcatggacaacttgctgctgaccgaggatgaccaggaaactaccactcggttcctgcagaccgaagccgtgaccctgcaggacgtgagaggccgggactaccagaacgccatgcgggtgtggtccaacatccctggactgaaaagcaagcacgcacctctgacccctaaagaagaggagtacctgcaggcccaggtgcggagcagaagcaagctggacgcccctaaggtggatctgctggtgaagaattgcctcctgcccctgagagagtacttcaagtatttcagccagaatagtctgcccctgggaggcagcggcggcggcagccagatccccctgaccttccaggacgtggccgtggacttcacctgggaggagtggggcctgctggagcccagccagaaggacatgtactgggacgtgatgctggagatctacgagaacttcatcagcctgggcggcgtgcccctgagcatccccgacgtgatcagccagctggagaggatggaggccccctggatgacccagggcggcgtgctgatcagcaccttcctggacagcagcaccggcggcccaagcagcggcgcccctcctcccagcggcggcaggcggcccaagcagcggcgcccctcctcccagcggcggcagcccagccggctccccaacctctaccgaggagggcacctctgagtccgccacccccgagagcggccctggcacctccaccgagcccagcgagggcagcgcacccggcagccctgccggcagccccacctccacagaggagggaaccagcaccgagcccagcgaaggcagcgccccaggcaccagcaccgagcctagtgagcaggagattaaacggatcaacaagatcagaagaagacttgtgaaagacagcaacaccaagaaggccggcaagacaggccccatgaaaaccctgctggttagagtgatgacacccgatctgagagagcggctggaaaacctgagaaagaagcctgaaaatatcccccagcccatcagcaatacatctagagccaacctgaataagctgctgaccgattacaccgaaatgaagaaggcgatcctgcatgtgtactgggaagagttccagaaggaccctgtgggcctgatgagccgggtggcccagcctgccagcaagaagatcgatcagaacaagctgaaacctgagatggacgagaagggcaacctgaccaccgccggctttgcctgctctcagtgtggccagcccctgttcgtgtacaagctggagcaggtgtctgagaagggcaaggcttacaccaactacttcggacggtgcaatgtggccgagcacgaaaagctgatcctgctggcccagctgaagcccgagaaggatagcgacgaagccgtgacatatagcctgggaaagtttgggcagagggccctggatttctacagcattcatgtgaccaaggagtccacccaccccgtgaagcccctggcccagatcgccggaaacagatacgcctccggacctgtgggaaaggccctgagcgacgcatgtatgggcacaatcgcctccttcctgtctaagtaccaggacatcatcatcgaacaccagaaggtggtgaagggcaaccagaagagactggagagcctgcgggagctggccggcaaggaaaacctggaataccctagcgtgaccctgccacctcagcctcacaccaaggagggcgttgatgcctacaacgaagtgatcgcccgggtgcgaatgtgggtgaacctgaacctgtggcagaagctgaagctaagcagagatgatgccaagcctctgctgagactgaagggattcccttcctttcctctggtcgagagacaggccaacgaagtggactggtgggacatggtgtgtaacgtgaagaagctgatcaacgagaaaaaggaggatggcaaggtgttttggcagaatctggctggctacaagagacaggaagccctgagaccatacctgagcagcgaggaagatcggaagaagggaaagaaattcgctcggtaccagctgggcgacctgctgctgcacctggaaaagaagcacggcgaggactggggaaaggtgtacgacgaggcctgggagcggattgacaagaaagtggaaggcctgagcaagcacatcaagctggaagaggaacggagaagcgaggacgcccagagcaaggccgccctgaccgactggctgcgggctaaggccagcttcgtgatcgagggcctgaaggaggccgacaaggacgagttctgcagatgcgagctgaagctgcagaagtggtacggggacctgcggggaaagcccttcgccatcgaagccgagaacagcatcctggacatcagcggcttcagcaagcagtacaactgtgccttcatctggcagaaggacggcgtgaagaagctgaacctgtacctgatcatcaactacttcaagggcggcaagctgcggttcaagaagatcaaacctgaagccttcgaagccaacagattctacaccgtgatcaacaaaaagagcggcgagatcgtgcccatggaggtgaacttcaacttcgacgaccccaacctgatcatcctgcctctggcctttggcaagagacagggcagagaattcatctggaacgacctgctgtccctggaaaccggcagcctgaagctggccaacggaagagtgatcgagaagacactgtacaacagaagaacccggcaggatgagcctgccctgttcgtggccctgaccttcgagcggcgggaggtcctggactcctccaatatcaaaccaatgaacctgatcggcgtggcaagaggcgaaaacatccccgccgtgatcgccctgaccgaccccgagggctgcccactgagccggtttaaggatagcctgggaaacccaacccacatcctgagaatcggcgagagctataaggagaagcagcggaccatccaggccaagaaggaggtggagcagcggagagccggcggctacagccggaagtacgccagcaaagccaagaatctggcagacgatatggtgagaaacaccgctagagatctgctgtactacgccgtgacccaggatgccatgctgatcttcgccaacctgagccggggcttcggccggcagggcaagcggaccttcatggccgagagacagtacacacggatggaggactggctgaccgccaagctggcctacgagggcctgagcaagacctacctgtccaagacactggcccagtacacctccaagacatgcagcaactgtgggtttaccatcaccagcgccgactacgacagggtgctggagaagctgaagaagacagcaacaggctggatgaccacaattaacggcaaggagctgaaggtggagggccagattacctactacaacagatacaagagacagaacgtagtcaaggacctgtccgtcgagctggatagactgagcgaagaatctgtgaacaacgacatctcctcctggacaaagggcagaagcggagaagctctgagcctcctgaagaaaagattctcccatagacccgtgcaggagaagttcgtgtgcctgaactgcggcttcgagacacacgcagccgagcaagccgccctgaacatcgccagatcctggctgttcctgcggagccaggagtacaagaaataccagacaaacaagacaaccggcaacaccgataagagagccttcgtcgagacctggcagtccttttaccggaagaagcttaaggaggtgtggaaacctgccgtgcggtctggcggatctggcggaggctccaccagccccaagaaaaagagaaaagtctaagctgccttctgcggggcttgccttctggccatgcccttcttctctcccttgcacctgtacctcttggtctttgaataaagcctgagtaggaaggctagcaaaaaaaaaaaaaaaaaaaaaaaaaaaaaaaaaaaaaaaaaaaaaaaaaaaaaaaaaaaaaaaaaaaaaaaaaaaaaaaagcccagccggctccccaacctctaccgaggagggcacctctgagtccgccacccccgagagcggccctggcacctccaccgagcccagcgagggcagcgcacccggcagccctgccggcagccccacctccacagaggagggaaccagcaccgagcccagcgaaggcagcgccccaggcaccagcaccgagcctagtgagcaggagattaaacggatcaacaagatcagaagaagacttgtgaaagacagcaacaccaagaaggccggcaagacaggccccatgaaaaccctgctggttagagtgatgacacccgatctgagagagcggctggaaaacctgagaaagaagcctgaaaatatcccccagcccatcagcaatacatctagagccaacctgaataagctgctgaccgattacaccgaaatgaagaaggcgatcctgcatgtgtactgggaagagttccagaaggaccctgtgggcctgatgagccgggtggcccagcctgccagcaagaagatcgatcagaacaagctgaaacctgagatggacgagaagggcaacctgaccaccgccggctttgcctgctctcagtgtggccagcccctgttcgtgtacaagctggagcaggtgtctgagaagggcaaggcttacaccaactacttcggacggtgcaatgtggccgagcacgaaaagctgatcctgctggcccagctgaagcccgagaaggatagcgacgaagccgtgacatatagcctgggaaagtttgggcagagggccctggatttctacagcattcatgtgaccaaggagtccacccaccccgtgaagcccctggcccagatcgccggaaacagatacgcctccggacctgtgggaaaggccctgagcgacgcatgtatgggcacaatcgcctccttcctgtctaagtaccaggacatcatcatcgaacaccagaaggtggtgaagggcaaccagaagagactggagagcctgcgggagctggccggcaaggaaaacctggaataccctagcgtgaccctgccacctcagcctcacaccaaggagggcgttgatgcctacaacgaagtgatcgcccgggtgcgaatgtgggtgaacctgaacctgtggcagaagctgaagctaagcagagatgatgccaagcctctgctgagactgaagggattcccttcctttcctctggtcgagagacaggccaacgaagtggactggtgggacatggtgtgtaacgtgaagaagctgatcaacgagaaaaaggaggatggcaaggtgttttggcagaatctggctggctacaagagacaggaagccctgagaccatacctgagcagcgaggaagatcggaagaagggaaagaaattcgctcggtaccagctgggcgacctgctgctgcacctggaaaagaagcacggcgaggactggggaaaggtgtacgacgaggcctgggagcggattgacaagaaagtggaaggcctgagcaagcacatcaagctggaagaggaacggagaagcgaggacgcccagagcaaggccgccctgaccgactggctgcgggctaaggccagcttcgtgatcgagggcctgaaggaggccgacaaggacgagttctgcagatgcgagctgaagctgcagaagtggtacggggacctgcggggaaagcccttcgccatcgaagccgagaacagcatcctggacatcagcggcttcagcaagcagtacaactgtgccttcatctggcagaaggacggcgtgaagaagctgaacctgtacctgatcatcaactacttcaagggcggcaagctgcggttcaagaagatcaaacctgaagccttcgaagccaacagattctacaccgtgatcaacaaaaagagcggcgagatcgtgcccatggaggtgaacttcaacttcgacgaccccaacctgatcatcctgcctctggcctttggcaagagacagggcagagaattcatctggaacgacctgctgtccctggaaaccggcagcctgaagctggccaacggaagagtgatcgagaagacactgtacaacagaagaacccggcaggatgagcctgccctgttcgtggccctgaccttcgagcggcgggaggtcctggactcctccaatatcaaaccaatgaacctgatcggcgtggcaagaggcgaaaacatccccgccgtgatcgccctgaccgaccccgagggctgcccactgagccggtttaaggatagcctgggaaacccaacccacatcctgagaatcggcgagagctataaggagaagcagcggaccatccaggccaagaaggaggtggagcagcggagagccggcggctacagccggaagtacgccagcaaagccaagaatctggcagacgatatggtgagaaacaccgctagagatctgctgtactacgccgtgacccaggatgccatgctgatcttcgccaacctgagccggggcttcggccggcagggcaagcggaccttcatggccgagagacagtacacacggatggaggactggctgaccgccaagctggcctacgagggcctgagcaagacctacctgtccaagacactggcccagtacacctccaagacatgcagcaactgtgggtttaccatcaccagcgccgactacgacagggtgctggagaagctgaagaagacagcaacaggctggatgaccacaattaacggcaaggagctgaaggtggagggccagattacctactacaacagatacaagagacagaacgtagtcaaggacctgtccgtcgagctggatagactgagcgaagaatctgtgaacaacgacatctcctcctggacaaagggcagaagcggagaagctctgagcctcctgaagaaaagattctcccatagacccgtgcaggagaagttcgtgtgcctgaactgcggcttcgagacacacgcagccgagcaagccgccctgaacatcgccagatcctggctgttcctgcggagccaggagtacaagaaataccagacaaacaagacaaccggcaacaccgataagagagccttcgtcgagacctggcagtccttttaccggaagaagcttaaggaggtgtggaaacctgccgtgcggtctggcggatctggcggaggctccaccagccccaagaaaaagagaaaagtctaagctgccttctgcggggcttgccttctggccatgcccttcttctctcccttgcacctgtacctcttggtctttgaataaagcctgagtaggaaggctagcaaaaaaaaaaaaaaaaaaaaaaaaaaaaaaaaaaaaaaaaaaaaaaaaaaaaaaaaaaaaaaaaaaaaaaaaaaaaaaaa

SEQ ID NO: 9854 - RNA, 8787 nt, synthetic construct
  source 1..8787: mol_type = other RNA
aggaaataagagagaaaagaagagtaagaagaaatataagagccaccatggcccctaagaagaagcgtaaagtgagccggatgaaccacgaccaggagttcgacccccctaaggtgtaccctcccgtccccgccgagaagagaaagcccatccgggtcctgagcctgttcgatggcatcgccaccggtctgctggtgctgaaggacctgggcatccaggtggataggtacattgcctccgaggtgtgcgaggactccatcaccgtgggaatggtgcgtcatcagggcaagatcatgtacgtgggcgacgtgcggagcgtgacacagaagcatatccaggagtggggccctttcgacctggtgatcggcggcagcccttgcaatgacctgagcatcgtgaacccagcccggaagggcctgtacgagggaaccggcagactgttcttcgagttttacagactgctgcacgacgcccggcctaaggaaggcgacgaccggcccttcttttggctgttcgagaatgtggtggccatgggagtcagcgacaagcgggatattagccggttcctggagagcaaccccgtgatgatcgatgccaaggaagtgagcgccgcccaccgggccagatacttctggggcaatctgcctggcatgaacagacccctggccagcaccgtgaacgacaagctggagctgcaggagtgcctggagcacggccggatcgccaagttcagcaaggtgagaaccatcaccacccgaagcaacagcatcaaacaaggcaaggaccagcactttcctgtgttcatgaacgagaaggaggacatcctgtggtgtaccgagatggagagagtgttcgggttcccagtccactacacagatgtcagcaacatgtctagactggccagacagagactgctgggaagaagctggtccgtccctgtgatcagacacctgttcgcccctctgaaggagtacttcgcctgcgtgagcagcggcaacagcaacgccaacagccggggccccagcttctctagcggcctggtgccactgtccctgagagggagccacatgggccccatggagatctacaaaaccgtgagcgcctggaagcggcagcctgtgcgcgtgctgagcctgtttcggaatatcgataaagtcctgaaaagcctgggattcctggagagcggctctggctccggcggtggcaccctgaagtacgtggaggatgtgacaaacgtggtcagacgggatgtggagaagtggggccccttcgatctggtgtacggcagcacccaacccctgggcagctcttgtgaccggtgccctggctggtacatgtttcagttccaccggatcctgcagtacgccctgccgagacaggagtcccagcggccattcttttggattttcatggacaacttgctgctgaccgaggatgaccaggaaactaccactcggttcctgcagaccgaagccgtgaccctgcaggacgtgagaggccgggactaccagaacgccatgcgggtgtggtccaacatccctggactgaaaagcaagcacgcacctctgacccctaaagaagaggagtacctgcaggcccaggtgcggagcagaagcaagctggacgcccctaaggtggatctgctggtgaagaattgcctcctgcccctgagagagtacttcaagtatttcagccagaatagtctgcccctgggaggcagcggcggcggcgcccaggagagcgtgatgttcagcgacgtgagcatcgacttcagccaggaggagtgggagtgcctgaacgacgaccagagggacctgtacagggacgtgatgctggagaactacagcaacctggtgagcatggccggccacagcatcagcaagcccaacgtgatcagctacctggagcagggcaaggagccctggctggtggacagggagatcaccagcggccagtggcccgtgctggagagcggcggcccaagcagcggcgcccctcctcccagcggcggcaggcggcccaagcagcggcgcccctcctcccagcggcggcagcccagccggctccccaacctctaccgaggagggcacctctgagtccgccacccccgagagcggccctggcacctccaccgagcccagcgagggcagcgcacccggcagccctgccggcagccccacctccacagaggagggaaccagcaccgagcccagcgaaggcagcgccccaggcaccagcaccgagcctagtgagcaggagattaaacggatcaacaagatcagaagaagacttgtgaaagacagcaacaccaagaaggccggcaagacaggccccatgaaaaccctgctggttagagtgatgacacccgatctgagagagcggctggaaaacctgagaaagaagcctgaaaatatcccccagcccatcagcaatacatctagagccaacctgaataagctgctgaccgattacaccgaaatgaagaaggcgatcctgcatgtgtactgggaagagttccagaaggaccctgtgggcctgatgagccgggtggcccagcctgccagcaagaagatcgatcagaacaagctgaaacctgagatggacgagaagggcaacctgaccaccgccggctttgcctgctctcagtgtggccagcccctgttcgtgtacaagctggagcaggtgtctgagaagggcaaggcttacaccaactacttcggacggtgcaatgtggccgagcacgaaaagctgatcctgctggcccagctgaagcccgagaaggatagcgacgaagccgtgacatatagcctgggaaagtttgggcagagggccctggatttctacagcattcatgtgaccaaggagtccacccaccccgtgaagcccctggcccagatcgccggaaacagatacgcctccggacctgtgggaaaggccctgagcgacgcatgtatgggcacaatcgcctccttcctgtctaagtaccaggacatcatcatcgaacaccagaaggtggtgaagggcaaccagaagagactggagagcctgcgggagctggccggcaaggaaaacctggaataccctagcgtgaccctgccacctcagcctcacaccaaggagggcgttgatgcctacaacgaagtgatcgcccgggtgcgaatgtgggtgaacctgaacctgtggcagaagctgaagctaagcagagatgatgccaagcctctgctgagactgaagggattcccttcctttcctctggtcgagagacaggccaacgaagtggactggtgggacatggtgtgtaacgtgaagaagctgatcaacgagaaaaaggaggatggcaaggtgttttggcagaatctggctggctacaagagacaggaagccctgagaccatacctgagcagcgaggaagatcggaagaagggaaagaaattcgctcggtaccagctgggcgacctgctgctgcacctggaaaagaagcacggcgaggactggggaaaggtgtacgacgaggcctgggagcggattgacaagaaagtggaaggcctgagcaagcacatcaagctggaagaggaacggagaagcgaggacgcccagagcaaggccgccctgaccgactggctgcgggctaaggccagcttcgtgatcgagggcctgaaggaggccgacaaggacgagttctgcagatgcgagctgaagctgcagaagtggtacggggacctgcggggaaagcccttcgccatcgaagccgagaacagcatcctggacatcagcggcttcagcaagcagtacaactgtgccttcatctggcagaaggacggcgtgaagaagctgaacctgtacctgatcatcaactacttcaagggcggcaagctgcggttcaagaagatcaaacctgaagccttcgaagccaacagattctacaccgtgatcaacaaaaagagcggcgagatcgtgcccatggaggtgaacttcaacttcgacgaccccaacctgatcatcctgcctctggcctttggcaagagacagggcagagaattcatctggaacgacctgctgtccctggaaaccggcagcctgaagctggccaacggaagagtgatcgagaagacactgtacaacagaagaacccggcaggatgagcctgccctgttcgtggccctgaccttcgagcggcgggaggtcctggactcctccaatatcaaaccaatgaacctgatcggcgtggcaagaggcgaaaacatccccgccgtgatcgccctgaccgaccccgagggctgcccactgagccggtttaaggatagcctgggaaacccaacccacatcctgagaatcggcgagagctataaggagaagcagcggaccatccaggccaagaaggaggtggagcagcggagagccggcggctacagccggaagtacgccagcaaagccaagaatctggcagacgatatggtgagaaacaccgctagagatctgctgtactacgccgtgacccaggatgccatgctgatcttcgccaacctgagccggggcttcggccggcagggcaagcggaccttcatggccgagagacagtacacacggatggaggactggctgaccgccaagctggcctacgagggcctgagcaagacctacctgtccaagacactggcccagtacacctccaagacatgcagcaactgtgggtttaccatcaccagcgccgactacgacagggtgctggagaagctgaagaagacagcaacaggctggatgaccacaattaacggcaaggagctgaaggtggagggccagattacctactacaacagatacaagagacagaacgtagtcaaggacctgtccgtcgagctggatagactgagcgaagaatctgtgaacaacgacatctcctcctggacaaagggcagaagcggagaagctctgagcctcctgaagaaaagattctcccatagacccgtgcaggagaagttcgtgtgcctgaactgcggcttcgagacacacgcagccgagcaagccgccctgaacatcgccagatcctggctgttcctgcggagccaggagtacaagaaataccagacaaacaagacaaccggcaacaccgataagagagccttcgtcgagacctggcagtccttttaccggaagaagcttaaggaggtgtggaaacctgccgtgcggtctggcggatctggcggaggctccaccagccccaagaaaaagagaaaagtctaagctgccttctgcggggcttgccttctggccatgcccttcttctctcccttgcacctgtacctcttggtctttgaataaagcctgagtaggaaggctagcaaaaaaaaaaaaaaaaaaaaaaaaaaaaaaaaaaaaaaaaaaaaaaaaaaaaaaaaaaaaaaaaaaaaaaaaaaaaaaaagcccagccggctccccaacctctaccgaggagggcacctctgagtccgccacccccgagagcggccctggcacctccaccgagcccagcgagggcagcgcacccggcagccctgccggcagccccacctccacagaggagggaaccagcaccgagcccagcgaaggcagcgccccaggcaccagcaccgagcctagtgagcaggagattaaacggatcaacaagatcagaagaagacttgtgaaagacagcaacaccaagaaggccggcaagacaggccccatgaaaaccctgctggttagagtgatgacacccgatctgagagagcggctggaaaacctgagaaagaagcctgaaaatatcccccagcccatcagcaatacatctagagccaacctgaataagctgctgaccgattacaccgaaatgaagaaggcgatcctgcatgtgtactgggaagagttccagaaggaccctgtgggcctgatgagccgggtggcccagcctgccagcaagaagatcgatcagaacaagctgaaacctgagatggacgagaagggcaacctgaccaccgccggctttgcctgctctcagtgtggccagcccctgttcgtgtacaagctggagcaggtgtctgagaagggcaaggcttacaccaactacttcggacggtgcaatgtggccgagcacgaaaagctgatcctgctggcccagctgaagcccgagaaggatagcgacgaagccgtgacatatagcctgggaaagtttgggcagagggccctggatttctacagcattcatgtgaccaaggagtccacccaccccgtgaagcccctggcccagatcgccggaaacagatacgcctccggacctgtgggaaaggccctgagcgacgcatgtatgggcacaatcgcctccttcctgtctaagtaccaggacatcatcatcgaacaccagaaggtggtgaagggcaaccagaagagactggagagcctgcgggagctggccggcaaggaaaacctggaataccctagcgtgaccctgccacctcagcctcacaccaaggagggcgttgatgcctacaacgaagtgatcgcccgggtgcgaatgtgggtgaacctgaacctgtggcagaagctgaagctaagcagagatgatgccaagcctctgctgagactgaagggattcccttcctttcctctggtcgagagacaggccaacgaagtggactggtgggacatggtgtgtaacgtgaagaagctgatcaacgagaaaaaggaggatggcaaggtgttttggcagaatctggctggctacaagagacaggaagccctgagaccatacctgagcagcgaggaagatcggaagaagggaaagaaattcgctcggtaccagctgggcgacctgctgctgcacctggaaaagaagcacggcgaggactggggaaaggtgtacgacgaggcctgggagcggattgacaagaaagtggaaggcctgagcaagcacatcaagctggaagaggaacggagaagcgaggacgcccagagcaaggccgccctgaccgactggctgcgggctaaggccagcttcgtgatcgagggcctgaaggaggccgacaaggacgagttctgcagatgcgagctgaagctgcagaagtggtacggggacctgcggggaaagcccttcgccatcgaagccgagaacagcatcctggacatcagcggcttcagcaagcagtacaactgtgccttcatctggcagaaggacggcgtgaagaagctgaacctgtacctgatcatcaactacttcaagggcggcaagctgcggttcaagaagatcaaacctgaagccttcgaagccaacagattctacaccgtgatcaacaaaaagagcggcgagatcgtgcccatggaggtgaacttcaacttcgacgaccccaacctgatcatcctgcctctggcctttggcaagagacagggcagagaattcatctggaacgacctgctgtccctggaaaccggcagcctgaagctggccaacggaagagtgatcgagaagacactgtacaacagaagaacccggcaggatgagcctgccctgttcgtggccctgaccttcgagcggcgggaggtcctggactcctccaatatcaaaccaatgaacctgatcggcgtggcaagaggcgaaaacatccccgccgtgatcgccctgaccgaccccgagggctgcccactgagccggtttaaggatagcctgggaaacccaacccacatcctgagaatcggcgagagctataaggagaagcagcggaccatccaggccaagaaggaggtggagcagcggagagccggcggctacagccggaagtacgccagcaaagccaagaatctggcagacgatatggtgagaaacaccgctagagatctgctgtactacgccgtgacccaggatgccatgctgatcttcgccaacctgagccggggcttcggccggcagggcaagcggaccttcatggccgagagacagtacacacggatggaggactggctgaccgccaagctggcctacgagggcctgagcaagacctacctgtccaagacactggcccagtacacctccaagacatgcagcaactgtgggtttaccatcaccagcgccgactacgacagggtgctggagaagctgaagaagacagcaacaggctggatgaccacaattaacggcaaggagctgaaggtggagggccagattacctactacaacagatacaagagacagaacgtagtcaaggacctgtccgtcgagctggatagactgagcgaagaatctgtgaacaacgacatctcctcctggacaaagggcagaagcggagaagctctgagcctcctgaagaaaagattctcccatagacccgtgcaggagaagttcgtgtgcctgaactgcggcttcgagacacacgcagccgagcaagccgccctgaacatcgccagatcctggctgttcctgcggagccaggagtacaagaaataccagacaaacaagacaaccggcaacaccgataagagagccttcgtcgagacctggcagtccttttaccggaagaagcttaaggaggtgtggaaacctgccgtgcggtctggcggatctggcggaggctccaccagccccaagaaaaagagaaaagtctaagctgccttctgcggggcttgccttctggccatgcccttcttctctcccttgcacctgtacctcttggtctttgaataaagcctgagtaggaaggctagcaaaaaaaaaaaaaaaaaaaaaaaaaaaaaaaaaaaaaaaaaaaaaaaaaaaaaaaaaaaaaaaaaaaaaaaaaaaaaaaa

SEQ ID NO: 9855 - RNA, 8787 nt, synthetic construct
  source 1..8787: mol_type = other RNA
aggaaataagagagaaaagaagagtaagaagaaatataagagccaccatggcccctaagaagaagcgtaaagtgagccggatgaaccacgaccaggagttcgacccccctaaggtgtaccctcccgtccccgccgagaagagaaagcccatccgggtcctgagcctgttcgatggcatcgccaccggtctgctggtgctgaaggacctgggcatccaggtggataggtacattgcctccgaggtgtgcgaggactccatcaccgtgggaatggtgcgtcatcagggcaagatcatgtacgtgggcgacgtgcggagcgtgacacagaagcatatccaggagtggggccctttcgacctggtgatcggcggcagcccttgcaatgacctgagcatcgtgaacccagcccggaagggcctgtacgagggaaccggcagactgttcttcgagttttacagactgctgcacgacgcccggcctaaggaaggcgacgaccggcccttcttttggctgttcgagaatgtggtggccatgggagtcagcgacaagcgggatattagccggttcctggagagcaaccccgtgatgatcgatgccaaggaagtgagcgccgcccaccgggccagatacttctggggcaatctgcctggcatgaacagacccctggccagcaccgtgaacgacaagctggagctgcaggagtgcctggagcacggccggatcgccaagttcagcaaggtgagaaccatcaccacccgaagcaacagcatcaaacaaggcaaggaccagcactttcctgtgttcatgaacgagaaggaggacatcctgtggtgtaccgagatggagagagtgttcgggttcccagtccactacacagatgtcagcaacatgtctagactggccagacagagactgctgggaagaagctggtccgtccctgtgatcagacacctgttcgcccctctgaaggagtacttcgcctgcgtgagcagcggcaacagcaacgccaacagccggggccccagcttctctagcggcctggtgccactgtccctgagagggagccacatgggccccatggagatctacaaaaccgtgagcgcctggaagcggcagcctgtgcgcgtgctgagcctgtttcggaatatcgataaagtcctgaaaagcctgggattcctggagagcggctctggctccggcggtggcaccctgaagtacgtggaggatgtgacaaacgtggtcagacgggatgtggagaagtggggccccttcgatctggtgtacggcagcacccaacccctgggcagctcttgtgaccggtgccctggctggtacatgtttcagttccaccggatcctgcagtacgccctgccgagacaggagtcccagcggccattcttttggattttcatggacaacttgctgctgaccgaggatgaccaggaaactaccactcggttcctgcagaccgaagccgtgaccctgcaggacgtgagaggccgggactaccagaacgccatgcgggtgtggtccaacatccctggactgaaaagcaagcacgcacctctgacccctaaagaagaggagtacctgcaggcccaggtgcggagcagaagcaagctggacgcccctaaggtggatctgctggtgaagaattgcctcctgcccctgagagagtacttcaagtatttcagccagaatagtctgcccctgggaggcagcggcggcggcatggccctggtgaccttcagggacgtggccatcgacttcagccagaaggagtgggagtgcctggacaccacccagaggaagctgtacagggacgtgatgctggagaactacaacaacctggtgagcctgggctacagcggcagcaagcccgacgtgatcaccctgctggagcagggcaaggagccctgcgtggccgccagggacgtgaccggcaggcagtgccccggcctgctgagcaggcacggcggcccaagcagcggcgcccctcctcccagcggcggcaggcggcccaagcagcggcgcccctcctcccagcggcggcagcccagccggctccccaacctctaccgaggagggcacctctgagtccgccacccccgagagcggccctggcacctccaccgagcccagcgagggcagcgcacccggcagccctgccggcagccccacctccacagaggagggaaccagcaccgagcccagcgaaggcagcgccccaggcaccagcaccgagcctagtgagcaggagattaaacggatcaacaagatcagaagaagacttgtgaaagacagcaacaccaagaaggccggcaagacaggccccatgaaaaccctgctggttagagtgatgacacccgatctgagagagcggctggaaaacctgagaaagaagcctgaaaatatcccccagcccatcagcaatacatctagagccaacctgaataagctgctgaccgattacaccgaaatgaagaaggcgatcctgcatgtgtactgggaagagttccagaaggaccctgtgggcctgatgagccgggtggcccagcctgccagcaagaagatcgatcagaacaagctgaaacctgagatggacgagaagggcaacctgaccaccgccggctttgcctgctctcagtgtggccagcccctgttcgtgtacaagctggagcaggtgtctgagaagggcaaggcttacaccaactacttcggacggtgcaatgtggccgagcacgaaaagctgatcctgctggcccagctgaagcccgagaaggatagcgacgaagccgtgacatatagcctgggaaagtttgggcagagggccctggatttctacagcattcatgtgaccaaggagtccacccaccccgtgaagcccctggcccagatcgccggaaacagatacgcctccggacctgtgggaaaggccctgagcgacgcatgtatgggcacaatcgcctccttcctgtctaagtaccaggacatcatcatcgaacaccagaaggtggtgaagggcaaccagaagagactggagagcctgcgggagctggccggcaaggaaaacctggaataccctagcgtgaccctgccacctcagcctcacaccaaggagggcgttgatgcctacaacgaagtgatcgcccgggtgcgaatgtgggtgaacctgaacctgtggcagaagctgaagctaagcagagatgatgccaagcctctgctgagactgaagggattcccttcctttcctctggtcgagagacaggccaacgaagtggactggtgggacatggtgtgtaacgtgaagaagctgatcaacgagaaaaaggaggatggcaaggtgttttggcagaatctggctggctacaagagacaggaagccctgagaccatacctgagcagcgaggaagatcggaagaagggaaagaaattcgctcggtaccagctgggcgacctgctgctgcacctggaaaagaagcacggcgaggactggggaaaggtgtacgacgaggcctgggagcggattgacaagaaagtggaaggcctgagcaagcacatcaagctggaagaggaacggagaagcgaggacgcccagagcaaggccgccctgaccgactggctgcgggctaaggccagcttcgtgatcgagggcctgaaggaggccgacaaggacgagttctgcagatgcgagctgaagctgcagaagtggtacggggacctgcggggaaagcccttcgccatcgaagccgagaacagcatcctggacatcagcggcttcagcaagcagtacaactgtgccttcatctggcagaaggacggcgtgaagaagctgaacctgtacctgatcatcaactacttcaagggcggcaagctgcggttcaagaagatcaaacctgaagccttcgaagccaacagattctacaccgtgatcaacaaaaagagcggcgagatcgtgcccatggaggtgaacttcaacttcgacgaccccaacctgatcatcctgcctctggcctttggcaagagacagggcagagaattcatctggaacgacctgctgtccctggaaaccggcagcctgaagctggccaacggaagagtgatcgagaagacactgtacaacagaagaacccggcaggatgagcctgccctgttcgtggccctgaccttcgagcggcgggaggtcctggactcctccaatatcaaaccaatgaacctgatcggcgtggcaagaggcgaaaacatccccgccgtgatcgccctgaccgaccccgagggctgcccactgagccggtttaaggatagcctgggaaacccaacccacatcctgagaatcggcgagagctataaggagaagcagcggaccatccaggccaagaaggaggtggagcagcggagagccggcggctacagccggaagtacgccagcaaagccaagaatctggcagacgatatggtgagaaacaccgctagagatctgctgtactacgccgtgacccaggatgccatgctgatcttcgccaacctgagccggggcttcggccggcagggcaagcggaccttcatggccgagagacagtacacacggatggaggactggctgaccgccaagctggcctacgagggcctgagcaagacctacctgtccaagacactggcccagtacacctccaagacatgcagcaactgtgggtttaccatcaccagcgccgactacgacagggtgctggagaagctgaagaagacagcaacaggctggatgaccacaattaacggcaaggagctgaaggtggagggccagattacctactacaacagatacaagagacagaacgtagtcaaggacctgtccgtcgagctggatagactgagcgaagaatctgtgaacaacgacatctcctcctggacaaagggcagaagcggagaagctctgagcctcctgaagaaaagattctcccatagacccgtgcaggagaagttcgtgtgcctgaactgcggcttcgagacacacgcagccgagcaagccgccctgaacatcgccagatcctggctgttcctgcggagccaggagtacaagaaataccagacaaacaagacaaccggcaacaccgataagagagccttcgtcgagacctggcagtccttttaccggaagaagcttaaggaggtgtggaaacctgccgtgcggtctggcggatctggcggaggctccaccagccccaagaaaaagagaaaagtctaagctgccttctgcggggcttgccttctggccatgcccttcttctctcccttgcacctgtacctcttggtctttgaataaagcctgagtaggaaggctagcaaaaaaaaaaaaaaaaaaaaaaaaaaaaaaaaaaaaaaaaaaaaaaaaaaaaaaaaaaaaaaaaaaaaaaaaaaaaaaaagcccagccggctccccaacctctaccgaggagggcacctctgagtccgccacccccgagagcggccctggcacctccaccgagcccagcgagggcagcgcacccggcagccctgccggcagccccacctccacagaggagggaaccagcaccgagcccagcgaaggcagcgccccaggcaccagcaccgagcctagtgagcaggagattaaacggatcaacaagatcagaagaagacttgtgaaagacagcaacaccaagaaggccggcaagacaggccccatgaaaaccctgctggttagagtgatgacacccgatctgagagagcggctggaaaacctgagaaagaagcctgaaaatatcccccagcccatcagcaatacatctagagccaacctgaataagctgctgaccgattacaccgaaatgaagaaggcgatcctgcatgtgtactgggaagagttccagaaggaccctgtgggcctgatgagccgggtggcccagcctgccagcaagaagatcgatcagaacaagctgaaacctgagatggacgagaagggcaacctgaccaccgccggctttgcctgctctcagtgtggccagcccctgttcgtgtacaagctggagcaggtgtctgagaagggcaaggcttacaccaactacttcggacggtgcaatgtggccgagcacgaaaagctgatcctgctggcccagctgaagcccgagaaggatagcgacgaagccgtgacatatagcctgggaaagtttgggcagagggccctggatttctacagcattcatgtgaccaaggagtccacccaccccgtgaagcccctggcccagatcgccggaaacagatacgcctccggacctgtgggaaaggccctgagcgacgcatgtatgggcacaatcgcctccttcctgtctaagtaccaggacatcatcatcgaacaccagaaggtggtgaagggcaaccagaagagactggagagcctgcgggagctggccggcaaggaaaacctggaataccctagcgtgaccctgccacctcagcctcacaccaaggagggcgttgatgcctacaacgaagtgatcgcccgggtgcgaatgtgggtgaacctgaacctgtggcagaagctgaagctaagcagagatgatgccaagcctctgctgagactgaagggattcccttcctttcctctggtcgagagacaggccaacgaagtggactggtgggacatggtgtgtaacgtgaagaagctgatcaacgagaaaaaggaggatggcaaggtgttttggcagaatctggctggctacaagagacaggaagccctgagaccatacctgagcagcgaggaagatcggaagaagggaaagaaattcgctcggtaccagctgggcgacctgctgctgcacctggaaaagaagcacggcgaggactggggaaaggtgtacgacgaggcctgggagcggattgacaagaaagtggaaggcctgagcaagcacatcaagctggaagaggaacggagaagcgaggacgcccagagcaaggccgccctgaccgactggctgcgggctaaggccagcttcgtgatcgagggcctgaaggaggccgacaaggacgagttctgcagatgcgagctgaagctgcagaagtggtacggggacctgcggggaaagcccttcgccatcgaagccgagaacagcatcctggacatcagcggcttcagcaagcagtacaactgtgccttcatctggcagaaggacggcgtgaagaagctgaacctgtacctgatcatcaactacttcaagggcggcaagctgcggttcaagaagatcaaacctgaagccttcgaagccaacagattctacaccgtgatcaacaaaaagagcggcgagatcgtgcccatggaggtgaacttcaacttcgacgaccccaacctgatcatcctgcctctggcctttggcaagagacagggcagagaattcatctggaacgacctgctgtccctggaaaccggcagcctgaagctggccaacggaagagtgatcgagaagacactgtacaacagaagaacccggcaggatgagcctgccctgttcgtggccctgaccttcgagcggcgggaggtcctggactcctccaatatcaaaccaatgaacctgatcggcgtggcaagaggcgaaaacatccccgccgtgatcgccctgaccgaccccgagggctgcccactgagccggtttaaggatagcctgggaaacccaacccacatcctgagaatcggcgagagctataaggagaagcagcggaccatccaggccaagaaggaggtggagcagcggagagccggcggctacagccggaagtacgccagcaaagccaagaatctggcagacgatatggtgagaaacaccgctagagatctgctgtactacgccgtgacccaggatgccatgctgatcttcgccaacctgagccggggcttcggccggcagggcaagcggaccttcatggccgagagacagtacacacggatggaggactggctgaccgccaagctggcctacgagggcctgagcaagacctacctgtccaagacactggcccagtacacctccaagacatgcagcaactgtgggtttaccatcaccagcgccgactacgacagggtgctggagaagctgaagaagacagcaacaggctggatgaccacaattaacggcaaggagctgaaggtggagggccagattacctactacaacagatacaagagacagaacgtagtcaaggacctgtccgtcgagctggatagactgagcgaagaatctgtgaacaacgacatctcctcctggacaaagggcagaagcggagaagctctgagcctcctgaagaaaagattctcccatagacccgtgcaggagaagttcgtgtgcctgaactgcggcttcgagacacacgcagccgagcaagccgccctgaacatcgccagatcctggctgttcctgcggagccaggagtacaagaaataccagacaaacaagacaaccggcaacaccgataagagagccttcgtcgagacctggcagtccttttaccggaagaagcttaaggaggtgtggaaacctgccgtgcggtctggcggatctggcggaggctccaccagccccaagaaaaagagaaaagtctaagctgccttctgcggggcttgccttctggccatgcccttcttctctcccttgcacctgtacctcttggtctttgaataaagcctgagtaggaaggctagcaaaaaaaaaaaaaaaaaaaaaaaaaaaaaaaaaaaaaaaaaaaaaaaaaaaaaaaaaaaaaaaaaaaaaaaaaaaaaaaa

SEQ ID NO: 9856 - RNA, 8787 nt, synthetic construct
  source 1..8787: mol_type = other RNA
aggaaataagagagaaaagaagagtaagaagaaatataagagccaccatggcccctaagaagaagcgtaaagtgagccggatgaaccacgaccaggagttcgacccccctaaggtgtaccctcccgtccccgccgagaagagaaagcccatccgggtcctgagcctgttcgatggcatcgccaccggtctgctggtgctgaaggacctgggcatccaggtggataggtacattgcctccgaggtgtgcgaggactccatcaccgtgggaatggtgcgtcatcagggcaagatcatgtacgtgggcgacgtgcggagcgtgacacagaagcatatccaggagtggggccctttcgacctggtgatcggcggcagcccttgcaatgacctgagcatcgtgaacccagcccggaagggcctgtacgagggaaccggcagactgttcttcgagttttacagactgctgcacgacgcccggcctaaggaaggcgacgaccggcccttcttttggctgttcgagaatgtggtggccatgggagtcagcgacaagcgggatattagccggttcctggagagcaaccccgtgatgatcgatgccaaggaagtgagcgccgcccaccgggccagatacttctggggcaatctgcctggcatgaacagacccctggccagcaccgtgaacgacaagctggagctgcaggagtgcctggagcacggccggatcgccaagttcagcaaggtgagaaccatcaccacccgaagcaacagcatcaaacaaggcaaggaccagcactttcctgtgttcatgaacgagaaggaggacatcctgtggtgtaccgagatggagagagtgttcgggttcccagtccactacacagatgtcagcaacatgtctagactggccagacagagactgctgggaagaagctggtccgtccctgtgatcagacacctgttcgcccctctgaaggagtacttcgcctgcgtgagcagcggcaacagcaacgccaacagccggggccccagcttctctagcggcctggtgccactgtccctgagagggagccacatgggccccatggagatctacaaaaccgtgagcgcctggaagcggcagcctgtgcgcgtgctgagcctgtttcggaatatcgataaagtcctgaaaagcctgggattcctggagagcggctctggctccggcggtggcaccctgaagtacgtggaggatgtgacaaacgtggtcagacgggatgtggagaagtggggccccttcgatctggtgtacggcagcacccaacccctgggcagctcttgtgaccggtgccctggctggtacatgtttcagttccaccggatcctgcagtacgccctgccgagacaggagtcccagcggccattcttttggattttcatggacaacttgctgctgaccgaggatgaccaggaaactaccactcggttcctgcagaccgaagccgtgaccctgcaggacgtgagaggccgggactaccagaacgccatgcgggtgtggtccaacatccctggactgaaaagcaagcacgcacctctgacccctaaagaagaggagtacctgcaggcccaggtgcggagcagaagcaagctggacgcccctaaggtggatctgctggtgaagaattgcctcctgcccctgagagagtacttcaagtatttcagccagaatagtctgcccctgggaggcagcggcggcggcgccgtgacccagctgaccttcgaggacgtggccgtggacttcacccaggaggagtggaggtgcctgacccaggcccagaggaccctgtacagggacgtgatgctggacacctacggcaacctggtgagcgtgggcgtgagcccccccagcatgagcgtgatcctgcccctggagttccaggaggacccctgggtggccaagagccacgtgaccacccccggcgagctgaacggctgggagggcggcggcccaagcagcggcgcccctcctcccagcggcggcaggcggcccaagcagcggcgcccctcctcccagcggcggcagcccagccggctccccaacctctaccgaggagggcacctctgagtccgccacccccgagagcggccctggcacctccaccgagcccagcgagggcagcgcacccggcagccctgccggcagccccacctccacagaggagggaaccagcaccgagcccagcgaaggcagcgccccaggcaccagcaccgagcctagtgagcaggagattaaacggatcaacaagatcagaagaagacttgtgaaagacagcaacaccaagaaggccggcaagacaggccccatgaaaaccctgctggttagagtgatgacacccgatctgagagagcggctggaaaacctgagaaagaagcctgaaaatatcccccagcccatcagcaatacatctagagccaacctgaataagctgctgaccgattacaccgaaatgaagaaggcgatcctgcatgtgtactgggaagagttccagaaggaccctgtgggcctgatgagccgggtggcccagcctgccagcaagaagatcgatcagaacaagctgaaacctgagatggacgagaagggcaacctgaccaccgccggctttgcctgctctcagtgtggccagcccctgttcgtgtacaagctggagcaggtgtctgagaagggcaaggcttacaccaactacttcggacggtgcaatgtggccgagcacgaaaagctgatcctgctggcccagctgaagcccgagaaggatagcgacgaagccgtgacatatagcctgggaaagtttgggcagagggccctggatttctacagcattcatgtgaccaaggagtccacccaccccgtgaagcccctggcccagatcgccggaaacagatacgcctccggacctgtgggaaaggccctgagcgacgcatgtatgggcacaatcgcctccttcctgtctaagtaccaggacatcatcatcgaacaccagaaggtggtgaagggcaaccagaagagactggagagcctgcgggagctggccggcaaggaaaacctggaataccctagcgtgaccctgccacctcagcctcacaccaaggagggcgttgatgcctacaacgaagtgatcgcccgggtgcgaatgtgggtgaacctgaacctgtggcagaagctgaagctaagcagagatgatgccaagcctctgctgagactgaagggattcccttcctttcctctggtcgagagacaggccaacgaagtggactggtgggacatggtgtgtaacgtgaagaagctgatcaacgagaaaaaggaggatggcaaggtgttttggcagaatctggctggctacaagagacaggaagccctgagaccatacctgagcagcgaggaagatcggaagaagggaaagaaattcgctcggtaccagctgggcgacctgctgctgcacctggaaaagaagcacggcgaggactggggaaaggtgtacgacgaggcctgggagcggattgacaagaaagtggaaggcctgagcaagcacatcaagctggaagaggaacggagaagcgaggacgcccagagcaaggccgccctgaccgactggctgcgggctaaggccagcttcgtgatcgagggcctgaaggaggccgacaaggacgagttctgcagatgcgagctgaagctgcagaagtggtacggggacctgcggggaaagcccttcgccatcgaagccgagaacagcatcctggacatcagcggcttcagcaagcagtacaactgtgccttcatctggcagaaggacggcgtgaagaagctgaacctgtacctgatcatcaactacttcaagggcggcaagctgcggttcaagaagatcaaacctgaagccttcgaagccaacagattctacaccgtgatcaacaaaaagagcggcgagatcgtgcccatggaggtgaacttcaacttcgacgaccccaacctgatcatcctgcctctggcctttggcaagagacagggcagagaattcatctggaacgacctgctgtccctggaaaccggcagcctgaagctggccaacggaagagtgatcgagaagacactgtacaacagaagaacccggcaggatgagcctgccctgttcgtggccctgaccttcgagcggcgggaggtcctggactcctccaatatcaaaccaatgaacctgatcggcgtggcaagaggcgaaaacatccccgccgtgatcgccctgaccgaccccgagggctgcccactgagccggtttaaggatagcctgggaaacccaacccacatcctgagaatcggcgagagctataaggagaagcagcggaccatccaggccaagaaggaggtggagcagcggagagccggcggctacagccggaagtacgccagcaaagccaagaatctggcagacgatatggtgagaaacaccgctagagatctgctgtactacgccgtgacccaggatgccatgctgatcttcgccaacctgagccggggcttcggccggcagggcaagcggaccttcatggccgagagacagtacacacggatggaggactggctgaccgccaagctggcctacgagggcctgagcaagacctacctgtccaagacactggcccagtacacctccaagacatgcagcaactgtgggtttaccatcaccagcgccgactacgacagggtgctggagaagctgaagaagacagcaacaggctggatgaccacaattaacggcaaggagctgaaggtggagggccagattacctactacaacagatacaagagacagaacgtagtcaaggacctgtccgtcgagctggatagactgagcgaagaatctgtgaacaacgacatctcctcctggacaaagggcagaagcggagaagctctgagcctcctgaagaaaagattctcccatagacccgtgcaggagaagttcgtgtgcctgaactgcggcttcgagacacacgcagccgagcaagccgccctgaacatcgccagatcctggctgttcctgcggagccaggagtacaagaaataccagacaaacaagacaaccggcaacaccgataagagagccttcgtcgagacctggcagtccttttaccggaagaagcttaaggaggtgtggaaacctgccgtgcggtctggcggatctggcggaggctccaccagccccaagaaaaagagaaaagtctaagctgccttctgcggggcttgccttctggccatgcccttcttctctcccttgcacctgtacctcttggtctttgaataaagcctgagtaggaaggctagcaaaaaaaaaaaaaaaaaaaaaaaaaaaaaaaaaaaaaaaaaaaaaaaaaaaaaaaaaaaaaaaaaaaaaaaaaaaaaaaagcccagccggctccccaacctctaccgaggagggcacctctgagtccgccacccccgagagcggccctggcacctccaccgagcccagcgagggcagcgcacccggcagccctgccggcagccccacctccacagaggagggaaccagcaccgagcccagcgaaggcagcgccccaggcaccagcaccgagcctagtgagcaggagattaaacggatcaacaagatcagaagaagacttgtgaaagacagcaacaccaagaaggccggcaagacaggccccatgaaaaccctgctggttagagtgatgacacccgatctgagagagcggctggaaaacctgagaaagaagcctgaaaatatcccccagcccatcagcaatacatctagagccaacctgaataagctgctgaccgattacaccgaaatgaagaaggcgatcctgcatgtgtactgggaagagttccagaaggaccctgtgggcctgatgagccgggtggcccagcctgccagcaagaagatcgatcagaacaagctgaaacctgagatggacgagaagggcaacctgaccaccgccggctttgcctgctctcagtgtggccagcccctgttcgtgtacaagctggagcaggtgtctgagaagggcaaggcttacaccaactacttcggacggtgcaatgtggccgagcacgaaaagctgatcctgctggcccagctgaagcccgagaaggatagcgacgaagccgtgacatatagcctgggaaagtttgggcagagggccctggatttctacagcattcatgtgaccaaggagtccacccaccccgtgaagcccctggcccagatcgccggaaacagatacgcctccggacctgtgggaaaggccctgagcgacgcatgtatgggcacaatcgcctccttcctgtctaagtaccaggacatcatcatcgaacaccagaaggtggtgaagggcaaccagaagagactggagagcctgcgggagctggccggcaaggaaaacctggaataccctagcgtgaccctgccacctcagcctcacaccaaggagggcgttgatgcctacaacgaagtgatcgcccgggtgcgaatgtgggtgaacctgaacctgtggcagaagctgaagctaagcagagatgatgccaagcctctgctgagactgaagggattcccttcctttcctctggtcgagagacaggccaacgaagtggactggtgggacatggtgtgtaacgtgaagaagctgatcaacgagaaaaaggaggatggcaaggtgttttggcagaatctggctggctacaagagacaggaagccctgagaccatacctgagcagcgaggaagatcggaagaagggaaagaaattcgctcggtaccagctgggcgacctgctgctgcacctggaaaagaagcacggcgaggactggggaaaggtgtacgacgaggcctgggagcggattgacaagaaagtggaaggcctgagcaagcacatcaagctggaagaggaacggagaagcgaggacgcccagagcaaggccgccctgaccgactggctgcgggctaaggccagcttcgtgatcgagggcctgaaggaggccgacaaggacgagttctgcagatgcgagctgaagctgcagaagtggtacggggacctgcggggaaagcccttcgccatcgaagccgagaacagcatcctggacatcagcggcttcagcaagcagtacaactgtgccttcatctggcagaaggacggcgtgaagaagctgaacctgtacctgatcatcaactacttcaagggcggcaagctgcggttcaagaagatcaaacctgaagccttcgaagccaacagattctacaccgtgatcaacaaaaagagcggcgagatcgtgcccatggaggtgaacttcaacttcgacgaccccaacctgatcatcctgcctctggcctttggcaagagacagggcagagaattcatctggaacgacctgctgtccctggaaaccggcagcctgaagctggccaacggaagagtgatcgagaagacactgtacaacagaagaacccggcaggatgagcctgccctgttcgtggccctgaccttcgagcggcgggaggtcctggactcctccaatatcaaaccaatgaacctgatcggcgtggcaagaggcgaaaacatccccgccgtgatcgccctgaccgaccccgagggctgcccactgagccggtttaaggatagcctgggaaacccaacccacatcctgagaatcggcgagagctataaggagaagcagcggaccatccaggccaagaaggaggtggagcagcggagagccggcggctacagccggaagtacgccagcaaagccaagaatctggcagacgatatggtgagaaacaccgctagagatctgctgtactacgccgtgacccaggatgccatgctgatcttcgccaacctgagccggggcttcggccggcagggcaagcggaccttcatggccgagagacagtacacacggatggaggactggctgaccgccaagctggcctacgagggcctgagcaagacctacctgtccaagacactggcccagtacacctccaagacatgcagcaactgtgggtttaccatcaccagcgccgactacgacagggtgctggagaagctgaagaagacagcaacaggctggatgaccacaattaacggcaaggagctgaaggtggagggccagattacctactacaacagatacaagagacagaacgtagtcaaggacctgtccgtcgagctggatagactgagcgaagaatctgtgaacaacgacatctcctcctggacaaagggcagaagcggagaagctctgagcctcctgaagaaaagattctcccatagacccgtgcaggagaagttcgtgtgcctgaactgcggcttcgagacacacgcagccgagcaagccgccctgaacatcgccagatcctggctgttcctgcggagccaggagtacaagaaataccagacaaacaagacaaccggcaacaccgataagagagccttcgtcgagacctggcagtccttttaccggaagaagcttaaggaggtgtggaaacctgccgtgcggtctggcggatctggcggaggctccaccagccccaagaaaaagagaaaagtctaagctgccttctgcggggcttgccttctggccatgcccttcttctctcccttgcacctgtacctcttggtctttgaataaagcctgagtaggaaggctagcaaaaaaaaaaaaaaaaaaaaaaaaaaaaaaaaaaaaaaaaaaaaaaaaaaaaaaaaaaaaaaaaaaaaaaaaaaaaaaaa

SEQ ID NO: 9857 - RNA, 8787 nt, synthetic construct
  source 1..8787: mol_type = other RNA
aggaaataagagagaaaagaagagtaagaagaaatataagagccaccatggcccctaagaagaagcgtaaagtgagccggatgaaccacgaccaggagttcgacccccctaaggtgtaccctcccgtccccgccgagaagagaaagcccatccgggtcctgagcctgttcgatggcatcgccaccggtctgctggtgctgaaggacctgggcatccaggtggataggtacattgcctccgaggtgtgcgaggactccatcaccgtgggaatggtgcgtcatcagggcaagatcatgtacgtgggcgacgtgcggagcgtgacacagaagcatatccaggagtggggccctttcgacctggtgatcggcggcagcccttgcaatgacctgagcatcgtgaacccagcccggaagggcctgtacgagggaaccggcagactgttcttcgagttttacagactgctgcacgacgcccggcctaaggaaggcgacgaccggcccttcttttggctgttcgagaatgtggtggccatgggagtcagcgacaagcgggatattagccggttcctggagagcaaccccgtgatgatcgatgccaaggaagtgagcgccgcccaccgggccagatacttctggggcaatctgcctggcatgaacagacccctggccagcaccgtgaacgacaagctggagctgcaggagtgcctggagcacggccggatcgccaagttcagcaaggtgagaaccatcaccacccgaagcaacagcatcaaacaaggcaaggaccagcactttcctgtgttcatgaacgagaaggaggacatcctgtggtgtaccgagatggagagagtgttcgggttcccagtccactacacagatgtcagcaacatgtctagactggccagacagagactgctgggaagaagctggtccgtccctgtgatcagacacctgttcgcccctctgaaggagtacttcgcctgcgtgagcagcggcaacagcaacgccaacagccggggccccagcttctctagcggcctggtgccactgtccctgagagggagccacatgggccccatggagatctacaaaaccgtgagcgcctggaagcggcagcctgtgcgcgtgctgagcctgtttcggaatatcgataaagtcctgaaaagcctgggattcctggagagcggctctggctccggcggtggcaccctgaagtacgtggaggatgtgacaaacgtggtcagacgggatgtggagaagtggggccccttcgatctggtgtacggcagcacccaacccctgggcagctcttgtgaccggtgccctggctggtacatgtttcagttccaccggatcctgcagtacgccctgccgagacaggagtcccagcggccattcttttggattttcatggacaacttgctgctgaccgaggatgaccaggaaactaccactcggttcctgcagaccgaagccgtgaccctgcaggacgtgagaggccgggactaccagaacgccatgcgggtgtggtccaacatccctggactgaaaagcaagcacgcacctctgacccctaaagaagaggagtacctgcaggcccaggtgcggagcagaagcaagctggacgcccctaaggtggatctgctggtgaagaattgcctcctgcccctgagagagtacttcaagtatttcagccagaatagtctgcccctgggaggcagcggcggcggccaggccgaggtgaccttcgaggacgtggccgtgctgctgagcagggaggagtggggcaggctgggccccgtgcagaagggcctgtacagggacgtgatgctggagacctacaggaacctggtgagcctgggcgccggccccaccggccccaagcccgaggtgatcacccagctggagaggggcgacgagccctgggtgctggacgtgcagggcagggagggccccaccatcgacggcagcgccggcggcccaagcagcggcgcccctcctcccagcggcggcaggcggcccaagcagcggcgcccctcctcccagcggcggcagcccagccggctccccaacctctaccgaggagggcacctctgagtccgccacccccgagagcggccctggcacctccaccgagcccagcgagggcagcgcacccggcagccctgccggcagccccacctccacagaggagggaaccagcaccgagcccagcgaaggcagcgccccaggcaccagcaccgagcctagtgagcaggagattaaacggatcaacaagatcagaagaagacttgtgaaagacagcaacaccaagaaggccggcaagacaggccccatgaaaaccctgctggttagagtgatgacacccgatctgagagagcggctggaaaacctgagaaagaagcctgaaaatatcccccagcccatcagcaatacatctagagccaacctgaataagctgctgaccgattacaccgaaatgaagaaggcgatcctgcatgtgtactgggaagagttccagaaggaccctgtgggcctgatgagccgggtggcccagcctgccagcaagaagatcgatcagaacaagctgaaacctgagatggacgagaagggcaacctgaccaccgccggctttgcctgctctcagtgtggccagcccctgttcgtgtacaagctggagcaggtgtctgagaagggcaaggcttacaccaactacttcggacggtgcaatgtggccgagcacgaaaagctgatcctgctggcccagctgaagcccgagaaggatagcgacgaagccgtgacatatagcctgggaaagtttgggcagagggccctggatttctacagcattcatgtgaccaaggagtccacccaccccgtgaagcccctggcccagatcgccggaaacagatacgcctccggacctgtgggaaaggccctgagcgacgcatgtatgggcacaatcgcctccttcctgtctaagtaccaggacatcatcatcgaacaccagaaggtggtgaagggcaaccagaagagactggagagcctgcgggagctggccggcaaggaaaacctggaataccctagcgtgaccctgccacctcagcctcacaccaaggagggcgttgatgcctacaacgaagtgatcgcccgggtgcgaatgtgggtgaacctgaacctgtggcagaagctgaagctaagcagagatgatgccaagcctctgctgagactgaagggattcccttcctttcctctggtcgagagacaggccaacgaagtggactggtgggacatggtgtgtaacgtgaagaagctgatcaacgagaaaaaggaggatggcaaggtgttttggcagaatctggctggctacaagagacaggaagccctgagaccatacctgagcagcgaggaagatcggaagaagggaaagaaattcgctcggtaccagctgggcgacctgctgctgcacctggaaaagaagcacggcgaggactggggaaaggtgtacgacgaggcctgggagcggattgacaagaaagtggaaggcctgagcaagcacatcaagctggaagaggaacggagaagcgaggacgcccagagcaaggccgccctgaccgactggctgcgggctaaggccagcttcgtgatcgagggcctgaaggaggccgacaaggacgagttctgcagatgcgagctgaagctgcagaagtggtacggggacctgcggggaaagcccttcgccatcgaagccgagaacagcatcctggacatcagcggcttcagcaagcagtacaactgtgccttcatctggcagaaggacggcgtgaagaagctgaacctgtacctgatcatcaactacttcaagggcggcaagctgcggttcaagaagatcaaacctgaagccttcgaagccaacagattctacaccgtgatcaacaaaaagagcggcgagatcgtgcccatggaggtgaacttcaacttcgacgaccccaacctgatcatcctgcctctggcctttggcaagagacagggcagagaattcatctggaacgacctgctgtccctggaaaccggcagcctgaagctggccaacggaagagtgatcgagaagacactgtacaacagaagaacccggcaggatgagcctgccctgttcgtggccctgaccttcgagcggcgggaggtcctggactcctccaatatcaaaccaatgaacctgatcggcgtggcaagaggcgaaaacatccccgccgtgatcgccctgaccgaccccgagggctgcccactgagccggtttaaggatagcctgggaaacccaacccacatcctgagaatcggcgagagctataaggagaagcagcggaccatccaggccaagaaggaggtggagcagcggagagccggcggctacagccggaagtacgccagcaaagccaagaatctggcagacgatatggtgagaaacaccgctagagatctgctgtactacgccgtgacccaggatgccatgctgatcttcgccaacctgagccggggcttcggccggcagggcaagcggaccttcatggccgagagacagtacacacggatggaggactggctgaccgccaagctggcctacgagggcctgagcaagacctacctgtccaagacactggcccagtacacctccaagacatgcagcaactgtgggtttaccatcaccagcgccgactacgacagggtgctggagaagctgaagaagacagcaacaggctggatgaccacaattaacggcaaggagctgaaggtggagggccagattacctactacaacagatacaagagacagaacgtagtcaaggacctgtccgtcgagctggatagactgagcgaagaatctgtgaacaacgacatctcctcctggacaaagggcagaagcggagaagctctgagcctcctgaagaaaagattctcccatagacccgtgcaggagaagttcgtgtgcctgaactgcggcttcgagacacacgcagccgagcaagccgccctgaacatcgccagatcctggctgttcctgcggagccaggagtacaagaaataccagacaaacaagacaaccggcaacaccgataagagagccttcgtcgagacctggcagtccttttaccggaagaagcttaaggaggtgtggaaacctgccgtgcggtctggcggatctggcggaggctccaccagccccaagaaaaagagaaaagtctaagctgccttctgcggggcttgccttctggccatgcccttcttctctcccttgcacctgtacctcttggtctttgaataaagcctgagtaggaaggctagcaaaaaaaaaaaaaaaaaaaaaaaaaaaaaaaaaaaaaaaaaaaaaaaaaaaaaaaaaaaaaaaaaaaaaaaaaaaaaaaagcccagccggctccccaacctctaccgaggagggcacctctgagtccgccacccccgagagcggccctggcacctccaccgagcccagcgagggcagcgcacccggcagccctgccggcagccccacctccacagaggagggaaccagcaccgagcccagcgaaggcagcgccccaggcaccagcaccgagcctagtgagcaggagattaaacggatcaacaagatcagaagaagacttgtgaaagacagcaacaccaagaaggccggcaagacaggccccatgaaaaccctgctggttagagtgatgacacccgatctgagagagcggctggaaaacctgagaaagaagcctgaaaatatcccccagcccatcagcaatacatctagagccaacctgaataagctgctgaccgattacaccgaaatgaagaaggcgatcctgcatgtgtactgggaagagttccagaaggaccctgtgggcctgatgagccgggtggcccagcctgccagcaagaagatcgatcagaacaagctgaaacctgagatggacgagaagggcaacctgaccaccgccggctttgcctgctctcagtgtggccagcccctgttcgtgtacaagctggagcaggtgtctgagaagggcaaggcttacaccaactacttcggacggtgcaatgtggccgagcacgaaaagctgatcctgctggcccagctgaagcccgagaaggatagcgacgaagccgtgacatatagcctgggaaagtttgggcagagggccctggatttctacagcattcatgtgaccaaggagtccacccaccccgtgaagcccctggcccagatcgccggaaacagatacgcctccggacctgtgggaaaggccctgagcgacgcatgtatgggcacaatcgcctccttcctgtctaagtaccaggacatcatcatcgaacaccagaaggtggtgaagggcaaccagaagagactggagagcctgcgggagctggccggcaaggaaaacctggaataccctagcgtgaccctgccacctcagcctcacaccaaggagggcgttgatgcctacaacgaagtgatcgcccgggtgcgaatgtgggtgaacctgaacctgtggcagaagctgaagctaagcagagatgatgccaagcctctgctgagactgaagggattcccttcctttcctctggtcgagagacaggccaacgaagtggactggtgggacatggtgtgtaacgtgaagaagctgatcaacgagaaaaaggaggatggcaaggtgttttggcagaatctggctggctacaagagacaggaagccctgagaccatacctgagcagcgaggaagatcggaagaagggaaagaaattcgctcggtaccagctgggcgacctgctgctgcacctggaaaagaagcacggcgaggactggggaaaggtgtacgacgaggcctgggagcggattgacaagaaagtggaaggcctgagcaagcacatcaagctggaagaggaacggagaagcgaggacgcccagagcaaggccgccctgaccgactggctgcgggctaaggccagcttcgtgatcgagggcctgaaggaggccgacaaggacgagttctgcagatgcgagctgaagctgcagaagtggtacggggacctgcggggaaagcccttcgccatcgaagccgagaacagcatcctggacatcagcggcttcagcaagcagtacaactgtgccttcatctggcagaaggacggcgtgaagaagctgaacctgtacctgatcatcaactacttcaagggcggcaagctgcggttcaagaagatcaaacctgaagccttcgaagccaacagattctacaccgtgatcaacaaaaagagcggcgagatcgtgcccatggaggtgaacttcaacttcgacgaccccaacctgatcatcctgcctctggcctttggcaagagacagggcagagaattcatctggaacgacctgctgtccctggaaaccggcagcctgaagctggccaacggaagagtgatcgagaagacactgtacaacagaagaacccggcaggatgagcctgccctgttcgtggccctgaccttcgagcggcgggaggtcctggactcctccaatatcaaaccaatgaacctgatcggcgtggcaagaggcgaaaacatccccgccgtgatcgccctgaccgaccccgagggctgcccactgagccggtttaaggatagcctgggaaacccaacccacatcctgagaatcggcgagagctataaggagaagcagcggaccatccaggccaagaaggaggtggagcagcggagagccggcggctacagccggaagtacgccagcaaagccaagaatctggcagacgatatggtgagaaacaccgctagagatctgctgtactacgccgtgacccaggatgccatgctgatcttcgccaacctgagccggggcttcggccggcagggcaagcggaccttcatggccgagagacagtacacacggatggaggactggctgaccgccaagctggcctacgagggcctgagcaagacctacctgtccaagacactggcccagtacacctccaagacatgcagcaactgtgggtttaccatcaccagcgccgactacgacagggtgctggagaagctgaagaagacagcaacaggctggatgaccacaattaacggcaaggagctgaaggtggagggccagattacctactacaacagatacaagagacagaacgtagtcaaggacctgtccgtcgagctggatagactgagcgaagaatctgtgaacaacgacatctcctcctggacaaagggcagaagcggagaagctctgagcctcctgaagaaaagattctcccatagacccgtgcaggagaagttcgtgtgcctgaactgcggcttcgagacacacgcagccgagcaagccgccctgaacatcgccagatcctggctgttcctgcggagccaggagtacaagaaataccagacaaacaagacaaccggcaacaccgataagagagccttcgtcgagacctggcagtccttttaccggaagaagcttaaggaggtgtggaaacctgccgtgcggtctggcggatctggcggaggctccaccagccccaagaaaaagagaaaagtctaagctgccttctgcggggcttgccttctggccatgcccttcttctctcccttgcacctgtacctcttggtctttgaataaagcctgagtaggaaggctagcaaaaaaaaaaaaaaaaaaaaaaaaaaaaaaaaaaaaaaaaaaaaaaaaaaaaaaaaaaaaaaaaaaaaaaaaaaaaaaaa

SEQ ID NO: 9858 - RNA, 8787 nt, synthetic construct
  source 1..8787: mol_type = other RNA
aggaaataagagagaaaagaagagtaagaagaaatataagagccaccatggcccctaagaagaagcgtaaagtgagccggatgaaccacgaccaggagttcgacccccctaaggtgtaccctcccgtccccgccgagaagagaaagcccatccgggtcctgagcctgttcgatggcatcgccaccggtctgctggtgctgaaggacctgggcatccaggtggataggtacattgcctccgaggtgtgcgaggactccatcaccgtgggaatggtgcgtcatcagggcaagatcatgtacgtgggcgacgtgcggagcgtgacacagaagcatatccaggagtggggccctttcgacctggtgatcggcggcagcccttgcaatgacctgagcatcgtgaacccagcccggaagggcctgtacgagggaaccggcagactgttcttcgagttttacagactgctgcacgacgcccggcctaaggaaggcgacgaccggcccttcttttggctgttcgagaatgtggtggccatgggagtcagcgacaagcgggatattagccggttcctggagagcaaccccgtgatgatcgatgccaaggaagtgagcgccgcccaccgggccagatacttctggggcaatctgcctggcatgaacagacccctggccagcaccgtgaacgacaagctggagctgcaggagtgcctggagcacggccggatcgccaagttcagcaaggtgagaaccatcaccacccgaagcaacagcatcaaacaaggcaaggaccagcactttcctgtgttcatgaacgagaaggaggacatcctgtggtgtaccgagatggagagagtgttcgggttcccagtccactacacagatgtcagcaacatgtctagactggccagacagagactgctgggaagaagctggtccgtccctgtgatcagacacctgttcgcccctctgaaggagtacttcgcctgcgtgagcagcggcaacagcaacgccaacagccggggccccagcttctctagcggcctggtgccactgtccctgagagggagccacatgggccccatggagatctacaaaaccgtgagcgcctggaagcggcagcctgtgcgcgtgctgagcctgtttcggaatatcgataaagtcctgaaaagcctgggattcctggagagcggctctggctccggcggtggcaccctgaagtacgtggaggatgtgacaaacgtggtcagacgggatgtggagaagtggggccccttcgatctggtgtacggcagcacccaacccctgggcagctcttgtgaccggtgccctggctggtacatgtttcagttccaccggatcctgcagtacgccctgccgagacaggagtcccagcggccattcttttggattttcatggacaacttgctgctgaccgaggatgaccaggaaactaccactcggttcctgcagaccgaagccgtgaccctgcaggacgtgagaggccgggactaccagaacgccatgcgggtgtggtccaacatccctggactgaaaagcaagcacgcacctctgacccctaaagaagaggagtacctgcaggcccaggtgcggagcagaagcaagctggacgcccctaaggtggatctgctggtgaagaattgcctcctgcccctgagagagtacttcaagtatttcagccagaatagtctgcccctgggaggcagcggcggcggccccagcgtgcccgtgaccttcagggacgtgttcgtgcagttcagcagggacgagtgggccctgctggacgacgagcagaaggagctgcaccagagcgtgatgcagagcaactacgaggtgctgatgagcctgtactgcgacctggccaagcccgaggtgctgctgcagatggagaggggcgagccctgcctgcccgccgagcccgacctgcagggcgccgccgtgagcctgaaccccgccgccggcggcccaagcagcggcgcccctcctcccagcggcggcaggcggcccaagcagcggcgcccctcctcccagcggcggcagcccagccggctccccaacctctaccgaggagggcacctctgagtccgccacccccgagagcggccctggcacctccaccgagcccagcgagggcagcgcacccggcagccctgccggcagccccacctccacagaggagggaaccagcaccgagcccagcgaaggcagcgccccaggcaccagcaccgagcctagtgagcaggagattaaacggatcaacaagatcagaagaagacttgtgaaagacagcaacaccaagaaggccggcaagacaggccccatgaaaaccctgctggttagagtgatgacacccgatctgagagagcggctggaaaacctgagaaagaagcctgaaaatatcccccagcccatcagcaatacatctagagccaacctgaataagctgctgaccgattacaccgaaatgaagaaggcgatcctgcatgtgtactgggaagagttccagaaggaccctgtgggcctgatgagccgggtggcccagcctgccagcaagaagatcgatcagaacaagctgaaacctgagatggacgagaagggcaacctgaccaccgccggctttgcctgctctcagtgtggccagcccctgttcgtgtacaagctggagcaggtgtctgagaagggcaaggcttacaccaactacttcggacggtgcaatgtggccgagcacgaaaagctgatcctgctggcccagctgaagcccgagaaggatagcgacgaagccgtgacatatagcctgggaaagtttgggcagagggccctggatttctacagcattcatgtgaccaaggagtccacccaccccgtgaagcccctggcccagatcgccggaaacagatacgcctccggacctgtgggaaaggccctgagcgacgcatgtatgggcacaatcgcctccttcctgtctaagtaccaggacatcatcatcgaacaccagaaggtggtgaagggcaaccagaagagactggagagcctgcgggagctggccggcaaggaaaacctggaataccctagcgtgaccctgccacctcagcctcacaccaaggagggcgttgatgcctacaacgaagtgatcgcccgggtgcgaatgtgggtgaacctgaacctgtggcagaagctgaagctaagcagagatgatgccaagcctctgctgagactgaagggattcccttcctttcctctggtcgagagacaggccaacgaagtggactggtgggacatggtgtgtaacgtgaagaagctgatcaacgagaaaaaggaggatggcaaggtgttttggcagaatctggctggctacaagagacaggaagccctgagaccatacctgagcagcgaggaagatcggaagaagggaaagaaattcgctcggtaccagctgggcgacctgctgctgcacctggaaaagaagcacggcgaggactggggaaaggtgtacgacgaggcctgggagcggattgacaagaaagtggaaggcctgagcaagcacatcaagctggaagaggaacggagaagcgaggacgcccagagcaaggccgccctgaccgactggctgcgggctaaggccagcttcgtgatcgagggcctgaaggaggccgacaaggacgagttctgcagatgcgagctgaagctgcagaagtggtacggggacctgcggggaaagcccttcgccatcgaagccgagaacagcatcctggacatcagcggcttcagcaagcagtacaactgtgccttcatctggcagaaggacggcgtgaagaagctgaacctgtacctgatcatcaactacttcaagggcggcaagctgcggttcaagaagatcaaacctgaagccttcgaagccaacagattctacaccgtgatcaacaaaaagagcggcgagatcgtgcccatggaggtgaacttcaacttcgacgaccccaacctgatcatcctgcctctggcctttggcaagagacagggcagagaattcatctggaacgacctgctgtccctggaaaccggcagcctgaagctggccaacggaagagtgatcgagaagacactgtacaacagaagaacccggcaggatgagcctgccctgttcgtggccctgaccttcgagcggcgggaggtcctggactcctccaatatcaaaccaatgaacctgatcggcgtggcaagaggcgaaaacatccccgccgtgatcgccctgaccgaccccgagggctgcccactgagccggtttaaggatagcctgggaaacccaacccacatcctgagaatcggcgagagctataaggagaagcagcggaccatccaggccaagaaggaggtggagcagcggagagccggcggctacagccggaagtacgccagcaaagccaagaatctggcagacgatatggtgagaaacaccgctagagatctgctgtactacgccgtgacccaggatgccatgctgatcttcgccaacctgagccggggcttcggccggcagggcaagcggaccttcatggccgagagacagtacacacggatggaggactggctgaccgccaagctggcctacgagggcctgagcaagacctacctgtccaagacactggcccagtacacctccaagacatgcagcaactgtgggtttaccatcaccagcgccgactacgacagggtgctggagaagctgaagaagacagcaacaggctggatgaccacaattaacggcaaggagctgaaggtggagggccagattacctactacaacagatacaagagacagaacgtagtcaaggacctgtccgtcgagctggatagactgagcgaagaatctgtgaacaacgacatctcctcctggacaaagggcagaagcggagaagctctgagcctcctgaagaaaagattctcccatagacccgtgcaggagaagttcgtgtgcctgaactgcggcttcgagacacacgcagccgagcaagccgccctgaacatcgccagatcctggctgttcctgcggagccaggagtacaagaaataccagacaaacaagacaaccggcaacaccgataagagagccttcgtcgagacctggcagtccttttaccggaagaagcttaaggaggtgtggaaacctgccgtgcggtctggcggatctggcggaggctccaccagccccaagaaaaagagaaaagtctaagctgccttctgcggggcttgccttctggccatgcccttcttctctcccttgcacctgtacctcttggtctttgaataaagcctgagtaggaaggctagcaaaaaaaaaaaaaaaaaaaaaaaaaaaaaaaaaaaaaaaaaaaaaaaaaaaaaaaaaaaaaaaaaaaaaaaaaaaaaaaagcccagccggctccccaacctctaccgaggagggcacctctgagtccgccacccccgagagcggccctggcacctccaccgagcccagcgagggcagcgcacccggcagccctgccggcagccccacctccacagaggagggaaccagcaccgagcccagcgaaggcagcgccccaggcaccagcaccgagcctagtgagcaggagattaaacggatcaacaagatcagaagaagacttgtgaaagacagcaacaccaagaaggccggcaagacaggccccatgaaaaccctgctggttagagtgatgacacccgatctgagagagcggctggaaaacctgagaaagaagcctgaaaatatcccccagcccatcagcaatacatctagagccaacctgaataagctgctgaccgattacaccgaaatgaagaaggcgatcctgcatgtgtactgggaagagttccagaaggaccctgtgggcctgatgagccgggtggcccagcctgccagcaagaagatcgatcagaacaagctgaaacctgagatggacgagaagggcaacctgaccaccgccggctttgcctgctctcagtgtggccagcccctgttcgtgtacaagctggagcaggtgtctgagaagggcaaggcttacaccaactacttcggacggtgcaatgtggccgagcacgaaaagctgatcctgctggcccagctgaagcccgagaaggatagcgacgaagccgtgacatatagcctgggaaagtttgggcagagggccctggatttctacagcattcatgtgaccaaggagtccacccaccccgtgaagcccctggcccagatcgccggaaacagatacgcctccggacctgtgggaaaggccctgagcgacgcatgtatgggcacaatcgcctccttcctgtctaagtaccaggacatcatcatcgaacaccagaaggtggtgaagggcaaccagaagagactggagagcctgcgggagctggccggcaaggaaaacctggaataccctagcgtgaccctgccacctcagcctcacaccaaggagggcgttgatgcctacaacgaagtgatcgcccgggtgcgaatgtgggtgaacctgaacctgtggcagaagctgaagctaagcagagatgatgccaagcctctgctgagactgaagggattcccttcctttcctctggtcgagagacaggccaacgaagtggactggtgggacatggtgtgtaacgtgaagaagctgatcaacgagaaaaaggaggatggcaaggtgttttggcagaatctggctggctacaagagacaggaagccctgagaccatacctgagcagcgaggaagatcggaagaagggaaagaaattcgctcggtaccagctgggcgacctgctgctgcacctggaaaagaagcacggcgaggactggggaaaggtgtacgacgaggcctgggagcggattgacaagaaagtggaaggcctgagcaagcacatcaagctggaagaggaacggagaagcgaggacgcccagagcaaggccgccctgaccgactggctgcgggctaaggccagcttcgtgatcgagggcctgaaggaggccgacaaggacgagttctgcagatgcgagctgaagctgcagaagtggtacggggacctgcggggaaagcccttcgccatcgaagccgagaacagcatcctggacatcagcggcttcagcaagcagtacaactgtgccttcatctggcagaaggacggcgtgaagaagctgaacctgtacctgatcatcaactacttcaagggcggcaagctgcggttcaagaagatcaaacctgaagccttcgaagccaacagattctacaccgtgatcaacaaaaagagcggcgagatcgtgcccatggaggtgaacttcaacttcgacgaccccaacctgatcatcctgcctctggcctttggcaagagacagggcagagaattcatctggaacgacctgctgtccctggaaaccggcagcctgaagctggccaacggaagagtgatcgagaagacactgtacaacagaagaacccggcaggatgagcctgccctgttcgtggccctgaccttcgagcggcgggaggtcctggactcctccaatatcaaaccaatgaacctgatcggcgtggcaagaggcgaaaacatccccgccgtgatcgccctgaccgaccccgagggctgcccactgagccggtttaaggatagcctgggaaacccaacccacatcctgagaatcggcgagagctataaggagaagcagcggaccatccaggccaagaaggaggtggagcagcggagagccggcggctacagccggaagtacgccagcaaagccaagaatctggcagacgatatggtgagaaacaccgctagagatctgctgtactacgccgtgacccaggatgccatgctgatcttcgccaacctgagccggggcttcggccggcagggcaagcggaccttcatggccgagagacagtacacacggatggaggactggctgaccgccaagctggcctacgagggcctgagcaagacctacctgtccaagacactggcccagtacacctccaagacatgcagcaactgtgggtttaccatcaccagcgccgactacgacagggtgctggagaagctgaagaagacagcaacaggctggatgaccacaattaacggcaaggagctgaaggtggagggccagattacctactacaacagatacaagagacagaacgtagtcaaggacctgtccgtcgagctggatagactgagcgaagaatctgtgaacaacgacatctcctcctggacaaagggcagaagcggagaagctctgagcctcctgaagaaaagattctcccatagacccgtgcaggagaagttcgtgtgcctgaactgcggcttcgagacacacgcagccgagcaagccgccctgaacatcgccagatcctggctgttcctgcggagccaggagtacaagaaataccagacaaacaagacaaccggcaacaccgataagagagccttcgtcgagacctggcagtccttttaccggaagaagcttaaggaggtgtggaaacctgccgtgcggtctggcggatctggcggaggctccaccagccccaagaaaaagagaaaagtctaagctgccttctgcggggcttgccttctggccatgcccttcttctctcccttgcacctgtacctcttggtctttgaataaagcctgagtaggaaggctagcaaaaaaaaaaaaaaaaaaaaaaaaaaaaaaaaaaaaaaaaaaaaaaaaaaaaaaaaaaaaaaaaaaaaaaaaaaaaaaaa

SEQ ID NO: 9859 - RNA, 8787 nt, synthetic construct
  source 1..8787: mol_type = other RNA
aggaaataagagagaaaagaagagtaagaagaaatataagagccaccatggcccctaagaagaagcgtaaagtgagccggatgaaccacgaccaggagttcgacccccctaaggtgtaccctcccgtccccgccgagaagagaaagcccatccgggtcctgagcctgttcgatggcatcgccaccggtctgctggtgctgaaggacctgggcatccaggtggataggtacattgcctccgaggtgtgcgaggactccatcaccgtgggaatggtgcgtcatcagggcaagatcatgtacgtgggcgacgtgcggagcgtgacacagaagcatatccaggagtggggccctttcgacctggtgatcggcggcagcccttgcaatgacctgagcatcgtgaacccagcccggaagggcctgtacgagggaaccggcagactgttcttcgagttttacagactgctgcacgacgcccggcctaaggaaggcgacgaccggcccttcttttggctgttcgagaatgtggtggccatgggagtcagcgacaagcgggatattagccggttcctggagagcaaccccgtgatgatcgatgccaaggaagtgagcgccgcccaccgggccagatacttctggggcaatctgcctggcatgaacagacccctggccagcaccgtgaacgacaagctggagctgcaggagtgcctggagcacggccggatcgccaagttcagcaaggtgagaaccatcaccacccgaagcaacagcatcaaacaaggcaaggaccagcactttcctgtgttcatgaacgagaaggaggacatcctgtggtgtaccgagatggagagagtgttcgggttcccagtccactacacagatgtcagcaacatgtctagactggccagacagagactgctgggaagaagctggtccgtccctgtgatcagacacctgttcgcccctctgaaggagtacttcgcctgcgtgagcagcggcaacagcaacgccaacagccggggccccagcttctctagcggcctggtgccactgtccctgagagggagccacatgggccccatggagatctacaaaaccgtgagcgcctggaagcggcagcctgtgcgcgtgctgagcctgtttcggaatatcgataaagtcctgaaaagcctgggattcctggagagcggctctggctccggcggtggcaccctgaagtacgtggaggatgtgacaaacgtggtcagacgggatgtggagaagtggggccccttcgatctggtgtacggcagcacccaacccctgggcagctcttgtgaccggtgccctggctggtacatgtttcagttccaccggatcctgcagtacgccctgccgagacaggagtcccagcggccattcttttggattttcatggacaacttgctgctgaccgaggatgaccaggaaactaccactcggttcctgcagaccgaagccgtgaccctgcaggacgtgagaggccgggactaccagaacgccatgcgggtgtggtccaacatccctggactgaaaagcaagcacgcacctctgacccctaaagaagaggagtacctgcaggcccaggtgcggagcagaagcaagctggacgcccctaaggtggatctgctggtgaagaattgcctcctgcccctgagagagtacttcaagtatttcagccagaatagtctgcccctgggaggcagcggcggcggcttccaggagcccgtgaccttcgaggacgtggccgtgtacttcacccagaacgagtgggccagcctgcaccccacccagagggccctgtacagggaggtgatgctggagaactacgccaacgtgaccagcctgctggccttccccttccccaagcccgccctgatcagccacctggagaggggcgaggccccctggggccccgacccctgggacaccgagatccccaggggcatcagccagggcggcggcccaagcagcggcgcccctcctcccagcggcggcaggcggcccaagcagcggcgcccctcctcccagcggcggcagcccagccggctccccaacctctaccgaggagggcacctctgagtccgccacccccgagagcggccctggcacctccaccgagcccagcgagggcagcgcacccggcagccctgccggcagccccacctccacagaggagggaaccagcaccgagcccagcgaaggcagcgccccaggcaccagcaccgagcctagtgagcaggagattaaacggatcaacaagatcagaagaagacttgtgaaagacagcaacaccaagaaggccggcaagacaggccccatgaaaaccctgctggttagagtgatgacacccgatctgagagagcggctggaaaacctgagaaagaagcctgaaaatatcccccagcccatcagcaatacatctagagccaacctgaataagctgctgaccgattacaccgaaatgaagaaggcgatcctgcatgtgtactgggaagagttccagaaggaccctgtgggcctgatgagccgggtggcccagcctgccagcaagaagatcgatcagaacaagctgaaacctgagatggacgagaagggcaacctgaccaccgccggctttgcctgctctcagtgtggccagcccctgttcgtgtacaagctggagcaggtgtctgagaagggcaaggcttacaccaactacttcggacggtgcaatgtggccgagcacgaaaagctgatcctgctggcccagctgaagcccgagaaggatagcgacgaagccgtgacatatagcctgggaaagtttgggcagagggccctggatttctacagcattcatgtgaccaaggagtccacccaccccgtgaagcccctggcccagatcgccggaaacagatacgcctccggacctgtgggaaaggccctgagcgacgcatgtatgggcacaatcgcctccttcctgtctaagtaccaggacatcatcatcgaacaccagaaggtggtgaagggcaaccagaagagactggagagcctgcgggagctggccggcaaggaaaacctggaataccctagcgtgaccctgccacctcagcctcacaccaaggagggcgttgatgcctacaacgaagtgatcgcccgggtgcgaatgtgggtgaacctgaacctgtggcagaagctgaagctaagcagagatgatgccaagcctctgctgagactgaagggattcccttcctttcctctggtcgagagacaggccaacgaagtggactggtgggacatggtgtgtaacgtgaagaagctgatcaacgagaaaaaggaggatggcaaggtgttttggcagaatctggctggctacaagagacaggaagccctgagaccatacctgagcagcgaggaagatcggaagaagggaaagaaattcgctcggtaccagctgggcgacctgctgctgcacctggaaaagaagcacggcgaggactggggaaaggtgtacgacgaggcctgggagcggattgacaagaaagtggaaggcctgagcaagcacatcaagctggaagaggaacggagaagcgaggacgcccagagcaaggccgccctgaccgactggctgcgggctaaggccagcttcgtgatcgagggcctgaaggaggccgacaaggacgagttctgcagatgcgagctgaagctgcagaagtggtacggggacctgcggggaaagcccttcgccatcgaagccgagaacagcatcctggacatcagcggcttcagcaagcagtacaactgtgccttcatctggcagaaggacggcgtgaagaagctgaacctgtacctgatcatcaactacttcaagggcggcaagctgcggttcaagaagatcaaacctgaagccttcgaagccaacagattctacaccgtgatcaacaaaaagagcggcgagatcgtgcccatggaggtgaacttcaacttcgacgaccccaacctgatcatcctgcctctggcctttggcaagagacagggcagagaattcatctggaacgacctgctgtccctggaaaccggcagcctgaagctggccaacggaagagtgatcgagaagacactgtacaacagaagaacccggcaggatgagcctgccctgttcgtggccctgaccttcgagcggcgggaggtcctggactcctccaatatcaaaccaatgaacctgatcggcgtggcaagaggcgaaaacatccccgccgtgatcgccctgaccgaccccgagggctgcccactgagccggtttaaggatagcctgggaaacccaacccacatcctgagaatcggcgagagctataaggagaagcagcggaccatccaggccaagaaggaggtggagcagcggagagccggcggctacagccggaagtacgccagcaaagccaagaatctggcagacgatatggtgagaaacaccgctagagatctgctgtactacgccgtgacccaggatgccatgctgatcttcgccaacctgagccggggcttcggccggcagggcaagcggaccttcatggccgagagacagtacacacggatggaggactggctgaccgccaagctggcctacgagggcctgagcaagacctacctgtccaagacactggcccagtacacctccaagacatgcagcaactgtgggtttaccatcaccagcgccgactacgacagggtgctggagaagctgaagaagacagcaacaggctggatgaccacaattaacggcaaggagctgaaggtggagggccagattacctactacaacagatacaagagacagaacgtagtcaaggacctgtccgtcgagctggatagactgagcgaagaatctgtgaacaacgacatctcctcctggacaaagggcagaagcggagaagctctgagcctcctgaagaaaagattctcccatagacccgtgcaggagaagttcgtgtgcctgaactgcggcttcgagacacacgcagccgagcaagccgccctgaacatcgccagatcctggctgttcctgcggagccaggagtacaagaaataccagacaaacaagacaaccggcaacaccgataagagagccttcgtcgagacctggcagtccttttaccggaagaagcttaaggaggtgtggaaacctgccgtgcggtctggcggatctggcggaggctccaccagccccaagaaaaagagaaaagtctaagctgccttctgcggggcttgccttctggccatgcccttcttctctcccttgcacctgtacctcttggtctttgaataaagcctgagtaggaaggctagcaaaaaaaaaaaaaaaaaaaaaaaaaaaaaaaaaaaaaaaaaaaaaaaaaaaaaaaaaaaaaaaaaaaaaaaaaaaaaaaagcccagccggctccccaacctctaccgaggagggcacctctgagtccgccacccccgagagcggccctggcacctccaccgagcccagcgagggcagcgcacccggcagccctgccggcagccccacctccacagaggagggaaccagcaccgagcccagcgaaggcagcgccccaggcaccagcaccgagcctagtgagcaggagattaaacggatcaacaagatcagaagaagacttgtgaaagacagcaacaccaagaaggccggcaagacaggccccatgaaaaccctgctggttagagtgatgacacccgatctgagagagcggctggaaaacctgagaaagaagcctgaaaatatcccccagcccatcagcaatacatctagagccaacctgaataagctgctgaccgattacaccgaaatgaagaaggcgatcctgcatgtgtactgggaagagttccagaaggaccctgtgggcctgatgagccgggtggcccagcctgccagcaagaagatcgatcagaacaagctgaaacctgagatggacgagaagggcaacctgaccaccgccggctttgcctgctctcagtgtggccagcccctgttcgtgtacaagctggagcaggtgtctgagaagggcaaggcttacaccaactacttcggacggtgcaatgtggccgagcacgaaaagctgatcctgctggcccagctgaagcccgagaaggatagcgacgaagccgtgacatatagcctgggaaagtttgggcagagggccctggatttctacagcattcatgtgaccaaggagtccacccaccccgtgaagcccctggcccagatcgccggaaacagatacgcctccggacctgtgggaaaggccctgagcgacgcatgtatgggcacaatcgcctccttcctgtctaagtaccaggacatcatcatcgaacaccagaaggtggtgaagggcaaccagaagagactggagagcctgcgggagctggccggcaaggaaaacctggaataccctagcgtgaccctgccacctcagcctcacaccaaggagggcgttgatgcctacaacgaagtgatcgcccgggtgcgaatgtgggtgaacctgaacctgtggcagaagctgaagctaagcagagatgatgccaagcctctgctgagactgaagggattcccttcctttcctctggtcgagagacaggccaacgaagtggactggtgggacatggtgtgtaacgtgaagaagctgatcaacgagaaaaaggaggatggcaaggtgttttggcagaatctggctggctacaagagacaggaagccctgagaccatacctgagcagcgaggaagatcggaagaagggaaagaaattcgctcggtaccagctgggcgacctgctgctgcacctggaaaagaagcacggcgaggactggggaaaggtgtacgacgaggcctgggagcggattgacaagaaagtggaaggcctgagcaagcacatcaagctggaagaggaacggagaagcgaggacgcccagagcaaggccgccctgaccgactggctgcgggctaaggccagcttcgtgatcgagggcctgaaggaggccgacaaggacgagttctgcagatgcgagctgaagctgcagaagtggtacggggacctgcggggaaagcccttcgccatcgaagccgagaacagcatcctggacatcagcggcttcagcaagcagtacaactgtgccttcatctggcagaaggacggcgtgaagaagctgaacctgtacctgatcatcaactacttcaagggcggcaagctgcggttcaagaagatcaaacctgaagccttcgaagccaacagattctacaccgtgatcaacaaaaagagcggcgagatcgtgcccatggaggtgaacttcaacttcgacgaccccaacctgatcatcctgcctctggcctttggcaagagacagggcagagaattcatctggaacgacctgctgtccctggaaaccggcagcctgaagctggccaacggaagagtgatcgagaagacactgtacaacagaagaacccggcaggatgagcctgccctgttcgtggccctgaccttcgagcggcgggaggtcctggactcctccaatatcaaaccaatgaacctgatcggcgtggcaagaggcgaaaacatccccgccgtgatcgccctgaccgaccccgagggctgcccactgagccggtttaaggatagcctgggaaacccaacccacatcctgagaatcggcgagagctataaggagaagcagcggaccatccaggccaagaaggaggtggagcagcggagagccggcggctacagccggaagtacgccagcaaagccaagaatctggcagacgatatggtgagaaacaccgctagagatctgctgtactacgccgtgacccaggatgccatgctgatcttcgccaacctgagccggggcttcggccggcagggcaagcggaccttcatggccgagagacagtacacacggatggaggactggctgaccgccaagctggcctacgagggcctgagcaagacctacctgtccaagacactggcccagtacacctccaagacatgcagcaactgtgggtttaccatcaccagcgccgactacgacagggtgctggagaagctgaagaagacagcaacaggctggatgaccacaattaacggcaaggagctgaaggtggagggccagattacctactacaacagatacaagagacagaacgtagtcaaggacctgtccgtcgagctggatagactgagcgaagaatctgtgaacaacgacatctcctcctggacaaagggcagaagcggagaagctctgagcctcctgaagaaaagattctcccatagacccgtgcaggagaagttcgtgtgcctgaactgcggcttcgagacacacgcagccgagcaagccgccctgaacatcgccagatcctggctgttcctgcggagccaggagtacaagaaataccagacaaacaagacaaccggcaacaccgataagagagccttcgtcgagacctggcagtccttttaccggaagaagcttaaggaggtgtggaaacctgccgtgcggtctggcggatctggcggaggctccaccagccccaagaaaaagagaaaagtctaagctgccttctgcggggcttgccttctggccatgcccttcttctctcccttgcacctgtacctcttggtctttgaataaagcctgagtaggaaggctagcaaaaaaaaaaaaaaaaaaaaaaaaaaaaaaaaaaaaaaaaaaaaaaaaaaaaaaaaaaaaaaaaaaaaaaaaaaaaaaaa

SEQ ID NO: 9860 - RNA, 8787 nt, synthetic construct
  source 1..8787: mol_type = other RNA
aggaaataagagagaaaagaagagtaagaagaaatataagagccaccatggcccctaagaagaagcgtaaagtgagccggatgaaccacgaccaggagttcgacccccctaaggtgtaccctcccgtccccgccgagaagagaaagcccatccgggtcctgagcctgttcgatggcatcgccaccggtctgctggtgctgaaggacctgggcatccaggtggataggtacattgcctccgaggtgtgcgaggactccatcaccgtgggaatggtgcgtcatcagggcaagatcatgtacgtgggcgacgtgcggagcgtgacacagaagcatatccaggagtggggccctttcgacctggtgatcggcggcagcccttgcaatgacctgagcatcgtgaacccagcccggaagggcctgtacgagggaaccggcagactgttcttcgagttttacagactgctgcacgacgcccggcctaaggaaggcgacgaccggcccttcttttggctgttcgagaatgtggtggccatgggagtcagcgacaagcgggatattagccggttcctggagagcaaccccgtgatgatcgatgccaaggaagtgagcgccgcccaccgggccagatacttctggggcaatctgcctggcatgaacagacccctggccagcaccgtgaacgacaagctggagctgcaggagtgcctggagcacggccggatcgccaagttcagcaaggtgagaaccatcaccacccgaagcaacagcatcaaacaaggcaaggaccagcactttcctgtgttcatgaacgagaaggaggacatcctgtggtgtaccgagatggagagagtgttcgggttcccagtccactacacagatgtcagcaacatgtctagactggccagacagagactgctgggaagaagctggtccgtccctgtgatcagacacctgttcgcccctctgaaggagtacttcgcctgcgtgagcagcggcaacagcaacgccaacagccggggccccagcttctctagcggcctggtgccactgtccctgagagggagccacatgggccccatggagatctacaaaaccgtgagcgcctggaagcggcagcctgtgcgcgtgctgagcctgtttcggaatatcgataaagtcctgaaaagcctgggattcctggagagcggctctggctccggcggtggcaccctgaagtacgtggaggatgtgacaaacgtggtcagacgggatgtggagaagtggggccccttcgatctggtgtacggcagcacccaacccctgggcagctcttgtgaccggtgccctggctggtacatgtttcagttccaccggatcctgcagtacgccctgccgagacaggagtcccagcggccattcttttggattttcatggacaacttgctgctgaccgaggatgaccaggaaactaccactcggttcctgcagaccgaagccgtgaccctgcaggacgtgagaggccgggactaccagaacgccatgcgggtgtggtccaacatccctggactgaaaagcaagcacgcacctctgacccctaaagaagaggagtacctgcaggcccaggtgcggagcagaagcaagctggacgcccctaaggtggatctgctggtgaagaattgcctcctgcccctgagagagtacttcaagtatttcagccagaatagtctgcccctgggaggcagcggcggcggcggcgaggaggccgtgaccttcagggacgtggccctggacttcacctgggaggagtggggctgcctgagcgccgcccagagggagctgtacaaggacgtgatgctggagaactacaggaacctggtgagcctgggcctgcccggccccaagcccggcctgatcagctggctggagggcgaggaggagccccacccctgggacagcctggtgcacgccgccaggagcaccagcctgagcaaggccggcggcccaagcagcggcgcccctcctcccagcggcggcaggcggcccaagcagcggcgcccctcctcccagcggcggcagcccagccggctccccaacctctaccgaggagggcacctctgagtccgccacccccgagagcggccctggcacctccaccgagcccagcgagggcagcgcacccggcagccctgccggcagccccacctccacagaggagggaaccagcaccgagcccagcgaaggcagcgccccaggcaccagcaccgagcctagtgagcaggagattaaacggatcaacaagatcagaagaagacttgtgaaagacagcaacaccaagaaggccggcaagacaggccccatgaaaaccctgctggttagagtgatgacacccgatctgagagagcggctggaaaacctgagaaagaagcctgaaaatatcccccagcccatcagcaatacatctagagccaacctgaataagctgctgaccgattacaccgaaatgaagaaggcgatcctgcatgtgtactgggaagagttccagaaggaccctgtgggcctgatgagccgggtggcccagcctgccagcaagaagatcgatcagaacaagctgaaacctgagatggacgagaagggcaacctgaccaccgccggctttgcctgctctcagtgtggccagcccctgttcgtgtacaagctggagcaggtgtctgagaagggcaaggcttacaccaactacttcggacggtgcaatgtggccgagcacgaaaagctgatcctgctggcccagctgaagcccgagaaggatagcgacgaagccgtgacatatagcctgggaaagtttgggcagagggccctggatttctacagcattcatgtgaccaaggagtccacccaccccgtgaagcccctggcccagatcgccggaaacagatacgcctccggacctgtgggaaaggccctgagcgacgcatgtatgggcacaatcgcctccttcctgtctaagtaccaggacatcatcatcgaacaccagaaggtggtgaagggcaaccagaagagactggagagcctgcgggagctggccggcaaggaaaacctggaataccctagcgtgaccctgccacctcagcctcacaccaaggagggcgttgatgcctacaacgaagtgatcgcccgggtgcgaatgtgggtgaacctgaacctgtggcagaagctgaagctaagcagagatgatgccaagcctctgctgagactgaagggattcccttcctttcctctggtcgagagacaggccaacgaagtggactggtgggacatggtgtgtaacgtgaagaagctgatcaacgagaaaaaggaggatggcaaggtgttttggcagaatctggctggctacaagagacaggaagccctgagaccatacctgagcagcgaggaagatcggaagaagggaaagaaattcgctcggtaccagctgggcgacctgctgctgcacctggaaaagaagcacggcgaggactggggaaaggtgtacgacgaggcctgggagcggattgacaagaaagtggaaggcctgagcaagcacatcaagctggaagaggaacggagaagcgaggacgcccagagcaaggccgccctgaccgactggctgcgggctaaggccagcttcgtgatcgagggcctgaaggaggccgacaaggacgagttctgcagatgcgagctgaagctgcagaagtggtacggggacctgcggggaaagcccttcgccatcgaagccgagaacagcatcctggacatcagcggcttcagcaagcagtacaactgtgccttcatctggcagaaggacggcgtgaagaagctgaacctgtacctgatcatcaactacttcaagggcggcaagctgcggttcaagaagatcaaacctgaagccttcgaagccaacagattctacaccgtgatcaacaaaaagagcggcgagatcgtgcccatggaggtgaacttcaacttcgacgaccccaacctgatcatcctgcctctggcctttggcaagagacagggcagagaattcatctggaacgacctgctgtccctggaaaccggcagcctgaagctggccaacggaagagtgatcgagaagacactgtacaacagaagaacccggcaggatgagcctgccctgttcgtggccctgaccttcgagcggcgggaggtcctggactcctccaatatcaaaccaatgaacctgatcggcgtggcaagaggcgaaaacatccccgccgtgatcgccctgaccgaccccgagggctgcccactgagccggtttaaggatagcctgggaaacccaacccacatcctgagaatcggcgagagctataaggagaagcagcggaccatccaggccaagaaggaggtggagcagcggagagccggcggctacagccggaagtacgccagcaaagccaagaatctggcagacgatatggtgagaaacaccgctagagatctgctgtactacgccgtgacccaggatgccatgctgatcttcgccaacctgagccggggcttcggccggcagggcaagcggaccttcatggccgagagacagtacacacggatggaggactggctgaccgccaagctggcctacgagggcctgagcaagacctacctgtccaagacactggcccagtacacctccaagacatgcagcaactgtgggtttaccatcaccagcgccgactacgacagggtgctggagaagctgaagaagacagcaacaggctggatgaccacaattaacggcaaggagctgaaggtggagggccagattacctactacaacagatacaagagacagaacgtagtcaaggacctgtccgtcgagctggatagactgagcgaagaatctgtgaacaacgacatctcctcctggacaaagggcagaagcggagaagctctgagcctcctgaagaaaagattctcccatagacccgtgcaggagaagttcgtgtgcctgaactgcggcttcgagacacacgcagccgagcaagccgccctgaacatcgccagatcctggctgttcctgcggagccaggagtacaagaaataccagacaaacaagacaaccggcaacaccgataagagagccttcgtcgagacctggcagtccttttaccggaagaagcttaaggaggtgtggaaacctgccgtgcggtctggcggatctggcggaggctccaccagccccaagaaaaagagaaaagtctaagctgccttctgcggggcttgccttctggccatgcccttcttctctcccttgcacctgtacctcttggtctttgaataaagcctgagtaggaaggctagcaaaaaaaaaaaaaaaaaaaaaaaaaaaaaaaaaaaaaaaaaaaaaaaaaaaaaaaaaaaaaaaaaaaaaaaaaaaaaaaagcccagccggctccccaacctctaccgaggagggcacctctgagtccgccacccccgagagcggccctggcacctccaccgagcccagcgagggcagcgcacccggcagccctgccggcagccccacctccacagaggagggaaccagcaccgagcccagcgaaggcagcgccccaggcaccagcaccgagcctagtgagcaggagattaaacggatcaacaagatcagaagaagacttgtgaaagacagcaacaccaagaaggccggcaagacaggccccatgaaaaccctgctggttagagtgatgacacccgatctgagagagcggctggaaaacctgagaaagaagcctgaaaatatcccccagcccatcagcaatacatctagagccaacctgaataagctgctgaccgattacaccgaaatgaagaaggcgatcctgcatgtgtactgggaagagttccagaaggaccctgtgggcctgatgagccgggtggcccagcctgccagcaagaagatcgatcagaacaagctgaaacctgagatggacgagaagggcaacctgaccaccgccggctttgcctgctctcagtgtggccagcccctgttcgtgtacaagctggagcaggtgtctgagaagggcaaggcttacaccaactacttcggacggtgcaatgtggccgagcacgaaaagctgatcctgctggcccagctgaagcccgagaaggatagcgacgaagccgtgacatatagcctgggaaagtttgggcagagggccctggatttctacagcattcatgtgaccaaggagtccacccaccccgtgaagcccctggcccagatcgccggaaacagatacgcctccggacctgtgggaaaggccctgagcgacgcatgtatgggcacaatcgcctccttcctgtctaagtaccaggacatcatcatcgaacaccagaaggtggtgaagggcaaccagaagagactggagagcctgcgggagctggccggcaaggaaaacctggaataccctagcgtgaccctgccacctcagcctcacaccaaggagggcgttgatgcctacaacgaagtgatcgcccgggtgcgaatgtgggtgaacctgaacctgtggcagaagctgaagctaagcagagatgatgccaagcctctgctgagactgaagggattcccttcctttcctctggtcgagagacaggccaacgaagtggactggtgggacatggtgtgtaacgtgaagaagctgatcaacgagaaaaaggaggatggcaaggtgttttggcagaatctggctggctacaagagacaggaagccctgagaccatacctgagcagcgaggaagatcggaagaagggaaagaaattcgctcggtaccagctgggcgacctgctgctgcacctggaaaagaagcacggcgaggactggggaaaggtgtacgacgaggcctgggagcggattgacaagaaagtggaaggcctgagcaagcacatcaagctggaagaggaacggagaagcgaggacgcccagagcaaggccgccctgaccgactggctgcgggctaaggccagcttcgtgatcgagggcctgaaggaggccgacaaggacgagttctgcagatgcgagctgaagctgcagaagtggtacggggacctgcggggaaagcccttcgccatcgaagccgagaacagcatcctggacatcagcggcttcagcaagcagtacaactgtgccttcatctggcagaaggacggcgtgaagaagctgaacctgtacctgatcatcaactacttcaagggcggcaagctgcggttcaagaagatcaaacctgaagccttcgaagccaacagattctacaccgtgatcaacaaaaagagcggcgagatcgtgcccatggaggtgaacttcaacttcgacgaccccaacctgatcatcctgcctctggcctttggcaagagacagggcagagaattcatctggaacgacctgctgtccctggaaaccggcagcctgaagctggccaacggaagagtgatcgagaagacactgtacaacagaagaacccggcaggatgagcctgccctgttcgtggccctgaccttcgagcggcgggaggtcctggactcctccaatatcaaaccaatgaacctgatcggcgtggcaagaggcgaaaacatccccgccgtgatcgccctgaccgaccccgagggctgcccactgagccggtttaaggatagcctgggaaacccaacccacatcctgagaatcggcgagagctataaggagaagcagcggaccatccaggccaagaaggaggtggagcagcggagagccggcggctacagccggaagtacgccagcaaagccaagaatctggcagacgatatggtgagaaacaccgctagagatctgctgtactacgccgtgacccaggatgccatgctgatcttcgccaacctgagccggggcttcggccggcagggcaagcggaccttcatggccgagagacagtacacacggatggaggactggctgaccgccaagctggcctacgagggcctgagcaagacctacctgtccaagacactggcccagtacacctccaagacatgcagcaactgtgggtttaccatcaccagcgccgactacgacagggtgctggagaagctgaagaagacagcaacaggctggatgaccacaattaacggcaaggagctgaaggtggagggccagattacctactacaacagatacaagagacagaacgtagtcaaggacctgtccgtcgagctggatagactgagcgaagaatctgtgaacaacgacatctcctcctggacaaagggcagaagcggagaagctctgagcctcctgaagaaaagattctcccatagacccgtgcaggagaagttcgtgtgcctgaactgcggcttcgagacacacgcagccgagcaagccgccctgaacatcgccagatcctggctgttcctgcggagccaggagtacaagaaataccagacaaacaagacaaccggcaacaccgataagagagccttcgtcgagacctggcagtccttttaccggaagaagcttaaggaggtgtggaaacctgccgtgcggtctggcggatctggcggaggctccaccagccccaagaaaaagagaaaagtctaagctgccttctgcggggcttgccttctggccatgcccttcttctctcccttgcacctgtacctcttggtctttgaataaagcctgagtaggaaggctagcaaaaaaaaaaaaaaaaaaaaaaaaaaaaaaaaaaaaaaaaaaaaaaaaaaaaaaaaaaaaaaaaaaaaaaaaaaaaaaaa

SEQ ID NO: 9861 - RNA, 8787 nt, synthetic construct
  source 1..8787: mol_type = other RNA
aggaaataagagagaaaagaagagtaagaagaaatataagagccaccatggcccctaagaagaagcgtaaagtgagccggatgaaccacgaccaggagttcgacccccctaaggtgtaccctcccgtccccgccgagaagagaaagcccatccgggtcctgagcctgttcgatggcatcgccaccggtctgctggtgctgaaggacctgggcatccaggtggataggtacattgcctccgaggtgtgcgaggactccatcaccgtgggaatggtgcgtcatcagggcaagatcatgtacgtgggcgacgtgcggagcgtgacacagaagcatatccaggagtggggccctttcgacctggtgatcggcggcagcccttgcaatgacctgagcatcgtgaacccagcccggaagggcctgtacgagggaaccggcagactgttcttcgagttttacagactgctgcacgacgcccggcctaaggaaggcgacgaccggcccttcttttggctgttcgagaatgtggtggccatgggagtcagcgacaagcgggatattagccggttcctggagagcaaccccgtgatgatcgatgccaaggaagtgagcgccgcccaccgggccagatacttctggggcaatctgcctggcatgaacagacccctggccagcaccgtgaacgacaagctggagctgcaggagtgcctggagcacggccggatcgccaagttcagcaaggtgagaaccatcaccacccgaagcaacagcatcaaacaaggcaaggaccagcactttcctgtgttcatgaacgagaaggaggacatcctgtggtgtaccgagatggagagagtgttcgggttcccagtccactacacagatgtcagcaacatgtctagactggccagacagagactgctgggaagaagctggtccgtccctgtgatcagacacctgttcgcccctctgaaggagtacttcgcctgcgtgagcagcggcaacagcaacgccaacagccggggccccagcttctctagcggcctggtgccactgtccctgagagggagccacatgggccccatggagatctacaaaaccgtgagcgcctggaagcggcagcctgtgcgcgtgctgagcctgtttcggaatatcgataaagtcctgaaaagcctgggattcctggagagcggctctggctccggcggtggcaccctgaagtacgtggaggatgtgacaaacgtggtcagacgggatgtggagaagtggggccccttcgatctggtgtacggcagcacccaacccctgggcagctcttgtgaccggtgccctggctggtacatgtttcagttccaccggatcctgcagtacgccctgccgagacaggagtcccagcggccattcttttggattttcatggacaacttgctgctgaccgaggatgaccaggaaactaccactcggttcctgcagaccgaagccgtgaccctgcaggacgtgagaggccgggactaccagaacgccatgcgggtgtggtccaacatccctggactgaaaagcaagcacgcacctctgacccctaaagaagaggagtacctgcaggcccaggtgcggagcagaagcaagctggacgcccctaaggtggatctgctggtgaagaattgcctcctgcccctgagagagtacttcaagtatttcagccagaatagtctgcccctgggaggcagcggcggcggcagccagaccctggtgaccttcaaggacgtgttcgtggacttcaccagggaggagtggaagctgctggacaccgcccagcagatcgtgtacaggaacgtgatgctggagaactacaagaacctggtgagcctgggctaccagctgaccaagcccgacgtgatcctgaggctggagaagggcgaggagccctgggtggtggagaggggcatccaccaggagacccaccccgacagcgagaccgccggcggcccaagcagcggcgcccctcctcccagcggcggcaggcggcccaagcagcggcgcccctcctcccagcggcggcagcccagccggctccccaacctctaccgaggagggcacctctgagtccgccacccccgagagcggccctggcacctccaccgagcccagcgagggcagcgcacccggcagccctgccggcagccccacctccacagaggagggaaccagcaccgagcccagcgaaggcagcgccccaggcaccagcaccgagcctagtgagcaggagattaaacggatcaacaagatcagaagaagacttgtgaaagacagcaacaccaagaaggccggcaagacaggccccatgaaaaccctgctggttagagtgatgacacccgatctgagagagcggctggaaaacctgagaaagaagcctgaaaatatcccccagcccatcagcaatacatctagagccaacctgaataagctgctgaccgattacaccgaaatgaagaaggcgatcctgcatgtgtactgggaagagttccagaaggaccctgtgggcctgatgagccgggtggcccagcctgccagcaagaagatcgatcagaacaagctgaaacctgagatggacgagaagggcaacctgaccaccgccggctttgcctgctctcagtgtggccagcccctgttcgtgtacaagctggagcaggtgtctgagaagggcaaggcttacaccaactacttcggacggtgcaatgtggccgagcacgaaaagctgatcctgctggcccagctgaagcccgagaaggatagcgacgaagccgtgacatatagcctgggaaagtttgggcagagggccctggatttctacagcattcatgtgaccaaggagtccacccaccccgtgaagcccctggcccagatcgccggaaacagatacgcctccggacctgtgggaaaggccctgagcgacgcatgtatgggcacaatcgcctccttcctgtctaagtaccaggacatcatcatcgaacaccagaaggtggtgaagggcaaccagaagagactggagagcctgcgggagctggccggcaaggaaaacctggaataccctagcgtgaccctgccacctcagcctcacaccaaggagggcgttgatgcctacaacgaagtgatcgcccgggtgcgaatgtgggtgaacctgaacctgtggcagaagctgaagctaagcagagatgatgccaagcctctgctgagactgaagggattcccttcctttcctctggtcgagagacaggccaacgaagtggactggtgggacatggtgtgtaacgtgaagaagctgatcaacgagaaaaaggaggatggcaaggtgttttggcagaatctggctggctacaagagacaggaagccctgagaccatacctgagcagcgaggaagatcggaagaagggaaagaaattcgctcggtaccagctgggcgacctgctgctgcacctggaaaagaagcacggcgaggactggggaaaggtgtacgacgaggcctgggagcggattgacaagaaagtggaaggcctgagcaagcacatcaagctggaagaggaacggagaagcgaggacgcccagagcaaggccgccctgaccgactggctgcgggctaaggccagcttcgtgatcgagggcctgaaggaggccgacaaggacgagttctgcagatgcgagctgaagctgcagaagtggtacggggacctgcggggaaagcccttcgccatcgaagccgagaacagcatcctggacatcagcggcttcagcaagcagtacaactgtgccttcatctggcagaaggacggcgtgaagaagctgaacctgtacctgatcatcaactacttcaagggcggcaagctgcggttcaagaagatcaaacctgaagccttcgaagccaacagattctacaccgtgatcaacaaaaagagcggcgagatcgtgcccatggaggtgaacttcaacttcgacgaccccaacctgatcatcctgcctctggcctttggcaagagacagggcagagaattcatctggaacgacctgctgtccctggaaaccggcagcctgaagctggccaacggaagagtgatcgagaagacactgtacaacagaagaacccggcaggatgagcctgccctgttcgtggccctgaccttcgagcggcgggaggtcctggactcctccaatatcaaaccaatgaacctgatcggcgtggcaagaggcgaaaacatccccgccgtgatcgccctgaccgaccccgagggctgcccactgagccggtttaaggatagcctgggaaacccaacccacatcctgagaatcggcgagagctataaggagaagcagcggaccatccaggccaagaaggaggtggagcagcggagagccggcggctacagccggaagtacgccagcaaagccaagaatctggcagacgatatggtgagaaacaccgctagagatctgctgtactacgccgtgacccaggatgccatgctgatcttcgccaacctgagccggggcttcggccggcagggcaagcggaccttcatggccgagagacagtacacacggatggaggactggctgaccgccaagctggcctacgagggcctgagcaagacctacctgtccaagacactggcccagtacacctccaagacatgcagcaactgtgggtttaccatcaccagcgccgactacgacagggtgctggagaagctgaagaagacagcaacaggctggatgaccacaattaacggcaaggagctgaaggtggagggccagattacctactacaacagatacaagagacagaacgtagtcaaggacctgtccgtcgagctggatagactgagcgaagaatctgtgaacaacgacatctcctcctggacaaagggcagaagcggagaagctctgagcctcctgaagaaaagattctcccatagacccgtgcaggagaagttcgtgtgcctgaactgcggcttcgagacacacgcagccgagcaagccgccctgaacatcgccagatcctggctgttcctgcggagccaggagtacaagaaataccagacaaacaagacaaccggcaacaccgataagagagccttcgtcgagacctggcagtccttttaccggaagaagcttaaggaggtgtggaaacctgccgtgcggtctggcggatctggcggaggctccaccagccccaagaaaaagagaaaagtctaagctgccttctgcggggcttgccttctggccatgcccttcttctctcccttgcacctgtacctcttggtctttgaataaagcctgagtaggaaggctagcaaaaaaaaaaaaaaaaaaaaaaaaaaaaaaaaaaaaaaaaaaaaaaaaaaaaaaaaaaaaaaaaaaaaaaaaaaaaaaaagcccagccggctccccaacctctaccgaggagggcacctctgagtccgccacccccgagagcggccctggcacctccaccgagcccagcgagggcagcgcacccggcagccctgccggcagccccacctccacagaggagggaaccagcaccgagcccagcgaaggcagcgccccaggcaccagcaccgagcctagtgagcaggagattaaacggatcaacaagatcagaagaagacttgtgaaagacagcaacaccaagaaggccggcaagacaggccccatgaaaaccctgctggttagagtgatgacacccgatctgagagagcggctggaaaacctgagaaagaagcctgaaaatatcccccagcccatcagcaatacatctagagccaacctgaataagctgctgaccgattacaccgaaatgaagaaggcgatcctgcatgtgtactgggaagagttccagaaggaccctgtgggcctgatgagccgggtggcccagcctgccagcaagaagatcgatcagaacaagctgaaacctgagatggacgagaagggcaacctgaccaccgccggctttgcctgctctcagtgtggccagcccctgttcgtgtacaagctggagcaggtgtctgagaagggcaaggcttacaccaactacttcggacggtgcaatgtggccgagcacgaaaagctgatcctgctggcccagctgaagcccgagaaggatagcgacgaagccgtgacatatagcctgggaaagtttgggcagagggccctggatttctacagcattcatgtgaccaaggagtccacccaccccgtgaagcccctggcccagatcgccggaaacagatacgcctccggacctgtgggaaaggccctgagcgacgcatgtatgggcacaatcgcctccttcctgtctaagtaccaggacatcatcatcgaacaccagaaggtggtgaagggcaaccagaagagactggagagcctgcgggagctggccggcaaggaaaacctggaataccctagcgtgaccctgccacctcagcctcacaccaaggagggcgttgatgcctacaacgaagtgatcgcccgggtgcgaatgtgggtgaacctgaacctgtggcagaagctgaagctaagcagagatgatgccaagcctctgctgagactgaagggattcccttcctttcctctggtcgagagacaggccaacgaagtggactggtgggacatggtgtgtaacgtgaagaagctgatcaacgagaaaaaggaggatggcaaggtgttttggcagaatctggctggctacaagagacaggaagccctgagaccatacctgagcagcgaggaagatcggaagaagggaaagaaattcgctcggtaccagctgggcgacctgctgctgcacctggaaaagaagcacggcgaggactggggaaaggtgtacgacgaggcctgggagcggattgacaagaaagtggaaggcctgagcaagcacatcaagctggaagaggaacggagaagcgaggacgcccagagcaaggccgccctgaccgactggctgcgggctaaggccagcttcgtgatcgagggcctgaaggaggccgacaaggacgagttctgcagatgcgagctgaagctgcagaagtggtacggggacctgcggggaaagcccttcgccatcgaagccgagaacagcatcctggacatcagcggcttcagcaagcagtacaactgtgccttcatctggcagaaggacggcgtgaagaagctgaacctgtacctgatcatcaactacttcaagggcggcaagctgcggttcaagaagatcaaacctgaagccttcgaagccaacagattctacaccgtgatcaacaaaaagagcggcgagatcgtgcccatggaggtgaacttcaacttcgacgaccccaacctgatcatcctgcctctggcctttggcaagagacagggcagagaattcatctggaacgacctgctgtccctggaaaccggcagcctgaagctggccaacggaagagtgatcgagaagacactgtacaacagaagaacccggcaggatgagcctgccctgttcgtggccctgaccttcgagcggcgggaggtcctggactcctccaatatcaaaccaatgaacctgatcggcgtggcaagaggcgaaaacatccccgccgtgatcgccctgaccgaccccgagggctgcccactgagccggtttaaggatagcctgggaaacccaacccacatcctgagaatcggcgagagctataaggagaagcagcggaccatccaggccaagaaggaggtggagcagcggagagccggcggctacagccggaagtacgccagcaaagccaagaatctggcagacgatatggtgagaaacaccgctagagatctgctgtactacgccgtgacccaggatgccatgctgatcttcgccaacctgagccggggcttcggccggcagggcaagcggaccttcatggccgagagacagtacacacggatggaggactggctgaccgccaagctggcctacgagggcctgagcaagacctacctgtccaagacactggcccagtacacctccaagacatgcagcaactgtgggtttaccatcaccagcgccgactacgacagggtgctggagaagctgaagaagacagcaacaggctggatgaccacaattaacggcaaggagctgaaggtggagggccagattacctactacaacagatacaagagacagaacgtagtcaaggacctgtccgtcgagctggatagactgagcgaagaatctgtgaacaacgacatctcctcctggacaaagggcagaagcggagaagctctgagcctcctgaagaaaagattctcccatagacccgtgcaggagaagttcgtgtgcctgaactgcggcttcgagacacacgcagccgagcaagccgccctgaacatcgccagatcctggctgttcctgcggagccaggagtacaagaaataccagacaaacaagacaaccggcaacaccgataagagagccttcgtcgagacctggcagtccttttaccggaagaagcttaaggaggtgtggaaacctgccgtgcggtctggcggatctggcggaggctccaccagccccaagaaaaagagaaaagtctaagctgccttctgcggggcttgccttctggccatgcccttcttctctcccttgcacctgtacctcttggtctttgaataaagcctgagtaggaaggctagcaaaaaaaaaaaaaaaaaaaaaaaaaaaaaaaaaaaaaaaaaaaaaaaaaaaaaaaaaaaaaaaaaaaaaaaaaaaaaaaa

SEQ ID NO: 9862 - RNA, 8787 nt, synthetic construct
  source 1..8787: mol_type = other RNA
aggaaataagagagaaaagaagagtaagaagaaatataagagccaccatggcccctaagaagaagcgtaaagtgagccggatgaaccacgaccaggagttcgacccccctaaggtgtaccctcccgtccccgccgagaagagaaagcccatccgggtcctgagcctgttcgatggcatcgccaccggtctgctggtgctgaaggacctgggcatccaggtggataggtacattgcctccgaggtgtgcgaggactccatcaccgtgggaatggtgcgtcatcagggcaagatcatgtacgtgggcgacgtgcggagcgtgacacagaagcatatccaggagtggggccctttcgacctggtgatcggcggcagcccttgcaatgacctgagcatcgtgaacccagcccggaagggcctgtacgagggaaccggcagactgttcttcgagttttacagactgctgcacgacgcccggcctaaggaaggcgacgaccggcccttcttttggctgttcgagaatgtggtggccatgggagtcagcgacaagcgggatattagccggttcctggagagcaaccccgtgatgatcgatgccaaggaagtgagcgccgcccaccgggccagatacttctggggcaatctgcctggcatgaacagacccctggccagcaccgtgaacgacaagctggagctgcaggagtgcctggagcacggccggatcgccaagttcagcaaggtgagaaccatcaccacccgaagcaacagcatcaaacaaggcaaggaccagcactttcctgtgttcatgaacgagaaggaggacatcctgtggtgtaccgagatggagagagtgttcgggttcccagtccactacacagatgtcagcaacatgtctagactggccagacagagactgctgggaagaagctggtccgtccctgtgatcagacacctgttcgcccctctgaaggagtacttcgcctgcgtgagcagcggcaacagcaacgccaacagccggggccccagcttctctagcggcctggtgccactgtccctgagagggagccacatgggccccatggagatctacaaaaccgtgagcgcctggaagcggcagcctgtgcgcgtgctgagcctgtttcggaatatcgataaagtcctgaaaagcctgggattcctggagagcggctctggctccggcggtggcaccctgaagtacgtggaggatgtgacaaacgtggtcagacgggatgtggagaagtggggccccttcgatctggtgtacggcagcacccaacccctgggcagctcttgtgaccggtgccctggctggtacatgtttcagttccaccggatcctgcagtacgccctgccgagacaggagtcccagcggccattcttttggattttcatggacaacttgctgctgaccgaggatgaccaggaaactaccactcggttcctgcagaccgaagccgtgaccctgcaggacgtgagaggccgggactaccagaacgccatgcgggtgtggtccaacatccctggactgaaaagcaagcacgcacctctgacccctaaagaagaggagtacctgcaggcccaggtgcggagcagaagcaagctggacgcccctaaggtggatctgctggtgaagaattgcctcctgcccctgagagagtacttcaagtatttcagccagaatagtctgcccctgggaggcagcggcggcggccccaaggcccccgtgaccttcggcgacgtggccatctacttcagcaaggaggagtgggagtgcctgagccccaaccagaaggacctgtacgaggacgtgatgatggagaactaccagaacctggccagcatcggcttcagctgcaggaggcccaacgtgatcaccctgctggagaagggcgaggccccctggatggccgagcccctgaggaggaggcagggccccgacagcggcagcaagaagggcggcccaagcagcggcgcccctcctcccagcggcggcaggcggcccaagcagcggcgcccctcctcccagcggcggcagcccagccggctccccaacctctaccgaggagggcacctctgagtccgccacccccgagagcggccctggcacctccaccgagcccagcgagggcagcgcacccggcagccctgccggcagccccacctccacagaggagggaaccagcaccgagcccagcgaaggcagcgccccaggcaccagcaccgagcctagtgagcaggagattaaacggatcaacaagatcagaagaagacttgtgaaagacagcaacaccaagaaggccggcaagacaggccccatgaaaaccctgctggttagagtgatgacacccgatctgagagagcggctggaaaacctgagaaagaagcctgaaaatatcccccagcccatcagcaatacatctagagccaacctgaataagctgctgaccgattacaccgaaatgaagaaggcgatcctgcatgtgtactgggaagagttccagaaggaccctgtgggcctgatgagccgggtggcccagcctgccagcaagaagatcgatcagaacaagctgaaacctgagatggacgagaagggcaacctgaccaccgccggctttgcctgctctcagtgtggccagcccctgttcgtgtacaagctggagcaggtgtctgagaagggcaaggcttacaccaactacttcggacggtgcaatgtggccgagcacgaaaagctgatcctgctggcccagctgaagcccgagaaggatagcgacgaagccgtgacatatagcctgggaaagtttgggcagagggccctggatttctacagcattcatgtgaccaaggagtccacccaccccgtgaagcccctggcccagatcgccggaaacagatacgcctccggacctgtgggaaaggccctgagcgacgcatgtatgggcacaatcgcctccttcctgtctaagtaccaggacatcatcatcgaacaccagaaggtggtgaagggcaaccagaagagactggagagcctgcgggagctggccggcaaggaaaacctggaataccctagcgtgaccctgccacctcagcctcacaccaaggagggcgttgatgcctacaacgaagtgatcgcccgggtgcgaatgtgggtgaacctgaacctgtggcagaagctgaagctaagcagagatgatgccaagcctctgctgagactgaagggattcccttcctttcctctggtcgagagacaggccaacgaagtggactggtgggacatggtgtgtaacgtgaagaagctgatcaacgagaaaaaggaggatggcaaggtgttttggcagaatctggctggctacaagagacaggaagccctgagaccatacctgagcagcgaggaagatcggaagaagggaaagaaattcgctcggtaccagctgggcgacctgctgctgcacctggaaaagaagcacggcgaggactggggaaaggtgtacgacgaggcctgggagcggattgacaagaaagtggaaggcctgagcaagcacatcaagctggaagaggaacggagaagcgaggacgcccagagcaaggccgccctgaccgactggctgcgggctaaggccagcttcgtgatcgagggcctgaaggaggccgacaaggacgagttctgcagatgcgagctgaagctgcagaagtggtacggggacctgcggggaaagcccttcgccatcgaagccgagaacagcatcctggacatcagcggcttcagcaagcagtacaactgtgccttcatctggcagaaggacggcgtgaagaagctgaacctgtacctgatcatcaactacttcaagggcggcaagctgcggttcaagaagatcaaacctgaagccttcgaagccaacagattctacaccgtgatcaacaaaaagagcggcgagatcgtgcccatggaggtgaacttcaacttcgacgaccccaacctgatcatcctgcctctggcctttggcaagagacagggcagagaattcatctggaacgacctgctgtccctggaaaccggcagcctgaagctggccaacggaagagtgatcgagaagacactgtacaacagaagaacccggcaggatgagcctgccctgttcgtggccctgaccttcgagcggcgggaggtcctggactcctccaatatcaaaccaatgaacctgatcggcgtggcaagaggcgaaaacatccccgccgtgatcgccctgaccgaccccgagggctgcccactgagccggtttaaggatagcctgggaaacccaacccacatcctgagaatcggcgagagctataaggagaagcagcggaccatccaggccaagaaggaggtggagcagcggagagccggcggctacagccggaagtacgccagcaaagccaagaatctggcagacgatatggtgagaaacaccgctagagatctgctgtactacgccgtgacccaggatgccatgctgatcttcgccaacctgagccggggcttcggccggcagggcaagcggaccttcatggccgagagacagtacacacggatggaggactggctgaccgccaagctggcctacgagggcctgagcaagacctacctgtccaagacactggcccagtacacctccaagacatgcagcaactgtgggtttaccatcaccagcgccgactacgacagggtgctggagaagctgaagaagacagcaacaggctggatgaccacaattaacggcaaggagctgaaggtggagggccagattacctactacaacagatacaagagacagaacgtagtcaaggacctgtccgtcgagctggatagactgagcgaagaatctgtgaacaacgacatctcctcctggacaaagggcagaagcggagaagctctgagcctcctgaagaaaagattctcccatagacccgtgcaggagaagttcgtgtgcctgaactgcggcttcgagacacacgcagccgagcaagccgccctgaacatcgccagatcctggctgttcctgcggagccaggagtacaagaaataccagacaaacaagacaaccggcaacaccgataagagagccttcgtcgagacctggcagtccttttaccggaagaagcttaaggaggtgtggaaacctgccgtgcggtctggcggatctggcggaggctccaccagccccaagaaaaagagaaaagtctaagctgccttctgcggggcttgccttctggccatgcccttcttctctcccttgcacctgtacctcttggtctttgaataaagcctgagtaggaaggctagcaaaaaaaaaaaaaaaaaaaaaaaaaaaaaaaaaaaaaaaaaaaaaaaaaaaaaaaaaaaaaaaaaaaaaaaaaaaaaaaagcccagccggctccccaacctctaccgaggagggcacctctgagtccgccacccccgagagcggccctggcacctccaccgagcccagcgagggcagcgcacccggcagccctgccggcagccccacctccacagaggagggaaccagcaccgagcccagcgaaggcagcgccccaggcaccagcaccgagcctagtgagcaggagattaaacggatcaacaagatcagaagaagacttgtgaaagacagcaacaccaagaaggccggcaagacaggccccatgaaaaccctgctggttagagtgatgacacccgatctgagagagcggctggaaaacctgagaaagaagcctgaaaatatcccccagcccatcagcaatacatctagagccaacctgaataagctgctgaccgattacaccgaaatgaagaaggcgatcctgcatgtgtactgggaagagttccagaaggaccctgtgggcctgatgagccgggtggcccagcctgccagcaagaagatcgatcagaacaagctgaaacctgagatggacgagaagggcaacctgaccaccgccggctttgcctgctctcagtgtggccagcccctgttcgtgtacaagctggagcaggtgtctgagaagggcaaggcttacaccaactacttcggacggtgcaatgtggccgagcacgaaaagctgatcctgctggcccagctgaagcccgagaaggatagcgacgaagccgtgacatatagcctgggaaagtttgggcagagggccctggatttctacagcattcatgtgaccaaggagtccacccaccccgtgaagcccctggcccagatcgccggaaacagatacgcctccggacctgtgggaaaggccctgagcgacgcatgtatgggcacaatcgcctccttcctgtctaagtaccaggacatcatcatcgaacaccagaaggtggtgaagggcaaccagaagagactggagagcctgcgggagctggccggcaaggaaaacctggaataccctagcgtgaccctgccacctcagcctcacaccaaggagggcgttgatgcctacaacgaagtgatcgcccgggtgcgaatgtgggtgaacctgaacctgtggcagaagctgaagctaagcagagatgatgccaagcctctgctgagactgaagggattcccttcctttcctctggtcgagagacaggccaacgaagtggactggtgggacatggtgtgtaacgtgaagaagctgatcaacgagaaaaaggaggatggcaaggtgttttggcagaatctggctggctacaagagacaggaagccctgagaccatacctgagcagcgaggaagatcggaagaagggaaagaaattcgctcggtaccagctgggcgacctgctgctgcacctggaaaagaagcacggcgaggactggggaaaggtgtacgacgaggcctgggagcggattgacaagaaagtggaaggcctgagcaagcacatcaagctggaagaggaacggagaagcgaggacgcccagagcaaggccgccctgaccgactggctgcgggctaaggccagcttcgtgatcgagggcctgaaggaggccgacaaggacgagttctgcagatgcgagctgaagctgcagaagtggtacggggacctgcggggaaagcccttcgccatcgaagccgagaacagcatcctggacatcagcggcttcagcaagcagtacaactgtgccttcatctggcagaaggacggcgtgaagaagctgaacctgtacctgatcatcaactacttcaagggcggcaagctgcggttcaagaagatcaaacctgaagccttcgaagccaacagattctacaccgtgatcaacaaaaagagcggcgagatcgtgcccatggaggtgaacttcaacttcgacgaccccaacctgatcatcctgcctctggcctttggcaagagacagggcagagaattcatctggaacgacctgctgtccctggaaaccggcagcctgaagctggccaacggaagagtgatcgagaagacactgtacaacagaagaacccggcaggatgagcctgccctgttcgtggccctgaccttcgagcggcgggaggtcctggactcctccaatatcaaaccaatgaacctgatcggcgtggcaagaggcgaaaacatccccgccgtgatcgccctgaccgaccccgagggctgcccactgagccggtttaaggatagcctgggaaacccaacccacatcctgagaatcggcgagagctataaggagaagcagcggaccatccaggccaagaaggaggtggagcagcggagagccggcggctacagccggaagtacgccagcaaagccaagaatctggcagacgatatggtgagaaacaccgctagagatctgctgtactacgccgtgacccaggatgccatgctgatcttcgccaacctgagccggggcttcggccggcagggcaagcggaccttcatggccgagagacagtacacacggatggaggactggctgaccgccaagctggcctacgagggcctgagcaagacctacctgtccaagacactggcccagtacacctccaagacatgcagcaactgtgggtttaccatcaccagcgccgactacgacagggtgctggagaagctgaagaagacagcaacaggctggatgaccacaattaacggcaaggagctgaaggtggagggccagattacctactacaacagatacaagagacagaacgtagtcaaggacctgtccgtcgagctggatagactgagcgaagaatctgtgaacaacgacatctcctcctggacaaagggcagaagcggagaagctctgagcctcctgaagaaaagattctcccatagacccgtgcaggagaagttcgtgtgcctgaactgcggcttcgagacacacgcagccgagcaagccgccctgaacatcgccagatcctggctgttcctgcggagccaggagtacaagaaataccagacaaacaagacaaccggcaacaccgataagagagccttcgtcgagacctggcagtccttttaccggaagaagcttaaggaggtgtggaaacctgccgtgcggtctggcggatctggcggaggctccaccagccccaagaaaaagagaaaagtctaagctgccttctgcggggcttgccttctggccatgcccttcttctctcccttgcacctgtacctcttggtctttgaataaagcctgagtaggaaggctagcaaaaaaaaaaaaaaaaaaaaaaaaaaaaaaaaaaaaaaaaaaaaaaaaaaaaaaaaaaaaaaaaaaaaaaaaaaaaaaaa

SEQ ID NO: 9863 - RNA, 8787 nt, synthetic construct
  source 1..8787: mol_type = other RNA
aggaaataagagagaaaagaagagtaagaagaaatataagagccaccatggcccctaagaagaagcgtaaagtgagccggatgaaccacgaccaggagttcgacccccctaaggtgtaccctcccgtccccgccgagaagagaaagcccatccgggtcctgagcctgttcgatggcatcgccaccggtctgctggtgctgaaggacctgggcatccaggtggataggtacattgcctccgaggtgtgcgaggactccatcaccgtgggaatggtgcgtcatcagggcaagatcatgtacgtgggcgacgtgcggagcgtgacacagaagcatatccaggagtggggccctttcgacctggtgatcggcggcagcccttgcaatgacctgagcatcgtgaacccagcccggaagggcctgtacgagggaaccggcagactgttcttcgagttttacagactgctgcacgacgcccggcctaaggaaggcgacgaccggcccttcttttggctgttcgagaatgtggtggccatgggagtcagcgacaagcgggatattagccggttcctggagagcaaccccgtgatgatcgatgccaaggaagtgagcgccgcccaccgggccagatacttctggggcaatctgcctggcatgaacagacccctggccagcaccgtgaacgacaagctggagctgcaggagtgcctggagcacggccggatcgccaagttcagcaaggtgagaaccatcaccacccgaagcaacagcatcaaacaaggcaaggaccagcactttcctgtgttcatgaacgagaaggaggacatcctgtggtgtaccgagatggagagagtgttcgggttcccagtccactacacagatgtcagcaacatgtctagactggccagacagagactgctgggaagaagctggtccgtccctgtgatcagacacctgttcgcccctctgaaggagtacttcgcctgcgtgagcagcggcaacagcaacgccaacagccggggccccagcttctctagcggcctggtgccactgtccctgagagggagccacatgggccccatggagatctacaaaaccgtgagcgcctggaagcggcagcctgtgcgcgtgctgagcctgtttcggaatatcgataaagtcctgaaaagcctgggattcctggagagcggctctggctccggcggtggcaccctgaagtacgtggaggatgtgacaaacgtggtcagacgggatgtggagaagtggggccccttcgatctggtgtacggcagcacccaacccctgggcagctcttgtgaccggtgccctggctggtacatgtttcagttccaccggatcctgcagtacgccctgccgagacaggagtcccagcggccattcttttggattttcatggacaacttgctgctgaccgaggatgaccaggaaactaccactcggttcctgcagaccgaagccgtgaccctgcaggacgtgagaggccgggactaccagaacgccatgcgggtgtggtccaacatccctggactgaaaagcaagcacgcacctctgacccctaaagaagaggagtacctgcaggcccaggtgcggagcagaagcaagctggacgcccctaaggtggatctgctggtgaagaattgcctcctgcccctgagagagtacttcaagtatttcagccagaatagtctgcccctgggaggcagcggcggcggcagcctggagagcgagctgttcagggacgtggccatcgtgttcagccaggaggagtggcagtgcctggcccccgcccagagggacctgtacagggacgtgatgctggagacctacagcaacctggtgagcctgggcctggccatcagcaagcccgacgtgatcagcttcctggagcagggcaaggagccctggatggtggagagggtggtgagcggcggcctgtgccccgtgctgaagtacaggggcggcccaagcagcggcgcccctcctcccagcggcggcaggcggcccaagcagcggcgcccctcctcccagcggcggcagcccagccggctccccaacctctaccgaggagggcacctctgagtccgccacccccgagagcggccctggcacctccaccgagcccagcgagggcagcgcacccggcagccctgccggcagccccacctccacagaggagggaaccagcaccgagcccagcgaaggcagcgccccaggcaccagcaccgagcctagtgagcaggagattaaacggatcaacaagatcagaagaagacttgtgaaagacagcaacaccaagaaggccggcaagacaggccccatgaaaaccctgctggttagagtgatgacacccgatctgagagagcggctggaaaacctgagaaagaagcctgaaaatatcccccagcccatcagcaatacatctagagccaacctgaataagctgctgaccgattacaccgaaatgaagaaggcgatcctgcatgtgtactgggaagagttccagaaggaccctgtgggcctgatgagccgggtggcccagcctgccagcaagaagatcgatcagaacaagctgaaacctgagatggacgagaagggcaacctgaccaccgccggctttgcctgctctcagtgtggccagcccctgttcgtgtacaagctggagcaggtgtctgagaagggcaaggcttacaccaactacttcggacggtgcaatgtggccgagcacgaaaagctgatcctgctggcccagctgaagcccgagaaggatagcgacgaagccgtgacatatagcctgggaaagtttgggcagagggccctggatttctacagcattcatgtgaccaaggagtccacccaccccgtgaagcccctggcccagatcgccggaaacagatacgcctccggacctgtgggaaaggccctgagcgacgcatgtatgggcacaatcgcctccttcctgtctaagtaccaggacatcatcatcgaacaccagaaggtggtgaagggcaaccagaagagactggagagcctgcgggagctggccggcaaggaaaacctggaataccctagcgtgaccctgccacctcagcctcacaccaaggagggcgttgatgcctacaacgaagtgatcgcccgggtgcgaatgtgggtgaacctgaacctgtggcagaagctgaagctaagcagagatgatgccaagcctctgctgagactgaagggattcccttcctttcctctggtcgagagacaggccaacgaagtggactggtgggacatggtgtgtaacgtgaagaagctgatcaacgagaaaaaggaggatggcaaggtgttttggcagaatctggctggctacaagagacaggaagccctgagaccatacctgagcagcgaggaagatcggaagaagggaaagaaattcgctcggtaccagctgggcgacctgctgctgcacctggaaaagaagcacggcgaggactggggaaaggtgtacgacgaggcctgggagcggattgacaagaaagtggaaggcctgagcaagcacatcaagctggaagaggaacggagaagcgaggacgcccagagcaaggccgccctgaccgactggctgcgggctaaggccagcttcgtgatcgagggcctgaaggaggccgacaaggacgagttctgcagatgcgagctgaagctgcagaagtggtacggggacctgcggggaaagcccttcgccatcgaagccgagaacagcatcctggacatcagcggcttcagcaagcagtacaactgtgccttcatctggcagaaggacggcgtgaagaagctgaacctgtacctgatcatcaactacttcaagggcggcaagctgcggttcaagaagatcaaacctgaagccttcgaagccaacagattctacaccgtgatcaacaaaaagagcggcgagatcgtgcccatggaggtgaacttcaacttcgacgaccccaacctgatcatcctgcctctggcctttggcaagagacagggcagagaattcatctggaacgacctgctgtccctggaaaccggcagcctgaagctggccaacggaagagtgatcgagaagacactgtacaacagaagaacccggcaggatgagcctgccctgttcgtggccctgaccttcgagcggcgggaggtcctggactcctccaatatcaaaccaatgaacctgatcggcgtggcaagaggcgaaaacatccccgccgtgatcgccctgaccgaccccgagggctgcccactgagccggtttaaggatagcctgggaaacccaacccacatcctgagaatcggcgagagctataaggagaagcagcggaccatccaggccaagaaggaggtggagcagcggagagccggcggctacagccggaagtacgccagcaaagccaagaatctggcagacgatatggtgagaaacaccgctagagatctgctgtactacgccgtgacccaggatgccatgctgatcttcgccaacctgagccggggcttcggccggcagggcaagcggaccttcatggccgagagacagtacacacggatggaggactggctgaccgccaagctggcctacgagggcctgagcaagacctacctgtccaagacactggcccagtacacctccaagacatgcagcaactgtgggtttaccatcaccagcgccgactacgacagggtgctggagaagctgaagaagacagcaacaggctggatgaccacaattaacggcaaggagctgaaggtggagggccagattacctactacaacagatacaagagacagaacgtagtcaaggacctgtccgtcgagctggatagactgagcgaagaatctgtgaacaacgacatctcctcctggacaaagggcagaagcggagaagctctgagcctcctgaagaaaagattctcccatagacccgtgcaggagaagttcgtgtgcctgaactgcggcttcgagacacacgcagccgagcaagccgccctgaacatcgccagatcctggctgttcctgcggagccaggagtacaagaaataccagacaaacaagacaaccggcaacaccgataagagagccttcgtcgagacctggcagtccttttaccggaagaagcttaaggaggtgtggaaacctgccgtgcggtctggcggatctggcggaggctccaccagccccaagaaaaagagaaaagtctaagctgccttctgcggggcttgccttctggccatgcccttcttctctcccttgcacctgtacctcttggtctttgaataaagcctgagtaggaaggctagcaaaaaaaaaaaaaaaaaaaaaaaaaaaaaaaaaaaaaaaaaaaaaaaaaaaaaaaaaaaaaaaaaaaaaaaaaaaaaaaagcccagccggctccccaacctctaccgaggagggcacctctgagtccgccacccccgagagcggccctggcacctccaccgagcccagcgagggcagcgcacccggcagccctgccggcagccccacctccacagaggagggaaccagcaccgagcccagcgaaggcagcgccccaggcaccagcaccgagcctagtgagcaggagattaaacggatcaacaagatcagaagaagacttgtgaaagacagcaacaccaagaaggccggcaagacaggccccatgaaaaccctgctggttagagtgatgacacccgatctgagagagcggctggaaaacctgagaaagaagcctgaaaatatcccccagcccatcagcaatacatctagagccaacctgaataagctgctgaccgattacaccgaaatgaagaaggcgatcctgcatgtgtactgggaagagttccagaaggaccctgtgggcctgatgagccgggtggcccagcctgccagcaagaagatcgatcagaacaagctgaaacctgagatggacgagaagggcaacctgaccaccgccggctttgcctgctctcagtgtggccagcccctgttcgtgtacaagctggagcaggtgtctgagaagggcaaggcttacaccaactacttcggacggtgcaatgtggccgagcacgaaaagctgatcctgctggcccagctgaagcccgagaaggatagcgacgaagccgtgacatatagcctgggaaagtttgggcagagggccctggatttctacagcattcatgtgaccaaggagtccacccaccccgtgaagcccctggcccagatcgccggaaacagatacgcctccggacctgtgggaaaggccctgagcgacgcatgtatgggcacaatcgcctccttcctgtctaagtaccaggacatcatcatcgaacaccagaaggtggtgaagggcaaccagaagagactggagagcctgcgggagctggccggcaaggaaaacctggaataccctagcgtgaccctgccacctcagcctcacaccaaggagggcgttgatgcctacaacgaagtgatcgcccgggtgcgaatgtgggtgaacctgaacctgtggcagaagctgaagctaagcagagatgatgccaagcctctgctgagactgaagggattcccttcctttcctctggtcgagagacaggccaacgaagtggactggtgggacatggtgtgtaacgtgaagaagctgatcaacgagaaaaaggaggatggcaaggtgttttggcagaatctggctggctacaagagacaggaagccctgagaccatacctgagcagcgaggaagatcggaagaagggaaagaaattcgctcggtaccagctgggcgacctgctgctgcacctggaaaagaagcacggcgaggactggggaaaggtgtacgacgaggcctgggagcggattgacaagaaagtggaaggcctgagcaagcacatcaagctggaagaggaacggagaagcgaggacgcccagagcaaggccgccctgaccgactggctgcgggctaaggccagcttcgtgatcgagggcctgaaggaggccgacaaggacgagttctgcagatgcgagctgaagctgcagaagtggtacggggacctgcggggaaagcccttcgccatcgaagccgagaacagcatcctggacatcagcggcttcagcaagcagtacaactgtgccttcatctggcagaaggacggcgtgaagaagctgaacctgtacctgatcatcaactacttcaagggcggcaagctgcggttcaagaagatcaaacctgaagccttcgaagccaacagattctacaccgtgatcaacaaaaagagcggcgagatcgtgcccatggaggtgaacttcaacttcgacgaccccaacctgatcatcctgcctctggcctttggcaagagacagggcagagaattcatctggaacgacctgctgtccctggaaaccggcagcctgaagctggccaacggaagagtgatcgagaagacactgtacaacagaagaacccggcaggatgagcctgccctgttcgtggccctgaccttcgagcggcgggaggtcctggactcctccaatatcaaaccaatgaacctgatcggcgtggcaagaggcgaaaacatccccgccgtgatcgccctgaccgaccccgagggctgcccactgagccggtttaaggatagcctgggaaacccaacccacatcctgagaatcggcgagagctataaggagaagcagcggaccatccaggccaagaaggaggtggagcagcggagagccggcggctacagccggaagtacgccagcaaagccaagaatctggcagacgatatggtgagaaacaccgctagagatctgctgtactacgccgtgacccaggatgccatgctgatcttcgccaacctgagccggggcttcggccggcagggcaagcggaccttcatggccgagagacagtacacacggatggaggactggctgaccgccaagctggcctacgagggcctgagcaagacctacctgtccaagacactggcccagtacacctccaagacatgcagcaactgtgggtttaccatcaccagcgccgactacgacagggtgctggagaagctgaagaagacagcaacaggctggatgaccacaattaacggcaaggagctgaaggtggagggccagattacctactacaacagatacaagagacagaacgtagtcaaggacctgtccgtcgagctggatagactgagcgaagaatctgtgaacaacgacatctcctcctggacaaagggcagaagcggagaagctctgagcctcctgaagaaaagattctcccatagacccgtgcaggagaagttcgtgtgcctgaactgcggcttcgagacacacgcagccgagcaagccgccctgaacatcgccagatcctggctgttcctgcggagccaggagtacaagaaataccagacaaacaagacaaccggcaacaccgataagagagccttcgtcgagacctggcagtccttttaccggaagaagcttaaggaggtgtggaaacctgccgtgcggtctggcggatctggcggaggctccaccagccccaagaaaaagagaaaagtctaagctgccttctgcggggcttgccttctggccatgcccttcttctctcccttgcacctgtacctcttggtctttgaataaagcctgagtaggaaggctagcaaaaaaaaaaaaaaaaaaaaaaaaaaaaaaaaaaaaaaaaaaaaaaaaaaaaaaaaaaaaaaaaaaaaaaaaaaaaaaaa

SEQ ID NO: 9864 - RNA, 8787 nt, synthetic construct
  source 1..8787: mol_type = other RNA
aggaaataagagagaaaagaagagtaagaagaaatataagagccaccatggcccctaagaagaagcgtaaagtgagccggatgaaccacgaccaggagttcgacccccctaaggtgtaccctcccgtccccgccgagaagagaaagcccatccgggtcctgagcctgttcgatggcatcgccaccggtctgctggtgctgaaggacctgggcatccaggtggataggtacattgcctccgaggtgtgcgaggactccatcaccgtgggaatggtgcgtcatcagggcaagatcatgtacgtgggcgacgtgcggagcgtgacacagaagcatatccaggagtggggccctttcgacctggtgatcggcggcagcccttgcaatgacctgagcatcgtgaacccagcccggaagggcctgtacgagggaaccggcagactgttcttcgagttttacagactgctgcacgacgcccggcctaaggaaggcgacgaccggcccttcttttggctgttcgagaatgtggtggccatgggagtcagcgacaagcgggatattagccggttcctggagagcaaccccgtgatgatcgatgccaaggaagtgagcgccgcccaccgggccagatacttctggggcaatctgcctggcatgaacagacccctggccagcaccgtgaacgacaagctggagctgcaggagtgcctggagcacggccggatcgccaagttcagcaaggtgagaaccatcaccacccgaagcaacagcatcaaacaaggcaaggaccagcactttcctgtgttcatgaacgagaaggaggacatcctgtggtgtaccgagatggagagagtgttcgggttcccagtccactacacagatgtcagcaacatgtctagactggccagacagagactgctgggaagaagctggtccgtccctgtgatcagacacctgttcgcccctctgaaggagtacttcgcctgcgtgagcagcggcaacagcaacgccaacagccggggccccagcttctctagcggcctggtgccactgtccctgagagggagccacatgggccccatggagatctacaaaaccgtgagcgcctggaagcggcagcctgtgcgcgtgctgagcctgtttcggaatatcgataaagtcctgaaaagcctgggattcctggagagcggctctggctccggcggtggcaccctgaagtacgtggaggatgtgacaaacgtggtcagacgggatgtggagaagtggggccccttcgatctggtgtacggcagcacccaacccctgggcagctcttgtgaccggtgccctggctggtacatgtttcagttccaccggatcctgcagtacgccctgccgagacaggagtcccagcggccattcttttggattttcatggacaacttgctgctgaccgaggatgaccaggaaactaccactcggttcctgcagaccgaagccgtgaccctgcaggacgtgagaggccgggactaccagaacgccatgcgggtgtggtccaacatccctggactgaaaagcaagcacgcacctctgacccctaaagaagaggagtacctgcaggcccaggtgcggagcagaagcaagctggacgcccctaaggtggatctgctggtgaagaattgcctcctgcccctgagagagtacttcaagtatttcagccagaatagtctgcccctgggaggcagcggcggcggcatgagccagggcagcgtgaccttcagggacgtggccatcgacttcagccaggaggagtggaagtggctgcagcccgcccagagggacctgtacaggtgcgtgatgctggagaactacggccacctggtgagcctgggcctgagcatcagcaagcccgacgtggtgagcctgctggagcagggcaaggagccctggctgggcaagagggacgtgaagagggacctgttccccgtgctgaaggagggcggcccaagcagcggcgcccctcctcccagcggcggcaggcggcccaagcagcggcgcccctcctcccagcggcggcagcccagccggctccccaacctctaccgaggagggcacctctgagtccgccacccccgagagcggccctggcacctccaccgagcccagcgagggcagcgcacccggcagccctgccggcagccccacctccacagaggagggaaccagcaccgagcccagcgaaggcagcgccccaggcaccagcaccgagcctagtgagcaggagattaaacggatcaacaagatcagaagaagacttgtgaaagacagcaacaccaagaaggccggcaagacaggccccatgaaaaccctgctggttagagtgatgacacccgatctgagagagcggctggaaaacctgagaaagaagcctgaaaatatcccccagcccatcagcaatacatctagagccaacctgaataagctgctgaccgattacaccgaaatgaagaaggcgatcctgcatgtgtactgggaagagttccagaaggaccctgtgggcctgatgagccgggtggcccagcctgccagcaagaagatcgatcagaacaagctgaaacctgagatggacgagaagggcaacctgaccaccgccggctttgcctgctctcagtgtggccagcccctgttcgtgtacaagctggagcaggtgtctgagaagggcaaggcttacaccaactacttcggacggtgcaatgtggccgagcacgaaaagctgatcctgctggcccagctgaagcccgagaaggatagcgacgaagccgtgacatatagcctgggaaagtttgggcagagggccctggatttctacagcattcatgtgaccaaggagtccacccaccccgtgaagcccctggcccagatcgccggaaacagatacgcctccggacctgtgggaaaggccctgagcgacgcatgtatgggcacaatcgcctccttcctgtctaagtaccaggacatcatcatcgaacaccagaaggtggtgaagggcaaccagaagagactggagagcctgcgggagctggccggcaaggaaaacctggaataccctagcgtgaccctgccacctcagcctcacaccaaggagggcgttgatgcctacaacgaagtgatcgcccgggtgcgaatgtgggtgaacctgaacctgtggcagaagctgaagctaagcagagatgatgccaagcctctgctgagactgaagggattcccttcctttcctctggtcgagagacaggccaacgaagtggactggtgggacatggtgtgtaacgtgaagaagctgatcaacgagaaaaaggaggatggcaaggtgttttggcagaatctggctggctacaagagacaggaagccctgagaccatacctgagcagcgaggaagatcggaagaagggaaagaaattcgctcggtaccagctgggcgacctgctgctgcacctggaaaagaagcacggcgaggactggggaaaggtgtacgacgaggcctgggagcggattgacaagaaagtggaaggcctgagcaagcacatcaagctggaagaggaacggagaagcgaggacgcccagagcaaggccgccctgaccgactggctgcgggctaaggccagcttcgtgatcgagggcctgaaggaggccgacaaggacgagttctgcagatgcgagctgaagctgcagaagtggtacggggacctgcggggaaagcccttcgccatcgaagccgagaacagcatcctggacatcagcggcttcagcaagcagtacaactgtgccttcatctggcagaaggacggcgtgaagaagctgaacctgtacctgatcatcaactacttcaagggcggcaagctgcggttcaagaagatcaaacctgaagccttcgaagccaacagattctacaccgtgatcaacaaaaagagcggcgagatcgtgcccatggaggtgaacttcaacttcgacgaccccaacctgatcatcctgcctctggcctttggcaagagacagggcagagaattcatctggaacgacctgctgtccctggaaaccggcagcctgaagctggccaacggaagagtgatcgagaagacactgtacaacagaagaacccggcaggatgagcctgccctgttcgtggccctgaccttcgagcggcgggaggtcctggactcctccaatatcaaaccaatgaacctgatcggcgtggcaagaggcgaaaacatccccgccgtgatcgccctgaccgaccccgagggctgcccactgagccggtttaaggatagcctgggaaacccaacccacatcctgagaatcggcgagagctataaggagaagcagcggaccatccaggccaagaaggaggtggagcagcggagagccggcggctacagccggaagtacgccagcaaagccaagaatctggcagacgatatggtgagaaacaccgctagagatctgctgtactacgccgtgacccaggatgccatgctgatcttcgccaacctgagccggggcttcggccggcagggcaagcggaccttcatggccgagagacagtacacacggatggaggactggctgaccgccaagctggcctacgagggcctgagcaagacctacctgtccaagacactggcccagtacacctccaagacatgcagcaactgtgggtttaccatcaccagcgccgactacgacagggtgctggagaagctgaagaagacagcaacaggctggatgaccacaattaacggcaaggagctgaaggtggagggccagattacctactacaacagatacaagagacagaacgtagtcaaggacctgtccgtcgagctggatagactgagcgaagaatctgtgaacaacgacatctcctcctggacaaagggcagaagcggagaagctctgagcctcctgaagaaaagattctcccatagacccgtgcaggagaagttcgtgtgcctgaactgcggcttcgagacacacgcagccgagcaagccgccctgaacatcgccagatcctggctgttcctgcggagccaggagtacaagaaataccagacaaacaagacaaccggcaacaccgataagagagccttcgtcgagacctggcagtccttttaccggaagaagcttaaggaggtgtggaaacctgccgtgcggtctggcggatctggcggaggctccaccagccccaagaaaaagagaaaagtctaagctgccttctgcggggcttgccttctggccatgcccttcttctctcccttgcacctgtacctcttggtctttgaataaagcctgagtaggaaggctagcaaaaaaaaaaaaaaaaaaaaaaaaaaaaaaaaaaaaaaaaaaaaaaaaaaaaaaaaaaaaaaaaaaaaaaaaaaaaaaaagcccagccggctccccaacctctaccgaggagggcacctctgagtccgccacccccgagagcggccctggcacctccaccgagcccagcgagggcagcgcacccggcagccctgccggcagccccacctccacagaggagggaaccagcaccgagcccagcgaaggcagcgccccaggcaccagcaccgagcctagtgagcaggagattaaacggatcaacaagatcagaagaagacttgtgaaagacagcaacaccaagaaggccggcaagacaggccccatgaaaaccctgctggttagagtgatgacacccgatctgagagagcggctggaaaacctgagaaagaagcctgaaaatatcccccagcccatcagcaatacatctagagccaacctgaataagctgctgaccgattacaccgaaatgaagaaggcgatcctgcatgtgtactgggaagagttccagaaggaccctgtgggcctgatgagccgggtggcccagcctgccagcaagaagatcgatcagaacaagctgaaacctgagatggacgagaagggcaacctgaccaccgccggctttgcctgctctcagtgtggccagcccctgttcgtgtacaagctggagcaggtgtctgagaagggcaaggcttacaccaactacttcggacggtgcaatgtggccgagcacgaaaagctgatcctgctggcccagctgaagcccgagaaggatagcgacgaagccgtgacatatagcctgggaaagtttgggcagagggccctggatttctacagcattcatgtgaccaaggagtccacccaccccgtgaagcccctggcccagatcgccggaaacagatacgcctccggacctgtgggaaaggccctgagcgacgcatgtatgggcacaatcgcctccttcctgtctaagtaccaggacatcatcatcgaacaccagaaggtggtgaagggcaaccagaagagactggagagcctgcgggagctggccggcaaggaaaacctggaataccctagcgtgaccctgccacctcagcctcacaccaaggagggcgttgatgcctacaacgaagtgatcgcccgggtgcgaatgtgggtgaacctgaacctgtggcagaagctgaagctaagcagagatgatgccaagcctctgctgagactgaagggattcccttcctttcctctggtcgagagacaggccaacgaagtggactggtgggacatggtgtgtaacgtgaagaagctgatcaacgagaaaaaggaggatggcaaggtgttttggcagaatctggctggctacaagagacaggaagccctgagaccatacctgagcagcgaggaagatcggaagaagggaaagaaattcgctcggtaccagctgggcgacctgctgctgcacctggaaaagaagcacggcgaggactggggaaaggtgtacgacgaggcctgggagcggattgacaagaaagtggaaggcctgagcaagcacatcaagctggaagaggaacggagaagcgaggacgcccagagcaaggccgccctgaccgactggctgcgggctaaggccagcttcgtgatcgagggcctgaaggaggccgacaaggacgagttctgcagatgcgagctgaagctgcagaagtggtacggggacctgcggggaaagcccttcgccatcgaagccgagaacagcatcctggacatcagcggcttcagcaagcagtacaactgtgccttcatctggcagaaggacggcgtgaagaagctgaacctgtacctgatcatcaactacttcaagggcggcaagctgcggttcaagaagatcaaacctgaagccttcgaagccaacagattctacaccgtgatcaacaaaaagagcggcgagatcgtgcccatggaggtgaacttcaacttcgacgaccccaacctgatcatcctgcctctggcctttggcaagagacagggcagagaattcatctggaacgacctgctgtccctggaaaccggcagcctgaagctggccaacggaagagtgatcgagaagacactgtacaacagaagaacccggcaggatgagcctgccctgttcgtggccctgaccttcgagcggcgggaggtcctggactcctccaatatcaaaccaatgaacctgatcggcgtggcaagaggcgaaaacatccccgccgtgatcgccctgaccgaccccgagggctgcccactgagccggtttaaggatagcctgggaaacccaacccacatcctgagaatcggcgagagctataaggagaagcagcggaccatccaggccaagaaggaggtggagcagcggagagccggcggctacagccggaagtacgccagcaaagccaagaatctggcagacgatatggtgagaaacaccgctagagatctgctgtactacgccgtgacccaggatgccatgctgatcttcgccaacctgagccggggcttcggccggcagggcaagcggaccttcatggccgagagacagtacacacggatggaggactggctgaccgccaagctggcctacgagggcctgagcaagacctacctgtccaagacactggcccagtacacctccaagacatgcagcaactgtgggtttaccatcaccagcgccgactacgacagggtgctggagaagctgaagaagacagcaacaggctggatgaccacaattaacggcaaggagctgaaggtggagggccagattacctactacaacagatacaagagacagaacgtagtcaaggacctgtccgtcgagctggatagactgagcgaagaatctgtgaacaacgacatctcctcctggacaaagggcagaagcggagaagctctgagcctcctgaagaaaagattctcccatagacccgtgcaggagaagttcgtgtgcctgaactgcggcttcgagacacacgcagccgagcaagccgccctgaacatcgccagatcctggctgttcctgcggagccaggagtacaagaaataccagacaaacaagacaaccggcaacaccgataagagagccttcgtcgagacctggcagtccttttaccggaagaagcttaaggaggtgtggaaacctgccgtgcggtctggcggatctggcggaggctccaccagccccaagaaaaagagaaaagtctaagctgccttctgcggggcttgccttctggccatgcccttcttctctcccttgcacctgtacctcttggtctttgaataaagcctgagtaggaaggctagcaaaaaaaaaaaaaaaaaaaaaaaaaaaaaaaaaaaaaaaaaaaaaaaaaaaaaaaaaaaaaaaaaaaaaaaaaaaaaaaa

SEQ ID NO: 9865 - RNA, 8787 nt, synthetic construct
  source 1..8787: mol_type = other RNA
aggaaataagagagaaaagaagagtaagaagaaatataagagccaccatggcccctaagaagaagcgtaaagtgagccggatgaaccacgaccaggagttcgacccccctaaggtgtaccctcccgtccccgccgagaagagaaagcccatccgggtcctgagcctgttcgatggcatcgccaccggtctgctggtgctgaaggacctgggcatccaggtggataggtacattgcctccgaggtgtgcgaggactccatcaccgtgggaatggtgcgtcatcagggcaagatcatgtacgtgggcgacgtgcggagcgtgacacagaagcatatccaggagtggggccctttcgacctggtgatcggcggcagcccttgcaatgacctgagcatcgtgaacccagcccggaagggcctgtacgagggaaccggcagactgttcttcgagttttacagactgctgcacgacgcccggcctaaggaaggcgacgaccggcccttcttttggctgttcgagaatgtggtggccatgggagtcagcgacaagcgggatattagccggttcctggagagcaaccccgtgatgatcgatgccaaggaagtgagcgccgcccaccgggccagatacttctggggcaatctgcctggcatgaacagacccctggccagcaccgtgaacgacaagctggagctgcaggagtgcctggagcacggccggatcgccaagttcagcaaggtgagaaccatcaccacccgaagcaacagcatcaaacaaggcaaggaccagcactttcctgtgttcatgaacgagaaggaggacatcctgtggtgtaccgagatggagagagtgttcgggttcccagtccactacacagatgtcagcaacatgtctagactggccagacagagactgctgggaagaagctggtccgtccctgtgatcagacacctgttcgcccctctgaaggagtacttcgcctgcgtgagcagcggcaacagcaacgccaacagccggggccccagcttctctagcggcctggtgccactgtccctgagagggagccacatgggccccatggagatctacaaaaccgtgagcgcctggaagcggcagcctgtgcgcgtgctgagcctgtttcggaatatcgataaagtcctgaaaagcctgggattcctggagagcggctctggctccggcggtggcaccctgaagtacgtggaggatgtgacaaacgtggtcagacgggatgtggagaagtggggccccttcgatctggtgtacggcagcacccaacccctgggcagctcttgtgaccggtgccctggctggtacatgtttcagttccaccggatcctgcagtacgccctgccgagacaggagtcccagcggccattcttttggattttcatggacaacttgctgctgaccgaggatgaccaggaaactaccactcggttcctgcagaccgaagccgtgaccctgcaggacgtgagaggccgggactaccagaacgccatgcgggtgtggtccaacatccctggactgaaaagcaagcacgcacctctgacccctaaagaagaggagtacctgcaggcccaggtgcggagcagaagcaagctggacgcccctaaggtggatctgctggtgaagaattgcctcctgcccctgagagagtacttcaagtatttcagccagaatagtctgcccctgggaggcagcggcggcggccagaaccccgtgaccttcagggacgtggccgtggacttcagcctggaggagtggaagtgcctgagccccgcccagagggccctgtacagggacgtgatgctggagaactacgagaacctggccagcgtgggccccaggctgcccttcagcaagccctacgtgatcagccagctggagaggggcgaggccccctggatgcccgaggaggaggtgcccagggaccactggcccgacctgttcaacggcggcccaagcagcggcgcccctcctcccagcggcggcaggcggcccaagcagcggcgcccctcctcccagcggcggcagcccagccggctccccaacctctaccgaggagggcacctctgagtccgccacccccgagagcggccctggcacctccaccgagcccagcgagggcagcgcacccggcagccctgccggcagccccacctccacagaggagggaaccagcaccgagcccagcgaaggcagcgccccaggcaccagcaccgagcctagtgagcaggagattaaacggatcaacaagatcagaagaagacttgtgaaagacagcaacaccaagaaggccggcaagacaggccccatgaaaaccctgctggttagagtgatgacacccgatctgagagagcggctggaaaacctgagaaagaagcctgaaaatatcccccagcccatcagcaatacatctagagccaacctgaataagctgctgaccgattacaccgaaatgaagaaggcgatcctgcatgtgtactgggaagagttccagaaggaccctgtgggcctgatgagccgggtggcccagcctgccagcaagaagatcgatcagaacaagctgaaacctgagatggacgagaagggcaacctgaccaccgccggctttgcctgctctcagtgtggccagcccctgttcgtgtacaagctggagcaggtgtctgagaagggcaaggcttacaccaactacttcggacggtgcaatgtggccgagcacgaaaagctgatcctgctggcccagctgaagcccgagaaggatagcgacgaagccgtgacatatagcctgggaaagtttgggcagagggccctggatttctacagcattcatgtgaccaaggagtccacccaccccgtgaagcccctggcccagatcgccggaaacagatacgcctccggacctgtgggaaaggccctgagcgacgcatgtatgggcacaatcgcctccttcctgtctaagtaccaggacatcatcatcgaacaccagaaggtggtgaagggcaaccagaagagactggagagcctgcgggagctggccggcaaggaaaacctggaataccctagcgtgaccctgccacctcagcctcacaccaaggagggcgttgatgcctacaacgaagtgatcgcccgggtgcgaatgtgggtgaacctgaacctgtggcagaagctgaagctaagcagagatgatgccaagcctctgctgagactgaagggattcccttcctttcctctggtcgagagacaggccaacgaagtggactggtgggacatggtgtgtaacgtgaagaagctgatcaacgagaaaaaggaggatggcaaggtgttttggcagaatctggctggctacaagagacaggaagccctgagaccatacctgagcagcgaggaagatcggaagaagggaaagaaattcgctcggtaccagctgggcgacctgctgctgcacctggaaaagaagcacggcgaggactggggaaaggtgtacgacgaggcctgggagcggattgacaagaaagtggaaggcctgagcaagcacatcaagctggaagaggaacggagaagcgaggacgcccagagcaaggccgccctgaccgactggctgcgggctaaggccagcttcgtgatcgagggcctgaaggaggccgacaaggacgagttctgcagatgcgagctgaagctgcagaagtggtacggggacctgcggggaaagcccttcgccatcgaagccgagaacagcatcctggacatcagcggcttcagcaagcagtacaactgtgccttcatctggcagaaggacggcgtgaagaagctgaacctgtacctgatcatcaactacttcaagggcggcaagctgcggttcaagaagatcaaacctgaagccttcgaagccaacagattctacaccgtgatcaacaaaaagagcggcgagatcgtgcccatggaggtgaacttcaacttcgacgaccccaacctgatcatcctgcctctggcctttggcaagagacagggcagagaattcatctggaacgacctgctgtccctggaaaccggcagcctgaagctggccaacggaagagtgatcgagaagacactgtacaacagaagaacccggcaggatgagcctgccctgttcgtggccctgaccttcgagcggcgggaggtcctggactcctccaatatcaaaccaatgaacctgatcggcgtggcaagaggcgaaaacatccccgccgtgatcgccctgaccgaccccgagggctgcccactgagccggtttaaggatagcctgggaaacccaacccacatcctgagaatcggcgagagctataaggagaagcagcggaccatccaggccaagaaggaggtggagcagcggagagccggcggctacagccggaagtacgccagcaaagccaagaatctggcagacgatatggtgagaaacaccgctagagatctgctgtactacgccgtgacccaggatgccatgctgatcttcgccaacctgagccggggcttcggccggcagggcaagcggaccttcatggccgagagacagtacacacggatggaggactggctgaccgccaagctggcctacgagggcctgagcaagacctacctgtccaagacactggcccagtacacctccaagacatgcagcaactgtgggtttaccatcaccagcgccgactacgacagggtgctggagaagctgaagaagacagcaacaggctggatgaccacaattaacggcaaggagctgaaggtggagggccagattacctactacaacagatacaagagacagaacgtagtcaaggacctgtccgtcgagctggatagactgagcgaagaatctgtgaacaacgacatctcctcctggacaaagggcagaagcggagaagctctgagcctcctgaagaaaagattctcccatagacccgtgcaggagaagttcgtgtgcctgaactgcggcttcgagacacacgcagccgagcaagccgccctgaacatcgccagatcctggctgttcctgcggagccaggagtacaagaaataccagacaaacaagacaaccggcaacaccgataagagagccttcgtcgagacctggcagtccttttaccggaagaagcttaaggaggtgtggaaacctgccgtgcggtctggcggatctggcggaggctccaccagccccaagaaaaagagaaaagtctaagctgccttctgcggggcttgccttctggccatgcccttcttctctcccttgcacctgtacctcttggtctttgaataaagcctgagtaggaaggctagcaaaaaaaaaaaaaaaaaaaaaaaaaaaaaaaaaaaaaaaaaaaaaaaaaaaaaaaaaaaaaaaaaaaaaaaaaaaaaaaagcccagccggctccccaacctctaccgaggagggcacctctgagtccgccacccccgagagcggccctggcacctccaccgagcccagcgagggcagcgcacccggcagccctgccggcagccccacctccacagaggagggaaccagcaccgagcccagcgaaggcagcgccccaggcaccagcaccgagcctagtgagcaggagattaaacggatcaacaagatcagaagaagacttgtgaaagacagcaacaccaagaaggccggcaagacaggccccatgaaaaccctgctggttagagtgatgacacccgatctgagagagcggctggaaaacctgagaaagaagcctgaaaatatcccccagcccatcagcaatacatctagagccaacctgaataagctgctgaccgattacaccgaaatgaagaaggcgatcctgcatgtgtactgggaagagttccagaaggaccctgtgggcctgatgagccgggtggcccagcctgccagcaagaagatcgatcagaacaagctgaaacctgagatggacgagaagggcaacctgaccaccgccggctttgcctgctctcagtgtggccagcccctgttcgtgtacaagctggagcaggtgtctgagaagggcaaggcttacaccaactacttcggacggtgcaatgtggccgagcacgaaaagctgatcctgctggcccagctgaagcccgagaaggatagcgacgaagccgtgacatatagcctgggaaagtttgggcagagggccctggatttctacagcattcatgtgaccaaggagtccacccaccccgtgaagcccctggcccagatcgccggaaacagatacgcctccggacctgtgggaaaggccctgagcgacgcatgtatgggcacaatcgcctccttcctgtctaagtaccaggacatcatcatcgaacaccagaaggtggtgaagggcaaccagaagagactggagagcctgcgggagctggccggcaaggaaaacctggaataccctagcgtgaccctgccacctcagcctcacaccaaggagggcgttgatgcctacaacgaagtgatcgcccgggtgcgaatgtgggtgaacctgaacctgtggcagaagctgaagctaagcagagatgatgccaagcctctgctgagactgaagggattcccttcctttcctctggtcgagagacaggccaacgaagtggactggtgggacatggtgtgtaacgtgaagaagctgatcaacgagaaaaaggaggatggcaaggtgttttggcagaatctggctggctacaagagacaggaagccctgagaccatacctgagcagcgaggaagatcggaagaagggaaagaaattcgctcggtaccagctgggcgacctgctgctgcacctggaaaagaagcacggcgaggactggggaaaggtgtacgacgaggcctgggagcggattgacaagaaagtggaaggcctgagcaagcacatcaagctggaagaggaacggagaagcgaggacgcccagagcaaggccgccctgaccgactggctgcgggctaaggccagcttcgtgatcgagggcctgaaggaggccgacaaggacgagttctgcagatgcgagctgaagctgcagaagtggtacggggacctgcggggaaagcccttcgccatcgaagccgagaacagcatcctggacatcagcggcttcagcaagcagtacaactgtgccttcatctggcagaaggacggcgtgaagaagctgaacctgtacctgatcatcaactacttcaagggcggcaagctgcggttcaagaagatcaaacctgaagccttcgaagccaacagattctacaccgtgatcaacaaaaagagcggcgagatcgtgcccatggaggtgaacttcaacttcgacgaccccaacctgatcatcctgcctctggcctttggcaagagacagggcagagaattcatctggaacgacctgctgtccctggaaaccggcagcctgaagctggccaacggaagagtgatcgagaagacactgtacaacagaagaacccggcaggatgagcctgccctgttcgtggccctgaccttcgagcggcgggaggtcctggactcctccaatatcaaaccaatgaacctgatcggcgtggcaagaggcgaaaacatccccgccgtgatcgccctgaccgaccccgagggctgcccactgagccggtttaaggatagcctgggaaacccaacccacatcctgagaatcggcgagagctataaggagaagcagcggaccatccaggccaagaaggaggtggagcagcggagagccggcggctacagccggaagtacgccagcaaagccaagaatctggcagacgatatggtgagaaacaccgctagagatctgctgtactacgccgtgacccaggatgccatgctgatcttcgccaacctgagccggggcttcggccggcagggcaagcggaccttcatggccgagagacagtacacacggatggaggactggctgaccgccaagctggcctacgagggcctgagcaagacctacctgtccaagacactggcccagtacacctccaagacatgcagcaactgtgggtttaccatcaccagcgccgactacgacagggtgctggagaagctgaagaagacagcaacaggctggatgaccacaattaacggcaaggagctgaaggtggagggccagattacctactacaacagatacaagagacagaacgtagtcaaggacctgtccgtcgagctggatagactgagcgaagaatctgtgaacaacgacatctcctcctggacaaagggcagaagcggagaagctctgagcctcctgaagaaaagattctcccatagacccgtgcaggagaagttcgtgtgcctgaactgcggcttcgagacacacgcagccgagcaagccgccctgaacatcgccagatcctggctgttcctgcggagccaggagtacaagaaataccagacaaacaagacaaccggcaacaccgataagagagccttcgtcgagacctggcagtccttttaccggaagaagcttaaggaggtgtggaaacctgccgtgcggtctggcggatctggcggaggctccaccagccccaagaaaaagagaaaagtctaagctgccttctgcggggcttgccttctggccatgcccttcttctctcccttgcacctgtacctcttggtctttgaataaagcctgagtaggaaggctagcaaaaaaaaaaaaaaaaaaaaaaaaaaaaaaaaaaaaaaaaaaaaaaaaaaaaaaaaaaaaaaaaaaaaaaaaaaaaaaaa

SEQ ID NO: 9866 - RNA, 8787 nt, synthetic construct
  source 1..8787: mol_type = other RNA
aggaaataagagagaaaagaagagtaagaagaaatataagagccaccatggcccctaagaagaagcgtaaagtgagccggatgaaccacgaccaggagttcgacccccctaaggtgtaccctcccgtccccgccgagaagagaaagcccatccgggtcctgagcctgttcgatggcatcgccaccggtctgctggtgctgaaggacctgggcatccaggtggataggtacattgcctccgaggtgtgcgaggactccatcaccgtgggaatggtgcgtcatcagggcaagatcatgtacgtgggcgacgtgcggagcgtgacacagaagcatatccaggagtggggccctttcgacctggtgatcggcggcagcccttgcaatgacctgagcatcgtgaacccagcccggaagggcctgtacgagggaaccggcagactgttcttcgagttttacagactgctgcacgacgcccggcctaaggaaggcgacgaccggcccttcttttggctgttcgagaatgtggtggccatgggagtcagcgacaagcgggatattagccggttcctggagagcaaccccgtgatgatcgatgccaaggaagtgagcgccgcccaccgggccagatacttctggggcaatctgcctggcatgaacagacccctggccagcaccgtgaacgacaagctggagctgcaggagtgcctggagcacggccggatcgccaagttcagcaaggtgagaaccatcaccacccgaagcaacagcatcaaacaaggcaaggaccagcactttcctgtgttcatgaacgagaaggaggacatcctgtggtgtaccgagatggagagagtgttcgggttcccagtccactacacagatgtcagcaacatgtctagactggccagacagagactgctgggaagaagctggtccgtccctgtgatcagacacctgttcgcccctctgaaggagtacttcgcctgcgtgagcagcggcaacagcaacgccaacagccggggccccagcttctctagcggcctggtgccactgtccctgagagggagccacatgggccccatggagatctacaaaaccgtgagcgcctggaagcggcagcctgtgcgcgtgctgagcctgtttcggaatatcgataaagtcctgaaaagcctgggattcctggagagcggctctggctccggcggtggcaccctgaagtacgtggaggatgtgacaaacgtggtcagacgggatgtggagaagtggggccccttcgatctggtgtacggcagcacccaacccctgggcagctcttgtgaccggtgccctggctggtacatgtttcagttccaccggatcctgcagtacgccctgccgagacaggagtcccagcggccattcttttggattttcatggacaacttgctgctgaccgaggatgaccaggaaactaccactcggttcctgcagaccgaagccgtgaccctgcaggacgtgagaggccgggactaccagaacgccatgcgggtgtggtccaacatccctggactgaaaagcaagcacgcacctctgacccctaaagaagaggagtacctgcaggcccaggtgcggagcagaagcaagctggacgcccctaaggtggatctgctggtgaagaattgcctcctgcccctgagagagtacttcaagtatttcagccagaatagtctgcccctgggaggcagcggcggcggcaaggaggccttcatggccttcggcgacgtggccgtggacttcacccaggaggagtggaggctgctgagccccgcccagaggaccctgcacagggaggtgatgctggagacctacaaccacctggtgagcctggagatccccttcagcaagcccaagctgatcagccagctggagaggggcgaggagccctggatcaaggagaggcagaggcccctgagcctgtgccccgccggcagcaagctgggcggcccaagcagcggcgcccctcctcccagcggcggcaggcggcccaagcagcggcgcccctcctcccagcggcggcagcccagccggctccccaacctctaccgaggagggcacctctgagtccgccacccccgagagcggccctggcacctccaccgagcccagcgagggcagcgcacccggcagccctgccggcagccccacctccacagaggagggaaccagcaccgagcccagcgaaggcagcgccccaggcaccagcaccgagcctagtgagcaggagattaaacggatcaacaagatcagaagaagacttgtgaaagacagcaacaccaagaaggccggcaagacaggccccatgaaaaccctgctggttagagtgatgacacccgatctgagagagcggctggaaaacctgagaaagaagcctgaaaatatcccccagcccatcagcaatacatctagagccaacctgaataagctgctgaccgattacaccgaaatgaagaaggcgatcctgcatgtgtactgggaagagttccagaaggaccctgtgggcctgatgagccgggtggcccagcctgccagcaagaagatcgatcagaacaagctgaaacctgagatggacgagaagggcaacctgaccaccgccggctttgcctgctctcagtgtggccagcccctgttcgtgtacaagctggagcaggtgtctgagaagggcaaggcttacaccaactacttcggacggtgcaatgtggccgagcacgaaaagctgatcctgctggcccagctgaagcccgagaaggatagcgacgaagccgtgacatatagcctgggaaagtttgggcagagggccctggatttctacagcattcatgtgaccaaggagtccacccaccccgtgaagcccctggcccagatcgccggaaacagatacgcctccggacctgtgggaaaggccctgagcgacgcatgtatgggcacaatcgcctccttcctgtctaagtaccaggacatcatcatcgaacaccagaaggtggtgaagggcaaccagaagagactggagagcctgcgggagctggccggcaaggaaaacctggaataccctagcgtgaccctgccacctcagcctcacaccaaggagggcgttgatgcctacaacgaagtgatcgcccgggtgcgaatgtgggtgaacctgaacctgtggcagaagctgaagctaagcagagatgatgccaagcctctgctgagactgaagggattcccttcctttcctctggtcgagagacaggccaacgaagtggactggtgggacatggtgtgtaacgtgaagaagctgatcaacgagaaaaaggaggatggcaaggtgttttggcagaatctggctggctacaagagacaggaagccctgagaccatacctgagcagcgaggaagatcggaagaagggaaagaaattcgctcggtaccagctgggcgacctgctgctgcacctggaaaagaagcacggcgaggactggggaaaggtgtacgacgaggcctgggagcggattgacaagaaagtggaaggcctgagcaagcacatcaagctggaagaggaacggagaagcgaggacgcccagagcaaggccgccctgaccgactggctgcgggctaaggccagcttcgtgatcgagggcctgaaggaggccgacaaggacgagttctgcagatgcgagctgaagctgcagaagtggtacggggacctgcggggaaagcccttcgccatcgaagccgagaacagcatcctggacatcagcggcttcagcaagcagtacaactgtgccttcatctggcagaaggacggcgtgaagaagctgaacctgtacctgatcatcaactacttcaagggcggcaagctgcggttcaagaagatcaaacctgaagccttcgaagccaacagattctacaccgtgatcaacaaaaagagcggcgagatcgtgcccatggaggtgaacttcaacttcgacgaccccaacctgatcatcctgcctctggcctttggcaagagacagggcagagaattcatctggaacgacctgctgtccctggaaaccggcagcctgaagctggccaacggaagagtgatcgagaagacactgtacaacagaagaacccggcaggatgagcctgccctgttcgtggccctgaccttcgagcggcgggaggtcctggactcctccaatatcaaaccaatgaacctgatcggcgtggcaagaggcgaaaacatccccgccgtgatcgccctgaccgaccccgagggctgcccactgagccggtttaaggatagcctgggaaacccaacccacatcctgagaatcggcgagagctataaggagaagcagcggaccatccaggccaagaaggaggtggagcagcggagagccggcggctacagccggaagtacgccagcaaagccaagaatctggcagacgatatggtgagaaacaccgctagagatctgctgtactacgccgtgacccaggatgccatgctgatcttcgccaacctgagccggggcttcggccggcagggcaagcggaccttcatggccgagagacagtacacacggatggaggactggctgaccgccaagctggcctacgagggcctgagcaagacctacctgtccaagacactggcccagtacacctccaagacatgcagcaactgtgggtttaccatcaccagcgccgactacgacagggtgctggagaagctgaagaagacagcaacaggctggatgaccacaattaacggcaaggagctgaaggtggagggccagattacctactacaacagatacaagagacagaacgtagtcaaggacctgtccgtcgagctggatagactgagcgaagaatctgtgaacaacgacatctcctcctggacaaagggcagaagcggagaagctctgagcctcctgaagaaaagattctcccatagacccgtgcaggagaagttcgtgtgcctgaactgcggcttcgagacacacgcagccgagcaagccgccctgaacatcgccagatcctggctgttcctgcggagccaggagtacaagaaataccagacaaacaagacaaccggcaacaccgataagagagccttcgtcgagacctggcagtccttttaccggaagaagcttaaggaggtgtggaaacctgccgtgcggtctggcggatctggcggaggctccaccagccccaagaaaaagagaaaagtctaagctgccttctgcggggcttgccttctggccatgcccttcttctctcccttgcacctgtacctcttggtctttgaataaagcctgagtaggaaggctagcaaaaaaaaaaaaaaaaaaaaaaaaaaaaaaaaaaaaaaaaaaaaaaaaaaaaaaaaaaaaaaaaaaaaaaaaaaaaaaaagcccagccggctccccaacctctaccgaggagggcacctctgagtccgccacccccgagagcggccctggcacctccaccgagcccagcgagggcagcgcacccggcagccctgccggcagccccacctccacagaggagggaaccagcaccgagcccagcgaaggcagcgccccaggcaccagcaccgagcctagtgagcaggagattaaacggatcaacaagatcagaagaagacttgtgaaagacagcaacaccaagaaggccggcaagacaggccccatgaaaaccctgctggttagagtgatgacacccgatctgagagagcggctggaaaacctgagaaagaagcctgaaaatatcccccagcccatcagcaatacatctagagccaacctgaataagctgctgaccgattacaccgaaatgaagaaggcgatcctgcatgtgtactgggaagagttccagaaggaccctgtgggcctgatgagccgggtggcccagcctgccagcaagaagatcgatcagaacaagctgaaacctgagatggacgagaagggcaacctgaccaccgccggctttgcctgctctcagtgtggccagcccctgttcgtgtacaagctggagcaggtgtctgagaagggcaaggcttacaccaactacttcggacggtgcaatgtggccgagcacgaaaagctgatcctgctggcccagctgaagcccgagaaggatagcgacgaagccgtgacatatagcctgggaaagtttgggcagagggccctggatttctacagcattcatgtgaccaaggagtccacccaccccgtgaagcccctggcccagatcgccggaaacagatacgcctccggacctgtgggaaaggccctgagcgacgcatgtatgggcacaatcgcctccttcctgtctaagtaccaggacatcatcatcgaacaccagaaggtggtgaagggcaaccagaagagactggagagcctgcgggagctggccggcaaggaaaacctggaataccctagcgtgaccctgccacctcagcctcacaccaaggagggcgttgatgcctacaacgaagtgatcgcccgggtgcgaatgtgggtgaacctgaacctgtggcagaagctgaagctaagcagagatgatgccaagcctctgctgagactgaagggattcccttcctttcctctggtcgagagacaggccaacgaagtggactggtgggacatggtgtgtaacgtgaagaagctgatcaacgagaaaaaggaggatggcaaggtgttttggcagaatctggctggctacaagagacaggaagccctgagaccatacctgagcagcgaggaagatcggaagaagggaaagaaattcgctcggtaccagctgggcgacctgctgctgcacctggaaaagaagcacggcgaggactggggaaaggtgtacgacgaggcctgggagcggattgacaagaaagtggaaggcctgagcaagcacatcaagctggaagaggaacggagaagcgaggacgcccagagcaaggccgccctgaccgactggctgcgggctaaggccagcttcgtgatcgagggcctgaaggaggccgacaaggacgagttctgcagatgcgagctgaagctgcagaagtggtacggggacctgcggggaaagcccttcgccatcgaagccgagaacagcatcctggacatcagcggcttcagcaagcagtacaactgtgccttcatctggcagaaggacggcgtgaagaagctgaacctgtacctgatcatcaactacttcaagggcggcaagctgcggttcaagaagatcaaacctgaagccttcgaagccaacagattctacaccgtgatcaacaaaaagagcggcgagatcgtgcccatggaggtgaacttcaacttcgacgaccccaacctgatcatcctgcctctggcctttggcaagagacagggcagagaattcatctggaacgacctgctgtccctggaaaccggcagcctgaagctggccaacggaagagtgatcgagaagacactgtacaacagaagaacccggcaggatgagcctgccctgttcgtggccctgaccttcgagcggcgggaggtcctggactcctccaatatcaaaccaatgaacctgatcggcgtggcaagaggcgaaaacatccccgccgtgatcgccctgaccgaccccgagggctgcccactgagccggtttaaggatagcctgggaaacccaacccacatcctgagaatcggcgagagctataaggagaagcagcggaccatccaggccaagaaggaggtggagcagcggagagccggcggctacagccggaagtacgccagcaaagccaagaatctggcagacgatatggtgagaaacaccgctagagatctgctgtactacgccgtgacccaggatgccatgctgatcttcgccaacctgagccggggcttcggccggcagggcaagcggaccttcatggccgagagacagtacacacggatggaggactggctgaccgccaagctggcctacgagggcctgagcaagacctacctgtccaagacactggcccagtacacctccaagacatgcagcaactgtgggtttaccatcaccagcgccgactacgacagggtgctggagaagctgaagaagacagcaacaggctggatgaccacaattaacggcaaggagctgaaggtggagggccagattacctactacaacagatacaagagacagaacgtagtcaaggacctgtccgtcgagctggatagactgagcgaagaatctgtgaacaacgacatctcctcctggacaaagggcagaagcggagaagctctgagcctcctgaagaaaagattctcccatagacccgtgcaggagaagttcgtgtgcctgaactgcggcttcgagacacacgcagccgagcaagccgccctgaacatcgccagatcctggctgttcctgcggagccaggagtacaagaaataccagacaaacaagacaaccggcaacaccgataagagagccttcgtcgagacctggcagtccttttaccggaagaagcttaaggaggtgtggaaacctgccgtgcggtctggcggatctggcggaggctccaccagccccaagaaaaagagaaaagtctaagctgccttctgcggggcttgccttctggccatgcccttcttctctcccttgcacctgtacctcttggtctttgaataaagcctgagtaggaaggctagcaaaaaaaaaaaaaaaaaaaaaaaaaaaaaaaaaaaaaaaaaaaaaaaaaaaaaaaaaaaaaaaaaaaaaaaaaaaaaaaa

SEQ ID NO: 9867 - RNA, 8787 nt, synthetic construct
  source 1..8787: mol_type = other RNA
aggaaataagagagaaaagaagagtaagaagaaatataagagccaccatggcccctaagaagaagcgtaaagtgagccggatgaaccacgaccaggagttcgacccccctaaggtgtaccctcccgtccccgccgagaagagaaagcccatccgggtcctgagcctgttcgatggcatcgccaccggtctgctggtgctgaaggacctgggcatccaggtggataggtacattgcctccgaggtgtgcgaggactccatcaccgtgggaatggtgcgtcatcagggcaagatcatgtacgtgggcgacgtgcggagcgtgacacagaagcatatccaggagtggggccctttcgacctggtgatcggcggcagcccttgcaatgacctgagcatcgtgaacccagcccggaagggcctgtacgagggaaccggcagactgttcttcgagttttacagactgctgcacgacgcccggcctaaggaaggcgacgaccggcccttcttttggctgttcgagaatgtggtggccatgggagtcagcgacaagcgggatattagccggttcctggagagcaaccccgtgatgatcgatgccaaggaagtgagcgccgcccaccgggccagatacttctggggcaatctgcctggcatgaacagacccctggccagcaccgtgaacgacaagctggagctgcaggagtgcctggagcacggccggatcgccaagttcagcaaggtgagaaccatcaccacccgaagcaacagcatcaaacaaggcaaggaccagcactttcctgtgttcatgaacgagaaggaggacatcctgtggtgtaccgagatggagagagtgttcgggttcccagtccactacacagatgtcagcaacatgtctagactggccagacagagactgctgggaagaagctggtccgtccctgtgatcagacacctgttcgcccctctgaaggagtacttcgcctgcgtgagcagcggcaacagcaacgccaacagccggggccccagcttctctagcggcctggtgccactgtccctgagagggagccacatgggccccatggagatctacaaaaccgtgagcgcctggaagcggcagcctgtgcgcgtgctgagcctgtttcggaatatcgataaagtcctgaaaagcctgggattcctggagagcggctctggctccggcggtggcaccctgaagtacgtggaggatgtgacaaacgtggtcagacgggatgtggagaagtggggccccttcgatctggtgtacggcagcacccaacccctgggcagctcttgtgaccggtgccctggctggtacatgtttcagttccaccggatcctgcagtacgccctgccgagacaggagtcccagcggccattcttttggattttcatggacaacttgctgctgaccgaggatgaccaggaaactaccactcggttcctgcagaccgaagccgtgaccctgcaggacgtgagaggccgggactaccagaacgccatgcgggtgtggtccaacatccctggactgaaaagcaagcacgcacctctgacccctaaagaagaggagtacctgcaggcccaggtgcggagcagaagcaagctggacgcccctaaggtggatctgctggtgaagaattgcctcctgcccctgagagagtacttcaagtatttcagccagaatagtctgcccctgggaggcagcggcggcggcaagagcatggtgaccttcgaggacgtggccgtgtacttcagccaggaggagtgggagctgctggacgccgcccagaggcacctgtaccacagcgtgatgctggagaacctggagctggtgaccagcctgggctgctggcacggcgtggagggcgaggaggcccaccccgagcagaacgtgagcgtggaggtgctgcaggtgaggatccccaacgccgaccccagcaccaagaaggccaacagcggcggcccaagcagcggcgcccctcctcccagcggcggcaggcggcccaagcagcggcgcccctcctcccagcggcggcagcccagccggctccccaacctctaccgaggagggcacctctgagtccgccacccccgagagcggccctggcacctccaccgagcccagcgagggcagcgcacccggcagccctgccggcagccccacctccacagaggagggaaccagcaccgagcccagcgaaggcagcgccccaggcaccagcaccgagcctagtgagcaggagattaaacggatcaacaagatcagaagaagacttgtgaaagacagcaacaccaagaaggccggcaagacaggccccatgaaaaccctgctggttagagtgatgacacccgatctgagagagcggctggaaaacctgagaaagaagcctgaaaatatcccccagcccatcagcaatacatctagagccaacctgaataagctgctgaccgattacaccgaaatgaagaaggcgatcctgcatgtgtactgggaagagttccagaaggaccctgtgggcctgatgagccgggtggcccagcctgccagcaagaagatcgatcagaacaagctgaaacctgagatggacgagaagggcaacctgaccaccgccggctttgcctgctctcagtgtggccagcccctgttcgtgtacaagctggagcaggtgtctgagaagggcaaggcttacaccaactacttcggacggtgcaatgtggccgagcacgaaaagctgatcctgctggcccagctgaagcccgagaaggatagcgacgaagccgtgacatatagcctgggaaagtttgggcagagggccctggatttctacagcattcatgtgaccaaggagtccacccaccccgtgaagcccctggcccagatcgccggaaacagatacgcctccggacctgtgggaaaggccctgagcgacgcatgtatgggcacaatcgcctccttcctgtctaagtaccaggacatcatcatcgaacaccagaaggtggtgaagggcaaccagaagagactggagagcctgcgggagctggccggcaaggaaaacctggaataccctagcgtgaccctgccacctcagcctcacaccaaggagggcgttgatgcctacaacgaagtgatcgcccgggtgcgaatgtgggtgaacctgaacctgtggcagaagctgaagctaagcagagatgatgccaagcctctgctgagactgaagggattcccttcctttcctctggtcgagagacaggccaacgaagtggactggtgggacatggtgtgtaacgtgaagaagctgatcaacgagaaaaaggaggatggcaaggtgttttggcagaatctggctggctacaagagacaggaagccctgagaccatacctgagcagcgaggaagatcggaagaagggaaagaaattcgctcggtaccagctgggcgacctgctgctgcacctggaaaagaagcacggcgaggactggggaaaggtgtacgacgaggcctgggagcggattgacaagaaagtggaaggcctgagcaagcacatcaagctggaagaggaacggagaagcgaggacgcccagagcaaggccgccctgaccgactggctgcgggctaaggccagcttcgtgatcgagggcctgaaggaggccgacaaggacgagttctgcagatgcgagctgaagctgcagaagtggtacggggacctgcggggaaagcccttcgccatcgaagccgagaacagcatcctggacatcagcggcttcagcaagcagtacaactgtgccttcatctggcagaaggacggcgtgaagaagctgaacctgtacctgatcatcaactacttcaagggcggcaagctgcggttcaagaagatcaaacctgaagccttcgaagccaacagattctacaccgtgatcaacaaaaagagcggcgagatcgtgcccatggaggtgaacttcaacttcgacgaccccaacctgatcatcctgcctctggcctttggcaagagacagggcagagaattcatctggaacgacctgctgtccctggaaaccggcagcctgaagctggccaacggaagagtgatcgagaagacactgtacaacagaagaacccggcaggatgagcctgccctgttcgtggccctgaccttcgagcggcgggaggtcctggactcctccaatatcaaaccaatgaacctgatcggcgtggcaagaggcgaaaacatccccgccgtgatcgccctgaccgaccccgagggctgcccactgagccggtttaaggatagcctgggaaacccaacccacatcctgagaatcggcgagagctataaggagaagcagcggaccatccaggccaagaaggaggtggagcagcggagagccggcggctacagccggaagtacgccagcaaagccaagaatctggcagacgatatggtgagaaacaccgctagagatctgctgtactacgccgtgacccaggatgccatgctgatcttcgccaacctgagccggggcttcggccggcagggcaagcggaccttcatggccgagagacagtacacacggatggaggactggctgaccgccaagctggcctacgagggcctgagcaagacctacctgtccaagacactggcccagtacacctccaagacatgcagcaactgtgggtttaccatcaccagcgccgactacgacagggtgctggagaagctgaagaagacagcaacaggctggatgaccacaattaacggcaaggagctgaaggtggagggccagattacctactacaacagatacaagagacagaacgtagtcaaggacctgtccgtcgagctggatagactgagcgaagaatctgtgaacaacgacatctcctcctggacaaagggcagaagcggagaagctctgagcctcctgaagaaaagattctcccatagacccgtgcaggagaagttcgtgtgcctgaactgcggcttcgagacacacgcagccgagcaagccgccctgaacatcgccagatcctggctgttcctgcggagccaggagtacaagaaataccagacaaacaagacaaccggcaacaccgataagagagccttcgtcgagacctggcagtccttttaccggaagaagcttaaggaggtgtggaaacctgccgtgcggtctggcggatctggcggaggctccaccagccccaagaaaaagagaaaagtctaagctgccttctgcggggcttgccttctggccatgcccttcttctctcccttgcacctgtacctcttggtctttgaataaagcctgagtaggaaggctagcaaaaaaaaaaaaaaaaaaaaaaaaaaaaaaaaaaaaaaaaaaaaaaaaaaaaaaaaaaaaaaaaaaaaaaaaaaaaaaaagcccagccggctccccaacctctaccgaggagggcacctctgagtccgccacccccgagagcggccctggcacctccaccgagcccagcgagggcagcgcacccggcagccctgccggcagccccacctccacagaggagggaaccagcaccgagcccagcgaaggcagcgccccaggcaccagcaccgagcctagtgagcaggagattaaacggatcaacaagatcagaagaagacttgtgaaagacagcaacaccaagaaggccggcaagacaggccccatgaaaaccctgctggttagagtgatgacacccgatctgagagagcggctggaaaacctgagaaagaagcctgaaaatatcccccagcccatcagcaatacatctagagccaacctgaataagctgctgaccgattacaccgaaatgaagaaggcgatcctgcatgtgtactgggaagagttccagaaggaccctgtgggcctgatgagccgggtggcccagcctgccagcaagaagatcgatcagaacaagctgaaacctgagatggacgagaagggcaacctgaccaccgccggctttgcctgctctcagtgtggccagcccctgttcgtgtacaagctggagcaggtgtctgagaagggcaaggcttacaccaactacttcggacggtgcaatgtggccgagcacgaaaagctgatcctgctggcccagctgaagcccgagaaggatagcgacgaagccgtgacatatagcctgggaaagtttgggcagagggccctggatttctacagcattcatgtgaccaaggagtccacccaccccgtgaagcccctggcccagatcgccggaaacagatacgcctccggacctgtgggaaaggccctgagcgacgcatgtatgggcacaatcgcctccttcctgtctaagtaccaggacatcatcatcgaacaccagaaggtggtgaagggcaaccagaagagactggagagcctgcgggagctggccggcaaggaaaacctggaataccctagcgtgaccctgccacctcagcctcacaccaaggagggcgttgatgcctacaacgaagtgatcgcccgggtgcgaatgtgggtgaacctgaacctgtggcagaagctgaagctaagcagagatgatgccaagcctctgctgagactgaagggattcccttcctttcctctggtcgagagacaggccaacgaagtggactggtgggacatggtgtgtaacgtgaagaagctgatcaacgagaaaaaggaggatggcaaggtgttttggcagaatctggctggctacaagagacaggaagccctgagaccatacctgagcagcgaggaagatcggaagaagggaaagaaattcgctcggtaccagctgggcgacctgctgctgcacctggaaaagaagcacggcgaggactggggaaaggtgtacgacgaggcctgggagcggattgacaagaaagtggaaggcctgagcaagcacatcaagctggaagaggaacggagaagcgaggacgcccagagcaaggccgccctgaccgactggctgcgggctaaggccagcttcgtgatcgagggcctgaaggaggccgacaaggacgagttctgcagatgcgagctgaagctgcagaagtggtacggggacctgcggggaaagcccttcgccatcgaagccgagaacagcatcctggacatcagcggcttcagcaagcagtacaactgtgccttcatctggcagaaggacggcgtgaagaagctgaacctgtacctgatcatcaactacttcaagggcggcaagctgcggttcaagaagatcaaacctgaagccttcgaagccaacagattctacaccgtgatcaacaaaaagagcggcgagatcgtgcccatggaggtgaacttcaacttcgacgaccccaacctgatcatcctgcctctggcctttggcaagagacagggcagagaattcatctggaacgacctgctgtccctggaaaccggcagcctgaagctggccaacggaagagtgatcgagaagacactgtacaacagaagaacccggcaggatgagcctgccctgttcgtggccctgaccttcgagcggcgggaggtcctggactcctccaatatcaaaccaatgaacctgatcggcgtggcaagaggcgaaaacatccccgccgtgatcgccctgaccgaccccgagggctgcccactgagccggtttaaggatagcctgggaaacccaacccacatcctgagaatcggcgagagctataaggagaagcagcggaccatccaggccaagaaggaggtggagcagcggagagccggcggctacagccggaagtacgccagcaaagccaagaatctggcagacgatatggtgagaaacaccgctagagatctgctgtactacgccgtgacccaggatgccatgctgatcttcgccaacctgagccggggcttcggccggcagggcaagcggaccttcatggccgagagacagtacacacggatggaggactggctgaccgccaagctggcctacgagggcctgagcaagacctacctgtccaagacactggcccagtacacctccaagacatgcagcaactgtgggtttaccatcaccagcgccgactacgacagggtgctggagaagctgaagaagacagcaacaggctggatgaccacaattaacggcaaggagctgaaggtggagggccagattacctactacaacagatacaagagacagaacgtagtcaaggacctgtccgtcgagctggatagactgagcgaagaatctgtgaacaacgacatctcctcctggacaaagggcagaagcggagaagctctgagcctcctgaagaaaagattctcccatagacccgtgcaggagaagttcgtgtgcctgaactgcggcttcgagacacacgcagccgagcaagccgccctgaacatcgccagatcctggctgttcctgcggagccaggagtacaagaaataccagacaaacaagacaaccggcaacaccgataagagagccttcgtcgagacctggcagtccttttaccggaagaagcttaaggaggtgtggaaacctgccgtgcggtctggcggatctggcggaggctccaccagccccaagaaaaagagaaaagtctaagctgccttctgcggggcttgccttctggccatgcccttcttctctcccttgcacctgtacctcttggtctttgaataaagcctgagtaggaaggctagcaaaaaaaaaaaaaaaaaaaaaaaaaaaaaaaaaaaaaaaaaaaaaaaaaaaaaaaaaaaaaaaaaaaaaaaaaaaaaaaa

SEQ ID NO: 9868 - RNA, 8787 nt, synthetic construct
  source 1..8787: mol_type = other RNA
aggaaataagagagaaaagaagagtaagaagaaatataagagccaccatggcccctaagaagaagcgtaaagtgagccggatgaaccacgaccaggagttcgacccccctaaggtgtaccctcccgtccccgccgagaagagaaagcccatccgggtcctgagcctgttcgatggcatcgccaccggtctgctggtgctgaaggacctgggcatccaggtggataggtacattgcctccgaggtgtgcgaggactccatcaccgtgggaatggtgcgtcatcagggcaagatcatgtacgtgggcgacgtgcggagcgtgacacagaagcatatccaggagtggggccctttcgacctggtgatcggcggcagcccttgcaatgacctgagcatcgtgaacccagcccggaagggcctgtacgagggaaccggcagactgttcttcgagttttacagactgctgcacgacgcccggcctaaggaaggcgacgaccggcccttcttttggctgttcgagaatgtggtggccatgggagtcagcgacaagcgggatattagccggttcctggagagcaaccccgtgatgatcgatgccaaggaagtgagcgccgcccaccgggccagatacttctggggcaatctgcctggcatgaacagacccctggccagcaccgtgaacgacaagctggagctgcaggagtgcctggagcacggccggatcgccaagttcagcaaggtgagaaccatcaccacccgaagcaacagcatcaaacaaggcaaggaccagcactttcctgtgttcatgaacgagaaggaggacatcctgtggtgtaccgagatggagagagtgttcgggttcccagtccactacacagatgtcagcaacatgtctagactggccagacagagactgctgggaagaagctggtccgtccctgtgatcagacacctgttcgcccctctgaaggagtacttcgcctgcgtgagcagcggcaacagcaacgccaacagccggggccccagcttctctagcggcctggtgccactgtccctgagagggagccacatgggccccatggagatctacaaaaccgtgagcgcctggaagcggcagcctgtgcgcgtgctgagcctgtttcggaatatcgataaagtcctgaaaagcctgggattcctggagagcggctctggctccggcggtggcaccctgaagtacgtggaggatgtgacaaacgtggtcagacgggatgtggagaagtggggccccttcgatctggtgtacggcagcacccaacccctgggcagctcttgtgaccggtgccctggctggtacatgtttcagttccaccggatcctgcagtacgccctgccgagacaggagtcccagcggccattcttttggattttcatggacaacttgctgctgaccgaggatgaccaggaaactaccactcggttcctgcagaccgaagccgtgaccctgcaggacgtgagaggccgggactaccagaacgccatgcgggtgtggtccaacatccctggactgaaaagcaagcacgcacctctgacccctaaagaagaggagtacctgcaggcccaggtgcggagcagaagcaagctggacgcccctaaggtggatctgctggtgaagaattgcctcctgcccctgagagagtacttcaagtatttcagccagaatagtctgcccctgggaggcagcggcggcggccccctgaagctggtgaccttcgaggacgtggccgtggacttcacccaggaggagtggagcctgctggacaagagccagaagaacctgttcaggaacgtgatgatggagaccatccaccacctggtgagcgtgggctaccagatcagcaagagcgacgtgatcagccagctggagcagggcaaggagctgtggagcaaggccgccggcggcttccagggccagaggcccggcgagcaccagggcggcggcccaagcagcggcgcccctcctcccagcggcggcaggcggcccaagcagcggcgcccctcctcccagcggcggcagcccagccggctccccaacctctaccgaggagggcacctctgagtccgccacccccgagagcggccctggcacctccaccgagcccagcgagggcagcgcacccggcagccctgccggcagccccacctccacagaggagggaaccagcaccgagcccagcgaaggcagcgccccaggcaccagcaccgagcctagtgagcaggagattaaacggatcaacaagatcagaagaagacttgtgaaagacagcaacaccaagaaggccggcaagacaggccccatgaaaaccctgctggttagagtgatgacacccgatctgagagagcggctggaaaacctgagaaagaagcctgaaaatatcccccagcccatcagcaatacatctagagccaacctgaataagctgctgaccgattacaccgaaatgaagaaggcgatcctgcatgtgtactgggaagagttccagaaggaccctgtgggcctgatgagccgggtggcccagcctgccagcaagaagatcgatcagaacaagctgaaacctgagatggacgagaagggcaacctgaccaccgccggctttgcctgctctcagtgtggccagcccctgttcgtgtacaagctggagcaggtgtctgagaagggcaaggcttacaccaactacttcggacggtgcaatgtggccgagcacgaaaagctgatcctgctggcccagctgaagcccgagaaggatagcgacgaagccgtgacatatagcctgggaaagtttgggcagagggccctggatttctacagcattcatgtgaccaaggagtccacccaccccgtgaagcccctggcccagatcgccggaaacagatacgcctccggacctgtgggaaaggccctgagcgacgcatgtatgggcacaatcgcctccttcctgtctaagtaccaggacatcatcatcgaacaccagaaggtggtgaagggcaaccagaagagactggagagcctgcgggagctggccggcaaggaaaacctggaataccctagcgtgaccctgccacctcagcctcacaccaaggagggcgttgatgcctacaacgaagtgatcgcccgggtgcgaatgtgggtgaacctgaacctgtggcagaagctgaagctaagcagagatgatgccaagcctctgctgagactgaagggattcccttcctttcctctggtcgagagacaggccaacgaagtggactggtgggacatggtgtgtaacgtgaagaagctgatcaacgagaaaaaggaggatggcaaggtgttttggcagaatctggctggctacaagagacaggaagccctgagaccatacctgagcagcgaggaagatcggaagaagggaaagaaattcgctcggtaccagctgggcgacctgctgctgcacctggaaaagaagcacggcgaggactggggaaaggtgtacgacgaggcctgggagcggattgacaagaaagtggaaggcctgagcaagcacatcaagctggaagaggaacggagaagcgaggacgcccagagcaaggccgccctgaccgactggctgcgggctaaggccagcttcgtgatcgagggcctgaaggaggccgacaaggacgagttctgcagatgcgagctgaagctgcagaagtggtacggggacctgcggggaaagcccttcgccatcgaagccgagaacagcatcctggacatcagcggcttcagcaagcagtacaactgtgccttcatctggcagaaggacggcgtgaagaagctgaacctgtacctgatcatcaactacttcaagggcggcaagctgcggttcaagaagatcaaacctgaagccttcgaagccaacagattctacaccgtgatcaacaaaaagagcggcgagatcgtgcccatggaggtgaacttcaacttcgacgaccccaacctgatcatcctgcctctggcctttggcaagagacagggcagagaattcatctggaacgacctgctgtccctggaaaccggcagcctgaagctggccaacggaagagtgatcgagaagacactgtacaacagaagaacccggcaggatgagcctgccctgttcgtggccctgaccttcgagcggcgggaggtcctggactcctccaatatcaaaccaatgaacctgatcggcgtggcaagaggcgaaaacatccccgccgtgatcgccctgaccgaccccgagggctgcccactgagccggtttaaggatagcctgggaaacccaacccacatcctgagaatcggcgagagctataaggagaagcagcggaccatccaggccaagaaggaggtggagcagcggagagccggcggctacagccggaagtacgccagcaaagccaagaatctggcagacgatatggtgagaaacaccgctagagatctgctgtactacgccgtgacccaggatgccatgctgatcttcgccaacctgagccggggcttcggccggcagggcaagcggaccttcatggccgagagacagtacacacggatggaggactggctgaccgccaagctggcctacgagggcctgagcaagacctacctgtccaagacactggcccagtacacctccaagacatgcagcaactgtgggtttaccatcaccagcgccgactacgacagggtgctggagaagctgaagaagacagcaacaggctggatgaccacaattaacggcaaggagctgaaggtggagggccagattacctactacaacagatacaagagacagaacgtagtcaaggacctgtccgtcgagctggatagactgagcgaagaatctgtgaacaacgacatctcctcctggacaaagggcagaagcggagaagctctgagcctcctgaagaaaagattctcccatagacccgtgcaggagaagttcgtgtgcctgaactgcggcttcgagacacacgcagccgagcaagccgccctgaacatcgccagatcctggctgttcctgcggagccaggagtacaagaaataccagacaaacaagacaaccggcaacaccgataagagagccttcgtcgagacctggcagtccttttaccggaagaagcttaaggaggtgtggaaacctgccgtgcggtctggcggatctggcggaggctccaccagccccaagaaaaagagaaaagtctaagctgccttctgcggggcttgccttctggccatgcccttcttctctcccttgcacctgtacctcttggtctttgaataaagcctgagtaggaaggctagcaaaaaaaaaaaaaaaaaaaaaaaaaaaaaaaaaaaaaaaaaaaaaaaaaaaaaaaaaaaaaaaaaaaaaaaaaaaaaaaagcccagccggctccccaacctctaccgaggagggcacctctgagtccgccacccccgagagcggccctggcacctccaccgagcccagcgagggcagcgcacccggcagccctgccggcagccccacctccacagaggagggaaccagcaccgagcccagcgaaggcagcgccccaggcaccagcaccgagcctagtgagcaggagattaaacggatcaacaagatcagaagaagacttgtgaaagacagcaacaccaagaaggccggcaagacaggccccatgaaaaccctgctggttagagtgatgacacccgatctgagagagcggctggaaaacctgagaaagaagcctgaaaatatcccccagcccatcagcaatacatctagagccaacctgaataagctgctgaccgattacaccgaaatgaagaaggcgatcctgcatgtgtactgggaagagttccagaaggaccctgtgggcctgatgagccgggtggcccagcctgccagcaagaagatcgatcagaacaagctgaaacctgagatggacgagaagggcaacctgaccaccgccggctttgcctgctctcagtgtggccagcccctgttcgtgtacaagctggagcaggtgtctgagaagggcaaggcttacaccaactacttcggacggtgcaatgtggccgagcacgaaaagctgatcctgctggcccagctgaagcccgagaaggatagcgacgaagccgtgacatatagcctgggaaagtttgggcagagggccctggatttctacagcattcatgtgaccaaggagtccacccaccccgtgaagcccctggcccagatcgccggaaacagatacgcctccggacctgtgggaaaggccctgagcgacgcatgtatgggcacaatcgcctccttcctgtctaagtaccaggacatcatcatcgaacaccagaaggtggtgaagggcaaccagaagagactggagagcctgcgggagctggccggcaaggaaaacctggaataccctagcgtgaccctgccacctcagcctcacaccaaggagggcgttgatgcctacaacgaagtgatcgcccgggtgcgaatgtgggtgaacctgaacctgtggcagaagctgaagctaagcagagatgatgccaagcctctgctgagactgaagggattcccttcctttcctctggtcgagagacaggccaacgaagtggactggtgggacatggtgtgtaacgtgaagaagctgatcaacgagaaaaaggaggatggcaaggtgttttggcagaatctggctggctacaagagacaggaagccctgagaccatacctgagcagcgaggaagatcggaagaagggaaagaaattcgctcggtaccagctgggcgacctgctgctgcacctggaaaagaagcacggcgaggactggggaaaggtgtacgacgaggcctgggagcggattgacaagaaagtggaaggcctgagcaagcacatcaagctggaagaggaacggagaagcgaggacgcccagagcaaggccgccctgaccgactggctgcgggctaaggccagcttcgtgatcgagggcctgaaggaggccgacaaggacgagttctgcagatgcgagctgaagctgcagaagtggtacggggacctgcggggaaagcccttcgccatcgaagccgagaacagcatcctggacatcagcggcttcagcaagcagtacaactgtgccttcatctggcagaaggacggcgtgaagaagctgaacctgtacctgatcatcaactacttcaagggcggcaagctgcggttcaagaagatcaaacctgaagccttcgaagccaacagattctacaccgtgatcaacaaaaagagcggcgagatcgtgcccatggaggtgaacttcaacttcgacgaccccaacctgatcatcctgcctctggcctttggcaagagacagggcagagaattcatctggaacgacctgctgtccctggaaaccggcagcctgaagctggccaacggaagagtgatcgagaagacactgtacaacagaagaacccggcaggatgagcctgccctgttcgtggccctgaccttcgagcggcgggaggtcctggactcctccaatatcaaaccaatgaacctgatcggcgtggcaagaggcgaaaacatccccgccgtgatcgccctgaccgaccccgagggctgcccactgagccggtttaaggatagcctgggaaacccaacccacatcctgagaatcggcgagagctataaggagaagcagcggaccatccaggccaagaaggaggtggagcagcggagagccggcggctacagccggaagtacgccagcaaagccaagaatctggcagacgatatggtgagaaacaccgctagagatctgctgtactacgccgtgacccaggatgccatgctgatcttcgccaacctgagccggggcttcggccggcagggcaagcggaccttcatggccgagagacagtacacacggatggaggactggctgaccgccaagctggcctacgagggcctgagcaagacctacctgtccaagacactggcccagtacacctccaagacatgcagcaactgtgggtttaccatcaccagcgccgactacgacagggtgctggagaagctgaagaagacagcaacaggctggatgaccacaattaacggcaaggagctgaaggtggagggccagattacctactacaacagatacaagagacagaacgtagtcaaggacctgtccgtcgagctggatagactgagcgaagaatctgtgaacaacgacatctcctcctggacaaagggcagaagcggagaagctctgagcctcctgaagaaaagattctcccatagacccgtgcaggagaagttcgtgtgcctgaactgcggcttcgagacacacgcagccgagcaagccgccctgaacatcgccagatcctggctgttcctgcggagccaggagtacaagaaataccagacaaacaagacaaccggcaacaccgataagagagccttcgtcgagacctggcagtccttttaccggaagaagcttaaggaggtgtggaaacctgccgtgcggtctggcggatctggcggaggctccaccagccccaagaaaaagagaaaagtctaagctgccttctgcggggcttgccttctggccatgcccttcttctctcccttgcacctgtacctcttggtctttgaataaagcctgagtaggaaggctagcaaaaaaaaaaaaaaaaaaaaaaaaaaaaaaaaaaaaaaaaaaaaaaaaaaaaaaaaaaaaaaaaaaaaaaaaaaaaaaaa

SEQ ID NO: 9869 - RNA, 8787 nt, synthetic construct
  source 1..8787: mol_type = other RNA
aggaaataagagagaaaagaagagtaagaagaaatataagagccaccatggcccctaagaagaagcgtaaagtgagccggatgaaccacgaccaggagttcgacccccctaaggtgtaccctcccgtccccgccgagaagagaaagcccatccgggtcctgagcctgttcgatggcatcgccaccggtctgctggtgctgaaggacctgggcatccaggtggataggtacattgcctccgaggtgtgcgaggactccatcaccgtgggaatggtgcgtcatcagggcaagatcatgtacgtgggcgacgtgcggagcgtgacacagaagcatatccaggagtggggccctttcgacctggtgatcggcggcagcccttgcaatgacctgagcatcgtgaacccagcccggaagggcctgtacgagggaaccggcagactgttcttcgagttttacagactgctgcacgacgcccggcctaaggaaggcgacgaccggcccttcttttggctgttcgagaatgtggtggccatgggagtcagcgacaagcgggatattagccggttcctggagagcaaccccgtgatgatcgatgccaaggaagtgagcgccgcccaccgggccagatacttctggggcaatctgcctggcatgaacagacccctggccagcaccgtgaacgacaagctggagctgcaggagtgcctggagcacggccggatcgccaagttcagcaaggtgagaaccatcaccacccgaagcaacagcatcaaacaaggcaaggaccagcactttcctgtgttcatgaacgagaaggaggacatcctgtggtgtaccgagatggagagagtgttcgggttcccagtccactacacagatgtcagcaacatgtctagactggccagacagagactgctgggaagaagctggtccgtccctgtgatcagacacctgttcgcccctctgaaggagtacttcgcctgcgtgagcagcggcaacagcaacgccaacagccggggccccagcttctctagcggcctggtgccactgtccctgagagggagccacatgggccccatggagatctacaaaaccgtgagcgcctggaagcggcagcctgtgcgcgtgctgagcctgtttcggaatatcgataaagtcctgaaaagcctgggattcctggagagcggctctggctccggcggtggcaccctgaagtacgtggaggatgtgacaaacgtggtcagacgggatgtggagaagtggggccccttcgatctggtgtacggcagcacccaacccctgggcagctcttgtgaccggtgccctggctggtacatgtttcagttccaccggatcctgcagtacgccctgccgagacaggagtcccagcggccattcttttggattttcatggacaacttgctgctgaccgaggatgaccaggaaactaccactcggttcctgcagaccgaagccgtgaccctgcaggacgtgagaggccgggactaccagaacgccatgcgggtgtggtccaacatccctggactgaaaagcaagcacgcacctctgacccctaaagaagaggagtacctgcaggcccaggtgcggagcagaagcaagctggacgcccctaaggtggatctgctggtgaagaattgcctcctgcccctgagagagtacttcaagtatttcagccagaatagtctgcccctgggaggcagcggcggcggcttcaaggaggccgtgaccttcaaggacgtggccgtgaccttcaccgaggaggagctgggcctgctggaccccgcccagagggagctgtacagggacgtgatgctggagaacttcaggaacctggtgagcgtgggccaccagtgcttcatccccgacgtgatcagccagctggagagggaggagaagctgtggatgctgaggaccgccgcccagagcaggtgcagcagcggcgacaagaacctgggcggcccaagcagcggcgcccctcctcccagcggcggcaggcggcccaagcagcggcgcccctcctcccagcggcggcagcccagccggctccccaacctctaccgaggagggcacctctgagtccgccacccccgagagcggccctggcacctccaccgagcccagcgagggcagcgcacccggcagccctgccggcagccccacctccacagaggagggaaccagcaccgagcccagcgaaggcagcgccccaggcaccagcaccgagcctagtgagcaggagattaaacggatcaacaagatcagaagaagacttgtgaaagacagcaacaccaagaaggccggcaagacaggccccatgaaaaccctgctggttagagtgatgacacccgatctgagagagcggctggaaaacctgagaaagaagcctgaaaatatcccccagcccatcagcaatacatctagagccaacctgaataagctgctgaccgattacaccgaaatgaagaaggcgatcctgcatgtgtactgggaagagttccagaaggaccctgtgggcctgatgagccgggtggcccagcctgccagcaagaagatcgatcagaacaagctgaaacctgagatggacgagaagggcaacctgaccaccgccggctttgcctgctctcagtgtggccagcccctgttcgtgtacaagctggagcaggtgtctgagaagggcaaggcttacaccaactacttcggacggtgcaatgtggccgagcacgaaaagctgatcctgctggcccagctgaagcccgagaaggatagcgacgaagccgtgacatatagcctgggaaagtttgggcagagggccctggatttctacagcattcatgtgaccaaggagtccacccaccccgtgaagcccctggcccagatcgccggaaacagatacgcctccggacctgtgggaaaggccctgagcgacgcatgtatgggcacaatcgcctccttcctgtctaagtaccaggacatcatcatcgaacaccagaaggtggtgaagggcaaccagaagagactggagagcctgcgggagctggccggcaaggaaaacctggaataccctagcgtgaccctgccacctcagcctcacaccaaggagggcgttgatgcctacaacgaagtgatcgcccgggtgcgaatgtgggtgaacctgaacctgtggcagaagctgaagctaagcagagatgatgccaagcctctgctgagactgaagggattcccttcctttcctctggtcgagagacaggccaacgaagtggactggtgggacatggtgtgtaacgtgaagaagctgatcaacgagaaaaaggaggatggcaaggtgttttggcagaatctggctggctacaagagacaggaagccctgagaccatacctgagcagcgaggaagatcggaagaagggaaagaaattcgctcggtaccagctgggcgacctgctgctgcacctggaaaagaagcacggcgaggactggggaaaggtgtacgacgaggcctgggagcggattgacaagaaagtggaaggcctgagcaagcacatcaagctggaagaggaacggagaagcgaggacgcccagagcaaggccgccctgaccgactggctgcgggctaaggccagcttcgtgatcgagggcctgaaggaggccgacaaggacgagttctgcagatgcgagctgaagctgcagaagtggtacggggacctgcggggaaagcccttcgccatcgaagccgagaacagcatcctggacatcagcggcttcagcaagcagtacaactgtgccttcatctggcagaaggacggcgtgaagaagctgaacctgtacctgatcatcaactacttcaagggcggcaagctgcggttcaagaagatcaaacctgaagccttcgaagccaacagattctacaccgtgatcaacaaaaagagcggcgagatcgtgcccatggaggtgaacttcaacttcgacgaccccaacctgatcatcctgcctctggcctttggcaagagacagggcagagaattcatctggaacgacctgctgtccctggaaaccggcagcctgaagctggccaacggaagagtgatcgagaagacactgtacaacagaagaacccggcaggatgagcctgccctgttcgtggccctgaccttcgagcggcgggaggtcctggactcctccaatatcaaaccaatgaacctgatcggcgtggcaagaggcgaaaacatccccgccgtgatcgccctgaccgaccccgagggctgcccactgagccggtttaaggatagcctgggaaacccaacccacatcctgagaatcggcgagagctataaggagaagcagcggaccatccaggccaagaaggaggtggagcagcggagagccggcggctacagccggaagtacgccagcaaagccaagaatctggcagacgatatggtgagaaacaccgctagagatctgctgtactacgccgtgacccaggatgccatgctgatcttcgccaacctgagccggggcttcggccggcagggcaagcggaccttcatggccgagagacagtacacacggatggaggactggctgaccgccaagctggcctacgagggcctgagcaagacctacctgtccaagacactggcccagtacacctccaagacatgcagcaactgtgggtttaccatcaccagcgccgactacgacagggtgctggagaagctgaagaagacagcaacaggctggatgaccacaattaacggcaaggagctgaaggtggagggccagattacctactacaacagatacaagagacagaacgtagtcaaggacctgtccgtcgagctggatagactgagcgaagaatctgtgaacaacgacatctcctcctggacaaagggcagaagcggagaagctctgagcctcctgaagaaaagattctcccatagacccgtgcaggagaagttcgtgtgcctgaactgcggcttcgagacacacgcagccgagcaagccgccctgaacatcgccagatcctggctgttcctgcggagccaggagtacaagaaataccagacaaacaagacaaccggcaacaccgataagagagccttcgtcgagacctggcagtccttttaccggaagaagcttaaggaggtgtggaaacctgccgtgcggtctggcggatctggcggaggctccaccagccccaagaaaaagagaaaagtctaagctgccttctgcggggcttgccttctggccatgcccttcttctctcccttgcacctgtacctcttggtctttgaataaagcctgagtaggaaggctagcaaaaaaaaaaaaaaaaaaaaaaaaaaaaaaaaaaaaaaaaaaaaaaaaaaaaaaaaaaaaaaaaaaaaaaaaaaaaaaaagcccagccggctccccaacctctaccgaggagggcacctctgagtccgccacccccgagagcggccctggcacctccaccgagcccagcgagggcagcgcacccggcagccctgccggcagccccacctccacagaggagggaaccagcaccgagcccagcgaaggcagcgccccaggcaccagcaccgagcctagtgagcaggagattaaacggatcaacaagatcagaagaagacttgtgaaagacagcaacaccaagaaggccggcaagacaggccccatgaaaaccctgctggttagagtgatgacacccgatctgagagagcggctggaaaacctgagaaagaagcctgaaaatatcccccagcccatcagcaatacatctagagccaacctgaataagctgctgaccgattacaccgaaatgaagaaggcgatcctgcatgtgtactgggaagagttccagaaggaccctgtgggcctgatgagccgggtggcccagcctgccagcaagaagatcgatcagaacaagctgaaacctgagatggacgagaagggcaacctgaccaccgccggctttgcctgctctcagtgtggccagcccctgttcgtgtacaagctggagcaggtgtctgagaagggcaaggcttacaccaactacttcggacggtgcaatgtggccgagcacgaaaagctgatcctgctggcccagctgaagcccgagaaggatagcgacgaagccgtgacatatagcctgggaaagtttgggcagagggccctggatttctacagcattcatgtgaccaaggagtccacccaccccgtgaagcccctggcccagatcgccggaaacagatacgcctccggacctgtgggaaaggccctgagcgacgcatgtatgggcacaatcgcctccttcctgtctaagtaccaggacatcatcatcgaacaccagaaggtggtgaagggcaaccagaagagactggagagcctgcgggagctggccggcaaggaaaacctggaataccctagcgtgaccctgccacctcagcctcacaccaaggagggcgttgatgcctacaacgaagtgatcgcccgggtgcgaatgtgggtgaacctgaacctgtggcagaagctgaagctaagcagagatgatgccaagcctctgctgagactgaagggattcccttcctttcctctggtcgagagacaggccaacgaagtggactggtgggacatggtgtgtaacgtgaagaagctgatcaacgagaaaaaggaggatggcaaggtgttttggcagaatctggctggctacaagagacaggaagccctgagaccatacctgagcagcgaggaagatcggaagaagggaaagaaattcgctcggtaccagctgggcgacctgctgctgcacctggaaaagaagcacggcgaggactggggaaaggtgtacgacgaggcctgggagcggattgacaagaaagtggaaggcctgagcaagcacatcaagctggaagaggaacggagaagcgaggacgcccagagcaaggccgccctgaccgactggctgcgggctaaggccagcttcgtgatcgagggcctgaaggaggccgacaaggacgagttctgcagatgcgagctgaagctgcagaagtggtacggggacctgcggggaaagcccttcgccatcgaagccgagaacagcatcctggacatcagcggcttcagcaagcagtacaactgtgccttcatctggcagaaggacggcgtgaagaagctgaacctgtacctgatcatcaactacttcaagggcggcaagctgcggttcaagaagatcaaacctgaagccttcgaagccaacagattctacaccgtgatcaacaaaaagagcggcgagatcgtgcccatggaggtgaacttcaacttcgacgaccccaacctgatcatcctgcctctggcctttggcaagagacagggcagagaattcatctggaacgacctgctgtccctggaaaccggcagcctgaagctggccaacggaagagtgatcgagaagacactgtacaacagaagaacccggcaggatgagcctgccctgttcgtggccctgaccttcgagcggcgggaggtcctggactcctccaatatcaaaccaatgaacctgatcggcgtggcaagaggcgaaaacatccccgccgtgatcgccctgaccgaccccgagggctgcccactgagccggtttaaggatagcctgggaaacccaacccacatcctgagaatcggcgagagctataaggagaagcagcggaccatccaggccaagaaggaggtggagcagcggagagccggcggctacagccggaagtacgccagcaaagccaagaatctggcagacgatatggtgagaaacaccgctagagatctgctgtactacgccgtgacccaggatgccatgctgatcttcgccaacctgagccggggcttcggccggcagggcaagcggaccttcatggccgagagacagtacacacggatggaggactggctgaccgccaagctggcctacgagggcctgagcaagacctacctgtccaagacactggcccagtacacctccaagacatgcagcaactgtgggtttaccatcaccagcgccgactacgacagggtgctggagaagctgaagaagacagcaacaggctggatgaccacaattaacggcaaggagctgaaggtggagggccagattacctactacaacagatacaagagacagaacgtagtcaaggacctgtccgtcgagctggatagactgagcgaagaatctgtgaacaacgacatctcctcctggacaaagggcagaagcggagaagctctgagcctcctgaagaaaagattctcccatagacccgtgcaggagaagttcgtgtgcctgaactgcggcttcgagacacacgcagccgagcaagccgccctgaacatcgccagatcctggctgttcctgcggagccaggagtacaagaaataccagacaaacaagacaaccggcaacaccgataagagagccttcgtcgagacctggcagtccttttaccggaagaagcttaaggaggtgtggaaacctgccgtgcggtctggcggatctggcggaggctccaccagccccaagaaaaagagaaaagtctaagctgccttctgcggggcttgccttctggccatgcccttcttctctcccttgcacctgtacctcttggtctttgaataaagcctgagtaggaaggctagcaaaaaaaaaaaaaaaaaaaaaaaaaaaaaaaaaaaaaaaaaaaaaaaaaaaaaaaaaaaaaaaaaaaaaaaaaaaaaaaa

SEQ ID NO: 9870 - RNA, 8787 nt, synthetic construct
  source 1..8787: mol_type = other RNA
aggaaataagagagaaaagaagagtaagaagaaatataagagccaccatggcccctaagaagaagcgtaaagtgagccggatgaaccacgaccaggagttcgacccccctaaggtgtaccctcccgtccccgccgagaagagaaagcccatccgggtcctgagcctgttcgatggcatcgccaccggtctgctggtgctgaaggacctgggcatccaggtggataggtacattgcctccgaggtgtgcgaggactccatcaccgtgggaatggtgcgtcatcagggcaagatcatgtacgtgggcgacgtgcggagcgtgacacagaagcatatccaggagtggggccctttcgacctggtgatcggcggcagcccttgcaatgacctgagcatcgtgaacccagcccggaagggcctgtacgagggaaccggcagactgttcttcgagttttacagactgctgcacgacgcccggcctaaggaaggcgacgaccggcccttcttttggctgttcgagaatgtggtggccatgggagtcagcgacaagcgggatattagccggttcctggagagcaaccccgtgatgatcgatgccaaggaagtgagcgccgcccaccgggccagatacttctggggcaatctgcctggcatgaacagacccctggccagcaccgtgaacgacaagctggagctgcaggagtgcctggagcacggccggatcgccaagttcagcaaggtgagaaccatcaccacccgaagcaacagcatcaaacaaggcaaggaccagcactttcctgtgttcatgaacgagaaggaggacatcctgtggtgtaccgagatggagagagtgttcgggttcccagtccactacacagatgtcagcaacatgtctagactggccagacagagactgctgggaagaagctggtccgtccctgtgatcagacacctgttcgcccctctgaaggagtacttcgcctgcgtgagcagcggcaacagcaacgccaacagccggggccccagcttctctagcggcctggtgccactgtccctgagagggagccacatgggccccatggagatctacaaaaccgtgagcgcctggaagcggcagcctgtgcgcgtgctgagcctgtttcggaatatcgataaagtcctgaaaagcctgggattcctggagagcggctctggctccggcggtggcaccctgaagtacgtggaggatgtgacaaacgtggtcagacgggatgtggagaagtggggccccttcgatctggtgtacggcagcacccaacccctgggcagctcttgtgaccggtgccctggctggtacatgtttcagttccaccggatcctgcagtacgccctgccgagacaggagtcccagcggccattcttttggattttcatggacaacttgctgctgaccgaggatgaccaggaaactaccactcggttcctgcagaccgaagccgtgaccctgcaggacgtgagaggccgggactaccagaacgccatgcgggtgtggtccaacatccctggactgaaaagcaagcacgcacctctgacccctaaagaagaggagtacctgcaggcccaggtgcggagcagaagcaagctggacgcccctaaggtggatctgctggtgaagaattgcctcctgcccctgagagagtacttcaagtatttcagccagaatagtctgcccctgggaggcagcggcggcggcgccagggccagcctgagcttcgaggacgtggccgtgggcttcagctgggaggagtggcagctgctggcccccagccagaaggacctgtacagggacgtgatgctggagaactacaggaacctggtgagcgtgggctacgaggccagcaagcccgacagcgtgttccagctggagcagggcgagcccccctggatggtggagggcgccgcccagagccagacctgccaggaggagatctgggagggcggcccaagcagcggcgcccctcctcccagcggcggcaggcggcccaagcagcggcgcccctcctcccagcggcggcagcccagccggctccccaacctctaccgaggagggcacctctgagtccgccacccccgagagcggccctggcacctccaccgagcccagcgagggcagcgcacccggcagccctgccggcagccccacctccacagaggagggaaccagcaccgagcccagcgaaggcagcgccccaggcaccagcaccgagcctagtgagcaggagattaaacggatcaacaagatcagaagaagacttgtgaaagacagcaacaccaagaaggccggcaagacaggccccatgaaaaccctgctggttagagtgatgacacccgatctgagagagcggctggaaaacctgagaaagaagcctgaaaatatcccccagcccatcagcaatacatctagagccaacctgaataagctgctgaccgattacaccgaaatgaagaaggcgatcctgcatgtgtactgggaagagttccagaaggaccctgtgggcctgatgagccgggtggcccagcctgccagcaagaagatcgatcagaacaagctgaaacctgagatggacgagaagggcaacctgaccaccgccggctttgcctgctctcagtgtggccagcccctgttcgtgtacaagctggagcaggtgtctgagaagggcaaggcttacaccaactacttcggacggtgcaatgtggccgagcacgaaaagctgatcctgctggcccagctgaagcccgagaaggatagcgacgaagccgtgacatatagcctgggaaagtttgggcagagggccctggatttctacagcattcatgtgaccaaggagtccacccaccccgtgaagcccctggcccagatcgccggaaacagatacgcctccggacctgtgggaaaggccctgagcgacgcatgtatgggcacaatcgcctccttcctgtctaagtaccaggacatcatcatcgaacaccagaaggtggtgaagggcaaccagaagagactggagagcctgcgggagctggccggcaaggaaaacctggaataccctagcgtgaccctgccacctcagcctcacaccaaggagggcgttgatgcctacaacgaagtgatcgcccgggtgcgaatgtgggtgaacctgaacctgtggcagaagctgaagctaagcagagatgatgccaagcctctgctgagactgaagggattcccttcctttcctctggtcgagagacaggccaacgaagtggactggtgggacatggtgtgtaacgtgaagaagctgatcaacgagaaaaaggaggatggcaaggtgttttggcagaatctggctggctacaagagacaggaagccctgagaccatacctgagcagcgaggaagatcggaagaagggaaagaaattcgctcggtaccagctgggcgacctgctgctgcacctggaaaagaagcacggcgaggactggggaaaggtgtacgacgaggcctgggagcggattgacaagaaagtggaaggcctgagcaagcacatcaagctggaagaggaacggagaagcgaggacgcccagagcaaggccgccctgaccgactggctgcgggctaaggccagcttcgtgatcgagggcctgaaggaggccgacaaggacgagttctgcagatgcgagctgaagctgcagaagtggtacggggacctgcggggaaagcccttcgccatcgaagccgagaacagcatcctggacatcagcggcttcagcaagcagtacaactgtgccttcatctggcagaaggacggcgtgaagaagctgaacctgtacctgatcatcaactacttcaagggcggcaagctgcggttcaagaagatcaaacctgaagccttcgaagccaacagattctacaccgtgatcaacaaaaagagcggcgagatcgtgcccatggaggtgaacttcaacttcgacgaccccaacctgatcatcctgcctctggcctttggcaagagacagggcagagaattcatctggaacgacctgctgtccctggaaaccggcagcctgaagctggccaacggaagagtgatcgagaagacactgtacaacagaagaacccggcaggatgagcctgccctgttcgtggccctgaccttcgagcggcgggaggtcctggactcctccaatatcaaaccaatgaacctgatcggcgtggcaagaggcgaaaacatccccgccgtgatcgccctgaccgaccccgagggctgcccactgagccggtttaaggatagcctgggaaacccaacccacatcctgagaatcggcgagagctataaggagaagcagcggaccatccaggccaagaaggaggtggagcagcggagagccggcggctacagccggaagtacgccagcaaagccaagaatctggcagacgatatggtgagaaacaccgctagagatctgctgtactacgccgtgacccaggatgccatgctgatcttcgccaacctgagccggggcttcggccggcagggcaagcggaccttcatggccgagagacagtacacacggatggaggactggctgaccgccaagctggcctacgagggcctgagcaagacctacctgtccaagacactggcccagtacacctccaagacatgcagcaactgtgggtttaccatcaccagcgccgactacgacagggtgctggagaagctgaagaagacagcaacaggctggatgaccacaattaacggcaaggagctgaaggtggagggccagattacctactacaacagatacaagagacagaacgtagtcaaggacctgtccgtcgagctggatagactgagcgaagaatctgtgaacaacgacatctcctcctggacaaagggcagaagcggagaagctctgagcctcctgaagaaaagattctcccatagacccgtgcaggagaagttcgtgtgcctgaactgcggcttcgagacacacgcagccgagcaagccgccctgaacatcgccagatcctggctgttcctgcggagccaggagtacaagaaataccagacaaacaagacaaccggcaacaccgataagagagccttcgtcgagacctggcagtccttttaccggaagaagcttaaggaggtgtggaaacctgccgtgcggtctggcggatctggcggaggctccaccagccccaagaaaaagagaaaagtctaagctgccttctgcggggcttgccttctggccatgcccttcttctctcccttgcacctgtacctcttggtctttgaataaagcctgagtaggaaggctagcaaaaaaaaaaaaaaaaaaaaaaaaaaaaaaaaaaaaaaaaaaaaaaaaaaaaaaaaaaaaaaaaaaaaaaaaaaaaaaaagcccagccggctccccaacctctaccgaggagggcacctctgagtccgccacccccgagagcggccctggcacctccaccgagcccagcgagggcagcgcacccggcagccctgccggcagccccacctccacagaggagggaaccagcaccgagcccagcgaaggcagcgccccaggcaccagcaccgagcctagtgagcaggagattaaacggatcaacaagatcagaagaagacttgtgaaagacagcaacaccaagaaggccggcaagacaggccccatgaaaaccctgctggttagagtgatgacacccgatctgagagagcggctggaaaacctgagaaagaagcctgaaaatatcccccagcccatcagcaatacatctagagccaacctgaataagctgctgaccgattacaccgaaatgaagaaggcgatcctgcatgtgtactgggaagagttccagaaggaccctgtgggcctgatgagccgggtggcccagcctgccagcaagaagatcgatcagaacaagctgaaacctgagatggacgagaagggcaacctgaccaccgccggctttgcctgctctcagtgtggccagcccctgttcgtgtacaagctggagcaggtgtctgagaagggcaaggcttacaccaactacttcggacggtgcaatgtggccgagcacgaaaagctgatcctgctggcccagctgaagcccgagaaggatagcgacgaagccgtgacatatagcctgggaaagtttgggcagagggccctggatttctacagcattcatgtgaccaaggagtccacccaccccgtgaagcccctggcccagatcgccggaaacagatacgcctccggacctgtgggaaaggccctgagcgacgcatgtatgggcacaatcgcctccttcctgtctaagtaccaggacatcatcatcgaacaccagaaggtggtgaagggcaaccagaagagactggagagcctgcgggagctggccggcaaggaaaacctggaataccctagcgtgaccctgccacctcagcctcacaccaaggagggcgttgatgcctacaacgaagtgatcgcccgggtgcgaatgtgggtgaacctgaacctgtggcagaagctgaagctaagcagagatgatgccaagcctctgctgagactgaagggattcccttcctttcctctggtcgagagacaggccaacgaagtggactggtgggacatggtgtgtaacgtgaagaagctgatcaacgagaaaaaggaggatggcaaggtgttttggcagaatctggctggctacaagagacaggaagccctgagaccatacctgagcagcgaggaagatcggaagaagggaaagaaattcgctcggtaccagctgggcgacctgctgctgcacctggaaaagaagcacggcgaggactggggaaaggtgtacgacgaggcctgggagcggattgacaagaaagtggaaggcctgagcaagcacatcaagctggaagaggaacggagaagcgaggacgcccagagcaaggccgccctgaccgactggctgcgggctaaggccagcttcgtgatcgagggcctgaaggaggccgacaaggacgagttctgcagatgcgagctgaagctgcagaagtggtacggggacctgcggggaaagcccttcgccatcgaagccgagaacagcatcctggacatcagcggcttcagcaagcagtacaactgtgccttcatctggcagaaggacggcgtgaagaagctgaacctgtacctgatcatcaactacttcaagggcggcaagctgcggttcaagaagatcaaacctgaagccttcgaagccaacagattctacaccgtgatcaacaaaaagagcggcgagatcgtgcccatggaggtgaacttcaacttcgacgaccccaacctgatcatcctgcctctggcctttggcaagagacagggcagagaattcatctggaacgacctgctgtccctggaaaccggcagcctgaagctggccaacggaagagtgatcgagaagacactgtacaacagaagaacccggcaggatgagcctgccctgttcgtggccctgaccttcgagcggcgggaggtcctggactcctccaatatcaaaccaatgaacctgatcggcgtggcaagaggcgaaaacatccccgccgtgatcgccctgaccgaccccgagggctgcccactgagccggtttaaggatagcctgggaaacccaacccacatcctgagaatcggcgagagctataaggagaagcagcggaccatccaggccaagaaggaggtggagcagcggagagccggcggctacagccggaagtacgccagcaaagccaagaatctggcagacgatatggtgagaaacaccgctagagatctgctgtactacgccgtgacccaggatgccatgctgatcttcgccaacctgagccggggcttcggccggcagggcaagcggaccttcatggccgagagacagtacacacggatggaggactggctgaccgccaagctggcctacgagggcctgagcaagacctacctgtccaagacactggcccagtacacctccaagacatgcagcaactgtgggtttaccatcaccagcgccgactacgacagggtgctggagaagctgaagaagacagcaacaggctggatgaccacaattaacggcaaggagctgaaggtggagggccagattacctactacaacagatacaagagacagaacgtagtcaaggacctgtccgtcgagctggatagactgagcgaagaatctgtgaacaacgacatctcctcctggacaaagggcagaagcggagaagctctgagcctcctgaagaaaagattctcccatagacccgtgcaggagaagttcgtgtgcctgaactgcggcttcgagacacacgcagccgagcaagccgccctgaacatcgccagatcctggctgttcctgcggagccaggagtacaagaaataccagacaaacaagacaaccggcaacaccgataagagagccttcgtcgagacctggcagtccttttaccggaagaagcttaaggaggtgtggaaacctgccgtgcggtctggcggatctggcggaggctccaccagccccaagaaaaagagaaaagtctaagctgccttctgcggggcttgccttctggccatgcccttcttctctcccttgcacctgtacctcttggtctttgaataaagcctgagtaggaaggctagcaaaaaaaaaaaaaaaaaaaaaaaaaaaaaaaaaaaaaaaaaaaaaaaaaaaaaaaaaaaaaaaaaaaaaaaaaaaaaaaa

SEQ ID NO: 9871 - RNA, 8787 nt, synthetic construct
  source 1..8787: mol_type = other RNA
aggaaataagagagaaaagaagagtaagaagaaatataagagccaccatggcccctaagaagaagcgtaaagtgagccggatgaaccacgaccaggagttcgacccccctaaggtgtaccctcccgtccccgccgagaagagaaagcccatccgggtcctgagcctgttcgatggcatcgccaccggtctgctggtgctgaaggacctgggcatccaggtggataggtacattgcctccgaggtgtgcgaggactccatcaccgtgggaatggtgcgtcatcagggcaagatcatgtacgtgggcgacgtgcggagcgtgacacagaagcatatccaggagtggggccctttcgacctggtgatcggcggcagcccttgcaatgacctgagcatcgtgaacccagcccggaagggcctgtacgagggaaccggcagactgttcttcgagttttacagactgctgcacgacgcccggcctaaggaaggcgacgaccggcccttcttttggctgttcgagaatgtggtggccatgggagtcagcgacaagcgggatattagccggttcctggagagcaaccccgtgatgatcgatgccaaggaagtgagcgccgcccaccgggccagatacttctggggcaatctgcctggcatgaacagacccctggccagcaccgtgaacgacaagctggagctgcaggagtgcctggagcacggccggatcgccaagttcagcaaggtgagaaccatcaccacccgaagcaacagcatcaaacaaggcaaggaccagcactttcctgtgttcatgaacgagaaggaggacatcctgtggtgtaccgagatggagagagtgttcgggttcccagtccactacacagatgtcagcaacatgtctagactggccagacagagactgctgggaagaagctggtccgtccctgtgatcagacacctgttcgcccctctgaaggagtacttcgcctgcgtgagcagcggcaacagcaacgccaacagccggggccccagcttctctagcggcctggtgccactgtccctgagagggagccacatgggccccatggagatctacaaaaccgtgagcgcctggaagcggcagcctgtgcgcgtgctgagcctgtttcggaatatcgataaagtcctgaaaagcctgggattcctggagagcggctctggctccggcggtggcaccctgaagtacgtggaggatgtgacaaacgtggtcagacgggatgtggagaagtggggccccttcgatctggtgtacggcagcacccaacccctgggcagctcttgtgaccggtgccctggctggtacatgtttcagttccaccggatcctgcagtacgccctgccgagacaggagtcccagcggccattcttttggattttcatggacaacttgctgctgaccgaggatgaccaggaaactaccactcggttcctgcagaccgaagccgtgaccctgcaggacgtgagaggccgggactaccagaacgccatgcgggtgtggtccaacatccctggactgaaaagcaagcacgcacctctgacccctaaagaagaggagtacctgcaggcccaggtgcggagcagaagcaagctggacgcccctaaggtggatctgctggtgaagaattgcctcctgcccctgagagagtacttcaagtatttcagccagaatagtctgcccctgggaggcagcggcggcggcatggcccacatggccttcagggacgtggccgtggacttcacccaggacgagtggaggctgctgagccccgcccagaggaccctgtacagggaggtgatgctggagaactacagcaacctggtgagcctgggcatcagcttcagcaagcccgagctgatcacccagctggagcagggcaaggagacctggagggaggagaagaactgcagccccgccacctgccccgccgaccccgagcccgagggcggcccaagcagcggcgcccctcctcccagcggcggcaggcggcccaagcagcggcgcccctcctcccagcggcggcagcccagccggctccccaacctctaccgaggagggcacctctgagtccgccacccccgagagcggccctggcacctccaccgagcccagcgagggcagcgcacccggcagccctgccggcagccccacctccacagaggagggaaccagcaccgagcccagcgaaggcagcgccccaggcaccagcaccgagcctagtgagcaggagattaaacggatcaacaagatcagaagaagacttgtgaaagacagcaacaccaagaaggccggcaagacaggccccatgaaaaccctgctggttagagtgatgacacccgatctgagagagcggctggaaaacctgagaaagaagcctgaaaatatcccccagcccatcagcaatacatctagagccaacctgaataagctgctgaccgattacaccgaaatgaagaaggcgatcctgcatgtgtactgggaagagttccagaaggaccctgtgggcctgatgagccgggtggcccagcctgccagcaagaagatcgatcagaacaagctgaaacctgagatggacgagaagggcaacctgaccaccgccggctttgcctgctctcagtgtggccagcccctgttcgtgtacaagctggagcaggtgtctgagaagggcaaggcttacaccaactacttcggacggtgcaatgtggccgagcacgaaaagctgatcctgctggcccagctgaagcccgagaaggatagcgacgaagccgtgacatatagcctgggaaagtttgggcagagggccctggatttctacagcattcatgtgaccaaggagtccacccaccccgtgaagcccctggcccagatcgccggaaacagatacgcctccggacctgtgggaaaggccctgagcgacgcatgtatgggcacaatcgcctccttcctgtctaagtaccaggacatcatcatcgaacaccagaaggtggtgaagggcaaccagaagagactggagagcctgcgggagctggccggcaaggaaaacctggaataccctagcgtgaccctgccacctcagcctcacaccaaggagggcgttgatgcctacaacgaagtgatcgcccgggtgcgaatgtgggtgaacctgaacctgtggcagaagctgaagctaagcagagatgatgccaagcctctgctgagactgaagggattcccttcctttcctctggtcgagagacaggccaacgaagtggactggtgggacatggtgtgtaacgtgaagaagctgatcaacgagaaaaaggaggatggcaaggtgttttggcagaatctggctggctacaagagacaggaagccctgagaccatacctgagcagcgaggaagatcggaagaagggaaagaaattcgctcggtaccagctgggcgacctgctgctgcacctggaaaagaagcacggcgaggactggggaaaggtgtacgacgaggcctgggagcggattgacaagaaagtggaaggcctgagcaagcacatcaagctggaagaggaacggagaagcgaggacgcccagagcaaggccgccctgaccgactggctgcgggctaaggccagcttcgtgatcgagggcctgaaggaggccgacaaggacgagttctgcagatgcgagctgaagctgcagaagtggtacggggacctgcggggaaagcccttcgccatcgaagccgagaacagcatcctggacatcagcggcttcagcaagcagtacaactgtgccttcatctggcagaaggacggcgtgaagaagctgaacctgtacctgatcatcaactacttcaagggcggcaagctgcggttcaagaagatcaaacctgaagccttcgaagccaacagattctacaccgtgatcaacaaaaagagcggcgagatcgtgcccatggaggtgaacttcaacttcgacgaccccaacctgatcatcctgcctctggcctttggcaagagacagggcagagaattcatctggaacgacctgctgtccctggaaaccggcagcctgaagctggccaacggaagagtgatcgagaagacactgtacaacagaagaacccggcaggatgagcctgccctgttcgtggccctgaccttcgagcggcgggaggtcctggactcctccaatatcaaaccaatgaacctgatcggcgtggcaagaggcgaaaacatccccgccgtgatcgccctgaccgaccccgagggctgcccactgagccggtttaaggatagcctgggaaacccaacccacatcctgagaatcggcgagagctataaggagaagcagcggaccatccaggccaagaaggaggtggagcagcggagagccggcggctacagccggaagtacgccagcaaagccaagaatctggcagacgatatggtgagaaacaccgctagagatctgctgtactacgccgtgacccaggatgccatgctgatcttcgccaacctgagccggggcttcggccggcagggcaagcggaccttcatggccgagagacagtacacacggatggaggactggctgaccgccaagctggcctacgagggcctgagcaagacctacctgtccaagacactggcccagtacacctccaagacatgcagcaactgtgggtttaccatcaccagcgccgactacgacagggtgctggagaagctgaagaagacagcaacaggctggatgaccacaattaacggcaaggagctgaaggtggagggccagattacctactacaacagatacaagagacagaacgtagtcaaggacctgtccgtcgagctggatagactgagcgaagaatctgtgaacaacgacatctcctcctggacaaagggcagaagcggagaagctctgagcctcctgaagaaaagattctcccatagacccgtgcaggagaagttcgtgtgcctgaactgcggcttcgagacacacgcagccgagcaagccgccctgaacatcgccagatcctggctgttcctgcggagccaggagtacaagaaataccagacaaacaagacaaccggcaacaccgataagagagccttcgtcgagacctggcagtccttttaccggaagaagcttaaggaggtgtggaaacctgccgtgcggtctggcggatctggcggaggctccaccagccccaagaaaaagagaaaagtctaagctgccttctgcggggcttgccttctggccatgcccttcttctctcccttgcacctgtacctcttggtctttgaataaagcctgagtaggaaggctagcaaaaaaaaaaaaaaaaaaaaaaaaaaaaaaaaaaaaaaaaaaaaaaaaaaaaaaaaaaaaaaaaaaaaaaaaaaaaaaaagcccagccggctccccaacctctaccgaggagggcacctctgagtccgccacccccgagagcggccctggcacctccaccgagcccagcgagggcagcgcacccggcagccctgccggcagccccacctccacagaggagggaaccagcaccgagcccagcgaaggcagcgccccaggcaccagcaccgagcctagtgagcaggagattaaacggatcaacaagatcagaagaagacttgtgaaagacagcaacaccaagaaggccggcaagacaggccccatgaaaaccctgctggttagagtgatgacacccgatctgagagagcggctggaaaacctgagaaagaagcctgaaaatatcccccagcccatcagcaatacatctagagccaacctgaataagctgctgaccgattacaccgaaatgaagaaggcgatcctgcatgtgtactgggaagagttccagaaggaccctgtgggcctgatgagccgggtggcccagcctgccagcaagaagatcgatcagaacaagctgaaacctgagatggacgagaagggcaacctgaccaccgccggctttgcctgctctcagtgtggccagcccctgttcgtgtacaagctggagcaggtgtctgagaagggcaaggcttacaccaactacttcggacggtgcaatgtggccgagcacgaaaagctgatcctgctggcccagctgaagcccgagaaggatagcgacgaagccgtgacatatagcctgggaaagtttgggcagagggccctggatttctacagcattcatgtgaccaaggagtccacccaccccgtgaagcccctggcccagatcgccggaaacagatacgcctccggacctgtgggaaaggccctgagcgacgcatgtatgggcacaatcgcctccttcctgtctaagtaccaggacatcatcatcgaacaccagaaggtggtgaagggcaaccagaagagactggagagcctgcgggagctggccggcaaggaaaacctggaataccctagcgtgaccctgccacctcagcctcacaccaaggagggcgttgatgcctacaacgaagtgatcgcccgggtgcgaatgtgggtgaacctgaacctgtggcagaagctgaagctaagcagagatgatgccaagcctctgctgagactgaagggattcccttcctttcctctggtcgagagacaggccaacgaagtggactggtgggacatggtgtgtaacgtgaagaagctgatcaacgagaaaaaggaggatggcaaggtgttttggcagaatctggctggctacaagagacaggaagccctgagaccatacctgagcagcgaggaagatcggaagaagggaaagaaattcgctcggtaccagctgggcgacctgctgctgcacctggaaaagaagcacggcgaggactggggaaaggtgtacgacgaggcctgggagcggattgacaagaaagtggaaggcctgagcaagcacatcaagctggaagaggaacggagaagcgaggacgcccagagcaaggccgccctgaccgactggctgcgggctaaggccagcttcgtgatcgagggcctgaaggaggccgacaaggacgagttctgcagatgcgagctgaagctgcagaagtggtacggggacctgcggggaaagcccttcgccatcgaagccgagaacagcatcctggacatcagcggcttcagcaagcagtacaactgtgccttcatctggcagaaggacggcgtgaagaagctgaacctgtacctgatcatcaactacttcaagggcggcaagctgcggttcaagaagatcaaacctgaagccttcgaagccaacagattctacaccgtgatcaacaaaaagagcggcgagatcgtgcccatggaggtgaacttcaacttcgacgaccccaacctgatcatcctgcctctggcctttggcaagagacagggcagagaattcatctggaacgacctgctgtccctggaaaccggcagcctgaagctggccaacggaagagtgatcgagaagacactgtacaacagaagaacccggcaggatgagcctgccctgttcgtggccctgaccttcgagcggcgggaggtcctggactcctccaatatcaaaccaatgaacctgatcggcgtggcaagaggcgaaaacatccccgccgtgatcgccctgaccgaccccgagggctgcccactgagccggtttaaggatagcctgggaaacccaacccacatcctgagaatcggcgagagctataaggagaagcagcggaccatccaggccaagaaggaggtggagcagcggagagccggcggctacagccggaagtacgccagcaaagccaagaatctggcagacgatatggtgagaaacaccgctagagatctgctgtactacgccgtgacccaggatgccatgctgatcttcgccaacctgagccggggcttcggccggcagggcaagcggaccttcatggccgagagacagtacacacggatggaggactggctgaccgccaagctggcctacgagggcctgagcaagacctacctgtccaagacactggcccagtacacctccaagacatgcagcaactgtgggtttaccatcaccagcgccgactacgacagggtgctggagaagctgaagaagacagcaacaggctggatgaccacaattaacggcaaggagctgaaggtggagggccagattacctactacaacagatacaagagacagaacgtagtcaaggacctgtccgtcgagctggatagactgagcgaagaatctgtgaacaacgacatctcctcctggacaaagggcagaagcggagaagctctgagcctcctgaagaaaagattctcccatagacccgtgcaggagaagttcgtgtgcctgaactgcggcttcgagacacacgcagccgagcaagccgccctgaacatcgccagatcctggctgttcctgcggagccaggagtacaagaaataccagacaaacaagacaaccggcaacaccgataagagagccttcgtcgagacctggcagtccttttaccggaagaagcttaaggaggtgtggaaacctgccgtgcggtctggcggatctggcggaggctccaccagccccaagaaaaagagaaaagtctaagctgccttctgcggggcttgccttctggccatgcccttcttctctcccttgcacctgtacctcttggtctttgaataaagcctgagtaggaaggctagcaaaaaaaaaaaaaaaaaaaaaaaaaaaaaaaaaaaaaaaaaaaaaaaaaaaaaaaaaaaaaaaaaaaaaaaaaaaaaaaa

SEQ ID NO: 9872 - RNA, 8787 nt, synthetic construct
  source 1..8787: mol_type = other RNA
aggaaataagagagaaaagaagagtaagaagaaatataagagccaccatggcccctaagaagaagcgtaaagtgagccggatgaaccacgaccaggagttcgacccccctaaggtgtaccctcccgtccccgccgagaagagaaagcccatccgggtcctgagcctgttcgatggcatcgccaccggtctgctggtgctgaaggacctgggcatccaggtggataggtacattgcctccgaggtgtgcgaggactccatcaccgtgggaatggtgcgtcatcagggcaagatcatgtacgtgggcgacgtgcggagcgtgacacagaagcatatccaggagtggggccctttcgacctggtgatcggcggcagcccttgcaatgacctgagcatcgtgaacccagcccggaagggcctgtacgagggaaccggcagactgttcttcgagttttacagactgctgcacgacgcccggcctaaggaaggcgacgaccggcccttcttttggctgttcgagaatgtggtggccatgggagtcagcgacaagcgggatattagccggttcctggagagcaaccccgtgatgatcgatgccaaggaagtgagcgccgcccaccgggccagatacttctggggcaatctgcctggcatgaacagacccctggccagcaccgtgaacgacaagctggagctgcaggagtgcctggagcacggccggatcgccaagttcagcaaggtgagaaccatcaccacccgaagcaacagcatcaaacaaggcaaggaccagcactttcctgtgttcatgaacgagaaggaggacatcctgtggtgtaccgagatggagagagtgttcgggttcccagtccactacacagatgtcagcaacatgtctagactggccagacagagactgctgggaagaagctggtccgtccctgtgatcagacacctgttcgcccctctgaaggagtacttcgcctgcgtgagcagcggcaacagcaacgccaacagccggggccccagcttctctagcggcctggtgccactgtccctgagagggagccacatgggccccatggagatctacaaaaccgtgagcgcctggaagcggcagcctgtgcgcgtgctgagcctgtttcggaatatcgataaagtcctgaaaagcctgggattcctggagagcggctctggctccggcggtggcaccctgaagtacgtggaggatgtgacaaacgtggtcagacgggatgtggagaagtggggccccttcgatctggtgtacggcagcacccaacccctgggcagctcttgtgaccggtgccctggctggtacatgtttcagttccaccggatcctgcagtacgccctgccgagacaggagtcccagcggccattcttttggattttcatggacaacttgctgctgaccgaggatgaccaggaaactaccactcggttcctgcagaccgaagccgtgaccctgcaggacgtgagaggccgggactaccagaacgccatgcgggtgtggtccaacatccctggactgaaaagcaagcacgcacctctgacccctaaagaagaggagtacctgcaggcccaggtgcggagcagaagcaagctggacgcccctaaggtggatctgctggtgaagaattgcctcctgcccctgagagagtacttcaagtatttcagccagaatagtctgcccctgggaggcagcggcggcggcatggcccacttccagggcagcgtgaccttcgaggacgtggccatcgccttcagccagcaggagtgggagagcctggacagcagccagaggggcctgtacagggacgtgatgctggagaactacaggaacctggtgagcatgggccacagcctgagcaagccccacgtgatcgccctgctggagaggtggaaggagcccaaggtgaccgagaggaaggacggcaggaggtggtgcaccgacctgggcggcccaagcagcggcgcccctcctcccagcggcggcaggcggcccaagcagcggcgcccctcctcccagcggcggcagcccagccggctccccaacctctaccgaggagggcacctctgagtccgccacccccgagagcggccctggcacctccaccgagcccagcgagggcagcgcacccggcagccctgccggcagccccacctccacagaggagggaaccagcaccgagcccagcgaaggcagcgccccaggcaccagcaccgagcctagtgagcaggagattaaacggatcaacaagatcagaagaagacttgtgaaagacagcaacaccaagaaggccggcaagacaggccccatgaaaaccctgctggttagagtgatgacacccgatctgagagagcggctggaaaacctgagaaagaagcctgaaaatatcccccagcccatcagcaatacatctagagccaacctgaataagctgctgaccgattacaccgaaatgaagaaggcgatcctgcatgtgtactgggaagagttccagaaggaccctgtgggcctgatgagccgggtggcccagcctgccagcaagaagatcgatcagaacaagctgaaacctgagatggacgagaagggcaacctgaccaccgccggctttgcctgctctcagtgtggccagcccctgttcgtgtacaagctggagcaggtgtctgagaagggcaaggcttacaccaactacttcggacggtgcaatgtggccgagcacgaaaagctgatcctgctggcccagctgaagcccgagaaggatagcgacgaagccgtgacatatagcctgggaaagtttgggcagagggccctggatttctacagcattcatgtgaccaaggagtccacccaccccgtgaagcccctggcccagatcgccggaaacagatacgcctccggacctgtgggaaaggccctgagcgacgcatgtatgggcacaatcgcctccttcctgtctaagtaccaggacatcatcatcgaacaccagaaggtggtgaagggcaaccagaagagactggagagcctgcgggagctggccggcaaggaaaacctggaataccctagcgtgaccctgccacctcagcctcacaccaaggagggcgttgatgcctacaacgaagtgatcgcccgggtgcgaatgtgggtgaacctgaacctgtggcagaagctgaagctaagcagagatgatgccaagcctctgctgagactgaagggattcccttcctttcctctggtcgagagacaggccaacgaagtggactggtgggacatggtgtgtaacgtgaagaagctgatcaacgagaaaaaggaggatggcaaggtgttttggcagaatctggctggctacaagagacaggaagccctgagaccatacctgagcagcgaggaagatcggaagaagggaaagaaattcgctcggtaccagctgggcgacctgctgctgcacctggaaaagaagcacggcgaggactggggaaaggtgtacgacgaggcctgggagcggattgacaagaaagtggaaggcctgagcaagcacatcaagctggaagaggaacggagaagcgaggacgcccagagcaaggccgccctgaccgactggctgcgggctaaggccagcttcgtgatcgagggcctgaaggaggccgacaaggacgagttctgcagatgcgagctgaagctgcagaagtggtacggggacctgcggggaaagcccttcgccatcgaagccgagaacagcatcctggacatcagcggcttcagcaagcagtacaactgtgccttcatctggcagaaggacggcgtgaagaagctgaacctgtacctgatcatcaactacttcaagggcggcaagctgcggttcaagaagatcaaacctgaagccttcgaagccaacagattctacaccgtgatcaacaaaaagagcggcgagatcgtgcccatggaggtgaacttcaacttcgacgaccccaacctgatcatcctgcctctggcctttggcaagagacagggcagagaattcatctggaacgacctgctgtccctggaaaccggcagcctgaagctggccaacggaagagtgatcgagaagacactgtacaacagaagaacccggcaggatgagcctgccctgttcgtggccctgaccttcgagcggcgggaggtcctggactcctccaatatcaaaccaatgaacctgatcggcgtggcaagaggcgaaaacatccccgccgtgatcgccctgaccgaccccgagggctgcccactgagccggtttaaggatagcctgggaaacccaacccacatcctgagaatcggcgagagctataaggagaagcagcggaccatccaggccaagaaggaggtggagcagcggagagccggcggctacagccggaagtacgccagcaaagccaagaatctggcagacgatatggtgagaaacaccgctagagatctgctgtactacgccgtgacccaggatgccatgctgatcttcgccaacctgagccggggcttcggccggcagggcaagcggaccttcatggccgagagacagtacacacggatggaggactggctgaccgccaagctggcctacgagggcctgagcaagacctacctgtccaagacactggcccagtacacctccaagacatgcagcaactgtgggtttaccatcaccagcgccgactacgacagggtgctggagaagctgaagaagacagcaacaggctggatgaccacaattaacggcaaggagctgaaggtggagggccagattacctactacaacagatacaagagacagaacgtagtcaaggacctgtccgtcgagctggatagactgagcgaagaatctgtgaacaacgacatctcctcctggacaaagggcagaagcggagaagctctgagcctcctgaagaaaagattctcccatagacccgtgcaggagaagttcgtgtgcctgaactgcggcttcgagacacacgcagccgagcaagccgccctgaacatcgccagatcctggctgttcctgcggagccaggagtacaagaaataccagacaaacaagacaaccggcaacaccgataagagagccttcgtcgagacctggcagtccttttaccggaagaagcttaaggaggtgtggaaacctgccgtgcggtctggcggatctggcggaggctccaccagccccaagaaaaagagaaaagtctaagctgccttctgcggggcttgccttctggccatgcccttcttctctcccttgcacctgtacctcttggtctttgaataaagcctgagtaggaaggctagcaaaaaaaaaaaaaaaaaaaaaaaaaaaaaaaaaaaaaaaaaaaaaaaaaaaaaaaaaaaaaaaaaaaaaaaaaaaaaaaagcccagccggctccccaacctctaccgaggagggcacctctgagtccgccacccccgagagcggccctggcacctccaccgagcccagcgagggcagcgcacccggcagccctgccggcagccccacctccacagaggagggaaccagcaccgagcccagcgaaggcagcgccccaggcaccagcaccgagcctagtgagcaggagattaaacggatcaacaagatcagaagaagacttgtgaaagacagcaacaccaagaaggccggcaagacaggccccatgaaaaccctgctggttagagtgatgacacccgatctgagagagcggctggaaaacctgagaaagaagcctgaaaatatcccccagcccatcagcaatacatctagagccaacctgaataagctgctgaccgattacaccgaaatgaagaaggcgatcctgcatgtgtactgggaagagttccagaaggaccctgtgggcctgatgagccgggtggcccagcctgccagcaagaagatcgatcagaacaagctgaaacctgagatggacgagaagggcaacctgaccaccgccggctttgcctgctctcagtgtggccagcccctgttcgtgtacaagctggagcaggtgtctgagaagggcaaggcttacaccaactacttcggacggtgcaatgtggccgagcacgaaaagctgatcctgctggcccagctgaagcccgagaaggatagcgacgaagccgtgacatatagcctgggaaagtttgggcagagggccctggatttctacagcattcatgtgaccaaggagtccacccaccccgtgaagcccctggcccagatcgccggaaacagatacgcctccggacctgtgggaaaggccctgagcgacgcatgtatgggcacaatcgcctccttcctgtctaagtaccaggacatcatcatcgaacaccagaaggtggtgaagggcaaccagaagagactggagagcctgcgggagctggccggcaaggaaaacctggaataccctagcgtgaccctgccacctcagcctcacaccaaggagggcgttgatgcctacaacgaagtgatcgcccgggtgcgaatgtgggtgaacctgaacctgtggcagaagctgaagctaagcagagatgatgccaagcctctgctgagactgaagggattcccttcctttcctctggtcgagagacaggccaacgaagtggactggtgggacatggtgtgtaacgtgaagaagctgatcaacgagaaaaaggaggatggcaaggtgttttggcagaatctggctggctacaagagacaggaagccctgagaccatacctgagcagcgaggaagatcggaagaagggaaagaaattcgctcggtaccagctgggcgacctgctgctgcacctggaaaagaagcacggcgaggactggggaaaggtgtacgacgaggcctgggagcggattgacaagaaagtggaaggcctgagcaagcacatcaagctggaagaggaacggagaagcgaggacgcccagagcaaggccgccctgaccgactggctgcgggctaaggccagcttcgtgatcgagggcctgaaggaggccgacaaggacgagttctgcagatgcgagctgaagctgcagaagtggtacggggacctgcggggaaagcccttcgccatcgaagccgagaacagcatcctggacatcagcggcttcagcaagcagtacaactgtgccttcatctggcagaaggacggcgtgaagaagctgaacctgtacctgatcatcaactacttcaagggcggcaagctgcggttcaagaagatcaaacctgaagccttcgaagccaacagattctacaccgtgatcaacaaaaagagcggcgagatcgtgcccatggaggtgaacttcaacttcgacgaccccaacctgatcatcctgcctctggcctttggcaagagacagggcagagaattcatctggaacgacctgctgtccctggaaaccggcagcctgaagctggccaacggaagagtgatcgagaagacactgtacaacagaagaacccggcaggatgagcctgccctgttcgtggccctgaccttcgagcggcgggaggtcctggactcctccaatatcaaaccaatgaacctgatcggcgtggcaagaggcgaaaacatccccgccgtgatcgccctgaccgaccccgagggctgcccactgagccggtttaaggatagcctgggaaacccaacccacatcctgagaatcggcgagagctataaggagaagcagcggaccatccaggccaagaaggaggtggagcagcggagagccggcggctacagccggaagtacgccagcaaagccaagaatctggcagacgatatggtgagaaacaccgctagagatctgctgtactacgccgtgacccaggatgccatgctgatcttcgccaacctgagccggggcttcggccggcagggcaagcggaccttcatggccgagagacagtacacacggatggaggactggctgaccgccaagctggcctacgagggcctgagcaagacctacctgtccaagacactggcccagtacacctccaagacatgcagcaactgtgggtttaccatcaccagcgccgactacgacagggtgctggagaagctgaagaagacagcaacaggctggatgaccacaattaacggcaaggagctgaaggtggagggccagattacctactacaacagatacaagagacagaacgtagtcaaggacctgtccgtcgagctggatagactgagcgaagaatctgtgaacaacgacatctcctcctggacaaagggcagaagcggagaagctctgagcctcctgaagaaaagattctcccatagacccgtgcaggagaagttcgtgtgcctgaactgcggcttcgagacacacgcagccgagcaagccgccctgaacatcgccagatcctggctgttcctgcggagccaggagtacaagaaataccagacaaacaagacaaccggcaacaccgataagagagccttcgtcgagacctggcagtccttttaccggaagaagcttaaggaggtgtggaaacctgccgtgcggtctggcggatctggcggaggctccaccagccccaagaaaaagagaaaagtctaagctgccttctgcggggcttgccttctggccatgcccttcttctctcccttgcacctgtacctcttggtctttgaataaagcctgagtaggaaggctagcaaaaaaaaaaaaaaaaaaaaaaaaaaaaaaaaaaaaaaaaaaaaaaaaaaaaaaaaaaaaaaaaaaaaaaaaaaaaaaaa

SEQ ID NO: 9873 - RNA, 8787 nt, synthetic construct
  source 1..8787: mol_type = other RNA
aggaaataagagagaaaagaagagtaagaagaaatataagagccaccatggcccctaagaagaagcgtaaagtgagccggatgaaccacgaccaggagttcgacccccctaaggtgtaccctcccgtccccgccgagaagagaaagcccatccgggtcctgagcctgttcgatggcatcgccaccggtctgctggtgctgaaggacctgggcatccaggtggataggtacattgcctccgaggtgtgcgaggactccatcaccgtgggaatggtgcgtcatcagggcaagatcatgtacgtgggcgacgtgcggagcgtgacacagaagcatatccaggagtggggccctttcgacctggtgatcggcggcagcccttgcaatgacctgagcatcgtgaacccagcccggaagggcctgtacgagggaaccggcagactgttcttcgagttttacagactgctgcacgacgcccggcctaaggaaggcgacgaccggcccttcttttggctgttcgagaatgtggtggccatgggagtcagcgacaagcgggatattagccggttcctggagagcaaccccgtgatgatcgatgccaaggaagtgagcgccgcccaccgggccagatacttctggggcaatctgcctggcatgaacagacccctggccagcaccgtgaacgacaagctggagctgcaggagtgcctggagcacggccggatcgccaagttcagcaaggtgagaaccatcaccacccgaagcaacagcatcaaacaaggcaaggaccagcactttcctgtgttcatgaacgagaaggaggacatcctgtggtgtaccgagatggagagagtgttcgggttcccagtccactacacagatgtcagcaacatgtctagactggccagacagagactgctgggaagaagctggtccgtccctgtgatcagacacctgttcgcccctctgaaggagtacttcgcctgcgtgagcagcggcaacagcaacgccaacagccggggccccagcttctctagcggcctggtgccactgtccctgagagggagccacatgggccccatggagatctacaaaaccgtgagcgcctggaagcggcagcctgtgcgcgtgctgagcctgtttcggaatatcgataaagtcctgaaaagcctgggattcctggagagcggctctggctccggcggtggcaccctgaagtacgtggaggatgtgacaaacgtggtcagacgggatgtggagaagtggggccccttcgatctggtgtacggcagcacccaacccctgggcagctcttgtgaccggtgccctggctggtacatgtttcagttccaccggatcctgcagtacgccctgccgagacaggagtcccagcggccattcttttggattttcatggacaacttgctgctgaccgaggatgaccaggaaactaccactcggttcctgcagaccgaagccgtgaccctgcaggacgtgagaggccgggactaccagaacgccatgcgggtgtggtccaacatccctggactgaaaagcaagcacgcacctctgacccctaaagaagaggagtacctgcaggcccaggtgcggagcagaagcaagctggacgcccctaaggtggatctgctggtgaagaattgcctcctgcccctgagagagtacttcaagtatttcagccagaatagtctgcccctgggaggcagcggcggcggcttccaggagcccgtgaccttcgaggacgtggccgtgtacttcacccagaaccagtgggccagcctggacagcgcccagagggccctgtacagggaggtgatgctggagaactacgccaacgtggccagcctggtgagccccttccccaggcccgacctgatcagccagctggagaggggcgaggccccctgggaccccaacccctgggaggccgaggacctgaggggcatctgccccggcgagggcggcccaagcagcggcgcccctcctcccagcggcggcaggcggcccaagcagcggcgcccctcctcccagcggcggcagcccagccggctccccaacctctaccgaggagggcacctctgagtccgccacccccgagagcggccctggcacctccaccgagcccagcgagggcagcgcacccggcagccctgccggcagccccacctccacagaggagggaaccagcaccgagcccagcgaaggcagcgccccaggcaccagcaccgagcctagtgagcaggagattaaacggatcaacaagatcagaagaagacttgtgaaagacagcaacaccaagaaggccggcaagacaggccccatgaaaaccctgctggttagagtgatgacacccgatctgagagagcggctggaaaacctgagaaagaagcctgaaaatatcccccagcccatcagcaatacatctagagccaacctgaataagctgctgaccgattacaccgaaatgaagaaggcgatcctgcatgtgtactgggaagagttccagaaggaccctgtgggcctgatgagccgggtggcccagcctgccagcaagaagatcgatcagaacaagctgaaacctgagatggacgagaagggcaacctgaccaccgccggctttgcctgctctcagtgtggccagcccctgttcgtgtacaagctggagcaggtgtctgagaagggcaaggcttacaccaactacttcggacggtgcaatgtggccgagcacgaaaagctgatcctgctggcccagctgaagcccgagaaggatagcgacgaagccgtgacatatagcctgggaaagtttgggcagagggccctggatttctacagcattcatgtgaccaaggagtccacccaccccgtgaagcccctggcccagatcgccggaaacagatacgcctccggacctgtgggaaaggccctgagcgacgcatgtatgggcacaatcgcctccttcctgtctaagtaccaggacatcatcatcgaacaccagaaggtggtgaagggcaaccagaagagactggagagcctgcgggagctggccggcaaggaaaacctggaataccctagcgtgaccctgccacctcagcctcacaccaaggagggcgttgatgcctacaacgaagtgatcgcccgggtgcgaatgtgggtgaacctgaacctgtggcagaagctgaagctaagcagagatgatgccaagcctctgctgagactgaagggattcccttcctttcctctggtcgagagacaggccaacgaagtggactggtgggacatggtgtgtaacgtgaagaagctgatcaacgagaaaaaggaggatggcaaggtgttttggcagaatctggctggctacaagagacaggaagccctgagaccatacctgagcagcgaggaagatcggaagaagggaaagaaattcgctcggtaccagctgggcgacctgctgctgcacctggaaaagaagcacggcgaggactggggaaaggtgtacgacgaggcctgggagcggattgacaagaaagtggaaggcctgagcaagcacatcaagctggaagaggaacggagaagcgaggacgcccagagcaaggccgccctgaccgactggctgcgggctaaggccagcttcgtgatcgagggcctgaaggaggccgacaaggacgagttctgcagatgcgagctgaagctgcagaagtggtacggggacctgcggggaaagcccttcgccatcgaagccgagaacagcatcctggacatcagcggcttcagcaagcagtacaactgtgccttcatctggcagaaggacggcgtgaagaagctgaacctgtacctgatcatcaactacttcaagggcggcaagctgcggttcaagaagatcaaacctgaagccttcgaagccaacagattctacaccgtgatcaacaaaaagagcggcgagatcgtgcccatggaggtgaacttcaacttcgacgaccccaacctgatcatcctgcctctggcctttggcaagagacagggcagagaattcatctggaacgacctgctgtccctggaaaccggcagcctgaagctggccaacggaagagtgatcgagaagacactgtacaacagaagaacccggcaggatgagcctgccctgttcgtggccctgaccttcgagcggcgggaggtcctggactcctccaatatcaaaccaatgaacctgatcggcgtggcaagaggcgaaaacatccccgccgtgatcgccctgaccgaccccgagggctgcccactgagccggtttaaggatagcctgggaaacccaacccacatcctgagaatcggcgagagctataaggagaagcagcggaccatccaggccaagaaggaggtggagcagcggagagccggcggctacagccggaagtacgccagcaaagccaagaatctggcagacgatatggtgagaaacaccgctagagatctgctgtactacgccgtgacccaggatgccatgctgatcttcgccaacctgagccggggcttcggccggcagggcaagcggaccttcatggccgagagacagtacacacggatggaggactggctgaccgccaagctggcctacgagggcctgagcaagacctacctgtccaagacactggcccagtacacctccaagacatgcagcaactgtgggtttaccatcaccagcgccgactacgacagggtgctggagaagctgaagaagacagcaacaggctggatgaccacaattaacggcaaggagctgaaggtggagggccagattacctactacaacagatacaagagacagaacgtagtcaaggacctgtccgtcgagctggatagactgagcgaagaatctgtgaacaacgacatctcctcctggacaaagggcagaagcggagaagctctgagcctcctgaagaaaagattctcccatagacccgtgcaggagaagttcgtgtgcctgaactgcggcttcgagacacacgcagccgagcaagccgccctgaacatcgccagatcctggctgttcctgcggagccaggagtacaagaaataccagacaaacaagacaaccggcaacaccgataagagagccttcgtcgagacctggcagtccttttaccggaagaagcttaaggaggtgtggaaacctgccgtgcggtctggcggatctggcggaggctccaccagccccaagaaaaagagaaaagtctaagctgccttctgcggggcttgccttctggccatgcccttcttctctcccttgcacctgtacctcttggtctttgaataaagcctgagtaggaaggctagcaaaaaaaaaaaaaaaaaaaaaaaaaaaaaaaaaaaaaaaaaaaaaaaaaaaaaaaaaaaaaaaaaaaaaaaaaaaaaaaagcccagccggctccccaacctctaccgaggagggcacctctgagtccgccacccccgagagcggccctggcacctccaccgagcccagcgagggcagcgcacccggcagccctgccggcagccccacctccacagaggagggaaccagcaccgagcccagcgaaggcagcgccccaggcaccagcaccgagcctagtgagcaggagattaaacggatcaacaagatcagaagaagacttgtgaaagacagcaacaccaagaaggccggcaagacaggccccatgaaaaccctgctggttagagtgatgacacccgatctgagagagcggctggaaaacctgagaaagaagcctgaaaatatcccccagcccatcagcaatacatctagagccaacctgaataagctgctgaccgattacaccgaaatgaagaaggcgatcctgcatgtgtactgggaagagttccagaaggaccctgtgggcctgatgagccgggtggcccagcctgccagcaagaagatcgatcagaacaagctgaaacctgagatggacgagaagggcaacctgaccaccgccggctttgcctgctctcagtgtggccagcccctgttcgtgtacaagctggagcaggtgtctgagaagggcaaggcttacaccaactacttcggacggtgcaatgtggccgagcacgaaaagctgatcctgctggcccagctgaagcccgagaaggatagcgacgaagccgtgacatatagcctgggaaagtttgggcagagggccctggatttctacagcattcatgtgaccaaggagtccacccaccccgtgaagcccctggcccagatcgccggaaacagatacgcctccggacctgtgggaaaggccctgagcgacgcatgtatgggcacaatcgcctccttcctgtctaagtaccaggacatcatcatcgaacaccagaaggtggtgaagggcaaccagaagagactggagagcctgcgggagctggccggcaaggaaaacctggaataccctagcgtgaccctgccacctcagcctcacaccaaggagggcgttgatgcctacaacgaagtgatcgcccgggtgcgaatgtgggtgaacctgaacctgtggcagaagctgaagctaagcagagatgatgccaagcctctgctgagactgaagggattcccttcctttcctctggtcgagagacaggccaacgaagtggactggtgggacatggtgtgtaacgtgaagaagctgatcaacgagaaaaaggaggatggcaaggtgttttggcagaatctggctggctacaagagacaggaagccctgagaccatacctgagcagcgaggaagatcggaagaagggaaagaaattcgctcggtaccagctgggcgacctgctgctgcacctggaaaagaagcacggcgaggactggggaaaggtgtacgacgaggcctgggagcggattgacaagaaagtggaaggcctgagcaagcacatcaagctggaagaggaacggagaagcgaggacgcccagagcaaggccgccctgaccgactggctgcgggctaaggccagcttcgtgatcgagggcctgaaggaggccgacaaggacgagttctgcagatgcgagctgaagctgcagaagtggtacggggacctgcggggaaagcccttcgccatcgaagccgagaacagcatcctggacatcagcggcttcagcaagcagtacaactgtgccttcatctggcagaaggacggcgtgaagaagctgaacctgtacctgatcatcaactacttcaagggcggcaagctgcggttcaagaagatcaaacctgaagccttcgaagccaacagattctacaccgtgatcaacaaaaagagcggcgagatcgtgcccatggaggtgaacttcaacttcgacgaccccaacctgatcatcctgcctctggcctttggcaagagacagggcagagaattcatctggaacgacctgctgtccctggaaaccggcagcctgaagctggccaacggaagagtgatcgagaagacactgtacaacagaagaacccggcaggatgagcctgccctgttcgtggccctgaccttcgagcggcgggaggtcctggactcctccaatatcaaaccaatgaacctgatcggcgtggcaagaggcgaaaacatccccgccgtgatcgccctgaccgaccccgagggctgcccactgagccggtttaaggatagcctgggaaacccaacccacatcctgagaatcggcgagagctataaggagaagcagcggaccatccaggccaagaaggaggtggagcagcggagagccggcggctacagccggaagtacgccagcaaagccaagaatctggcagacgatatggtgagaaacaccgctagagatctgctgtactacgccgtgacccaggatgccatgctgatcttcgccaacctgagccggggcttcggccggcagggcaagcggaccttcatggccgagagacagtacacacggatggaggactggctgaccgccaagctggcctacgagggcctgagcaagacctacctgtccaagacactggcccagtacacctccaagacatgcagcaactgtgggtttaccatcaccagcgccgactacgacagggtgctggagaagctgaagaagacagcaacaggctggatgaccacaattaacggcaaggagctgaaggtggagggccagattacctactacaacagatacaagagacagaacgtagtcaaggacctgtccgtcgagctggatagactgagcgaagaatctgtgaacaacgacatctcctcctggacaaagggcagaagcggagaagctctgagcctcctgaagaaaagattctcccatagacccgtgcaggagaagttcgtgtgcctgaactgcggcttcgagacacacgcagccgagcaagccgccctgaacatcgccagatcctggctgttcctgcggagccaggagtacaagaaataccagacaaacaagacaaccggcaacaccgataagagagccttcgtcgagacctggcagtccttttaccggaagaagcttaaggaggtgtggaaacctgccgtgcggtctggcggatctggcggaggctccaccagccccaagaaaaagagaaaagtctaagctgccttctgcggggcttgccttctggccatgcccttcttctctcccttgcacctgtacctcttggtctttgaataaagcctgagtaggaaggctagcaaaaaaaaaaaaaaaaaaaaaaaaaaaaaaaaaaaaaaaaaaaaaaaaaaaaaaaaaaaaaaaaaaaaaaaaaaaaaaaa

SEQ ID NO: 9874 - RNA, 8787 nt, synthetic construct
  source 1..8787: mol_type = other RNA
aggaaataagagagaaaagaagagtaagaagaaatataagagccaccatggcccctaagaagaagcgtaaagtgagccggatgaaccacgaccaggagttcgacccccctaaggtgtaccctcccgtccccgccgagaagagaaagcccatccgggtcctgagcctgttcgatggcatcgccaccggtctgctggtgctgaaggacctgggcatccaggtggataggtacattgcctccgaggtgtgcgaggactccatcaccgtgggaatggtgcgtcatcagggcaagatcatgtacgtgggcgacgtgcggagcgtgacacagaagcatatccaggagtggggccctttcgacctggtgatcggcggcagcccttgcaatgacctgagcatcgtgaacccagcccggaagggcctgtacgagggaaccggcagactgttcttcgagttttacagactgctgcacgacgcccggcctaaggaaggcgacgaccggcccttcttttggctgttcgagaatgtggtggccatgggagtcagcgacaagcgggatattagccggttcctggagagcaaccccgtgatgatcgatgccaaggaagtgagcgccgcccaccgggccagatacttctggggcaatctgcctggcatgaacagacccctggccagcaccgtgaacgacaagctggagctgcaggagtgcctggagcacggccggatcgccaagttcagcaaggtgagaaccatcaccacccgaagcaacagcatcaaacaaggcaaggaccagcactttcctgtgttcatgaacgagaaggaggacatcctgtggtgtaccgagatggagagagtgttcgggttcccagtccactacacagatgtcagcaacatgtctagactggccagacagagactgctgggaagaagctggtccgtccctgtgatcagacacctgttcgcccctctgaaggagtacttcgcctgcgtgagcagcggcaacagcaacgccaacagccggggccccagcttctctagcggcctggtgccactgtccctgagagggagccacatgggccccatggagatctacaaaaccgtgagcgcctggaagcggcagcctgtgcgcgtgctgagcctgtttcggaatatcgataaagtcctgaaaagcctgggattcctggagagcggctctggctccggcggtggcaccctgaagtacgtggaggatgtgacaaacgtggtcagacgggatgtggagaagtggggccccttcgatctggtgtacggcagcacccaacccctgggcagctcttgtgaccggtgccctggctggtacatgtttcagttccaccggatcctgcagtacgccctgccgagacaggagtcccagcggccattcttttggattttcatggacaacttgctgctgaccgaggatgaccaggaaactaccactcggttcctgcagaccgaagccgtgaccctgcaggacgtgagaggccgggactaccagaacgccatgcgggtgtggtccaacatccctggactgaaaagcaagcacgcacctctgacccctaaagaagaggagtacctgcaggcccaggtgcggagcagaagcaagctggacgcccctaaggtggatctgctggtgaagaattgcctcctgcccctgagagagtacttcaagtatttcagccagaatagtctgcccctgggaggcagcggcggcggcccccagaagagcgtgaccttcgaggacgtggccgtgtacttcacccaggccgagtgggacggcctgagccccgcccagaggaccctgtacagggacgtgatgctggagaactacggcaacgtggccagcctgggcttccccctgctgaagcccgccgtgatcagccagctggagggcggcggcgacctgggcggccccagccccctggccgccggcaccggcctgcagggcctgaggaccgtgggcggcccaagcagcggcgcccctcctcccagcggcggcaggcggcccaagcagcggcgcccctcctcccagcggcggcagcccagccggctccccaacctctaccgaggagggcacctctgagtccgccacccccgagagcggccctggcacctccaccgagcccagcgagggcagcgcacccggcagccctgccggcagccccacctccacagaggagggaaccagcaccgagcccagcgaaggcagcgccccaggcaccagcaccgagcctagtgagcaggagattaaacggatcaacaagatcagaagaagacttgtgaaagacagcaacaccaagaaggccggcaagacaggccccatgaaaaccctgctggttagagtgatgacacccgatctgagagagcggctggaaaacctgagaaagaagcctgaaaatatcccccagcccatcagcaatacatctagagccaacctgaataagctgctgaccgattacaccgaaatgaagaaggcgatcctgcatgtgtactgggaagagttccagaaggaccctgtgggcctgatgagccgggtggcccagcctgccagcaagaagatcgatcagaacaagctgaaacctgagatggacgagaagggcaacctgaccaccgccggctttgcctgctctcagtgtggccagcccctgttcgtgtacaagctggagcaggtgtctgagaagggcaaggcttacaccaactacttcggacggtgcaatgtggccgagcacgaaaagctgatcctgctggcccagctgaagcccgagaaggatagcgacgaagccgtgacatatagcctgggaaagtttgggcagagggccctggatttctacagcattcatgtgaccaaggagtccacccaccccgtgaagcccctggcccagatcgccggaaacagatacgcctccggacctgtgggaaaggccctgagcgacgcatgtatgggcacaatcgcctccttcctgtctaagtaccaggacatcatcatcgaacaccagaaggtggtgaagggcaaccagaagagactggagagcctgcgggagctggccggcaaggaaaacctggaataccctagcgtgaccctgccacctcagcctcacaccaaggagggcgttgatgcctacaacgaagtgatcgcccgggtgcgaatgtgggtgaacctgaacctgtggcagaagctgaagctaagcagagatgatgccaagcctctgctgagactgaagggattcccttcctttcctctggtcgagagacaggccaacgaagtggactggtgggacatggtgtgtaacgtgaagaagctgatcaacgagaaaaaggaggatggcaaggtgttttggcagaatctggctggctacaagagacaggaagccctgagaccatacctgagcagcgaggaagatcggaagaagggaaagaaattcgctcggtaccagctgggcgacctgctgctgcacctggaaaagaagcacggcgaggactggggaaaggtgtacgacgaggcctgggagcggattgacaagaaagtggaaggcctgagcaagcacatcaagctggaagaggaacggagaagcgaggacgcccagagcaaggccgccctgaccgactggctgcgggctaaggccagcttcgtgatcgagggcctgaaggaggccgacaaggacgagttctgcagatgcgagctgaagctgcagaagtggtacggggacctgcggggaaagcccttcgccatcgaagccgagaacagcatcctggacatcagcggcttcagcaagcagtacaactgtgccttcatctggcagaaggacggcgtgaagaagctgaacctgtacctgatcatcaactacttcaagggcggcaagctgcggttcaagaagatcaaacctgaagccttcgaagccaacagattctacaccgtgatcaacaaaaagagcggcgagatcgtgcccatggaggtgaacttcaacttcgacgaccccaacctgatcatcctgcctctggcctttggcaagagacagggcagagaattcatctggaacgacctgctgtccctggaaaccggcagcctgaagctggccaacggaagagtgatcgagaagacactgtacaacagaagaacccggcaggatgagcctgccctgttcgtggccctgaccttcgagcggcgggaggtcctggactcctccaatatcaaaccaatgaacctgatcggcgtggcaagaggcgaaaacatccccgccgtgatcgccctgaccgaccccgagggctgcccactgagccggtttaaggatagcctgggaaacccaacccacatcctgagaatcggcgagagctataaggagaagcagcggaccatccaggccaagaaggaggtggagcagcggagagccggcggctacagccggaagtacgccagcaaagccaagaatctggcagacgatatggtgagaaacaccgctagagatctgctgtactacgccgtgacccaggatgccatgctgatcttcgccaacctgagccggggcttcggccggcagggcaagcggaccttcatggccgagagacagtacacacggatggaggactggctgaccgccaagctggcctacgagggcctgagcaagacctacctgtccaagacactggcccagtacacctccaagacatgcagcaactgtgggtttaccatcaccagcgccgactacgacagggtgctggagaagctgaagaagacagcaacaggctggatgaccacaattaacggcaaggagctgaaggtggagggccagattacctactacaacagatacaagagacagaacgtagtcaaggacctgtccgtcgagctggatagactgagcgaagaatctgtgaacaacgacatctcctcctggacaaagggcagaagcggagaagctctgagcctcctgaagaaaagattctcccatagacccgtgcaggagaagttcgtgtgcctgaactgcggcttcgagacacacgcagccgagcaagccgccctgaacatcgccagatcctggctgttcctgcggagccaggagtacaagaaataccagacaaacaagacaaccggcaacaccgataagagagccttcgtcgagacctggcagtccttttaccggaagaagcttaaggaggtgtggaaacctgccgtgcggtctggcggatctggcggaggctccaccagccccaagaaaaagagaaaagtctaagctgccttctgcggggcttgccttctggccatgcccttcttctctcccttgcacctgtacctcttggtctttgaataaagcctgagtaggaaggctagcaaaaaaaaaaaaaaaaaaaaaaaaaaaaaaaaaaaaaaaaaaaaaaaaaaaaaaaaaaaaaaaaaaaaaaaaaaaaaaaagcccagccggctccccaacctctaccgaggagggcacctctgagtccgccacccccgagagcggccctggcacctccaccgagcccagcgagggcagcgcacccggcagccctgccggcagccccacctccacagaggagggaaccagcaccgagcccagcgaaggcagcgccccaggcaccagcaccgagcctagtgagcaggagattaaacggatcaacaagatcagaagaagacttgtgaaagacagcaacaccaagaaggccggcaagacaggccccatgaaaaccctgctggttagagtgatgacacccgatctgagagagcggctggaaaacctgagaaagaagcctgaaaatatcccccagcccatcagcaatacatctagagccaacctgaataagctgctgaccgattacaccgaaatgaagaaggcgatcctgcatgtgtactgggaagagttccagaaggaccctgtgggcctgatgagccgggtggcccagcctgccagcaagaagatcgatcagaacaagctgaaacctgagatggacgagaagggcaacctgaccaccgccggctttgcctgctctcagtgtggccagcccctgttcgtgtacaagctggagcaggtgtctgagaagggcaaggcttacaccaactacttcggacggtgcaatgtggccgagcacgaaaagctgatcctgctggcccagctgaagcccgagaaggatagcgacgaagccgtgacatatagcctgggaaagtttgggcagagggccctggatttctacagcattcatgtgaccaaggagtccacccaccccgtgaagcccctggcccagatcgccggaaacagatacgcctccggacctgtgggaaaggccctgagcgacgcatgtatgggcacaatcgcctccttcctgtctaagtaccaggacatcatcatcgaacaccagaaggtggtgaagggcaaccagaagagactggagagcctgcgggagctggccggcaaggaaaacctggaataccctagcgtgaccctgccacctcagcctcacaccaaggagggcgttgatgcctacaacgaagtgatcgcccgggtgcgaatgtgggtgaacctgaacctgtggcagaagctgaagctaagcagagatgatgccaagcctctgctgagactgaagggattcccttcctttcctctggtcgagagacaggccaacgaagtggactggtgggacatggtgtgtaacgtgaagaagctgatcaacgagaaaaaggaggatggcaaggtgttttggcagaatctggctggctacaagagacaggaagccctgagaccatacctgagcagcgaggaagatcggaagaagggaaagaaattcgctcggtaccagctgggcgacctgctgctgcacctggaaaagaagcacggcgaggactggggaaaggtgtacgacgaggcctgggagcggattgacaagaaagtggaaggcctgagcaagcacatcaagctggaagaggaacggagaagcgaggacgcccagagcaaggccgccctgaccgactggctgcgggctaaggccagcttcgtgatcgagggcctgaaggaggccgacaaggacgagttctgcagatgcgagctgaagctgcagaagtggtacggggacctgcggggaaagcccttcgccatcgaagccgagaacagcatcctggacatcagcggcttcagcaagcagtacaactgtgccttcatctggcagaaggacggcgtgaagaagctgaacctgtacctgatcatcaactacttcaagggcggcaagctgcggttcaagaagatcaaacctgaagccttcgaagccaacagattctacaccgtgatcaacaaaaagagcggcgagatcgtgcccatggaggtgaacttcaacttcgacgaccccaacctgatcatcctgcctctggcctttggcaagagacagggcagagaattcatctggaacgacctgctgtccctggaaaccggcagcctgaagctggccaacggaagagtgatcgagaagacactgtacaacagaagaacccggcaggatgagcctgccctgttcgtggccctgaccttcgagcggcgggaggtcctggactcctccaatatcaaaccaatgaacctgatcggcgtggcaagaggcgaaaacatccccgccgtgatcgccctgaccgaccccgagggctgcccactgagccggtttaaggatagcctgggaaacccaacccacatcctgagaatcggcgagagctataaggagaagcagcggaccatccaggccaagaaggaggtggagcagcggagagccggcggctacagccggaagtacgccagcaaagccaagaatctggcagacgatatggtgagaaacaccgctagagatctgctgtactacgccgtgacccaggatgccatgctgatcttcgccaacctgagccggggcttcggccggcagggcaagcggaccttcatggccgagagacagtacacacggatggaggactggctgaccgccaagctggcctacgagggcctgagcaagacctacctgtccaagacactggcccagtacacctccaagacatgcagcaactgtgggtttaccatcaccagcgccgactacgacagggtgctggagaagctgaagaagacagcaacaggctggatgaccacaattaacggcaaggagctgaaggtggagggccagattacctactacaacagatacaagagacagaacgtagtcaaggacctgtccgtcgagctggatagactgagcgaagaatctgtgaacaacgacatctcctcctggacaaagggcagaagcggagaagctctgagcctcctgaagaaaagattctcccatagacccgtgcaggagaagttcgtgtgcctgaactgcggcttcgagacacacgcagccgagcaagccgccctgaacatcgccagatcctggctgttcctgcggagccaggagtacaagaaataccagacaaacaagacaaccggcaacaccgataagagagccttcgtcgagacctggcagtccttttaccggaagaagcttaaggaggtgtggaaacctgccgtgcggtctggcggatctggcggaggctccaccagccccaagaaaaagagaaaagtctaagctgccttctgcggggcttgccttctggccatgcccttcttctctcccttgcacctgtacctcttggtctttgaataaagcctgagtaggaaggctagcaaaaaaaaaaaaaaaaaaaaaaaaaaaaaaaaaaaaaaaaaaaaaaaaaaaaaaaaaaaaaaaaaaaaaaaaaaaaaaaa

SEQ ID NO: 9875 - RNA, 8787 nt, synthetic construct
  source 1..8787: mol_type = other RNA
aggaaataagagagaaaagaagagtaagaagaaatataagagccaccatggcccctaagaagaagcgtaaagtgagccggatgaaccacgaccaggagttcgacccccctaaggtgtaccctcccgtccccgccgagaagagaaagcccatccgggtcctgagcctgttcgatggcatcgccaccggtctgctggtgctgaaggacctgggcatccaggtggataggtacattgcctccgaggtgtgcgaggactccatcaccgtgggaatggtgcgtcatcagggcaagatcatgtacgtgggcgacgtgcggagcgtgacacagaagcatatccaggagtggggccctttcgacctggtgatcggcggcagcccttgcaatgacctgagcatcgtgaacccagcccggaagggcctgtacgagggaaccggcagactgttcttcgagttttacagactgctgcacgacgcccggcctaaggaaggcgacgaccggcccttcttttggctgttcgagaatgtggtggccatgggagtcagcgacaagcgggatattagccggttcctggagagcaaccccgtgatgatcgatgccaaggaagtgagcgccgcccaccgggccagatacttctggggcaatctgcctggcatgaacagacccctggccagcaccgtgaacgacaagctggagctgcaggagtgcctggagcacggccggatcgccaagttcagcaaggtgagaaccatcaccacccgaagcaacagcatcaaacaaggcaaggaccagcactttcctgtgttcatgaacgagaaggaggacatcctgtggtgtaccgagatggagagagtgttcgggttcccagtccactacacagatgtcagcaacatgtctagactggccagacagagactgctgggaagaagctggtccgtccctgtgatcagacacctgttcgcccctctgaaggagtacttcgcctgcgtgagcagcggcaacagcaacgccaacagccggggccccagcttctctagcggcctggtgccactgtccctgagagggagccacatgggccccatggagatctacaaaaccgtgagcgcctggaagcggcagcctgtgcgcgtgctgagcctgtttcggaatatcgataaagtcctgaaaagcctgggattcctggagagcggctctggctccggcggtggcaccctgaagtacgtggaggatgtgacaaacgtggtcagacgggatgtggagaagtggggccccttcgatctggtgtacggcagcacccaacccctgggcagctcttgtgaccggtgccctggctggtacatgtttcagttccaccggatcctgcagtacgccctgccgagacaggagtcccagcggccattcttttggattttcatggacaacttgctgctgaccgaggatgaccaggaaactaccactcggttcctgcagaccgaagccgtgaccctgcaggacgtgagaggccgggactaccagaacgccatgcgggtgtggtccaacatccctggactgaaaagcaagcacgcacctctgacccctaaagaagaggagtacctgcaggcccaggtgcggagcagaagcaagctggacgcccctaaggtggatctgctggtgaagaattgcctcctgcccctgagagagtacttcaagtatttcagccagaatagtctgcccctgggaggcagcggcggcggcgagaagcagttcagcttccagagcctgctgaccttcgaggacgtggccatcaacttcagcaagaaggagtgggagtgcctggacaccagccagagggacctgtacaggttcgtgatgctggagaactacagcaacctggtgagcgtgggcctgagcgtgagcaagcccgagctggtgacctgcctggagcagaacaaggagccctggatggtgaacatcgaggagagcgaggtgctggagcccggcggcccaagcagcggcgcccctcctcccagcggcggcaggcggcccaagcagcggcgcccctcctcccagcggcggcagcccagccggctccccaacctctaccgaggagggcacctctgagtccgccacccccgagagcggccctggcacctccaccgagcccagcgagggcagcgcacccggcagccctgccggcagccccacctccacagaggagggaaccagcaccgagcccagcgaaggcagcgccccaggcaccagcaccgagcctagtgagcaggagattaaacggatcaacaagatcagaagaagacttgtgaaagacagcaacaccaagaaggccggcaagacaggccccatgaaaaccctgctggttagagtgatgacacccgatctgagagagcggctggaaaacctgagaaagaagcctgaaaatatcccccagcccatcagcaatacatctagagccaacctgaataagctgctgaccgattacaccgaaatgaagaaggcgatcctgcatgtgtactgggaagagttccagaaggaccctgtgggcctgatgagccgggtggcccagcctgccagcaagaagatcgatcagaacaagctgaaacctgagatggacgagaagggcaacctgaccaccgccggctttgcctgctctcagtgtggccagcccctgttcgtgtacaagctggagcaggtgtctgagaagggcaaggcttacaccaactacttcggacggtgcaatgtggccgagcacgaaaagctgatcctgctggcccagctgaagcccgagaaggatagcgacgaagccgtgacatatagcctgggaaagtttgggcagagggccctggatttctacagcattcatgtgaccaaggagtccacccaccccgtgaagcccctggcccagatcgccggaaacagatacgcctccggacctgtgggaaaggccctgagcgacgcatgtatgggcacaatcgcctccttcctgtctaagtaccaggacatcatcatcgaacaccagaaggtggtgaagggcaaccagaagagactggagagcctgcgggagctggccggcaaggaaaacctggaataccctagcgtgaccctgccacctcagcctcacaccaaggagggcgttgatgcctacaacgaagtgatcgcccgggtgcgaatgtgggtgaacctgaacctgtggcagaagctgaagctaagcagagatgatgccaagcctctgctgagactgaagggattcccttcctttcctctggtcgagagacaggccaacgaagtggactggtgggacatggtgtgtaacgtgaagaagctgatcaacgagaaaaaggaggatggcaaggtgttttggcagaatctggctggctacaagagacaggaagccctgagaccatacctgagcagcgaggaagatcggaagaagggaaagaaattcgctcggtaccagctgggcgacctgctgctgcacctggaaaagaagcacggcgaggactggggaaaggtgtacgacgaggcctgggagcggattgacaagaaagtggaaggcctgagcaagcacatcaagctggaagaggaacggagaagcgaggacgcccagagcaaggccgccctgaccgactggctgcgggctaaggccagcttcgtgatcgagggcctgaaggaggccgacaaggacgagttctgcagatgcgagctgaagctgcagaagtggtacggggacctgcggggaaagcccttcgccatcgaagccgagaacagcatcctggacatcagcggcttcagcaagcagtacaactgtgccttcatctggcagaaggacggcgtgaagaagctgaacctgtacctgatcatcaactacttcaagggcggcaagctgcggttcaagaagatcaaacctgaagccttcgaagccaacagattctacaccgtgatcaacaaaaagagcggcgagatcgtgcccatggaggtgaacttcaacttcgacgaccccaacctgatcatcctgcctctggcctttggcaagagacagggcagagaattcatctggaacgacctgctgtccctggaaaccggcagcctgaagctggccaacggaagagtgatcgagaagacactgtacaacagaagaacccggcaggatgagcctgccctgttcgtggccctgaccttcgagcggcgggaggtcctggactcctccaatatcaaaccaatgaacctgatcggcgtggcaagaggcgaaaacatccccgccgtgatcgccctgaccgaccccgagggctgcccactgagccggtttaaggatagcctgggaaacccaacccacatcctgagaatcggcgagagctataaggagaagcagcggaccatccaggccaagaaggaggtggagcagcggagagccggcggctacagccggaagtacgccagcaaagccaagaatctggcagacgatatggtgagaaacaccgctagagatctgctgtactacgccgtgacccaggatgccatgctgatcttcgccaacctgagccggggcttcggccggcagggcaagcggaccttcatggccgagagacagtacacacggatggaggactggctgaccgccaagctggcctacgagggcctgagcaagacctacctgtccaagacactggcccagtacacctccaagacatgcagcaactgtgggtttaccatcaccagcgccgactacgacagggtgctggagaagctgaagaagacagcaacaggctggatgaccacaattaacggcaaggagctgaaggtggagggccagattacctactacaacagatacaagagacagaacgtagtcaaggacctgtccgtcgagctggatagactgagcgaagaatctgtgaacaacgacatctcctcctggacaaagggcagaagcggagaagctctgagcctcctgaagaaaagattctcccatagacccgtgcaggagaagttcgtgtgcctgaactgcggcttcgagacacacgcagccgagcaagccgccctgaacatcgccagatcctggctgttcctgcggagccaggagtacaagaaataccagacaaacaagacaaccggcaacaccgataagagagccttcgtcgagacctggcagtccttttaccggaagaagcttaaggaggtgtggaaacctgccgtgcggtctggcggatctggcggaggctccaccagccccaagaaaaagagaaaagtctaagctgccttctgcggggcttgccttctggccatgcccttcttctctcccttgcacctgtacctcttggtctttgaataaagcctgagtaggaaggctagcaaaaaaaaaaaaaaaaaaaaaaaaaaaaaaaaaaaaaaaaaaaaaaaaaaaaaaaaaaaaaaaaaaaaaaaaaaaaaaaagcccagccggctccccaacctctaccgaggagggcacctctgagtccgccacccccgagagcggccctggcacctccaccgagcccagcgagggcagcgcacccggcagccctgccggcagccccacctccacagaggagggaaccagcaccgagcccagcgaaggcagcgccccaggcaccagcaccgagcctagtgagcaggagattaaacggatcaacaagatcagaagaagacttgtgaaagacagcaacaccaagaaggccggcaagacaggccccatgaaaaccctgctggttagagtgatgacacccgatctgagagagcggctggaaaacctgagaaagaagcctgaaaatatcccccagcccatcagcaatacatctagagccaacctgaataagctgctgaccgattacaccgaaatgaagaaggcgatcctgcatgtgtactgggaagagttccagaaggaccctgtgggcctgatgagccgggtggcccagcctgccagcaagaagatcgatcagaacaagctgaaacctgagatggacgagaagggcaacctgaccaccgccggctttgcctgctctcagtgtggccagcccctgttcgtgtacaagctggagcaggtgtctgagaagggcaaggcttacaccaactacttcggacggtgcaatgtggccgagcacgaaaagctgatcctgctggcccagctgaagcccgagaaggatagcgacgaagccgtgacatatagcctgggaaagtttgggcagagggccctggatttctacagcattcatgtgaccaaggagtccacccaccccgtgaagcccctggcccagatcgccggaaacagatacgcctccggacctgtgggaaaggccctgagcgacgcatgtatgggcacaatcgcctccttcctgtctaagtaccaggacatcatcatcgaacaccagaaggtggtgaagggcaaccagaagagactggagagcctgcgggagctggccggcaaggaaaacctggaataccctagcgtgaccctgccacctcagcctcacaccaaggagggcgttgatgcctacaacgaagtgatcgcccgggtgcgaatgtgggtgaacctgaacctgtggcagaagctgaagctaagcagagatgatgccaagcctctgctgagactgaagggattcccttcctttcctctggtcgagagacaggccaacgaagtggactggtgggacatggtgtgtaacgtgaagaagctgatcaacgagaaaaaggaggatggcaaggtgttttggcagaatctggctggctacaagagacaggaagccctgagaccatacctgagcagcgaggaagatcggaagaagggaaagaaattcgctcggtaccagctgggcgacctgctgctgcacctggaaaagaagcacggcgaggactggggaaaggtgtacgacgaggcctgggagcggattgacaagaaagtggaaggcctgagcaagcacatcaagctggaagaggaacggagaagcgaggacgcccagagcaaggccgccctgaccgactggctgcgggctaaggccagcttcgtgatcgagggcctgaaggaggccgacaaggacgagttctgcagatgcgagctgaagctgcagaagtggtacggggacctgcggggaaagcccttcgccatcgaagccgagaacagcatcctggacatcagcggcttcagcaagcagtacaactgtgccttcatctggcagaaggacggcgtgaagaagctgaacctgtacctgatcatcaactacttcaagggcggcaagctgcggttcaagaagatcaaacctgaagccttcgaagccaacagattctacaccgtgatcaacaaaaagagcggcgagatcgtgcccatggaggtgaacttcaacttcgacgaccccaacctgatcatcctgcctctggcctttggcaagagacagggcagagaattcatctggaacgacctgctgtccctggaaaccggcagcctgaagctggccaacggaagagtgatcgagaagacactgtacaacagaagaacccggcaggatgagcctgccctgttcgtggccctgaccttcgagcggcgggaggtcctggactcctccaatatcaaaccaatgaacctgatcggcgtggcaagaggcgaaaacatccccgccgtgatcgccctgaccgaccccgagggctgcccactgagccggtttaaggatagcctgggaaacccaacccacatcctgagaatcggcgagagctataaggagaagcagcggaccatccaggccaagaaggaggtggagcagcggagagccggcggctacagccggaagtacgccagcaaagccaagaatctggcagacgatatggtgagaaacaccgctagagatctgctgtactacgccgtgacccaggatgccatgctgatcttcgccaacctgagccggggcttcggccggcagggcaagcggaccttcatggccgagagacagtacacacggatggaggactggctgaccgccaagctggcctacgagggcctgagcaagacctacctgtccaagacactggcccagtacacctccaagacatgcagcaactgtgggtttaccatcaccagcgccgactacgacagggtgctggagaagctgaagaagacagcaacaggctggatgaccacaattaacggcaaggagctgaaggtggagggccagattacctactacaacagatacaagagacagaacgtagtcaaggacctgtccgtcgagctggatagactgagcgaagaatctgtgaacaacgacatctcctcctggacaaagggcagaagcggagaagctctgagcctcctgaagaaaagattctcccatagacccgtgcaggagaagttcgtgtgcctgaactgcggcttcgagacacacgcagccgagcaagccgccctgaacatcgccagatcctggctgttcctgcggagccaggagtacaagaaataccagacaaacaagacaaccggcaacaccgataagagagccttcgtcgagacctggcagtccttttaccggaagaagcttaaggaggtgtggaaacctgccgtgcggtctggcggatctggcggaggctccaccagccccaagaaaaagagaaaagtctaagctgccttctgcggggcttgccttctggccatgcccttcttctctcccttgcacctgtacctcttggtctttgaataaagcctgagtaggaaggctagcaaaaaaaaaaaaaaaaaaaaaaaaaaaaaaaaaaaaaaaaaaaaaaaaaaaaaaaaaaaaaaaaaaaaaaaaaaaaaaaa

SEQ ID NO: 9876 - RNA, 8787 nt, synthetic construct
  source 1..8787: mol_type = other RNA
aggaaataagagagaaaagaagagtaagaagaaatataagagccaccatggcccctaagaagaagcgtaaagtgagccggatgaaccacgaccaggagttcgacccccctaaggtgtaccctcccgtccccgccgagaagagaaagcccatccgggtcctgagcctgttcgatggcatcgccaccggtctgctggtgctgaaggacctgggcatccaggtggataggtacattgcctccgaggtgtgcgaggactccatcaccgtgggaatggtgcgtcatcagggcaagatcatgtacgtgggcgacgtgcggagcgtgacacagaagcatatccaggagtggggccctttcgacctggtgatcggcggcagcccttgcaatgacctgagcatcgtgaacccagcccggaagggcctgtacgagggaaccggcagactgttcttcgagttttacagactgctgcacgacgcccggcctaaggaaggcgacgaccggcccttcttttggctgttcgagaatgtggtggccatgggagtcagcgacaagcgggatattagccggttcctggagagcaaccccgtgatgatcgatgccaaggaagtgagcgccgcccaccgggccagatacttctggggcaatctgcctggcatgaacagacccctggccagcaccgtgaacgacaagctggagctgcaggagtgcctggagcacggccggatcgccaagttcagcaaggtgagaaccatcaccacccgaagcaacagcatcaaacaaggcaaggaccagcactttcctgtgttcatgaacgagaaggaggacatcctgtggtgtaccgagatggagagagtgttcgggttcccagtccactacacagatgtcagcaacatgtctagactggccagacagagactgctgggaagaagctggtccgtccctgtgatcagacacctgttcgcccctctgaaggagtacttcgcctgcgtgagcagcggcaacagcaacgccaacagccggggccccagcttctctagcggcctggtgccactgtccctgagagggagccacatgggccccatggagatctacaaaaccgtgagcgcctggaagcggcagcctgtgcgcgtgctgagcctgtttcggaatatcgataaagtcctgaaaagcctgggattcctggagagcggctctggctccggcggtggcaccctgaagtacgtggaggatgtgacaaacgtggtcagacgggatgtggagaagtggggccccttcgatctggtgtacggcagcacccaacccctgggcagctcttgtgaccggtgccctggctggtacatgtttcagttccaccggatcctgcagtacgccctgccgagacaggagtcccagcggccattcttttggattttcatggacaacttgctgctgaccgaggatgaccaggaaactaccactcggttcctgcagaccgaagccgtgaccctgcaggacgtgagaggccgggactaccagaacgccatgcgggtgtggtccaacatccctggactgaaaagcaagcacgcacctctgacccctaaagaagaggagtacctgcaggcccaggtgcggagcagaagcaagctggacgcccctaaggtggatctgctggtgaagaattgcctcctgcccctgagagagtacttcaagtatttcagccagaatagtctgcccctgggaggcagcggcggcggccagcccagggaggccgtgaccttcaaggacgtggaggtgaccttcagccaggacgagtggggctggctggaccccgcccagaggaacctgtacagggacgtgatgctggagaactacggcaacgtggtgagcctggtgggccccttcaccaagcccgtgctgatcagctggctggaggccagggagccctggggcctgaacgtgcagggcgcccagcccaagggcaagcccggcgtggcccccggcggcccaagcagcggcgcccctcctcccagcggcggcaggcggcccaagcagcggcgcccctcctcccagcggcggcagcccagccggctccccaacctctaccgaggagggcacctctgagtccgccacccccgagagcggccctggcacctccaccgagcccagcgagggcagcgcacccggcagccctgccggcagccccacctccacagaggagggaaccagcaccgagcccagcgaaggcagcgccccaggcaccagcaccgagcctagtgagcaggagattaaacggatcaacaagatcagaagaagacttgtgaaagacagcaacaccaagaaggccggcaagacaggccccatgaaaaccctgctggttagagtgatgacacccgatctgagagagcggctggaaaacctgagaaagaagcctgaaaatatcccccagcccatcagcaatacatctagagccaacctgaataagctgctgaccgattacaccgaaatgaagaaggcgatcctgcatgtgtactgggaagagttccagaaggaccctgtgggcctgatgagccgggtggcccagcctgccagcaagaagatcgatcagaacaagctgaaacctgagatggacgagaagggcaacctgaccaccgccggctttgcctgctctcagtgtggccagcccctgttcgtgtacaagctggagcaggtgtctgagaagggcaaggcttacaccaactacttcggacggtgcaatgtggccgagcacgaaaagctgatcctgctggcccagctgaagcccgagaaggatagcgacgaagccgtgacatatagcctgggaaagtttgggcagagggccctggatttctacagcattcatgtgaccaaggagtccacccaccccgtgaagcccctggcccagatcgccggaaacagatacgcctccggacctgtgggaaaggccctgagcgacgcatgtatgggcacaatcgcctccttcctgtctaagtaccaggacatcatcatcgaacaccagaaggtggtgaagggcaaccagaagagactggagagcctgcgggagctggccggcaaggaaaacctggaataccctagcgtgaccctgccacctcagcctcacaccaaggagggcgttgatgcctacaacgaagtgatcgcccgggtgcgaatgtgggtgaacctgaacctgtggcagaagctgaagctaagcagagatgatgccaagcctctgctgagactgaagggattcccttcctttcctctggtcgagagacaggccaacgaagtggactggtgggacatggtgtgtaacgtgaagaagctgatcaacgagaaaaaggaggatggcaaggtgttttggcagaatctggctggctacaagagacaggaagccctgagaccatacctgagcagcgaggaagatcggaagaagggaaagaaattcgctcggtaccagctgggcgacctgctgctgcacctggaaaagaagcacggcgaggactggggaaaggtgtacgacgaggcctgggagcggattgacaagaaagtggaaggcctgagcaagcacatcaagctggaagaggaacggagaagcgaggacgcccagagcaaggccgccctgaccgactggctgcgggctaaggccagcttcgtgatcgagggcctgaaggaggccgacaaggacgagttctgcagatgcgagctgaagctgcagaagtggtacggggacctgcggggaaagcccttcgccatcgaagccgagaacagcatcctggacatcagcggcttcagcaagcagtacaactgtgccttcatctggcagaaggacggcgtgaagaagctgaacctgtacctgatcatcaactacttcaagggcggcaagctgcggttcaagaagatcaaacctgaagccttcgaagccaacagattctacaccgtgatcaacaaaaagagcggcgagatcgtgcccatggaggtgaacttcaacttcgacgaccccaacctgatcatcctgcctctggcctttggcaagagacagggcagagaattcatctggaacgacctgctgtccctggaaaccggcagcctgaagctggccaacggaagagtgatcgagaagacactgtacaacagaagaacccggcaggatgagcctgccctgttcgtggccctgaccttcgagcggcgggaggtcctggactcctccaatatcaaaccaatgaacctgatcggcgtggcaagaggcgaaaacatccccgccgtgatcgccctgaccgaccccgagggctgcccactgagccggtttaaggatagcctgggaaacccaacccacatcctgagaatcggcgagagctataaggagaagcagcggaccatccaggccaagaaggaggtggagcagcggagagccggcggctacagccggaagtacgccagcaaagccaagaatctggcagacgatatggtgagaaacaccgctagagatctgctgtactacgccgtgacccaggatgccatgctgatcttcgccaacctgagccggggcttcggccggcagggcaagcggaccttcatggccgagagacagtacacacggatggaggactggctgaccgccaagctggcctacgagggcctgagcaagacctacctgtccaagacactggcccagtacacctccaagacatgcagcaactgtgggtttaccatcaccagcgccgactacgacagggtgctggagaagctgaagaagacagcaacaggctggatgaccacaattaacggcaaggagctgaaggtggagggccagattacctactacaacagatacaagagacagaacgtagtcaaggacctgtccgtcgagctggatagactgagcgaagaatctgtgaacaacgacatctcctcctggacaaagggcagaagcggagaagctctgagcctcctgaagaaaagattctcccatagacccgtgcaggagaagttcgtgtgcctgaactgcggcttcgagacacacgcagccgagcaagccgccctgaacatcgccagatcctggctgttcctgcggagccaggagtacaagaaataccagacaaacaagacaaccggcaacaccgataagagagccttcgtcgagacctggcagtccttttaccggaagaagcttaaggaggtgtggaaacctgccgtgcggtctggcggatctggcggaggctccaccagccccaagaaaaagagaaaagtctaagctgccttctgcggggcttgccttctggccatgcccttcttctctcccttgcacctgtacctcttggtctttgaataaagcctgagtaggaaggctagcaaaaaaaaaaaaaaaaaaaaaaaaaaaaaaaaaaaaaaaaaaaaaaaaaaaaaaaaaaaaaaaaaaaaaaaaaaaaaaaagcccagccggctccccaacctctaccgaggagggcacctctgagtccgccacccccgagagcggccctggcacctccaccgagcccagcgagggcagcgcacccggcagccctgccggcagccccacctccacagaggagggaaccagcaccgagcccagcgaaggcagcgccccaggcaccagcaccgagcctagtgagcaggagattaaacggatcaacaagatcagaagaagacttgtgaaagacagcaacaccaagaaggccggcaagacaggccccatgaaaaccctgctggttagagtgatgacacccgatctgagagagcggctggaaaacctgagaaagaagcctgaaaatatcccccagcccatcagcaatacatctagagccaacctgaataagctgctgaccgattacaccgaaatgaagaaggcgatcctgcatgtgtactgggaagagttccagaaggaccctgtgggcctgatgagccgggtggcccagcctgccagcaagaagatcgatcagaacaagctgaaacctgagatggacgagaagggcaacctgaccaccgccggctttgcctgctctcagtgtggccagcccctgttcgtgtacaagctggagcaggtgtctgagaagggcaaggcttacaccaactacttcggacggtgcaatgtggccgagcacgaaaagctgatcctgctggcccagctgaagcccgagaaggatagcgacgaagccgtgacatatagcctgggaaagtttgggcagagggccctggatttctacagcattcatgtgaccaaggagtccacccaccccgtgaagcccctggcccagatcgccggaaacagatacgcctccggacctgtgggaaaggccctgagcgacgcatgtatgggcacaatcgcctccttcctgtctaagtaccaggacatcatcatcgaacaccagaaggtggtgaagggcaaccagaagagactggagagcctgcgggagctggccggcaaggaaaacctggaataccctagcgtgaccctgccacctcagcctcacaccaaggagggcgttgatgcctacaacgaagtgatcgcccgggtgcgaatgtgggtgaacctgaacctgtggcagaagctgaagctaagcagagatgatgccaagcctctgctgagactgaagggattcccttcctttcctctggtcgagagacaggccaacgaagtggactggtgggacatggtgtgtaacgtgaagaagctgatcaacgagaaaaaggaggatggcaaggtgttttggcagaatctggctggctacaagagacaggaagccctgagaccatacctgagcagcgaggaagatcggaagaagggaaagaaattcgctcggtaccagctgggcgacctgctgctgcacctggaaaagaagcacggcgaggactggggaaaggtgtacgacgaggcctgggagcggattgacaagaaagtggaaggcctgagcaagcacatcaagctggaagaggaacggagaagcgaggacgcccagagcaaggccgccctgaccgactggctgcgggctaaggccagcttcgtgatcgagggcctgaaggaggccgacaaggacgagttctgcagatgcgagctgaagctgcagaagtggtacggggacctgcggggaaagcccttcgccatcgaagccgagaacagcatcctggacatcagcggcttcagcaagcagtacaactgtgccttcatctggcagaaggacggcgtgaagaagctgaacctgtacctgatcatcaactacttcaagggcggcaagctgcggttcaagaagatcaaacctgaagccttcgaagccaacagattctacaccgtgatcaacaaaaagagcggcgagatcgtgcccatggaggtgaacttcaacttcgacgaccccaacctgatcatcctgcctctggcctttggcaagagacagggcagagaattcatctggaacgacctgctgtccctggaaaccggcagcctgaagctggccaacggaagagtgatcgagaagacactgtacaacagaagaacccggcaggatgagcctgccctgttcgtggccctgaccttcgagcggcgggaggtcctggactcctccaatatcaaaccaatgaacctgatcggcgtggcaagaggcgaaaacatccccgccgtgatcgccctgaccgaccccgagggctgcccactgagccggtttaaggatagcctgggaaacccaacccacatcctgagaatcggcgagagctataaggagaagcagcggaccatccaggccaagaaggaggtggagcagcggagagccggcggctacagccggaagtacgccagcaaagccaagaatctggcagacgatatggtgagaaacaccgctagagatctgctgtactacgccgtgacccaggatgccatgctgatcttcgccaacctgagccggggcttcggccggcagggcaagcggaccttcatggccgagagacagtacacacggatggaggactggctgaccgccaagctggcctacgagggcctgagcaagacctacctgtccaagacactggcccagtacacctccaagacatgcagcaactgtgggtttaccatcaccagcgccgactacgacagggtgctggagaagctgaagaagacagcaacaggctggatgaccacaattaacggcaaggagctgaaggtggagggccagattacctactacaacagatacaagagacagaacgtagtcaaggacctgtccgtcgagctggatagactgagcgaagaatctgtgaacaacgacatctcctcctggacaaagggcagaagcggagaagctctgagcctcctgaagaaaagattctcccatagacccgtgcaggagaagttcgtgtgcctgaactgcggcttcgagacacacgcagccgagcaagccgccctgaacatcgccagatcctggctgttcctgcggagccaggagtacaagaaataccagacaaacaagacaaccggcaacaccgataagagagccttcgtcgagacctggcagtccttttaccggaagaagcttaaggaggtgtggaaacctgccgtgcggtctggcggatctggcggaggctccaccagccccaagaaaaagagaaaagtctaagctgccttctgcggggcttgccttctggccatgcccttcttctctcccttgcacctgtacctcttggtctttgaataaagcctgagtaggaaggctagcaaaaaaaaaaaaaaaaaaaaaaaaaaaaaaaaaaaaaaaaaaaaaaaaaaaaaaaaaaaaaaaaaaaaaaaaaaaaaaaa

SEQ ID NO: 9877 - RNA, 8787 nt, synthetic construct
  source 1..8787: mol_type = other RNA
aggaaataagagagaaaagaagagtaagaagaaatataagagccaccatggcccctaagaagaagcgtaaagtgagccggatgaaccacgaccaggagttcgacccccctaaggtgtaccctcccgtccccgccgagaagagaaagcccatccgggtcctgagcctgttcgatggcatcgccaccggtctgctggtgctgaaggacctgggcatccaggtggataggtacattgcctccgaggtgtgcgaggactccatcaccgtgggaatggtgcgtcatcagggcaagatcatgtacgtgggcgacgtgcggagcgtgacacagaagcatatccaggagtggggccctttcgacctggtgatcggcggcagcccttgcaatgacctgagcatcgtgaacccagcccggaagggcctgtacgagggaaccggcagactgttcttcgagttttacagactgctgcacgacgcccggcctaaggaaggcgacgaccggcccttcttttggctgttcgagaatgtggtggccatgggagtcagcgacaagcgggatattagccggttcctggagagcaaccccgtgatgatcgatgccaaggaagtgagcgccgcccaccgggccagatacttctggggcaatctgcctggcatgaacagacccctggccagcaccgtgaacgacaagctggagctgcaggagtgcctggagcacggccggatcgccaagttcagcaaggtgagaaccatcaccacccgaagcaacagcatcaaacaaggcaaggaccagcactttcctgtgttcatgaacgagaaggaggacatcctgtggtgtaccgagatggagagagtgttcgggttcccagtccactacacagatgtcagcaacatgtctagactggccagacagagactgctgggaagaagctggtccgtccctgtgatcagacacctgttcgcccctctgaaggagtacttcgcctgcgtgagcagcggcaacagcaacgccaacagccggggccccagcttctctagcggcctggtgccactgtccctgagagggagccacatgggccccatggagatctacaaaaccgtgagcgcctggaagcggcagcctgtgcgcgtgctgagcctgtttcggaatatcgataaagtcctgaaaagcctgggattcctggagagcggctctggctccggcggtggcaccctgaagtacgtggaggatgtgacaaacgtggtcagacgggatgtggagaagtggggccccttcgatctggtgtacggcagcacccaacccctgggcagctcttgtgaccggtgccctggctggtacatgtttcagttccaccggatcctgcagtacgccctgccgagacaggagtcccagcggccattcttttggattttcatggacaacttgctgctgaccgaggatgaccaggaaactaccactcggttcctgcagaccgaagccgtgaccctgcaggacgtgagaggccgggactaccagaacgccatgcgggtgtggtccaacatccctggactgaaaagcaagcacgcacctctgacccctaaagaagaggagtacctgcaggcccaggtgcggagcagaagcaagctggacgcccctaaggtggatctgctggtgaagaattgcctcctgcccctgagagagtacttcaagtatttcagccagaatagtctgcccctgggaggcagcggcggcggcgccgagctgcccgtggtgttcgaggacgtggccgtgtacttcaccagggaggagtggggcatgctggacaagaggcagaaggagctgtacagggacgtgatgaggatgaactacgagctgatggccagcctgggccccgccgccgccaagcccgacctgatcagcaagctggagaggagggccgccccctggatcaaggaccccaacggccccaagtggggcaagggcaggccccccggcaacggcggcccaagcagcggcgcccctcctcccagcggcggcaggcggcccaagcagcggcgcccctcctcccagcggcggcagcccagccggctccccaacctctaccgaggagggcacctctgagtccgccacccccgagagcggccctggcacctccaccgagcccagcgagggcagcgcacccggcagccctgccggcagccccacctccacagaggagggaaccagcaccgagcccagcgaaggcagcgccccaggcaccagcaccgagcctagtgagcaggagattaaacggatcaacaagatcagaagaagacttgtgaaagacagcaacaccaagaaggccggcaagacaggccccatgaaaaccctgctggttagagtgatgacacccgatctgagagagcggctggaaaacctgagaaagaagcctgaaaatatcccccagcccatcagcaatacatctagagccaacctgaataagctgctgaccgattacaccgaaatgaagaaggcgatcctgcatgtgtactgggaagagttccagaaggaccctgtgggcctgatgagccgggtggcccagcctgccagcaagaagatcgatcagaacaagctgaaacctgagatggacgagaagggcaacctgaccaccgccggctttgcctgctctcagtgtggccagcccctgttcgtgtacaagctggagcaggtgtctgagaagggcaaggcttacaccaactacttcggacggtgcaatgtggccgagcacgaaaagctgatcctgctggcccagctgaagcccgagaaggatagcgacgaagccgtgacatatagcctgggaaagtttgggcagagggccctggatttctacagcattcatgtgaccaaggagtccacccaccccgtgaagcccctggcccagatcgccggaaacagatacgcctccggacctgtgggaaaggccctgagcgacgcatgtatgggcacaatcgcctccttcctgtctaagtaccaggacatcatcatcgaacaccagaaggtggtgaagggcaaccagaagagactggagagcctgcgggagctggccggcaaggaaaacctggaataccctagcgtgaccctgccacctcagcctcacaccaaggagggcgttgatgcctacaacgaagtgatcgcccgggtgcgaatgtgggtgaacctgaacctgtggcagaagctgaagctaagcagagatgatgccaagcctctgctgagactgaagggattcccttcctttcctctggtcgagagacaggccaacgaagtggactggtgggacatggtgtgtaacgtgaagaagctgatcaacgagaaaaaggaggatggcaaggtgttttggcagaatctggctggctacaagagacaggaagccctgagaccatacctgagcagcgaggaagatcggaagaagggaaagaaattcgctcggtaccagctgggcgacctgctgctgcacctggaaaagaagcacggcgaggactggggaaaggtgtacgacgaggcctgggagcggattgacaagaaagtggaaggcctgagcaagcacatcaagctggaagaggaacggagaagcgaggacgcccagagcaaggccgccctgaccgactggctgcgggctaaggccagcttcgtgatcgagggcctgaaggaggccgacaaggacgagttctgcagatgcgagctgaagctgcagaagtggtacggggacctgcggggaaagcccttcgccatcgaagccgagaacagcatcctggacatcagcggcttcagcaagcagtacaactgtgccttcatctggcagaaggacggcgtgaagaagctgaacctgtacctgatcatcaactacttcaagggcggcaagctgcggttcaagaagatcaaacctgaagccttcgaagccaacagattctacaccgtgatcaacaaaaagagcggcgagatcgtgcccatggaggtgaacttcaacttcgacgaccccaacctgatcatcctgcctctggcctttggcaagagacagggcagagaattcatctggaacgacctgctgtccctggaaaccggcagcctgaagctggccaacggaagagtgatcgagaagacactgtacaacagaagaacccggcaggatgagcctgccctgttcgtggccctgaccttcgagcggcgggaggtcctggactcctccaatatcaaaccaatgaacctgatcggcgtggcaagaggcgaaaacatccccgccgtgatcgccctgaccgaccccgagggctgcccactgagccggtttaaggatagcctgggaaacccaacccacatcctgagaatcggcgagagctataaggagaagcagcggaccatccaggccaagaaggaggtggagcagcggagagccggcggctacagccggaagtacgccagcaaagccaagaatctggcagacgatatggtgagaaacaccgctagagatctgctgtactacgccgtgacccaggatgccatgctgatcttcgccaacctgagccggggcttcggccggcagggcaagcggaccttcatggccgagagacagtacacacggatggaggactggctgaccgccaagctggcctacgagggcctgagcaagacctacctgtccaagacactggcccagtacacctccaagacatgcagcaactgtgggtttaccatcaccagcgccgactacgacagggtgctggagaagctgaagaagacagcaacaggctggatgaccacaattaacggcaaggagctgaaggtggagggccagattacctactacaacagatacaagagacagaacgtagtcaaggacctgtccgtcgagctggatagactgagcgaagaatctgtgaacaacgacatctcctcctggacaaagggcagaagcggagaagctctgagcctcctgaagaaaagattctcccatagacccgtgcaggagaagttcgtgtgcctgaactgcggcttcgagacacacgcagccgagcaagccgccctgaacatcgccagatcctggctgttcctgcggagccaggagtacaagaaataccagacaaacaagacaaccggcaacaccgataagagagccttcgtcgagacctggcagtccttttaccggaagaagcttaaggaggtgtggaaacctgccgtgcggtctggcggatctggcggaggctccaccagccccaagaaaaagagaaaagtctaagctgccttctgcggggcttgccttctggccatgcccttcttctctcccttgcacctgtacctcttggtctttgaataaagcctgagtaggaaggctagcaaaaaaaaaaaaaaaaaaaaaaaaaaaaaaaaaaaaaaaaaaaaaaaaaaaaaaaaaaaaaaaaaaaaaaaaaaaaaaaagcccagccggctccccaacctctaccgaggagggcacctctgagtccgccacccccgagagcggccctggcacctccaccgagcccagcgagggcagcgcacccggcagccctgccggcagccccacctccacagaggagggaaccagcaccgagcccagcgaaggcagcgccccaggcaccagcaccgagcctagtgagcaggagattaaacggatcaacaagatcagaagaagacttgtgaaagacagcaacaccaagaaggccggcaagacaggccccatgaaaaccctgctggttagagtgatgacacccgatctgagagagcggctggaaaacctgagaaagaagcctgaaaatatcccccagcccatcagcaatacatctagagccaacctgaataagctgctgaccgattacaccgaaatgaagaaggcgatcctgcatgtgtactgggaagagttccagaaggaccctgtgggcctgatgagccgggtggcccagcctgccagcaagaagatcgatcagaacaagctgaaacctgagatggacgagaagggcaacctgaccaccgccggctttgcctgctctcagtgtggccagcccctgttcgtgtacaagctggagcaggtgtctgagaagggcaaggcttacaccaactacttcggacggtgcaatgtggccgagcacgaaaagctgatcctgctggcccagctgaagcccgagaaggatagcgacgaagccgtgacatatagcctgggaaagtttgggcagagggccctggatttctacagcattcatgtgaccaaggagtccacccaccccgtgaagcccctggcccagatcgccggaaacagatacgcctccggacctgtgggaaaggccctgagcgacgcatgtatgggcacaatcgcctccttcctgtctaagtaccaggacatcatcatcgaacaccagaaggtggtgaagggcaaccagaagagactggagagcctgcgggagctggccggcaaggaaaacctggaataccctagcgtgaccctgccacctcagcctcacaccaaggagggcgttgatgcctacaacgaagtgatcgcccgggtgcgaatgtgggtgaacctgaacctgtggcagaagctgaagctaagcagagatgatgccaagcctctgctgagactgaagggattcccttcctttcctctggtcgagagacaggccaacgaagtggactggtgggacatggtgtgtaacgtgaagaagctgatcaacgagaaaaaggaggatggcaaggtgttttggcagaatctggctggctacaagagacaggaagccctgagaccatacctgagcagcgaggaagatcggaagaagggaaagaaattcgctcggtaccagctgggcgacctgctgctgcacctggaaaagaagcacggcgaggactggggaaaggtgtacgacgaggcctgggagcggattgacaagaaagtggaaggcctgagcaagcacatcaagctggaagaggaacggagaagcgaggacgcccagagcaaggccgccctgaccgactggctgcgggctaaggccagcttcgtgatcgagggcctgaaggaggccgacaaggacgagttctgcagatgcgagctgaagctgcagaagtggtacggggacctgcggggaaagcccttcgccatcgaagccgagaacagcatcctggacatcagcggcttcagcaagcagtacaactgtgccttcatctggcagaaggacggcgtgaagaagctgaacctgtacctgatcatcaactacttcaagggcggcaagctgcggttcaagaagatcaaacctgaagccttcgaagccaacagattctacaccgtgatcaacaaaaagagcggcgagatcgtgcccatggaggtgaacttcaacttcgacgaccccaacctgatcatcctgcctctggcctttggcaagagacagggcagagaattcatctggaacgacctgctgtccctggaaaccggcagcctgaagctggccaacggaagagtgatcgagaagacactgtacaacagaagaacccggcaggatgagcctgccctgttcgtggccctgaccttcgagcggcgggaggtcctggactcctccaatatcaaaccaatgaacctgatcggcgtggcaagaggcgaaaacatccccgccgtgatcgccctgaccgaccccgagggctgcccactgagccggtttaaggatagcctgggaaacccaacccacatcctgagaatcggcgagagctataaggagaagcagcggaccatccaggccaagaaggaggtggagcagcggagagccggcggctacagccggaagtacgccagcaaagccaagaatctggcagacgatatggtgagaaacaccgctagagatctgctgtactacgccgtgacccaggatgccatgctgatcttcgccaacctgagccggggcttcggccggcagggcaagcggaccttcatggccgagagacagtacacacggatggaggactggctgaccgccaagctggcctacgagggcctgagcaagacctacctgtccaagacactggcccagtacacctccaagacatgcagcaactgtgggtttaccatcaccagcgccgactacgacagggtgctggagaagctgaagaagacagcaacaggctggatgaccacaattaacggcaaggagctgaaggtggagggccagattacctactacaacagatacaagagacagaacgtagtcaaggacctgtccgtcgagctggatagactgagcgaagaatctgtgaacaacgacatctcctcctggacaaagggcagaagcggagaagctctgagcctcctgaagaaaagattctcccatagacccgtgcaggagaagttcgtgtgcctgaactgcggcttcgagacacacgcagccgagcaagccgccctgaacatcgccagatcctggctgttcctgcggagccaggagtacaagaaataccagacaaacaagacaaccggcaacaccgataagagagccttcgtcgagacctggcagtccttttaccggaagaagcttaaggaggtgtggaaacctgccgtgcggtctggcggatctggcggaggctccaccagccccaagaaaaagagaaaagtctaagctgccttctgcggggcttgccttctggccatgcccttcttctctcccttgcacctgtacctcttggtctttgaataaagcctgagtaggaaggctagcaaaaaaaaaaaaaaaaaaaaaaaaaaaaaaaaaaaaaaaaaaaaaaaaaaaaaaaaaaaaaaaaaaaaaaaaaaaaaaaa

SEQ ID NO: 9878 - RNA, 8787 nt, synthetic construct
  source 1..8787: mol_type = other RNA
aggaaataagagagaaaagaagagtaagaagaaatataagagccaccatggcccctaagaagaagcgtaaagtgagccggatgaaccacgaccaggagttcgacccccctaaggtgtaccctcccgtccccgccgagaagagaaagcccatccgggtcctgagcctgttcgatggcatcgccaccggtctgctggtgctgaaggacctgggcatccaggtggataggtacattgcctccgaggtgtgcgaggactccatcaccgtgggaatggtgcgtcatcagggcaagatcatgtacgtgggcgacgtgcggagcgtgacacagaagcatatccaggagtggggccctttcgacctggtgatcggcggcagcccttgcaatgacctgagcatcgtgaacccagcccggaagggcctgtacgagggaaccggcagactgttcttcgagttttacagactgctgcacgacgcccggcctaaggaaggcgacgaccggcccttcttttggctgttcgagaatgtggtggccatgggagtcagcgacaagcgggatattagccggttcctggagagcaaccccgtgatgatcgatgccaaggaagtgagcgccgcccaccgggccagatacttctggggcaatctgcctggcatgaacagacccctggccagcaccgtgaacgacaagctggagctgcaggagtgcctggagcacggccggatcgccaagttcagcaaggtgagaaccatcaccacccgaagcaacagcatcaaacaaggcaaggaccagcactttcctgtgttcatgaacgagaaggaggacatcctgtggtgtaccgagatggagagagtgttcgggttcccagtccactacacagatgtcagcaacatgtctagactggccagacagagactgctgggaagaagctggtccgtccctgtgatcagacacctgttcgcccctctgaaggagtacttcgcctgcgtgagcagcggcaacagcaacgccaacagccggggccccagcttctctagcggcctggtgccactgtccctgagagggagccacatgggccccatggagatctacaaaaccgtgagcgcctggaagcggcagcctgtgcgcgtgctgagcctgtttcggaatatcgataaagtcctgaaaagcctgggattcctggagagcggctctggctccggcggtggcaccctgaagtacgtggaggatgtgacaaacgtggtcagacgggatgtggagaagtggggccccttcgatctggtgtacggcagcacccaacccctgggcagctcttgtgaccggtgccctggctggtacatgtttcagttccaccggatcctgcagtacgccctgccgagacaggagtcccagcggccattcttttggattttcatggacaacttgctgctgaccgaggatgaccaggaaactaccactcggttcctgcagaccgaagccgtgaccctgcaggacgtgagaggccgggactaccagaacgccatgcgggtgtggtccaacatccctggactgaaaagcaagcacgcacctctgacccctaaagaagaggagtacctgcaggcccaggtgcggagcagaagcaagctggacgcccctaaggtggatctgctggtgaagaattgcctcctgcccctgagagagtacttcaagtatttcagccagaatagtctgcccctgggaggcagcggcggcggctgccaggagcccgtgagcttcgccgaggtggccgtgtacttcagcagggaggagtgggccctgctggaccccgcccagagggccctgtacagggacgtgatgctggagacctaccagtgcgtggcctggctggccagcctgcccgcccccaagcccggcctgatcagcctgctggagggcggcgaggacccctggatccccggcgtgaggagccccgaggccatgcccggcgacctgagccccggcggcccaagcagcggcgcccctcctcccagcggcggcaggcggcccaagcagcggcgcccctcctcccagcggcggcagcccagccggctccccaacctctaccgaggagggcacctctgagtccgccacccccgagagcggccctggcacctccaccgagcccagcgagggcagcgcacccggcagccctgccggcagccccacctccacagaggagggaaccagcaccgagcccagcgaaggcagcgccccaggcaccagcaccgagcctagtgagcaggagattaaacggatcaacaagatcagaagaagacttgtgaaagacagcaacaccaagaaggccggcaagacaggccccatgaaaaccctgctggttagagtgatgacacccgatctgagagagcggctggaaaacctgagaaagaagcctgaaaatatcccccagcccatcagcaatacatctagagccaacctgaataagctgctgaccgattacaccgaaatgaagaaggcgatcctgcatgtgtactgggaagagttccagaaggaccctgtgggcctgatgagccgggtggcccagcctgccagcaagaagatcgatcagaacaagctgaaacctgagatggacgagaagggcaacctgaccaccgccggctttgcctgctctcagtgtggccagcccctgttcgtgtacaagctggagcaggtgtctgagaagggcaaggcttacaccaactacttcggacggtgcaatgtggccgagcacgaaaagctgatcctgctggcccagctgaagcccgagaaggatagcgacgaagccgtgacatatagcctgggaaagtttgggcagagggccctggatttctacagcattcatgtgaccaaggagtccacccaccccgtgaagcccctggcccagatcgccggaaacagatacgcctccggacctgtgggaaaggccctgagcgacgcatgtatgggcacaatcgcctccttcctgtctaagtaccaggacatcatcatcgaacaccagaaggtggtgaagggcaaccagaagagactggagagcctgcgggagctggccggcaaggaaaacctggaataccctagcgtgaccctgccacctcagcctcacaccaaggagggcgttgatgcctacaacgaagtgatcgcccgggtgcgaatgtgggtgaacctgaacctgtggcagaagctgaagctaagcagagatgatgccaagcctctgctgagactgaagggattcccttcctttcctctggtcgagagacaggccaacgaagtggactggtgggacatggtgtgtaacgtgaagaagctgatcaacgagaaaaaggaggatggcaaggtgttttggcagaatctggctggctacaagagacaggaagccctgagaccatacctgagcagcgaggaagatcggaagaagggaaagaaattcgctcggtaccagctgggcgacctgctgctgcacctggaaaagaagcacggcgaggactggggaaaggtgtacgacgaggcctgggagcggattgacaagaaagtggaaggcctgagcaagcacatcaagctggaagaggaacggagaagcgaggacgcccagagcaaggccgccctgaccgactggctgcgggctaaggccagcttcgtgatcgagggcctgaaggaggccgacaaggacgagttctgcagatgcgagctgaagctgcagaagtggtacggggacctgcggggaaagcccttcgccatcgaagccgagaacagcatcctggacatcagcggcttcagcaagcagtacaactgtgccttcatctggcagaaggacggcgtgaagaagctgaacctgtacctgatcatcaactacttcaagggcggcaagctgcggttcaagaagatcaaacctgaagccttcgaagccaacagattctacaccgtgatcaacaaaaagagcggcgagatcgtgcccatggaggtgaacttcaacttcgacgaccccaacctgatcatcctgcctctggcctttggcaagagacagggcagagaattcatctggaacgacctgctgtccctggaaaccggcagcctgaagctggccaacggaagagtgatcgagaagacactgtacaacagaagaacccggcaggatgagcctgccctgttcgtggccctgaccttcgagcggcgggaggtcctggactcctccaatatcaaaccaatgaacctgatcggcgtggcaagaggcgaaaacatccccgccgtgatcgccctgaccgaccccgagggctgcccactgagccggtttaaggatagcctgggaaacccaacccacatcctgagaatcggcgagagctataaggagaagcagcggaccatccaggccaagaaggaggtggagcagcggagagccggcggctacagccggaagtacgccagcaaagccaagaatctggcagacgatatggtgagaaacaccgctagagatctgctgtactacgccgtgacccaggatgccatgctgatcttcgccaacctgagccggggcttcggccggcagggcaagcggaccttcatggccgagagacagtacacacggatggaggactggctgaccgccaagctggcctacgagggcctgagcaagacctacctgtccaagacactggcccagtacacctccaagacatgcagcaactgtgggtttaccatcaccagcgccgactacgacagggtgctggagaagctgaagaagacagcaacaggctggatgaccacaattaacggcaaggagctgaaggtggagggccagattacctactacaacagatacaagagacagaacgtagtcaaggacctgtccgtcgagctggatagactgagcgaagaatctgtgaacaacgacatctcctcctggacaaagggcagaagcggagaagctctgagcctcctgaagaaaagattctcccatagacccgtgcaggagaagttcgtgtgcctgaactgcggcttcgagacacacgcagccgagcaagccgccctgaacatcgccagatcctggctgttcctgcggagccaggagtacaagaaataccagacaaacaagacaaccggcaacaccgataagagagccttcgtcgagacctggcagtccttttaccggaagaagcttaaggaggtgtggaaacctgccgtgcggtctggcggatctggcggaggctccaccagccccaagaaaaagagaaaagtctaagctgccttctgcggggcttgccttctggccatgcccttcttctctcccttgcacctgtacctcttggtctttgaataaagcctgagtaggaaggctagcaaaaaaaaaaaaaaaaaaaaaaaaaaaaaaaaaaaaaaaaaaaaaaaaaaaaaaaaaaaaaaaaaaaaaaaaaaaaaaaagcccagccggctccccaacctctaccgaggagggcacctctgagtccgccacccccgagagcggccctggcacctccaccgagcccagcgagggcagcgcacccggcagccctgccggcagccccacctccacagaggagggaaccagcaccgagcccagcgaaggcagcgccccaggcaccagcaccgagcctagtgagcaggagattaaacggatcaacaagatcagaagaagacttgtgaaagacagcaacaccaagaaggccggcaagacaggccccatgaaaaccctgctggttagagtgatgacacccgatctgagagagcggctggaaaacctgagaaagaagcctgaaaatatcccccagcccatcagcaatacatctagagccaacctgaataagctgctgaccgattacaccgaaatgaagaaggcgatcctgcatgtgtactgggaagagttccagaaggaccctgtgggcctgatgagccgggtggcccagcctgccagcaagaagatcgatcagaacaagctgaaacctgagatggacgagaagggcaacctgaccaccgccggctttgcctgctctcagtgtggccagcccctgttcgtgtacaagctggagcaggtgtctgagaagggcaaggcttacaccaactacttcggacggtgcaatgtggccgagcacgaaaagctgatcctgctggcccagctgaagcccgagaaggatagcgacgaagccgtgacatatagcctgggaaagtttgggcagagggccctggatttctacagcattcatgtgaccaaggagtccacccaccccgtgaagcccctggcccagatcgccggaaacagatacgcctccggacctgtgggaaaggccctgagcgacgcatgtatgggcacaatcgcctccttcctgtctaagtaccaggacatcatcatcgaacaccagaaggtggtgaagggcaaccagaagagactggagagcctgcgggagctggccggcaaggaaaacctggaataccctagcgtgaccctgccacctcagcctcacaccaaggagggcgttgatgcctacaacgaagtgatcgcccgggtgcgaatgtgggtgaacctgaacctgtggcagaagctgaagctaagcagagatgatgccaagcctctgctgagactgaagggattcccttcctttcctctggtcgagagacaggccaacgaagtggactggtgggacatggtgtgtaacgtgaagaagctgatcaacgagaaaaaggaggatggcaaggtgttttggcagaatctggctggctacaagagacaggaagccctgagaccatacctgagcagcgaggaagatcggaagaagggaaagaaattcgctcggtaccagctgggcgacctgctgctgcacctggaaaagaagcacggcgaggactggggaaaggtgtacgacgaggcctgggagcggattgacaagaaagtggaaggcctgagcaagcacatcaagctggaagaggaacggagaagcgaggacgcccagagcaaggccgccctgaccgactggctgcgggctaaggccagcttcgtgatcgagggcctgaaggaggccgacaaggacgagttctgcagatgcgagctgaagctgcagaagtggtacggggacctgcggggaaagcccttcgccatcgaagccgagaacagcatcctggacatcagcggcttcagcaagcagtacaactgtgccttcatctggcagaaggacggcgtgaagaagctgaacctgtacctgatcatcaactacttcaagggcggcaagctgcggttcaagaagatcaaacctgaagccttcgaagccaacagattctacaccgtgatcaacaaaaagagcggcgagatcgtgcccatggaggtgaacttcaacttcgacgaccccaacctgatcatcctgcctctggcctttggcaagagacagggcagagaattcatctggaacgacctgctgtccctggaaaccggcagcctgaagctggccaacggaagagtgatcgagaagacactgtacaacagaagaacccggcaggatgagcctgccctgttcgtggccctgaccttcgagcggcgggaggtcctggactcctccaatatcaaaccaatgaacctgatcggcgtggcaagaggcgaaaacatccccgccgtgatcgccctgaccgaccccgagggctgcccactgagccggtttaaggatagcctgggaaacccaacccacatcctgagaatcggcgagagctataaggagaagcagcggaccatccaggccaagaaggaggtggagcagcggagagccggcggctacagccggaagtacgccagcaaagccaagaatctggcagacgatatggtgagaaacaccgctagagatctgctgtactacgccgtgacccaggatgccatgctgatcttcgccaacctgagccggggcttcggccggcagggcaagcggaccttcatggccgagagacagtacacacggatggaggactggctgaccgccaagctggcctacgagggcctgagcaagacctacctgtccaagacactggcccagtacacctccaagacatgcagcaactgtgggtttaccatcaccagcgccgactacgacagggtgctggagaagctgaagaagacagcaacaggctggatgaccacaattaacggcaaggagctgaaggtggagggccagattacctactacaacagatacaagagacagaacgtagtcaaggacctgtccgtcgagctggatagactgagcgaagaatctgtgaacaacgacatctcctcctggacaaagggcagaagcggagaagctctgagcctcctgaagaaaagattctcccatagacccgtgcaggagaagttcgtgtgcctgaactgcggcttcgagacacacgcagccgagcaagccgccctgaacatcgccagatcctggctgttcctgcggagccaggagtacaagaaataccagacaaacaagacaaccggcaacaccgataagagagccttcgtcgagacctggcagtccttttaccggaagaagcttaaggaggtgtggaaacctgccgtgcggtctggcggatctggcggaggctccaccagccccaagaaaaagagaaaagtctaagctgccttctgcggggcttgccttctggccatgcccttcttctctcccttgcacctgtacctcttggtctttgaataaagcctgagtaggaaggctagcaaaaaaaaaaaaaaaaaaaaaaaaaaaaaaaaaaaaaaaaaaaaaaaaaaaaaaaaaaaaaaaaaaaaaaaaaaaaaaaa

SEQ ID NO: 9879 - RNA, 8787 nt, synthetic construct
  source 1..8787: mol_type = other RNA
aggaaataagagagaaaagaagagtaagaagaaatataagagccaccatggcccctaagaagaagcgtaaagtgagccggatgaaccacgaccaggagttcgacccccctaaggtgtaccctcccgtccccgccgagaagagaaagcccatccgggtcctgagcctgttcgatggcatcgccaccggtctgctggtgctgaaggacctgggcatccaggtggataggtacattgcctccgaggtgtgcgaggactccatcaccgtgggaatggtgcgtcatcagggcaagatcatgtacgtgggcgacgtgcggagcgtgacacagaagcatatccaggagtggggccctttcgacctggtgatcggcggcagcccttgcaatgacctgagcatcgtgaacccagcccggaagggcctgtacgagggaaccggcagactgttcttcgagttttacagactgctgcacgacgcccggcctaaggaaggcgacgaccggcccttcttttggctgttcgagaatgtggtggccatgggagtcagcgacaagcgggatattagccggttcctggagagcaaccccgtgatgatcgatgccaaggaagtgagcgccgcccaccgggccagatacttctggggcaatctgcctggcatgaacagacccctggccagcaccgtgaacgacaagctggagctgcaggagtgcctggagcacggccggatcgccaagttcagcaaggtgagaaccatcaccacccgaagcaacagcatcaaacaaggcaaggaccagcactttcctgtgttcatgaacgagaaggaggacatcctgtggtgtaccgagatggagagagtgttcgggttcccagtccactacacagatgtcagcaacatgtctagactggccagacagagactgctgggaagaagctggtccgtccctgtgatcagacacctgttcgcccctctgaaggagtacttcgcctgcgtgagcagcggcaacagcaacgccaacagccggggccccagcttctctagcggcctggtgccactgtccctgagagggagccacatgggccccatggagatctacaaaaccgtgagcgcctggaagcggcagcctgtgcgcgtgctgagcctgtttcggaatatcgataaagtcctgaaaagcctgggattcctggagagcggctctggctccggcggtggcaccctgaagtacgtggaggatgtgacaaacgtggtcagacgggatgtggagaagtggggccccttcgatctggtgtacggcagcacccaacccctgggcagctcttgtgaccggtgccctggctggtacatgtttcagttccaccggatcctgcagtacgccctgccgagacaggagtcccagcggccattcttttggattttcatggacaacttgctgctgaccgaggatgaccaggaaactaccactcggttcctgcagaccgaagccgtgaccctgcaggacgtgagaggccgggactaccagaacgccatgcgggtgtggtccaacatccctggactgaaaagcaagcacgcacctctgacccctaaagaagaggagtacctgcaggcccaggtgcggagcagaagcaagctggacgcccctaaggtggatctgctggtgaagaattgcctcctgcccctgagagagtacttcaagtatttcagccagaatagtctgcccctgggaggcagcggcggcggcatgaacgccgtgacctacgaggacgtgcacgtgaacttcacccaggaggagtgggccctgctggaccccagccagaagaagctgtacaaggacgtgatggtggagacctacaggaacctgaacgccatcggcttcaactgggaggcccacaacatcgaggagtactgccagagcagcaggaggcacaggaggtgcgagaggagccagagcgccgagaagcccagcgagtacacccagtgcggcggcggcccaagcagcggcgcccctcctcccagcggcggcaggcggcccaagcagcggcgcccctcctcccagcggcggcagcccagccggctccccaacctctaccgaggagggcacctctgagtccgccacccccgagagcggccctggcacctccaccgagcccagcgagggcagcgcacccggcagccctgccggcagccccacctccacagaggagggaaccagcaccgagcccagcgaaggcagcgccccaggcaccagcaccgagcctagtgagcaggagattaaacggatcaacaagatcagaagaagacttgtgaaagacagcaacaccaagaaggccggcaagacaggccccatgaaaaccctgctggttagagtgatgacacccgatctgagagagcggctggaaaacctgagaaagaagcctgaaaatatcccccagcccatcagcaatacatctagagccaacctgaataagctgctgaccgattacaccgaaatgaagaaggcgatcctgcatgtgtactgggaagagttccagaaggaccctgtgggcctgatgagccgggtggcccagcctgccagcaagaagatcgatcagaacaagctgaaacctgagatggacgagaagggcaacctgaccaccgccggctttgcctgctctcagtgtggccagcccctgttcgtgtacaagctggagcaggtgtctgagaagggcaaggcttacaccaactacttcggacggtgcaatgtggccgagcacgaaaagctgatcctgctggcccagctgaagcccgagaaggatagcgacgaagccgtgacatatagcctgggaaagtttgggcagagggccctggatttctacagcattcatgtgaccaaggagtccacccaccccgtgaagcccctggcccagatcgccggaaacagatacgcctccggacctgtgggaaaggccctgagcgacgcatgtatgggcacaatcgcctccttcctgtctaagtaccaggacatcatcatcgaacaccagaaggtggtgaagggcaaccagaagagactggagagcctgcgggagctggccggcaaggaaaacctggaataccctagcgtgaccctgccacctcagcctcacaccaaggagggcgttgatgcctacaacgaagtgatcgcccgggtgcgaatgtgggtgaacctgaacctgtggcagaagctgaagctaagcagagatgatgccaagcctctgctgagactgaagggattcccttcctttcctctggtcgagagacaggccaacgaagtggactggtgggacatggtgtgtaacgtgaagaagctgatcaacgagaaaaaggaggatggcaaggtgttttggcagaatctggctggctacaagagacaggaagccctgagaccatacctgagcagcgaggaagatcggaagaagggaaagaaattcgctcggtaccagctgggcgacctgctgctgcacctggaaaagaagcacggcgaggactggggaaaggtgtacgacgaggcctgggagcggattgacaagaaagtggaaggcctgagcaagcacatcaagctggaagaggaacggagaagcgaggacgcccagagcaaggccgccctgaccgactggctgcgggctaaggccagcttcgtgatcgagggcctgaaggaggccgacaaggacgagttctgcagatgcgagctgaagctgcagaagtggtacggggacctgcggggaaagcccttcgccatcgaagccgagaacagcatcctggacatcagcggcttcagcaagcagtacaactgtgccttcatctggcagaaggacggcgtgaagaagctgaacctgtacctgatcatcaactacttcaagggcggcaagctgcggttcaagaagatcaaacctgaagccttcgaagccaacagattctacaccgtgatcaacaaaaagagcggcgagatcgtgcccatggaggtgaacttcaacttcgacgaccccaacctgatcatcctgcctctggcctttggcaagagacagggcagagaattcatctggaacgacctgctgtccctggaaaccggcagcctgaagctggccaacggaagagtgatcgagaagacactgtacaacagaagaacccggcaggatgagcctgccctgttcgtggccctgaccttcgagcggcgggaggtcctggactcctccaatatcaaaccaatgaacctgatcggcgtggcaagaggcgaaaacatccccgccgtgatcgccctgaccgaccccgagggctgcccactgagccggtttaaggatagcctgggaaacccaacccacatcctgagaatcggcgagagctataaggagaagcagcggaccatccaggccaagaaggaggtggagcagcggagagccggcggctacagccggaagtacgccagcaaagccaagaatctggcagacgatatggtgagaaacaccgctagagatctgctgtactacgccgtgacccaggatgccatgctgatcttcgccaacctgagccggggcttcggccggcagggcaagcggaccttcatggccgagagacagtacacacggatggaggactggctgaccgccaagctggcctacgagggcctgagcaagacctacctgtccaagacactggcccagtacacctccaagacatgcagcaactgtgggtttaccatcaccagcgccgactacgacagggtgctggagaagctgaagaagacagcaacaggctggatgaccacaattaacggcaaggagctgaaggtggagggccagattacctactacaacagatacaagagacagaacgtagtcaaggacctgtccgtcgagctggatagactgagcgaagaatctgtgaacaacgacatctcctcctggacaaagggcagaagcggagaagctctgagcctcctgaagaaaagattctcccatagacccgtgcaggagaagttcgtgtgcctgaactgcggcttcgagacacacgcagccgagcaagccgccctgaacatcgccagatcctggctgttcctgcggagccaggagtacaagaaataccagacaaacaagacaaccggcaacaccgataagagagccttcgtcgagacctggcagtccttttaccggaagaagcttaaggaggtgtggaaacctgccgtgcggtctggcggatctggcggaggctccaccagccccaagaaaaagagaaaagtctaagctgccttctgcggggcttgccttctggccatgcccttcttctctcccttgcacctgtacctcttggtctttgaataaagcctgagtaggaaggctagcaaaaaaaaaaaaaaaaaaaaaaaaaaaaaaaaaaaaaaaaaaaaaaaaaaaaaaaaaaaaaaaaaaaaaaaaaaaaaaaagcccagccggctccccaacctctaccgaggagggcacctctgagtccgccacccccgagagcggccctggcacctccaccgagcccagcgagggcagcgcacccggcagccctgccggcagccccacctccacagaggagggaaccagcaccgagcccagcgaaggcagcgccccaggcaccagcaccgagcctagtgagcaggagattaaacggatcaacaagatcagaagaagacttgtgaaagacagcaacaccaagaaggccggcaagacaggccccatgaaaaccctgctggttagagtgatgacacccgatctgagagagcggctggaaaacctgagaaagaagcctgaaaatatcccccagcccatcagcaatacatctagagccaacctgaataagctgctgaccgattacaccgaaatgaagaaggcgatcctgcatgtgtactgggaagagttccagaaggaccctgtgggcctgatgagccgggtggcccagcctgccagcaagaagatcgatcagaacaagctgaaacctgagatggacgagaagggcaacctgaccaccgccggctttgcctgctctcagtgtggccagcccctgttcgtgtacaagctggagcaggtgtctgagaagggcaaggcttacaccaactacttcggacggtgcaatgtggccgagcacgaaaagctgatcctgctggcccagctgaagcccgagaaggatagcgacgaagccgtgacatatagcctgggaaagtttgggcagagggccctggatttctacagcattcatgtgaccaaggagtccacccaccccgtgaagcccctggcccagatcgccggaaacagatacgcctccggacctgtgggaaaggccctgagcgacgcatgtatgggcacaatcgcctccttcctgtctaagtaccaggacatcatcatcgaacaccagaaggtggtgaagggcaaccagaagagactggagagcctgcgggagctggccggcaaggaaaacctggaataccctagcgtgaccctgccacctcagcctcacaccaaggagggcgttgatgcctacaacgaagtgatcgcccgggtgcgaatgtgggtgaacctgaacctgtggcagaagctgaagctaagcagagatgatgccaagcctctgctgagactgaagggattcccttcctttcctctggtcgagagacaggccaacgaagtggactggtgggacatggtgtgtaacgtgaagaagctgatcaacgagaaaaaggaggatggcaaggtgttttggcagaatctggctggctacaagagacaggaagccctgagaccatacctgagcagcgaggaagatcggaagaagggaaagaaattcgctcggtaccagctgggcgacctgctgctgcacctggaaaagaagcacggcgaggactggggaaaggtgtacgacgaggcctgggagcggattgacaagaaagtggaaggcctgagcaagcacatcaagctggaagaggaacggagaagcgaggacgcccagagcaaggccgccctgaccgactggctgcgggctaaggccagcttcgtgatcgagggcctgaaggaggccgacaaggacgagttctgcagatgcgagctgaagctgcagaagtggtacggggacctgcggggaaagcccttcgccatcgaagccgagaacagcatcctggacatcagcggcttcagcaagcagtacaactgtgccttcatctggcagaaggacggcgtgaagaagctgaacctgtacctgatcatcaactacttcaagggcggcaagctgcggttcaagaagatcaaacctgaagccttcgaagccaacagattctacaccgtgatcaacaaaaagagcggcgagatcgtgcccatggaggtgaacttcaacttcgacgaccccaacctgatcatcctgcctctggcctttggcaagagacagggcagagaattcatctggaacgacctgctgtccctggaaaccggcagcctgaagctggccaacggaagagtgatcgagaagacactgtacaacagaagaacccggcaggatgagcctgccctgttcgtggccctgaccttcgagcggcgggaggtcctggactcctccaatatcaaaccaatgaacctgatcggcgtggcaagaggcgaaaacatccccgccgtgatcgccctgaccgaccccgagggctgcccactgagccggtttaaggatagcctgggaaacccaacccacatcctgagaatcggcgagagctataaggagaagcagcggaccatccaggccaagaaggaggtggagcagcggagagccggcggctacagccggaagtacgccagcaaagccaagaatctggcagacgatatggtgagaaacaccgctagagatctgctgtactacgccgtgacccaggatgccatgctgatcttcgccaacctgagccggggcttcggccggcagggcaagcggaccttcatggccgagagacagtacacacggatggaggactggctgaccgccaagctggcctacgagggcctgagcaagacctacctgtccaagacactggcccagtacacctccaagacatgcagcaactgtgggtttaccatcaccagcgccgactacgacagggtgctggagaagctgaagaagacagcaacaggctggatgaccacaattaacggcaaggagctgaaggtggagggccagattacctactacaacagatacaagagacagaacgtagtcaaggacctgtccgtcgagctggatagactgagcgaagaatctgtgaacaacgacatctcctcctggacaaagggcagaagcggagaagctctgagcctcctgaagaaaagattctcccatagacccgtgcaggagaagttcgtgtgcctgaactgcggcttcgagacacacgcagccgagcaagccgccctgaacatcgccagatcctggctgttcctgcggagccaggagtacaagaaataccagacaaacaagacaaccggcaacaccgataagagagccttcgtcgagacctggcagtccttttaccggaagaagcttaaggaggtgtggaaacctgccgtgcggtctggcggatctggcggaggctccaccagccccaagaaaaagagaaaagtctaagctgccttctgcggggcttgccttctggccatgcccttcttctctcccttgcacctgtacctcttggtctttgaataaagcctgagtaggaaggctagcaaaaaaaaaaaaaaaaaaaaaaaaaaaaaaaaaaaaaaaaaaaaaaaaaaaaaaaaaaaaaaaaaaaaaaaaaaaaaaaa

SEQ ID NO: 9880 - RNA, 8787 nt, synthetic construct
  source 1..8787: mol_type = other RNA
aggaaataagagagaaaagaagagtaagaagaaatataagagccaccatggcccctaagaagaagcgtaaagtgagccggatgaaccacgaccaggagttcgacccccctaaggtgtaccctcccgtccccgccgagaagagaaagcccatccgggtcctgagcctgttcgatggcatcgccaccggtctgctggtgctgaaggacctgggcatccaggtggataggtacattgcctccgaggtgtgcgaggactccatcaccgtgggaatggtgcgtcatcagggcaagatcatgtacgtgggcgacgtgcggagcgtgacacagaagcatatccaggagtggggccctttcgacctggtgatcggcggcagcccttgcaatgacctgagcatcgtgaacccagcccggaagggcctgtacgagggaaccggcagactgttcttcgagttttacagactgctgcacgacgcccggcctaaggaaggcgacgaccggcccttcttttggctgttcgagaatgtggtggccatgggagtcagcgacaagcgggatattagccggttcctggagagcaaccccgtgatgatcgatgccaaggaagtgagcgccgcccaccgggccagatacttctggggcaatctgcctggcatgaacagacccctggccagcaccgtgaacgacaagctggagctgcaggagtgcctggagcacggccggatcgccaagttcagcaaggtgagaaccatcaccacccgaagcaacagcatcaaacaaggcaaggaccagcactttcctgtgttcatgaacgagaaggaggacatcctgtggtgtaccgagatggagagagtgttcgggttcccagtccactacacagatgtcagcaacatgtctagactggccagacagagactgctgggaagaagctggtccgtccctgtgatcagacacctgttcgcccctctgaaggagtacttcgcctgcgtgagcagcggcaacagcaacgccaacagccggggccccagcttctctagcggcctggtgccactgtccctgagagggagccacatgggccccatggagatctacaaaaccgtgagcgcctggaagcggcagcctgtgcgcgtgctgagcctgtttcggaatatcgataaagtcctgaaaagcctgggattcctggagagcggctctggctccggcggtggcaccctgaagtacgtggaggatgtgacaaacgtggtcagacgggatgtggagaagtggggccccttcgatctggtgtacggcagcacccaacccctgggcagctcttgtgaccggtgccctggctggtacatgtttcagttccaccggatcctgcagtacgccctgccgagacaggagtcccagcggccattcttttggattttcatggacaacttgctgctgaccgaggatgaccaggaaactaccactcggttcctgcagaccgaagccgtgaccctgcaggacgtgagaggccgggactaccagaacgccatgcgggtgtggtccaacatccctggactgaaaagcaagcacgcacctctgacccctaaagaagaggagtacctgcaggcccaggtgcggagcagaagcaagctggacgcccctaaggtggatctgctggtgaagaattgcctcctgcccctgagagagtacttcaagtatttcagccagaatagtctgcccctgggaggcagcggcggcggcttccaggaggtggtgaccttcgaggacgtggccgtgcacttcacccaggccgagtgggccggcctgagcagcgcccagagggccctgcacaggagcgtgatgctggagaactacggcaacctgaccagcctgggctacaccgtgcccaacagcgccctgatcagcctgctggagggcagggacctgccctggggcctggaggcccagaacgacccccccgccgagaggagcacccacgtgtgcggcggcccaagcagcggcgcccctcctcccagcggcggcaggcggcccaagcagcggcgcccctcctcccagcggcggcagcccagccggctccccaacctctaccgaggagggcacctctgagtccgccacccccgagagcggccctggcacctccaccgagcccagcgagggcagcgcacccggcagccctgccggcagccccacctccacagaggagggaaccagcaccgagcccagcgaaggcagcgccccaggcaccagcaccgagcctagtgagcaggagattaaacggatcaacaagatcagaagaagacttgtgaaagacagcaacaccaagaaggccggcaagacaggccccatgaaaaccctgctggttagagtgatgacacccgatctgagagagcggctggaaaacctgagaaagaagcctgaaaatatcccccagcccatcagcaatacatctagagccaacctgaataagctgctgaccgattacaccgaaatgaagaaggcgatcctgcatgtgtactgggaagagttccagaaggaccctgtgggcctgatgagccgggtggcccagcctgccagcaagaagatcgatcagaacaagctgaaacctgagatggacgagaagggcaacctgaccaccgccggctttgcctgctctcagtgtggccagcccctgttcgtgtacaagctggagcaggtgtctgagaagggcaaggcttacaccaactacttcggacggtgcaatgtggccgagcacgaaaagctgatcctgctggcccagctgaagcccgagaaggatagcgacgaagccgtgacatatagcctgggaaagtttgggcagagggccctggatttctacagcattcatgtgaccaaggagtccacccaccccgtgaagcccctggcccagatcgccggaaacagatacgcctccggacctgtgggaaaggccctgagcgacgcatgtatgggcacaatcgcctccttcctgtctaagtaccaggacatcatcatcgaacaccagaaggtggtgaagggcaaccagaagagactggagagcctgcgggagctggccggcaaggaaaacctggaataccctagcgtgaccctgccacctcagcctcacaccaaggagggcgttgatgcctacaacgaagtgatcgcccgggtgcgaatgtgggtgaacctgaacctgtggcagaagctgaagctaagcagagatgatgccaagcctctgctgagactgaagggattcccttcctttcctctggtcgagagacaggccaacgaagtggactggtgggacatggtgtgtaacgtgaagaagctgatcaacgagaaaaaggaggatggcaaggtgttttggcagaatctggctggctacaagagacaggaagccctgagaccatacctgagcagcgaggaagatcggaagaagggaaagaaattcgctcggtaccagctgggcgacctgctgctgcacctggaaaagaagcacggcgaggactggggaaaggtgtacgacgaggcctgggagcggattgacaagaaagtggaaggcctgagcaagcacatcaagctggaagaggaacggagaagcgaggacgcccagagcaaggccgccctgaccgactggctgcgggctaaggccagcttcgtgatcgagggcctgaaggaggccgacaaggacgagttctgcagatgcgagctgaagctgcagaagtggtacggggacctgcggggaaagcccttcgccatcgaagccgagaacagcatcctggacatcagcggcttcagcaagcagtacaactgtgccttcatctggcagaaggacggcgtgaagaagctgaacctgtacctgatcatcaactacttcaagggcggcaagctgcggttcaagaagatcaaacctgaagccttcgaagccaacagattctacaccgtgatcaacaaaaagagcggcgagatcgtgcccatggaggtgaacttcaacttcgacgaccccaacctgatcatcctgcctctggcctttggcaagagacagggcagagaattcatctggaacgacctgctgtccctggaaaccggcagcctgaagctggccaacggaagagtgatcgagaagacactgtacaacagaagaacccggcaggatgagcctgccctgttcgtggccctgaccttcgagcggcgggaggtcctggactcctccaatatcaaaccaatgaacctgatcggcgtggcaagaggcgaaaacatccccgccgtgatcgccctgaccgaccccgagggctgcccactgagccggtttaaggatagcctgggaaacccaacccacatcctgagaatcggcgagagctataaggagaagcagcggaccatccaggccaagaaggaggtggagcagcggagagccggcggctacagccggaagtacgccagcaaagccaagaatctggcagacgatatggtgagaaacaccgctagagatctgctgtactacgccgtgacccaggatgccatgctgatcttcgccaacctgagccggggcttcggccggcagggcaagcggaccttcatggccgagagacagtacacacggatggaggactggctgaccgccaagctggcctacgagggcctgagcaagacctacctgtccaagacactggcccagtacacctccaagacatgcagcaactgtgggtttaccatcaccagcgccgactacgacagggtgctggagaagctgaagaagacagcaacaggctggatgaccacaattaacggcaaggagctgaaggtggagggccagattacctactacaacagatacaagagacagaacgtagtcaaggacctgtccgtcgagctggatagactgagcgaagaatctgtgaacaacgacatctcctcctggacaaagggcagaagcggagaagctctgagcctcctgaagaaaagattctcccatagacccgtgcaggagaagttcgtgtgcctgaactgcggcttcgagacacacgcagccgagcaagccgccctgaacatcgccagatcctggctgttcctgcggagccaggagtacaagaaataccagacaaacaagacaaccggcaacaccgataagagagccttcgtcgagacctggcagtccttttaccggaagaagcttaaggaggtgtggaaacctgccgtgcggtctggcggatctggcggaggctccaccagccccaagaaaaagagaaaagtctaagctgccttctgcggggcttgccttctggccatgcccttcttctctcccttgcacctgtacctcttggtctttgaataaagcctgagtaggaaggctagcaaaaaaaaaaaaaaaaaaaaaaaaaaaaaaaaaaaaaaaaaaaaaaaaaaaaaaaaaaaaaaaaaaaaaaaaaaaaaaaagcccagccggctccccaacctctaccgaggagggcacctctgagtccgccacccccgagagcggccctggcacctccaccgagcccagcgagggcagcgcacccggcagccctgccggcagccccacctccacagaggagggaaccagcaccgagcccagcgaaggcagcgccccaggcaccagcaccgagcctagtgagcaggagattaaacggatcaacaagatcagaagaagacttgtgaaagacagcaacaccaagaaggccggcaagacaggccccatgaaaaccctgctggttagagtgatgacacccgatctgagagagcggctggaaaacctgagaaagaagcctgaaaatatcccccagcccatcagcaatacatctagagccaacctgaataagctgctgaccgattacaccgaaatgaagaaggcgatcctgcatgtgtactgggaagagttccagaaggaccctgtgggcctgatgagccgggtggcccagcctgccagcaagaagatcgatcagaacaagctgaaacctgagatggacgagaagggcaacctgaccaccgccggctttgcctgctctcagtgtggccagcccctgttcgtgtacaagctggagcaggtgtctgagaagggcaaggcttacaccaactacttcggacggtgcaatgtggccgagcacgaaaagctgatcctgctggcccagctgaagcccgagaaggatagcgacgaagccgtgacatatagcctgggaaagtttgggcagagggccctggatttctacagcattcatgtgaccaaggagtccacccaccccgtgaagcccctggcccagatcgccggaaacagatacgcctccggacctgtgggaaaggccctgagcgacgcatgtatgggcacaatcgcctccttcctgtctaagtaccaggacatcatcatcgaacaccagaaggtggtgaagggcaaccagaagagactggagagcctgcgggagctggccggcaaggaaaacctggaataccctagcgtgaccctgccacctcagcctcacaccaaggagggcgttgatgcctacaacgaagtgatcgcccgggtgcgaatgtgggtgaacctgaacctgtggcagaagctgaagctaagcagagatgatgccaagcctctgctgagactgaagggattcccttcctttcctctggtcgagagacaggccaacgaagtggactggtgggacatggtgtgtaacgtgaagaagctgatcaacgagaaaaaggaggatggcaaggtgttttggcagaatctggctggctacaagagacaggaagccctgagaccatacctgagcagcgaggaagatcggaagaagggaaagaaattcgctcggtaccagctgggcgacctgctgctgcacctggaaaagaagcacggcgaggactggggaaaggtgtacgacgaggcctgggagcggattgacaagaaagtggaaggcctgagcaagcacatcaagctggaagaggaacggagaagcgaggacgcccagagcaaggccgccctgaccgactggctgcgggctaaggccagcttcgtgatcgagggcctgaaggaggccgacaaggacgagttctgcagatgcgagctgaagctgcagaagtggtacggggacctgcggggaaagcccttcgccatcgaagccgagaacagcatcctggacatcagcggcttcagcaagcagtacaactgtgccttcatctggcagaaggacggcgtgaagaagctgaacctgtacctgatcatcaactacttcaagggcggcaagctgcggttcaagaagatcaaacctgaagccttcgaagccaacagattctacaccgtgatcaacaaaaagagcggcgagatcgtgcccatggaggtgaacttcaacttcgacgaccccaacctgatcatcctgcctctggcctttggcaagagacagggcagagaattcatctggaacgacctgctgtccctggaaaccggcagcctgaagctggccaacggaagagtgatcgagaagacactgtacaacagaagaacccggcaggatgagcctgccctgttcgtggccctgaccttcgagcggcgggaggtcctggactcctccaatatcaaaccaatgaacctgatcggcgtggcaagaggcgaaaacatccccgccgtgatcgccctgaccgaccccgagggctgcccactgagccggtttaaggatagcctgggaaacccaacccacatcctgagaatcggcgagagctataaggagaagcagcggaccatccaggccaagaaggaggtggagcagcggagagccggcggctacagccggaagtacgccagcaaagccaagaatctggcagacgatatggtgagaaacaccgctagagatctgctgtactacgccgtgacccaggatgccatgctgatcttcgccaacctgagccggggcttcggccggcagggcaagcggaccttcatggccgagagacagtacacacggatggaggactggctgaccgccaagctggcctacgagggcctgagcaagacctacctgtccaagacactggcccagtacacctccaagacatgcagcaactgtgggtttaccatcaccagcgccgactacgacagggtgctggagaagctgaagaagacagcaacaggctggatgaccacaattaacggcaaggagctgaaggtggagggccagattacctactacaacagatacaagagacagaacgtagtcaaggacctgtccgtcgagctggatagactgagcgaagaatctgtgaacaacgacatctcctcctggacaaagggcagaagcggagaagctctgagcctcctgaagaaaagattctcccatagacccgtgcaggagaagttcgtgtgcctgaactgcggcttcgagacacacgcagccgagcaagccgccctgaacatcgccagatcctggctgttcctgcggagccaggagtacaagaaataccagacaaacaagacaaccggcaacaccgataagagagccttcgtcgagacctggcagtccttttaccggaagaagcttaaggaggtgtggaaacctgccgtgcggtctggcggatctggcggaggctccaccagccccaagaaaaagagaaaagtctaagctgccttctgcggggcttgccttctggccatgcccttcttctctcccttgcacctgtacctcttggtctttgaataaagcctgagtaggaaggctagcaaaaaaaaaaaaaaaaaaaaaaaaaaaaaaaaaaaaaaaaaaaaaaaaaaaaaaaaaaaaaaaaaaaaaaaaaaaaaaaa

SEQ ID NO: 9881 - RNA, 8787 nt, synthetic construct
  source 1..8787: mol_type = other RNA
aggaaataagagagaaaagaagagtaagaagaaatataagagccaccatggcccctaagaagaagcgtaaagtgagccggatgaaccacgaccaggagttcgacccccctaaggtgtaccctcccgtccccgccgagaagagaaagcccatccgggtcctgagcctgttcgatggcatcgccaccggtctgctggtgctgaaggacctgggcatccaggtggataggtacattgcctccgaggtgtgcgaggactccatcaccgtgggaatggtgcgtcatcagggcaagatcatgtacgtgggcgacgtgcggagcgtgacacagaagcatatccaggagtggggccctttcgacctggtgatcggcggcagcccttgcaatgacctgagcatcgtgaacccagcccggaagggcctgtacgagggaaccggcagactgttcttcgagttttacagactgctgcacgacgcccggcctaaggaaggcgacgaccggcccttcttttggctgttcgagaatgtggtggccatgggagtcagcgacaagcgggatattagccggttcctggagagcaaccccgtgatgatcgatgccaaggaagtgagcgccgcccaccgggccagatacttctggggcaatctgcctggcatgaacagacccctggccagcaccgtgaacgacaagctggagctgcaggagtgcctggagcacggccggatcgccaagttcagcaaggtgagaaccatcaccacccgaagcaacagcatcaaacaaggcaaggaccagcactttcctgtgttcatgaacgagaaggaggacatcctgtggtgtaccgagatggagagagtgttcgggttcccagtccactacacagatgtcagcaacatgtctagactggccagacagagactgctgggaagaagctggtccgtccctgtgatcagacacctgttcgcccctctgaaggagtacttcgcctgcgtgagcagcggcaacagcaacgccaacagccggggccccagcttctctagcggcctggtgccactgtccctgagagggagccacatgggccccatggagatctacaaaaccgtgagcgcctggaagcggcagcctgtgcgcgtgctgagcctgtttcggaatatcgataaagtcctgaaaagcctgggattcctggagagcggctctggctccggcggtggcaccctgaagtacgtggaggatgtgacaaacgtggtcagacgggatgtggagaagtggggccccttcgatctggtgtacggcagcacccaacccctgggcagctcttgtgaccggtgccctggctggtacatgtttcagttccaccggatcctgcagtacgccctgccgagacaggagtcccagcggccattcttttggattttcatggacaacttgctgctgaccgaggatgaccaggaaactaccactcggttcctgcagaccgaagccgtgaccctgcaggacgtgagaggccgggactaccagaacgccatgcgggtgtggtccaacatccctggactgaaaagcaagcacgcacctctgacccctaaagaagaggagtacctgcaggcccaggtgcggagcagaagcaagctggacgcccctaaggtggatctgctggtgaagaattgcctcctgcccctgagagagtacttcaagtatttcagccagaatagtctgcccctgggaggcagcggcggcggcgtgcaggtgcccatcaagttcgaggacgtggccgtgtacttcagcgagcccgagtggaagaacctggaccagtggcagaaggagctgtacaagcacgtgatgaccgccaactacgagatcctgttcagcctggacagcgccatccccaagcccgacctgatcagccacatcgagaggggcgaggagcccttcctgagggaccacggcaacctgatgaagagggacaagaccatcggctacggcggcggcccaagcagcggcgcccctcctcccagcggcggcaggcggcccaagcagcggcgcccctcctcccagcggcggcagcccagccggctccccaacctctaccgaggagggcacctctgagtccgccacccccgagagcggccctggcacctccaccgagcccagcgagggcagcgcacccggcagccctgccggcagccccacctccacagaggagggaaccagcaccgagcccagcgaaggcagcgccccaggcaccagcaccgagcctagtgagcaggagattaaacggatcaacaagatcagaagaagacttgtgaaagacagcaacaccaagaaggccggcaagacaggccccatgaaaaccctgctggttagagtgatgacacccgatctgagagagcggctggaaaacctgagaaagaagcctgaaaatatcccccagcccatcagcaatacatctagagccaacctgaataagctgctgaccgattacaccgaaatgaagaaggcgatcctgcatgtgtactgggaagagttccagaaggaccctgtgggcctgatgagccgggtggcccagcctgccagcaagaagatcgatcagaacaagctgaaacctgagatggacgagaagggcaacctgaccaccgccggctttgcctgctctcagtgtggccagcccctgttcgtgtacaagctggagcaggtgtctgagaagggcaaggcttacaccaactacttcggacggtgcaatgtggccgagcacgaaaagctgatcctgctggcccagctgaagcccgagaaggatagcgacgaagccgtgacatatagcctgggaaagtttgggcagagggccctggatttctacagcattcatgtgaccaaggagtccacccaccccgtgaagcccctggcccagatcgccggaaacagatacgcctccggacctgtgggaaaggccctgagcgacgcatgtatgggcacaatcgcctccttcctgtctaagtaccaggacatcatcatcgaacaccagaaggtggtgaagggcaaccagaagagactggagagcctgcgggagctggccggcaaggaaaacctggaataccctagcgtgaccctgccacctcagcctcacaccaaggagggcgttgatgcctacaacgaagtgatcgcccgggtgcgaatgtgggtgaacctgaacctgtggcagaagctgaagctaagcagagatgatgccaagcctctgctgagactgaagggattcccttcctttcctctggtcgagagacaggccaacgaagtggactggtgggacatggtgtgtaacgtgaagaagctgatcaacgagaaaaaggaggatggcaaggtgttttggcagaatctggctggctacaagagacaggaagccctgagaccatacctgagcagcgaggaagatcggaagaagggaaagaaattcgctcggtaccagctgggcgacctgctgctgcacctggaaaagaagcacggcgaggactggggaaaggtgtacgacgaggcctgggagcggattgacaagaaagtggaaggcctgagcaagcacatcaagctggaagaggaacggagaagcgaggacgcccagagcaaggccgccctgaccgactggctgcgggctaaggccagcttcgtgatcgagggcctgaaggaggccgacaaggacgagttctgcagatgcgagctgaagctgcagaagtggtacggggacctgcggggaaagcccttcgccatcgaagccgagaacagcatcctggacatcagcggcttcagcaagcagtacaactgtgccttcatctggcagaaggacggcgtgaagaagctgaacctgtacctgatcatcaactacttcaagggcggcaagctgcggttcaagaagatcaaacctgaagccttcgaagccaacagattctacaccgtgatcaacaaaaagagcggcgagatcgtgcccatggaggtgaacttcaacttcgacgaccccaacctgatcatcctgcctctggcctttggcaagagacagggcagagaattcatctggaacgacctgctgtccctggaaaccggcagcctgaagctggccaacggaagagtgatcgagaagacactgtacaacagaagaacccggcaggatgagcctgccctgttcgtggccctgaccttcgagcggcgggaggtcctggactcctccaatatcaaaccaatgaacctgatcggcgtggcaagaggcgaaaacatccccgccgtgatcgccctgaccgaccccgagggctgcccactgagccggtttaaggatagcctgggaaacccaacccacatcctgagaatcggcgagagctataaggagaagcagcggaccatccaggccaagaaggaggtggagcagcggagagccggcggctacagccggaagtacgccagcaaagccaagaatctggcagacgatatggtgagaaacaccgctagagatctgctgtactacgccgtgacccaggatgccatgctgatcttcgccaacctgagccggggcttcggccggcagggcaagcggaccttcatggccgagagacagtacacacggatggaggactggctgaccgccaagctggcctacgagggcctgagcaagacctacctgtccaagacactggcccagtacacctccaagacatgcagcaactgtgggtttaccatcaccagcgccgactacgacagggtgctggagaagctgaagaagacagcaacaggctggatgaccacaattaacggcaaggagctgaaggtggagggccagattacctactacaacagatacaagagacagaacgtagtcaaggacctgtccgtcgagctggatagactgagcgaagaatctgtgaacaacgacatctcctcctggacaaagggcagaagcggagaagctctgagcctcctgaagaaaagattctcccatagacccgtgcaggagaagttcgtgtgcctgaactgcggcttcgagacacacgcagccgagcaagccgccctgaacatcgccagatcctggctgttcctgcggagccaggagtacaagaaataccagacaaacaagacaaccggcaacaccgataagagagccttcgtcgagacctggcagtccttttaccggaagaagcttaaggaggtgtggaaacctgccgtgcggtctggcggatctggcggaggctccaccagccccaagaaaaagagaaaagtctaagctgccttctgcggggcttgccttctggccatgcccttcttctctcccttgcacctgtacctcttggtctttgaataaagcctgagtaggaaggctagcaaaaaaaaaaaaaaaaaaaaaaaaaaaaaaaaaaaaaaaaaaaaaaaaaaaaaaaaaaaaaaaaaaaaaaaaaaaaaaaagcccagccggctccccaacctctaccgaggagggcacctctgagtccgccacccccgagagcggccctggcacctccaccgagcccagcgagggcagcgcacccggcagccctgccggcagccccacctccacagaggagggaaccagcaccgagcccagcgaaggcagcgccccaggcaccagcaccgagcctagtgagcaggagattaaacggatcaacaagatcagaagaagacttgtgaaagacagcaacaccaagaaggccggcaagacaggccccatgaaaaccctgctggttagagtgatgacacccgatctgagagagcggctggaaaacctgagaaagaagcctgaaaatatcccccagcccatcagcaatacatctagagccaacctgaataagctgctgaccgattacaccgaaatgaagaaggcgatcctgcatgtgtactgggaagagttccagaaggaccctgtgggcctgatgagccgggtggcccagcctgccagcaagaagatcgatcagaacaagctgaaacctgagatggacgagaagggcaacctgaccaccgccggctttgcctgctctcagtgtggccagcccctgttcgtgtacaagctggagcaggtgtctgagaagggcaaggcttacaccaactacttcggacggtgcaatgtggccgagcacgaaaagctgatcctgctggcccagctgaagcccgagaaggatagcgacgaagccgtgacatatagcctgggaaagtttgggcagagggccctggatttctacagcattcatgtgaccaaggagtccacccaccccgtgaagcccctggcccagatcgccggaaacagatacgcctccggacctgtgggaaaggccctgagcgacgcatgtatgggcacaatcgcctccttcctgtctaagtaccaggacatcatcatcgaacaccagaaggtggtgaagggcaaccagaagagactggagagcctgcgggagctggccggcaaggaaaacctggaataccctagcgtgaccctgccacctcagcctcacaccaaggagggcgttgatgcctacaacgaagtgatcgcccgggtgcgaatgtgggtgaacctgaacctgtggcagaagctgaagctaagcagagatgatgccaagcctctgctgagactgaagggattcccttcctttcctctggtcgagagacaggccaacgaagtggactggtgggacatggtgtgtaacgtgaagaagctgatcaacgagaaaaaggaggatggcaaggtgttttggcagaatctggctggctacaagagacaggaagccctgagaccatacctgagcagcgaggaagatcggaagaagggaaagaaattcgctcggtaccagctgggcgacctgctgctgcacctggaaaagaagcacggcgaggactggggaaaggtgtacgacgaggcctgggagcggattgacaagaaagtggaaggcctgagcaagcacatcaagctggaagaggaacggagaagcgaggacgcccagagcaaggccgccctgaccgactggctgcgggctaaggccagcttcgtgatcgagggcctgaaggaggccgacaaggacgagttctgcagatgcgagctgaagctgcagaagtggtacggggacctgcggggaaagcccttcgccatcgaagccgagaacagcatcctggacatcagcggcttcagcaagcagtacaactgtgccttcatctggcagaaggacggcgtgaagaagctgaacctgtacctgatcatcaactacttcaagggcggcaagctgcggttcaagaagatcaaacctgaagccttcgaagccaacagattctacaccgtgatcaacaaaaagagcggcgagatcgtgcccatggaggtgaacttcaacttcgacgaccccaacctgatcatcctgcctctggcctttggcaagagacagggcagagaattcatctggaacgacctgctgtccctggaaaccggcagcctgaagctggccaacggaagagtgatcgagaagacactgtacaacagaagaacccggcaggatgagcctgccctgttcgtggccctgaccttcgagcggcgggaggtcctggactcctccaatatcaaaccaatgaacctgatcggcgtggcaagaggcgaaaacatccccgccgtgatcgccctgaccgaccccgagggctgcccactgagccggtttaaggatagcctgggaaacccaacccacatcctgagaatcggcgagagctataaggagaagcagcggaccatccaggccaagaaggaggtggagcagcggagagccggcggctacagccggaagtacgccagcaaagccaagaatctggcagacgatatggtgagaaacaccgctagagatctgctgtactacgccgtgacccaggatgccatgctgatcttcgccaacctgagccggggcttcggccggcagggcaagcggaccttcatggccgagagacagtacacacggatggaggactggctgaccgccaagctggcctacgagggcctgagcaagacctacctgtccaagacactggcccagtacacctccaagacatgcagcaactgtgggtttaccatcaccagcgccgactacgacagggtgctggagaagctgaagaagacagcaacaggctggatgaccacaattaacggcaaggagctgaaggtggagggccagattacctactacaacagatacaagagacagaacgtagtcaaggacctgtccgtcgagctggatagactgagcgaagaatctgtgaacaacgacatctcctcctggacaaagggcagaagcggagaagctctgagcctcctgaagaaaagattctcccatagacccgtgcaggagaagttcgtgtgcctgaactgcggcttcgagacacacgcagccgagcaagccgccctgaacatcgccagatcctggctgttcctgcggagccaggagtacaagaaataccagacaaacaagacaaccggcaacaccgataagagagccttcgtcgagacctggcagtccttttaccggaagaagcttaaggaggtgtggaaacctgccgtgcggtctggcggatctggcggaggctccaccagccccaagaaaaagagaaaagtctaagctgccttctgcggggcttgccttctggccatgcccttcttctctcccttgcacctgtacctcttggtctttgaataaagcctgagtaggaaggctagcaaaaaaaaaaaaaaaaaaaaaaaaaaaaaaaaaaaaaaaaaaaaaaaaaaaaaaaaaaaaaaaaaaaaaaaaaaaaaaaa

SEQ ID NO: 9882 - RNA, 8787 nt, synthetic construct
  source 1..8787: mol_type = other RNA
aggaaataagagagaaaagaagagtaagaagaaatataagagccaccatggcccctaagaagaagcgtaaagtgagccggatgaaccacgaccaggagttcgacccccctaaggtgtaccctcccgtccccgccgagaagagaaagcccatccgggtcctgagcctgttcgatggcatcgccaccggtctgctggtgctgaaggacctgggcatccaggtggataggtacattgcctccgaggtgtgcgaggactccatcaccgtgggaatggtgcgtcatcagggcaagatcatgtacgtgggcgacgtgcggagcgtgacacagaagcatatccaggagtggggccctttcgacctggtgatcggcggcagcccttgcaatgacctgagcatcgtgaacccagcccggaagggcctgtacgagggaaccggcagactgttcttcgagttttacagactgctgcacgacgcccggcctaaggaaggcgacgaccggcccttcttttggctgttcgagaatgtggtggccatgggagtcagcgacaagcgggatattagccggttcctggagagcaaccccgtgatgatcgatgccaaggaagtgagcgccgcccaccgggccagatacttctggggcaatctgcctggcatgaacagacccctggccagcaccgtgaacgacaagctggagctgcaggagtgcctggagcacggccggatcgccaagttcagcaaggtgagaaccatcaccacccgaagcaacagcatcaaacaaggcaaggaccagcactttcctgtgttcatgaacgagaaggaggacatcctgtggtgtaccgagatggagagagtgttcgggttcccagtccactacacagatgtcagcaacatgtctagactggccagacagagactgctgggaagaagctggtccgtccctgtgatcagacacctgttcgcccctctgaaggagtacttcgcctgcgtgagcagcggcaacagcaacgccaacagccggggccccagcttctctagcggcctggtgccactgtccctgagagggagccacatgggccccatggagatctacaaaaccgtgagcgcctggaagcggcagcctgtgcgcgtgctgagcctgtttcggaatatcgataaagtcctgaaaagcctgggattcctggagagcggctctggctccggcggtggcaccctgaagtacgtggaggatgtgacaaacgtggtcagacgggatgtggagaagtggggccccttcgatctggtgtacggcagcacccaacccctgggcagctcttgtgaccggtgccctggctggtacatgtttcagttccaccggatcctgcagtacgccctgccgagacaggagtcccagcggccattcttttggattttcatggacaacttgctgctgaccgaggatgaccaggaaactaccactcggttcctgcagaccgaagccgtgaccctgcaggacgtgagaggccgggactaccagaacgccatgcgggtgtggtccaacatccctggactgaaaagcaagcacgcacctctgacccctaaagaagaggagtacctgcaggcccaggtgcggagcagaagcaagctggacgcccctaaggtggatctgctggtgaagaattgcctcctgcccctgagagagtacttcaagtatttcagccagaatagtctgcccctgggaggcagcggcggcggcaggcccagggccgtgaagttcggcgacgtggccctgtacttcagcagggaggagtggggctgcctgaggcccgcccagagggccctgtacagggacgtgatgcaggagacctacggccacctgggcgccctgggctgcgccggccccaagcccgccctgatcagctggctggagaggaacaccgacgactgggagcccgccgccctggacccccaggagtgccccaagggcgtggccgtgcagggcggcccaagcagcggcgcccctcctcccagcggcggcaggcggcccaagcagcggcgcccctcctcccagcggcggcagcccagccggctccccaacctctaccgaggagggcacctctgagtccgccacccccgagagcggccctggcacctccaccgagcccagcgagggcagcgcacccggcagccctgccggcagccccacctccacagaggagggaaccagcaccgagcccagcgaaggcagcgccccaggcaccagcaccgagcctagtgagcaggagattaaacggatcaacaagatcagaagaagacttgtgaaagacagcaacaccaagaaggccggcaagacaggccccatgaaaaccctgctggttagagtgatgacacccgatctgagagagcggctggaaaacctgagaaagaagcctgaaaatatcccccagcccatcagcaatacatctagagccaacctgaataagctgctgaccgattacaccgaaatgaagaaggcgatcctgcatgtgtactgggaagagttccagaaggaccctgtgggcctgatgagccgggtggcccagcctgccagcaagaagatcgatcagaacaagctgaaacctgagatggacgagaagggcaacctgaccaccgccggctttgcctgctctcagtgtggccagcccctgttcgtgtacaagctggagcaggtgtctgagaagggcaaggcttacaccaactacttcggacggtgcaatgtggccgagcacgaaaagctgatcctgctggcccagctgaagcccgagaaggatagcgacgaagccgtgacatatagcctgggaaagtttgggcagagggccctggatttctacagcattcatgtgaccaaggagtccacccaccccgtgaagcccctggcccagatcgccggaaacagatacgcctccggacctgtgggaaaggccctgagcgacgcatgtatgggcacaatcgcctccttcctgtctaagtaccaggacatcatcatcgaacaccagaaggtggtgaagggcaaccagaagagactggagagcctgcgggagctggccggcaaggaaaacctggaataccctagcgtgaccctgccacctcagcctcacaccaaggagggcgttgatgcctacaacgaagtgatcgcccgggtgcgaatgtgggtgaacctgaacctgtggcagaagctgaagctaagcagagatgatgccaagcctctgctgagactgaagggattcccttcctttcctctggtcgagagacaggccaacgaagtggactggtgggacatggtgtgtaacgtgaagaagctgatcaacgagaaaaaggaggatggcaaggtgttttggcagaatctggctggctacaagagacaggaagccctgagaccatacctgagcagcgaggaagatcggaagaagggaaagaaattcgctcggtaccagctgggcgacctgctgctgcacctggaaaagaagcacggcgaggactggggaaaggtgtacgacgaggcctgggagcggattgacaagaaagtggaaggcctgagcaagcacatcaagctggaagaggaacggagaagcgaggacgcccagagcaaggccgccctgaccgactggctgcgggctaaggccagcttcgtgatcgagggcctgaaggaggccgacaaggacgagttctgcagatgcgagctgaagctgcagaagtggtacggggacctgcggggaaagcccttcgccatcgaagccgagaacagcatcctggacatcagcggcttcagcaagcagtacaactgtgccttcatctggcagaaggacggcgtgaagaagctgaacctgtacctgatcatcaactacttcaagggcggcaagctgcggttcaagaagatcaaacctgaagccttcgaagccaacagattctacaccgtgatcaacaaaaagagcggcgagatcgtgcccatggaggtgaacttcaacttcgacgaccccaacctgatcatcctgcctctggcctttggcaagagacagggcagagaattcatctggaacgacctgctgtccctggaaaccggcagcctgaagctggccaacggaagagtgatcgagaagacactgtacaacagaagaacccggcaggatgagcctgccctgttcgtggccctgaccttcgagcggcgggaggtcctggactcctccaatatcaaaccaatgaacctgatcggcgtggcaagaggcgaaaacatccccgccgtgatcgccctgaccgaccccgagggctgcccactgagccggtttaaggatagcctgggaaacccaacccacatcctgagaatcggcgagagctataaggagaagcagcggaccatccaggccaagaaggaggtggagcagcggagagccggcggctacagccggaagtacgccagcaaagccaagaatctggcagacgatatggtgagaaacaccgctagagatctgctgtactacgccgtgacccaggatgccatgctgatcttcgccaacctgagccggggcttcggccggcagggcaagcggaccttcatggccgagagacagtacacacggatggaggactggctgaccgccaagctggcctacgagggcctgagcaagacctacctgtccaagacactggcccagtacacctccaagacatgcagcaactgtgggtttaccatcaccagcgccgactacgacagggtgctggagaagctgaagaagacagcaacaggctggatgaccacaattaacggcaaggagctgaaggtggagggccagattacctactacaacagatacaagagacagaacgtagtcaaggacctgtccgtcgagctggatagactgagcgaagaatctgtgaacaacgacatctcctcctggacaaagggcagaagcggagaagctctgagcctcctgaagaaaagattctcccatagacccgtgcaggagaagttcgtgtgcctgaactgcggcttcgagacacacgcagccgagcaagccgccctgaacatcgccagatcctggctgttcctgcggagccaggagtacaagaaataccagacaaacaagacaaccggcaacaccgataagagagccttcgtcgagacctggcagtccttttaccggaagaagcttaaggaggtgtggaaacctgccgtgcggtctggcggatctggcggaggctccaccagccccaagaaaaagagaaaagtctaagctgccttctgcggggcttgccttctggccatgcccttcttctctcccttgcacctgtacctcttggtctttgaataaagcctgagtaggaaggctagcaaaaaaaaaaaaaaaaaaaaaaaaaaaaaaaaaaaaaaaaaaaaaaaaaaaaaaaaaaaaaaaaaaaaaaaaaaaaaaaagcccagccggctccccaacctctaccgaggagggcacctctgagtccgccacccccgagagcggccctggcacctccaccgagcccagcgagggcagcgcacccggcagccctgccggcagccccacctccacagaggagggaaccagcaccgagcccagcgaaggcagcgccccaggcaccagcaccgagcctagtgagcaggagattaaacggatcaacaagatcagaagaagacttgtgaaagacagcaacaccaagaaggccggcaagacaggccccatgaaaaccctgctggttagagtgatgacacccgatctgagagagcggctggaaaacctgagaaagaagcctgaaaatatcccccagcccatcagcaatacatctagagccaacctgaataagctgctgaccgattacaccgaaatgaagaaggcgatcctgcatgtgtactgggaagagttccagaaggaccctgtgggcctgatgagccgggtggcccagcctgccagcaagaagatcgatcagaacaagctgaaacctgagatggacgagaagggcaacctgaccaccgccggctttgcctgctctcagtgtggccagcccctgttcgtgtacaagctggagcaggtgtctgagaagggcaaggcttacaccaactacttcggacggtgcaatgtggccgagcacgaaaagctgatcctgctggcccagctgaagcccgagaaggatagcgacgaagccgtgacatatagcctgggaaagtttgggcagagggccctggatttctacagcattcatgtgaccaaggagtccacccaccccgtgaagcccctggcccagatcgccggaaacagatacgcctccggacctgtgggaaaggccctgagcgacgcatgtatgggcacaatcgcctccttcctgtctaagtaccaggacatcatcatcgaacaccagaaggtggtgaagggcaaccagaagagactggagagcctgcgggagctggccggcaaggaaaacctggaataccctagcgtgaccctgccacctcagcctcacaccaaggagggcgttgatgcctacaacgaagtgatcgcccgggtgcgaatgtgggtgaacctgaacctgtggcagaagctgaagctaagcagagatgatgccaagcctctgctgagactgaagggattcccttcctttcctctggtcgagagacaggccaacgaagtggactggtgggacatggtgtgtaacgtgaagaagctgatcaacgagaaaaaggaggatggcaaggtgttttggcagaatctggctggctacaagagacaggaagccctgagaccatacctgagcagcgaggaagatcggaagaagggaaagaaattcgctcggtaccagctgggcgacctgctgctgcacctggaaaagaagcacggcgaggactggggaaaggtgtacgacgaggcctgggagcggattgacaagaaagtggaaggcctgagcaagcacatcaagctggaagaggaacggagaagcgaggacgcccagagcaaggccgccctgaccgactggctgcgggctaaggccagcttcgtgatcgagggcctgaaggaggccgacaaggacgagttctgcagatgcgagctgaagctgcagaagtggtacggggacctgcggggaaagcccttcgccatcgaagccgagaacagcatcctggacatcagcggcttcagcaagcagtacaactgtgccttcatctggcagaaggacggcgtgaagaagctgaacctgtacctgatcatcaactacttcaagggcggcaagctgcggttcaagaagatcaaacctgaagccttcgaagccaacagattctacaccgtgatcaacaaaaagagcggcgagatcgtgcccatggaggtgaacttcaacttcgacgaccccaacctgatcatcctgcctctggcctttggcaagagacagggcagagaattcatctggaacgacctgctgtccctggaaaccggcagcctgaagctggccaacggaagagtgatcgagaagacactgtacaacagaagaacccggcaggatgagcctgccctgttcgtggccctgaccttcgagcggcgggaggtcctggactcctccaatatcaaaccaatgaacctgatcggcgtggcaagaggcgaaaacatccccgccgtgatcgccctgaccgaccccgagggctgcccactgagccggtttaaggatagcctgggaaacccaacccacatcctgagaatcggcgagagctataaggagaagcagcggaccatccaggccaagaaggaggtggagcagcggagagccggcggctacagccggaagtacgccagcaaagccaagaatctggcagacgatatggtgagaaacaccgctagagatctgctgtactacgccgtgacccaggatgccatgctgatcttcgccaacctgagccggggcttcggccggcagggcaagcggaccttcatggccgagagacagtacacacggatggaggactggctgaccgccaagctggcctacgagggcctgagcaagacctacctgtccaagacactggcccagtacacctccaagacatgcagcaactgtgggtttaccatcaccagcgccgactacgacagggtgctggagaagctgaagaagacagcaacaggctggatgaccacaattaacggcaaggagctgaaggtggagggccagattacctactacaacagatacaagagacagaacgtagtcaaggacctgtccgtcgagctggatagactgagcgaagaatctgtgaacaacgacatctcctcctggacaaagggcagaagcggagaagctctgagcctcctgaagaaaagattctcccatagacccgtgcaggagaagttcgtgtgcctgaactgcggcttcgagacacacgcagccgagcaagccgccctgaacatcgccagatcctggctgttcctgcggagccaggagtacaagaaataccagacaaacaagacaaccggcaacaccgataagagagccttcgtcgagacctggcagtccttttaccggaagaagcttaaggaggtgtggaaacctgccgtgcggtctggcggatctggcggaggctccaccagccccaagaaaaagagaaaagtctaagctgccttctgcggggcttgccttctggccatgcccttcttctctcccttgcacctgtacctcttggtctttgaataaagcctgagtaggaaggctagcaaaaaaaaaaaaaaaaaaaaaaaaaaaaaaaaaaaaaaaaaaaaaaaaaaaaaaaaaaaaaaaaaaaaaaaaaaaaaaaa

SEQ ID NO: 9883 - RNA, 8787 nt, synthetic construct
  source 1..8787: mol_type = other RNA
aggaaataagagagaaaagaagagtaagaagaaatataagagccaccatggcccctaagaagaagcgtaaagtgagccggatgaaccacgaccaggagttcgacccccctaaggtgtaccctcccgtccccgccgagaagagaaagcccatccgggtcctgagcctgttcgatggcatcgccaccggtctgctggtgctgaaggacctgggcatccaggtggataggtacattgcctccgaggtgtgcgaggactccatcaccgtgggaatggtgcgtcatcagggcaagatcatgtacgtgggcgacgtgcggagcgtgacacagaagcatatccaggagtggggccctttcgacctggtgatcggcggcagcccttgcaatgacctgagcatcgtgaacccagcccggaagggcctgtacgagggaaccggcagactgttcttcgagttttacagactgctgcacgacgcccggcctaaggaaggcgacgaccggcccttcttttggctgttcgagaatgtggtggccatgggagtcagcgacaagcgggatattagccggttcctggagagcaaccccgtgatgatcgatgccaaggaagtgagcgccgcccaccgggccagatacttctggggcaatctgcctggcatgaacagacccctggccagcaccgtgaacgacaagctggagctgcaggagtgcctggagcacggccggatcgccaagttcagcaaggtgagaaccatcaccacccgaagcaacagcatcaaacaaggcaaggaccagcactttcctgtgttcatgaacgagaaggaggacatcctgtggtgtaccgagatggagagagtgttcgggttcccagtccactacacagatgtcagcaacatgtctagactggccagacagagactgctgggaagaagctggtccgtccctgtgatcagacacctgttcgcccctctgaaggagtacttcgcctgcgtgagcagcggcaacagcaacgccaacagccggggccccagcttctctagcggcctggtgccactgtccctgagagggagccacatgggccccatggagatctacaaaaccgtgagcgcctggaagcggcagcctgtgcgcgtgctgagcctgtttcggaatatcgataaagtcctgaaaagcctgggattcctggagagcggctctggctccggcggtggcaccctgaagtacgtggaggatgtgacaaacgtggtcagacgggatgtggagaagtggggccccttcgatctggtgtacggcagcacccaacccctgggcagctcttgtgaccggtgccctggctggtacatgtttcagttccaccggatcctgcagtacgccctgccgagacaggagtcccagcggccattcttttggattttcatggacaacttgctgctgaccgaggatgaccaggaaactaccactcggttcctgcagaccgaagccgtgaccctgcaggacgtgagaggccgggactaccagaacgccatgcgggtgtggtccaacatccctggactgaaaagcaagcacgcacctctgacccctaaagaagaggagtacctgcaggcccaggtgcggagcagaagcaagctggacgcccctaaggtggatctgctggtgaagaattgcctcctgcccctgagagagtacttcaagtatttcagccagaatagtctgcccctgggaggcagcggcggcggcccccccaggcaggagagggtgaccttcggcgacgtggccgtggacttcaccctggacgagtgggtgtgcctggacagcgcccagaaggccctgtacagggacgtgatgctggagaactacggccacctggtgtgcctgggcctggccggcgccaagcccgccgtgatccagaggctggagaggggcgaggccgcctggtgccccggcgtgcccggcagcaggctgcccggcctgttcttcttcggcggcccaagcagcggcgcccctcctcccagcggcggcaggcggcccaagcagcggcgcccctcctcccagcggcggcagcccagccggctccccaacctctaccgaggagggcacctctgagtccgccacccccgagagcggccctggcacctccaccgagcccagcgagggcagcgcacccggcagccctgccggcagccccacctccacagaggagggaaccagcaccgagcccagcgaaggcagcgccccaggcaccagcaccgagcctagtgagcaggagattaaacggatcaacaagatcagaagaagacttgtgaaagacagcaacaccaagaaggccggcaagacaggccccatgaaaaccctgctggttagagtgatgacacccgatctgagagagcggctggaaaacctgagaaagaagcctgaaaatatcccccagcccatcagcaatacatctagagccaacctgaataagctgctgaccgattacaccgaaatgaagaaggcgatcctgcatgtgtactgggaagagttccagaaggaccctgtgggcctgatgagccgggtggcccagcctgccagcaagaagatcgatcagaacaagctgaaacctgagatggacgagaagggcaacctgaccaccgccggctttgcctgctctcagtgtggccagcccctgttcgtgtacaagctggagcaggtgtctgagaagggcaaggcttacaccaactacttcggacggtgcaatgtggccgagcacgaaaagctgatcctgctggcccagctgaagcccgagaaggatagcgacgaagccgtgacatatagcctgggaaagtttgggcagagggccctggatttctacagcattcatgtgaccaaggagtccacccaccccgtgaagcccctggcccagatcgccggaaacagatacgcctccggacctgtgggaaaggccctgagcgacgcatgtatgggcacaatcgcctccttcctgtctaagtaccaggacatcatcatcgaacaccagaaggtggtgaagggcaaccagaagagactggagagcctgcgggagctggccggcaaggaaaacctggaataccctagcgtgaccctgccacctcagcctcacaccaaggagggcgttgatgcctacaacgaagtgatcgcccgggtgcgaatgtgggtgaacctgaacctgtggcagaagctgaagctaagcagagatgatgccaagcctctgctgagactgaagggattcccttcctttcctctggtcgagagacaggccaacgaagtggactggtgggacatggtgtgtaacgtgaagaagctgatcaacgagaaaaaggaggatggcaaggtgttttggcagaatctggctggctacaagagacaggaagccctgagaccatacctgagcagcgaggaagatcggaagaagggaaagaaattcgctcggtaccagctgggcgacctgctgctgcacctggaaaagaagcacggcgaggactggggaaaggtgtacgacgaggcctgggagcggattgacaagaaagtggaaggcctgagcaagcacatcaagctggaagaggaacggagaagcgaggacgcccagagcaaggccgccctgaccgactggctgcgggctaaggccagcttcgtgatcgagggcctgaaggaggccgacaaggacgagttctgcagatgcgagctgaagctgcagaagtggtacggggacctgcggggaaagcccttcgccatcgaagccgagaacagcatcctggacatcagcggcttcagcaagcagtacaactgtgccttcatctggcagaaggacggcgtgaagaagctgaacctgtacctgatcatcaactacttcaagggcggcaagctgcggttcaagaagatcaaacctgaagccttcgaagccaacagattctacaccgtgatcaacaaaaagagcggcgagatcgtgcccatggaggtgaacttcaacttcgacgaccccaacctgatcatcctgcctctggcctttggcaagagacagggcagagaattcatctggaacgacctgctgtccctggaaaccggcagcctgaagctggccaacggaagagtgatcgagaagacactgtacaacagaagaacccggcaggatgagcctgccctgttcgtggccctgaccttcgagcggcgggaggtcctggactcctccaatatcaaaccaatgaacctgatcggcgtggcaagaggcgaaaacatccccgccgtgatcgccctgaccgaccccgagggctgcccactgagccggtttaaggatagcctgggaaacccaacccacatcctgagaatcggcgagagctataaggagaagcagcggaccatccaggccaagaaggaggtggagcagcggagagccggcggctacagccggaagtacgccagcaaagccaagaatctggcagacgatatggtgagaaacaccgctagagatctgctgtactacgccgtgacccaggatgccatgctgatcttcgccaacctgagccggggcttcggccggcagggcaagcggaccttcatggccgagagacagtacacacggatggaggactggctgaccgccaagctggcctacgagggcctgagcaagacctacctgtccaagacactggcccagtacacctccaagacatgcagcaactgtgggtttaccatcaccagcgccgactacgacagggtgctggagaagctgaagaagacagcaacaggctggatgaccacaattaacggcaaggagctgaaggtggagggccagattacctactacaacagatacaagagacagaacgtagtcaaggacctgtccgtcgagctggatagactgagcgaagaatctgtgaacaacgacatctcctcctggacaaagggcagaagcggagaagctctgagcctcctgaagaaaagattctcccatagacccgtgcaggagaagttcgtgtgcctgaactgcggcttcgagacacacgcagccgagcaagccgccctgaacatcgccagatcctggctgttcctgcggagccaggagtacaagaaataccagacaaacaagacaaccggcaacaccgataagagagccttcgtcgagacctggcagtccttttaccggaagaagcttaaggaggtgtggaaacctgccgtgcggtctggcggatctggcggaggctccaccagccccaagaaaaagagaaaagtctaagctgccttctgcggggcttgccttctggccatgcccttcttctctcccttgcacctgtacctcttggtctttgaataaagcctgagtaggaaggctagcaaaaaaaaaaaaaaaaaaaaaaaaaaaaaaaaaaaaaaaaaaaaaaaaaaaaaaaaaaaaaaaaaaaaaaaaaaaaaaaagcccagccggctccccaacctctaccgaggagggcacctctgagtccgccacccccgagagcggccctggcacctccaccgagcccagcgagggcagcgcacccggcagccctgccggcagccccacctccacagaggagggaaccagcaccgagcccagcgaaggcagcgccccaggcaccagcaccgagcctagtgagcaggagattaaacggatcaacaagatcagaagaagacttgtgaaagacagcaacaccaagaaggccggcaagacaggccccatgaaaaccctgctggttagagtgatgacacccgatctgagagagcggctggaaaacctgagaaagaagcctgaaaatatcccccagcccatcagcaatacatctagagccaacctgaataagctgctgaccgattacaccgaaatgaagaaggcgatcctgcatgtgtactgggaagagttccagaaggaccctgtgggcctgatgagccgggtggcccagcctgccagcaagaagatcgatcagaacaagctgaaacctgagatggacgagaagggcaacctgaccaccgccggctttgcctgctctcagtgtggccagcccctgttcgtgtacaagctggagcaggtgtctgagaagggcaaggcttacaccaactacttcggacggtgcaatgtggccgagcacgaaaagctgatcctgctggcccagctgaagcccgagaaggatagcgacgaagccgtgacatatagcctgggaaagtttgggcagagggccctggatttctacagcattcatgtgaccaaggagtccacccaccccgtgaagcccctggcccagatcgccggaaacagatacgcctccggacctgtgggaaaggccctgagcgacgcatgtatgggcacaatcgcctccttcctgtctaagtaccaggacatcatcatcgaacaccagaaggtggtgaagggcaaccagaagagactggagagcctgcgggagctggccggcaaggaaaacctggaataccctagcgtgaccctgccacctcagcctcacaccaaggagggcgttgatgcctacaacgaagtgatcgcccgggtgcgaatgtgggtgaacctgaacctgtggcagaagctgaagctaagcagagatgatgccaagcctctgctgagactgaagggattcccttcctttcctctggtcgagagacaggccaacgaagtggactggtgggacatggtgtgtaacgtgaagaagctgatcaacgagaaaaaggaggatggcaaggtgttttggcagaatctggctggctacaagagacaggaagccctgagaccatacctgagcagcgaggaagatcggaagaagggaaagaaattcgctcggtaccagctgggcgacctgctgctgcacctggaaaagaagcacggcgaggactggggaaaggtgtacgacgaggcctgggagcggattgacaagaaagtggaaggcctgagcaagcacatcaagctggaagaggaacggagaagcgaggacgcccagagcaaggccgccctgaccgactggctgcgggctaaggccagcttcgtgatcgagggcctgaaggaggccgacaaggacgagttctgcagatgcgagctgaagctgcagaagtggtacggggacctgcggggaaagcccttcgccatcgaagccgagaacagcatcctggacatcagcggcttcagcaagcagtacaactgtgccttcatctggcagaaggacggcgtgaagaagctgaacctgtacctgatcatcaactacttcaagggcggcaagctgcggttcaagaagatcaaacctgaagccttcgaagccaacagattctacaccgtgatcaacaaaaagagcggcgagatcgtgcccatggaggtgaacttcaacttcgacgaccccaacctgatcatcctgcctctggcctttggcaagagacagggcagagaattcatctggaacgacctgctgtccctggaaaccggcagcctgaagctggccaacggaagagtgatcgagaagacactgtacaacagaagaacccggcaggatgagcctgccctgttcgtggccctgaccttcgagcggcgggaggtcctggactcctccaatatcaaaccaatgaacctgatcggcgtggcaagaggcgaaaacatccccgccgtgatcgccctgaccgaccccgagggctgcccactgagccggtttaaggatagcctgggaaacccaacccacatcctgagaatcggcgagagctataaggagaagcagcggaccatccaggccaagaaggaggtggagcagcggagagccggcggctacagccggaagtacgccagcaaagccaagaatctggcagacgatatggtgagaaacaccgctagagatctgctgtactacgccgtgacccaggatgccatgctgatcttcgccaacctgagccggggcttcggccggcagggcaagcggaccttcatggccgagagacagtacacacggatggaggactggctgaccgccaagctggcctacgagggcctgagcaagacctacctgtccaagacactggcccagtacacctccaagacatgcagcaactgtgggtttaccatcaccagcgccgactacgacagggtgctggagaagctgaagaagacagcaacaggctggatgaccacaattaacggcaaggagctgaaggtggagggccagattacctactacaacagatacaagagacagaacgtagtcaaggacctgtccgtcgagctggatagactgagcgaagaatctgtgaacaacgacatctcctcctggacaaagggcagaagcggagaagctctgagcctcctgaagaaaagattctcccatagacccgtgcaggagaagttcgtgtgcctgaactgcggcttcgagacacacgcagccgagcaagccgccctgaacatcgccagatcctggctgttcctgcggagccaggagtacaagaaataccagacaaacaagacaaccggcaacaccgataagagagccttcgtcgagacctggcagtccttttaccggaagaagcttaaggaggtgtggaaacctgccgtgcggtctggcggatctggcggaggctccaccagccccaagaaaaagagaaaagtctaagctgccttctgcggggcttgccttctggccatgcccttcttctctcccttgcacctgtacctcttggtctttgaataaagcctgagtaggaaggctagcaaaaaaaaaaaaaaaaaaaaaaaaaaaaaaaaaaaaaaaaaaaaaaaaaaaaaaaaaaaaaaaaaaaaaaaaaaaaaaaa

SEQ ID NO: 9884 - RNA, 8787 nt, synthetic construct
  source 1..8787: mol_type = other RNA
aggaaataagagagaaaagaagagtaagaagaaatataagagccaccatggcccctaagaagaagcgtaaagtgagccggatgaaccacgaccaggagttcgacccccctaaggtgtaccctcccgtccccgccgagaagagaaagcccatccgggtcctgagcctgttcgatggcatcgccaccggtctgctggtgctgaaggacctgggcatccaggtggataggtacattgcctccgaggtgtgcgaggactccatcaccgtgggaatggtgcgtcatcagggcaagatcatgtacgtgggcgacgtgcggagcgtgacacagaagcatatccaggagtggggccctttcgacctggtgatcggcggcagcccttgcaatgacctgagcatcgtgaacccagcccggaagggcctgtacgagggaaccggcagactgttcttcgagttttacagactgctgcacgacgcccggcctaaggaaggcgacgaccggcccttcttttggctgttcgagaatgtggtggccatgggagtcagcgacaagcgggatattagccggttcctggagagcaaccccgtgatgatcgatgccaaggaagtgagcgccgcccaccgggccagatacttctggggcaatctgcctggcatgaacagacccctggccagcaccgtgaacgacaagctggagctgcaggagtgcctggagcacggccggatcgccaagttcagcaaggtgagaaccatcaccacccgaagcaacagcatcaaacaaggcaaggaccagcactttcctgtgttcatgaacgagaaggaggacatcctgtggtgtaccgagatggagagagtgttcgggttcccagtccactacacagatgtcagcaacatgtctagactggccagacagagactgctgggaagaagctggtccgtccctgtgatcagacacctgttcgcccctctgaaggagtacttcgcctgcgtgagcagcggcaacagcaacgccaacagccggggccccagcttctctagcggcctggtgccactgtccctgagagggagccacatgggccccatggagatctacaaaaccgtgagcgcctggaagcggcagcctgtgcgcgtgctgagcctgtttcggaatatcgataaagtcctgaaaagcctgggattcctggagagcggctctggctccggcggtggcaccctgaagtacgtggaggatgtgacaaacgtggtcagacgggatgtggagaagtggggccccttcgatctggtgtacggcagcacccaacccctgggcagctcttgtgaccggtgccctggctggtacatgtttcagttccaccggatcctgcagtacgccctgccgagacaggagtcccagcggccattcttttggattttcatggacaacttgctgctgaccgaggatgaccaggaaactaccactcggttcctgcagaccgaagccgtgaccctgcaggacgtgagaggccgggactaccagaacgccatgcgggtgtggtccaacatccctggactgaaaagcaagcacgcacctctgacccctaaagaagaggagtacctgcaggcccaggtgcggagcagaagcaagctggacgcccctaaggtggatctgctggtgaagaattgcctcctgcccctgagagagtacttcaagtatttcagccagaatagtctgcccctgggaggcagcggcggcggcatggccgccgccgccctgaggctgcccgcccagggcaccgtgaccttcgaggacgtggccgtgaagttcagccaggaggagtggagcatcctgaccgaggcccagaggtgcctgtaccacgacgtgatgctggagaacctggccctgatcagcagcctgggctgctggtacggcgccaaggacgagacccccagcaagcagaccctgagcatccagcagcagagccccctgaggagccactggggcggcccaagcagcggcgcccctcctcccagcggcggcaggcggcccaagcagcggcgcccctcctcccagcggcggcagcccagccggctccccaacctctaccgaggagggcacctctgagtccgccacccccgagagcggccctggcacctccaccgagcccagcgagggcagcgcacccggcagccctgccggcagccccacctccacagaggagggaaccagcaccgagcccagcgaaggcagcgccccaggcaccagcaccgagcctagtgagcaggagattaaacggatcaacaagatcagaagaagacttgtgaaagacagcaacaccaagaaggccggcaagacaggccccatgaaaaccctgctggttagagtgatgacacccgatctgagagagcggctggaaaacctgagaaagaagcctgaaaatatcccccagcccatcagcaatacatctagagccaacctgaataagctgctgaccgattacaccgaaatgaagaaggcgatcctgcatgtgtactgggaagagttccagaaggaccctgtgggcctgatgagccgggtggcccagcctgccagcaagaagatcgatcagaacaagctgaaacctgagatggacgagaagggcaacctgaccaccgccggctttgcctgctctcagtgtggccagcccctgttcgtgtacaagctggagcaggtgtctgagaagggcaaggcttacaccaactacttcggacggtgcaatgtggccgagcacgaaaagctgatcctgctggcccagctgaagcccgagaaggatagcgacgaagccgtgacatatagcctgggaaagtttgggcagagggccctggatttctacagcattcatgtgaccaaggagtccacccaccccgtgaagcccctggcccagatcgccggaaacagatacgcctccggacctgtgggaaaggccctgagcgacgcatgtatgggcacaatcgcctccttcctgtctaagtaccaggacatcatcatcgaacaccagaaggtggtgaagggcaaccagaagagactggagagcctgcgggagctggccggcaaggaaaacctggaataccctagcgtgaccctgccacctcagcctcacaccaaggagggcgttgatgcctacaacgaagtgatcgcccgggtgcgaatgtgggtgaacctgaacctgtggcagaagctgaagctaagcagagatgatgccaagcctctgctgagactgaagggattcccttcctttcctctggtcgagagacaggccaacgaagtggactggtgggacatggtgtgtaacgtgaagaagctgatcaacgagaaaaaggaggatggcaaggtgttttggcagaatctggctggctacaagagacaggaagccctgagaccatacctgagcagcgaggaagatcggaagaagggaaagaaattcgctcggtaccagctgggcgacctgctgctgcacctggaaaagaagcacggcgaggactggggaaaggtgtacgacgaggcctgggagcggattgacaagaaagtggaaggcctgagcaagcacatcaagctggaagaggaacggagaagcgaggacgcccagagcaaggccgccctgaccgactggctgcgggctaaggccagcttcgtgatcgagggcctgaaggaggccgacaaggacgagttctgcagatgcgagctgaagctgcagaagtggtacggggacctgcggggaaagcccttcgccatcgaagccgagaacagcatcctggacatcagcggcttcagcaagcagtacaactgtgccttcatctggcagaaggacggcgtgaagaagctgaacctgtacctgatcatcaactacttcaagggcggcaagctgcggttcaagaagatcaaacctgaagccttcgaagccaacagattctacaccgtgatcaacaaaaagagcggcgagatcgtgcccatggaggtgaacttcaacttcgacgaccccaacctgatcatcctgcctctggcctttggcaagagacagggcagagaattcatctggaacgacctgctgtccctggaaaccggcagcctgaagctggccaacggaagagtgatcgagaagacactgtacaacagaagaacccggcaggatgagcctgccctgttcgtggccctgaccttcgagcggcgggaggtcctggactcctccaatatcaaaccaatgaacctgatcggcgtggcaagaggcgaaaacatccccgccgtgatcgccctgaccgaccccgagggctgcccactgagccggtttaaggatagcctgggaaacccaacccacatcctgagaatcggcgagagctataaggagaagcagcggaccatccaggccaagaaggaggtggagcagcggagagccggcggctacagccggaagtacgccagcaaagccaagaatctggcagacgatatggtgagaaacaccgctagagatctgctgtactacgccgtgacccaggatgccatgctgatcttcgccaacctgagccggggcttcggccggcagggcaagcggaccttcatggccgagagacagtacacacggatggaggactggctgaccgccaagctggcctacgagggcctgagcaagacctacctgtccaagacactggcccagtacacctccaagacatgcagcaactgtgggtttaccatcaccagcgccgactacgacagggtgctggagaagctgaagaagacagcaacaggctggatgaccacaattaacggcaaggagctgaaggtggagggccagattacctactacaacagatacaagagacagaacgtagtcaaggacctgtccgtcgagctggatagactgagcgaagaatctgtgaacaacgacatctcctcctggacaaagggcagaagcggagaagctctgagcctcctgaagaaaagattctcccatagacccgtgcaggagaagttcgtgtgcctgaactgcggcttcgagacacacgcagccgagcaagccgccctgaacatcgccagatcctggctgttcctgcggagccaggagtacaagaaataccagacaaacaagacaaccggcaacaccgataagagagccttcgtcgagacctggcagtccttttaccggaagaagcttaaggaggtgtggaaacctgccgtgcggtctggcggatctggcggaggctccaccagccccaagaaaaagagaaaagtctaagctgccttctgcggggcttgccttctggccatgcccttcttctctcccttgcacctgtacctcttggtctttgaataaagcctgagtaggaaggctagcaaaaaaaaaaaaaaaaaaaaaaaaaaaaaaaaaaaaaaaaaaaaaaaaaaaaaaaaaaaaaaaaaaaaaaaaaaaaaaaagcccagccggctccccaacctctaccgaggagggcacctctgagtccgccacccccgagagcggccctggcacctccaccgagcccagcgagggcagcgcacccggcagccctgccggcagccccacctccacagaggagggaaccagcaccgagcccagcgaaggcagcgccccaggcaccagcaccgagcctagtgagcaggagattaaacggatcaacaagatcagaagaagacttgtgaaagacagcaacaccaagaaggccggcaagacaggccccatgaaaaccctgctggttagagtgatgacacccgatctgagagagcggctggaaaacctgagaaagaagcctgaaaatatcccccagcccatcagcaatacatctagagccaacctgaataagctgctgaccgattacaccgaaatgaagaaggcgatcctgcatgtgtactgggaagagttccagaaggaccctgtgggcctgatgagccgggtggcccagcctgccagcaagaagatcgatcagaacaagctgaaacctgagatggacgagaagggcaacctgaccaccgccggctttgcctgctctcagtgtggccagcccctgttcgtgtacaagctggagcaggtgtctgagaagggcaaggcttacaccaactacttcggacggtgcaatgtggccgagcacgaaaagctgatcctgctggcccagctgaagcccgagaaggatagcgacgaagccgtgacatatagcctgggaaagtttgggcagagggccctggatttctacagcattcatgtgaccaaggagtccacccaccccgtgaagcccctggcccagatcgccggaaacagatacgcctccggacctgtgggaaaggccctgagcgacgcatgtatgggcacaatcgcctccttcctgtctaagtaccaggacatcatcatcgaacaccagaaggtggtgaagggcaaccagaagagactggagagcctgcgggagctggccggcaaggaaaacctggaataccctagcgtgaccctgccacctcagcctcacaccaaggagggcgttgatgcctacaacgaagtgatcgcccgggtgcgaatgtgggtgaacctgaacctgtggcagaagctgaagctaagcagagatgatgccaagcctctgctgagactgaagggattcccttcctttcctctggtcgagagacaggccaacgaagtggactggtgggacatggtgtgtaacgtgaagaagctgatcaacgagaaaaaggaggatggcaaggtgttttggcagaatctggctggctacaagagacaggaagccctgagaccatacctgagcagcgaggaagatcggaagaagggaaagaaattcgctcggtaccagctgggcgacctgctgctgcacctggaaaagaagcacggcgaggactggggaaaggtgtacgacgaggcctgggagcggattgacaagaaagtggaaggcctgagcaagcacatcaagctggaagaggaacggagaagcgaggacgcccagagcaaggccgccctgaccgactggctgcgggctaaggccagcttcgtgatcgagggcctgaaggaggccgacaaggacgagttctgcagatgcgagctgaagctgcagaagtggtacggggacctgcggggaaagcccttcgccatcgaagccgagaacagcatcctggacatcagcggcttcagcaagcagtacaactgtgccttcatctggcagaaggacggcgtgaagaagctgaacctgtacctgatcatcaactacttcaagggcggcaagctgcggttcaagaagatcaaacctgaagccttcgaagccaacagattctacaccgtgatcaacaaaaagagcggcgagatcgtgcccatggaggtgaacttcaacttcgacgaccccaacctgatcatcctgcctctggcctttggcaagagacagggcagagaattcatctggaacgacctgctgtccctggaaaccggcagcctgaagctggccaacggaagagtgatcgagaagacactgtacaacagaagaacccggcaggatgagcctgccctgttcgtggccctgaccttcgagcggcgggaggtcctggactcctccaatatcaaaccaatgaacctgatcggcgtggcaagaggcgaaaacatccccgccgtgatcgccctgaccgaccccgagggctgcccactgagccggtttaaggatagcctgggaaacccaacccacatcctgagaatcggcgagagctataaggagaagcagcggaccatccaggccaagaaggaggtggagcagcggagagccggcggctacagccggaagtacgccagcaaagccaagaatctggcagacgatatggtgagaaacaccgctagagatctgctgtactacgccgtgacccaggatgccatgctgatcttcgccaacctgagccggggcttcggccggcagggcaagcggaccttcatggccgagagacagtacacacggatggaggactggctgaccgccaagctggcctacgagggcctgagcaagacctacctgtccaagacactggcccagtacacctccaagacatgcagcaactgtgggtttaccatcaccagcgccgactacgacagggtgctggagaagctgaagaagacagcaacaggctggatgaccacaattaacggcaaggagctgaaggtggagggccagattacctactacaacagatacaagagacagaacgtagtcaaggacctgtccgtcgagctggatagactgagcgaagaatctgtgaacaacgacatctcctcctggacaaagggcagaagcggagaagctctgagcctcctgaagaaaagattctcccatagacccgtgcaggagaagttcgtgtgcctgaactgcggcttcgagacacacgcagccgagcaagccgccctgaacatcgccagatcctggctgttcctgcggagccaggagtacaagaaataccagacaaacaagacaaccggcaacaccgataagagagccttcgtcgagacctggcagtccttttaccggaagaagcttaaggaggtgtggaaacctgccgtgcggtctggcggatctggcggaggctccaccagccccaagaaaaagagaaaagtctaagctgccttctgcggggcttgccttctggccatgcccttcttctctcccttgcacctgtacctcttggtctttgaataaagcctgagtaggaaggctagcaaaaaaaaaaaaaaaaaaaaaaaaaaaaaaaaaaaaaaaaaaaaaaaaaaaaaaaaaaaaaaaaaaaaaaaaaaaaaaaa

SEQ ID NO: 9885 - RNA, 8787 nt, synthetic construct
  source 1..8787: mol_type = other RNA
aggaaataagagagaaaagaagagtaagaagaaatataagagccaccatggcccctaagaagaagcgtaaagtgagccggatgaaccacgaccaggagttcgacccccctaaggtgtaccctcccgtccccgccgagaagagaaagcccatccgggtcctgagcctgttcgatggcatcgccaccggtctgctggtgctgaaggacctgggcatccaggtggataggtacattgcctccgaggtgtgcgaggactccatcaccgtgggaatggtgcgtcatcagggcaagatcatgtacgtgggcgacgtgcggagcgtgacacagaagcatatccaggagtggggccctttcgacctggtgatcggcggcagcccttgcaatgacctgagcatcgtgaacccagcccggaagggcctgtacgagggaaccggcagactgttcttcgagttttacagactgctgcacgacgcccggcctaaggaaggcgacgaccggcccttcttttggctgttcgagaatgtggtggccatgggagtcagcgacaagcgggatattagccggttcctggagagcaaccccgtgatgatcgatgccaaggaagtgagcgccgcccaccgggccagatacttctggggcaatctgcctggcatgaacagacccctggccagcaccgtgaacgacaagctggagctgcaggagtgcctggagcacggccggatcgccaagttcagcaaggtgagaaccatcaccacccgaagcaacagcatcaaacaaggcaaggaccagcactttcctgtgttcatgaacgagaaggaggacatcctgtggtgtaccgagatggagagagtgttcgggttcccagtccactacacagatgtcagcaacatgtctagactggccagacagagactgctgggaagaagctggtccgtccctgtgatcagacacctgttcgcccctctgaaggagtacttcgcctgcgtgagcagcggcaacagcaacgccaacagccggggccccagcttctctagcggcctggtgccactgtccctgagagggagccacatgggccccatggagatctacaaaaccgtgagcgcctggaagcggcagcctgtgcgcgtgctgagcctgtttcggaatatcgataaagtcctgaaaagcctgggattcctggagagcggctctggctccggcggtggcaccctgaagtacgtggaggatgtgacaaacgtggtcagacgggatgtggagaagtggggccccttcgatctggtgtacggcagcacccaacccctgggcagctcttgtgaccggtgccctggctggtacatgtttcagttccaccggatcctgcagtacgccctgccgagacaggagtcccagcggccattcttttggattttcatggacaacttgctgctgaccgaggatgaccaggaaactaccactcggttcctgcagaccgaagccgtgaccctgcaggacgtgagaggccgggactaccagaacgccatgcgggtgtggtccaacatccctggactgaaaagcaagcacgcacctctgacccctaaagaagaggagtacctgcaggcccaggtgcggagcagaagcaagctggacgcccctaaggtggatctgctggtgaagaattgcctcctgcccctgagagagtacttcaagtatttcagccagaatagtctgcccctgggaggcagcggcggcggcatggcccacatggccttcagggacgtggccgtggacttcacccaggacgagtggaggctgctgagccccgcccagaggaccctgtacagggaggtgatgctggagaactacagcaacctggtgagcctgggcatcagcttcagcaagcccgagatcatcacccagctggagcagggcaaggagacctggagggaggagaagaagtgcccccccgccacctgccccgaccccgagcccgagctgggcggcccaagcagcggcgcccctcctcccagcggcggcaggcggcccaagcagcggcgcccctcctcccagcggcggcagcccagccggctccccaacctctaccgaggagggcacctctgagtccgccacccccgagagcggccctggcacctccaccgagcccagcgagggcagcgcacccggcagccctgccggcagccccacctccacagaggagggaaccagcaccgagcccagcgaaggcagcgccccaggcaccagcaccgagcctagtgagcaggagattaaacggatcaacaagatcagaagaagacttgtgaaagacagcaacaccaagaaggccggcaagacaggccccatgaaaaccctgctggttagagtgatgacacccgatctgagagagcggctggaaaacctgagaaagaagcctgaaaatatcccccagcccatcagcaatacatctagagccaacctgaataagctgctgaccgattacaccgaaatgaagaaggcgatcctgcatgtgtactgggaagagttccagaaggaccctgtgggcctgatgagccgggtggcccagcctgccagcaagaagatcgatcagaacaagctgaaacctgagatggacgagaagggcaacctgaccaccgccggctttgcctgctctcagtgtggccagcccctgttcgtgtacaagctggagcaggtgtctgagaagggcaaggcttacaccaactacttcggacggtgcaatgtggccgagcacgaaaagctgatcctgctggcccagctgaagcccgagaaggatagcgacgaagccgtgacatatagcctgggaaagtttgggcagagggccctggatttctacagcattcatgtgaccaaggagtccacccaccccgtgaagcccctggcccagatcgccggaaacagatacgcctccggacctgtgggaaaggccctgagcgacgcatgtatgggcacaatcgcctccttcctgtctaagtaccaggacatcatcatcgaacaccagaaggtggtgaagggcaaccagaagagactggagagcctgcgggagctggccggcaaggaaaacctggaataccctagcgtgaccctgccacctcagcctcacaccaaggagggcgttgatgcctacaacgaagtgatcgcccgggtgcgaatgtgggtgaacctgaacctgtggcagaagctgaagctaagcagagatgatgccaagcctctgctgagactgaagggattcccttcctttcctctggtcgagagacaggccaacgaagtggactggtgggacatggtgtgtaacgtgaagaagctgatcaacgagaaaaaggaggatggcaaggtgttttggcagaatctggctggctacaagagacaggaagccctgagaccatacctgagcagcgaggaagatcggaagaagggaaagaaattcgctcggtaccagctgggcgacctgctgctgcacctggaaaagaagcacggcgaggactggggaaaggtgtacgacgaggcctgggagcggattgacaagaaagtggaaggcctgagcaagcacatcaagctggaagaggaacggagaagcgaggacgcccagagcaaggccgccctgaccgactggctgcgggctaaggccagcttcgtgatcgagggcctgaaggaggccgacaaggacgagttctgcagatgcgagctgaagctgcagaagtggtacggggacctgcggggaaagcccttcgccatcgaagccgagaacagcatcctggacatcagcggcttcagcaagcagtacaactgtgccttcatctggcagaaggacggcgtgaagaagctgaacctgtacctgatcatcaactacttcaagggcggcaagctgcggttcaagaagatcaaacctgaagccttcgaagccaacagattctacaccgtgatcaacaaaaagagcggcgagatcgtgcccatggaggtgaacttcaacttcgacgaccccaacctgatcatcctgcctctggcctttggcaagagacagggcagagaattcatctggaacgacctgctgtccctggaaaccggcagcctgaagctggccaacggaagagtgatcgagaagacactgtacaacagaagaacccggcaggatgagcctgccctgttcgtggccctgaccttcgagcggcgggaggtcctggactcctccaatatcaaaccaatgaacctgatcggcgtggcaagaggcgaaaacatccccgccgtgatcgccctgaccgaccccgagggctgcccactgagccggtttaaggatagcctgggaaacccaacccacatcctgagaatcggcgagagctataaggagaagcagcggaccatccaggccaagaaggaggtggagcagcggagagccggcggctacagccggaagtacgccagcaaagccaagaatctggcagacgatatggtgagaaacaccgctagagatctgctgtactacgccgtgacccaggatgccatgctgatcttcgccaacctgagccggggcttcggccggcagggcaagcggaccttcatggccgagagacagtacacacggatggaggactggctgaccgccaagctggcctacgagggcctgagcaagacctacctgtccaagacactggcccagtacacctccaagacatgcagcaactgtgggtttaccatcaccagcgccgactacgacagggtgctggagaagctgaagaagacagcaacaggctggatgaccacaattaacggcaaggagctgaaggtggagggccagattacctactacaacagatacaagagacagaacgtagtcaaggacctgtccgtcgagctggatagactgagcgaagaatctgtgaacaacgacatctcctcctggacaaagggcagaagcggagaagctctgagcctcctgaagaaaagattctcccatagacccgtgcaggagaagttcgtgtgcctgaactgcggcttcgagacacacgcagccgagcaagccgccctgaacatcgccagatcctggctgttcctgcggagccaggagtacaagaaataccagacaaacaagacaaccggcaacaccgataagagagccttcgtcgagacctggcagtccttttaccggaagaagcttaaggaggtgtggaaacctgccgtgcggtctggcggatctggcggaggctccaccagccccaagaaaaagagaaaagtctaagctgccttctgcggggcttgccttctggccatgcccttcttctctcccttgcacctgtacctcttggtctttgaataaagcctgagtaggaaggctagcaaaaaaaaaaaaaaaaaaaaaaaaaaaaaaaaaaaaaaaaaaaaaaaaaaaaaaaaaaaaaaaaaaaaaaaaaaaaaaaagcccagccggctccccaacctctaccgaggagggcacctctgagtccgccacccccgagagcggccctggcacctccaccgagcccagcgagggcagcgcacccggcagccctgccggcagccccacctccacagaggagggaaccagcaccgagcccagcgaaggcagcgccccaggcaccagcaccgagcctagtgagcaggagattaaacggatcaacaagatcagaagaagacttgtgaaagacagcaacaccaagaaggccggcaagacaggccccatgaaaaccctgctggttagagtgatgacacccgatctgagagagcggctggaaaacctgagaaagaagcctgaaaatatcccccagcccatcagcaatacatctagagccaacctgaataagctgctgaccgattacaccgaaatgaagaaggcgatcctgcatgtgtactgggaagagttccagaaggaccctgtgggcctgatgagccgggtggcccagcctgccagcaagaagatcgatcagaacaagctgaaacctgagatggacgagaagggcaacctgaccaccgccggctttgcctgctctcagtgtggccagcccctgttcgtgtacaagctggagcaggtgtctgagaagggcaaggcttacaccaactacttcggacggtgcaatgtggccgagcacgaaaagctgatcctgctggcccagctgaagcccgagaaggatagcgacgaagccgtgacatatagcctgggaaagtttgggcagagggccctggatttctacagcattcatgtgaccaaggagtccacccaccccgtgaagcccctggcccagatcgccggaaacagatacgcctccggacctgtgggaaaggccctgagcgacgcatgtatgggcacaatcgcctccttcctgtctaagtaccaggacatcatcatcgaacaccagaaggtggtgaagggcaaccagaagagactggagagcctgcgggagctggccggcaaggaaaacctggaataccctagcgtgaccctgccacctcagcctcacaccaaggagggcgttgatgcctacaacgaagtgatcgcccgggtgcgaatgtgggtgaacctgaacctgtggcagaagctgaagctaagcagagatgatgccaagcctctgctgagactgaagggattcccttcctttcctctggtcgagagacaggccaacgaagtggactggtgggacatggtgtgtaacgtgaagaagctgatcaacgagaaaaaggaggatggcaaggtgttttggcagaatctggctggctacaagagacaggaagccctgagaccatacctgagcagcgaggaagatcggaagaagggaaagaaattcgctcggtaccagctgggcgacctgctgctgcacctggaaaagaagcacggcgaggactggggaaaggtgtacgacgaggcctgggagcggattgacaagaaagtggaaggcctgagcaagcacatcaagctggaagaggaacggagaagcgaggacgcccagagcaaggccgccctgaccgactggctgcgggctaaggccagcttcgtgatcgagggcctgaaggaggccgacaaggacgagttctgcagatgcgagctgaagctgcagaagtggtacggggacctgcggggaaagcccttcgccatcgaagccgagaacagcatcctggacatcagcggcttcagcaagcagtacaactgtgccttcatctggcagaaggacggcgtgaagaagctgaacctgtacctgatcatcaactacttcaagggcggcaagctgcggttcaagaagatcaaacctgaagccttcgaagccaacagattctacaccgtgatcaacaaaaagagcggcgagatcgtgcccatggaggtgaacttcaacttcgacgaccccaacctgatcatcctgcctctggcctttggcaagagacagggcagagaattcatctggaacgacctgctgtccctggaaaccggcagcctgaagctggccaacggaagagtgatcgagaagacactgtacaacagaagaacccggcaggatgagcctgccctgttcgtggccctgaccttcgagcggcgggaggtcctggactcctccaatatcaaaccaatgaacctgatcggcgtggcaagaggcgaaaacatccccgccgtgatcgccctgaccgaccccgagggctgcccactgagccggtttaaggatagcctgggaaacccaacccacatcctgagaatcggcgagagctataaggagaagcagcggaccatccaggccaagaaggaggtggagcagcggagagccggcggctacagccggaagtacgccagcaaagccaagaatctggcagacgatatggtgagaaacaccgctagagatctgctgtactacgccgtgacccaggatgccatgctgatcttcgccaacctgagccggggcttcggccggcagggcaagcggaccttcatggccgagagacagtacacacggatggaggactggctgaccgccaagctggcctacgagggcctgagcaagacctacctgtccaagacactggcccagtacacctccaagacatgcagcaactgtgggtttaccatcaccagcgccgactacgacagggtgctggagaagctgaagaagacagcaacaggctggatgaccacaattaacggcaaggagctgaaggtggagggccagattacctactacaacagatacaagagacagaacgtagtcaaggacctgtccgtcgagctggatagactgagcgaagaatctgtgaacaacgacatctcctcctggacaaagggcagaagcggagaagctctgagcctcctgaagaaaagattctcccatagacccgtgcaggagaagttcgtgtgcctgaactgcggcttcgagacacacgcagccgagcaagccgccctgaacatcgccagatcctggctgttcctgcggagccaggagtacaagaaataccagacaaacaagacaaccggcaacaccgataagagagccttcgtcgagacctggcagtccttttaccggaagaagcttaaggaggtgtggaaacctgccgtgcggtctggcggatctggcggaggctccaccagccccaagaaaaagagaaaagtctaagctgccttctgcggggcttgccttctggccatgcccttcttctctcccttgcacctgtacctcttggtctttgaataaagcctgagtaggaaggctagcaaaaaaaaaaaaaaaaaaaaaaaaaaaaaaaaaaaaaaaaaaaaaaaaaaaaaaaaaaaaaaaaaaaaaaaaaaaaaaaa

SEQ ID NO: 9886 - RNA, 8787 nt, synthetic construct
  source 1..8787: mol_type = other RNA
aggaaataagagagaaaagaagagtaagaagaaatataagagccaccatggcccctaagaagaagcgtaaagtgagccggatgaaccacgaccaggagttcgacccccctaaggtgtaccctcccgtccccgccgagaagagaaagcccatccgggtcctgagcctgttcgatggcatcgccaccggtctgctggtgctgaaggacctgggcatccaggtggataggtacattgcctccgaggtgtgcgaggactccatcaccgtgggaatggtgcgtcatcagggcaagatcatgtacgtgggcgacgtgcggagcgtgacacagaagcatatccaggagtggggccctttcgacctggtgatcggcggcagcccttgcaatgacctgagcatcgtgaacccagcccggaagggcctgtacgagggaaccggcagactgttcttcgagttttacagactgctgcacgacgcccggcctaaggaaggcgacgaccggcccttcttttggctgttcgagaatgtggtggccatgggagtcagcgacaagcgggatattagccggttcctggagagcaaccccgtgatgatcgatgccaaggaagtgagcgccgcccaccgggccagatacttctggggcaatctgcctggcatgaacagacccctggccagcaccgtgaacgacaagctggagctgcaggagtgcctggagcacggccggatcgccaagttcagcaaggtgagaaccatcaccacccgaagcaacagcatcaaacaaggcaaggaccagcactttcctgtgttcatgaacgagaaggaggacatcctgtggtgtaccgagatggagagagtgttcgggttcccagtccactacacagatgtcagcaacatgtctagactggccagacagagactgctgggaagaagctggtccgtccctgtgatcagacacctgttcgcccctctgaaggagtacttcgcctgcgtgagcagcggcaacagcaacgccaacagccggggccccagcttctctagcggcctggtgccactgtccctgagagggagccacatgggccccatggagatctacaaaaccgtgagcgcctggaagcggcagcctgtgcgcgtgctgagcctgtttcggaatatcgataaagtcctgaaaagcctgggattcctggagagcggctctggctccggcggtggcaccctgaagtacgtggaggatgtgacaaacgtggtcagacgggatgtggagaagtggggccccttcgatctggtgtacggcagcacccaacccctgggcagctcttgtgaccggtgccctggctggtacatgtttcagttccaccggatcctgcagtacgccctgccgagacaggagtcccagcggccattcttttggattttcatggacaacttgctgctgaccgaggatgaccaggaaactaccactcggttcctgcagaccgaagccgtgaccctgcaggacgtgagaggccgggactaccagaacgccatgcgggtgtggtccaacatccctggactgaaaagcaagcacgcacctctgacccctaaagaagaggagtacctgcaggcccaggtgcggagcagaagcaagctggacgcccctaaggtggatctgctggtgaagaattgcctcctgcccctgagagagtacttcaagtatttcagccagaatagtctgcccctgggaggcagcggcggcggccaggccgaggtgaccttcgaggacgtggccgtgctgctgagcagggaggagtggggcaggctgggccccgtgcagaagggcctgtacagggacgtgatgctggagacctacaggaacctggtgagcctgggcgccggccccgccggccccaagcccgaggtgatcacccagctggagaggggcgacgagccctgggtgcccgacgtgcagggcagggagaggcccaacatcgacggcagcgccggcggcccaagcagcggcgcccctcctcccagcggcggcaggcggcccaagcagcggcgcccctcctcccagcggcggcagcccagccggctccccaacctctaccgaggagggcacctctgagtccgccacccccgagagcggccctggcacctccaccgagcccagcgagggcagcgcacccggcagccctgccggcagccccacctccacagaggagggaaccagcaccgagcccagcgaaggcagcgccccaggcaccagcaccgagcctagtgagcaggagattaaacggatcaacaagatcagaagaagacttgtgaaagacagcaacaccaagaaggccggcaagacaggccccatgaaaaccctgctggttagagtgatgacacccgatctgagagagcggctggaaaacctgagaaagaagcctgaaaatatcccccagcccatcagcaatacatctagagccaacctgaataagctgctgaccgattacaccgaaatgaagaaggcgatcctgcatgtgtactgggaagagttccagaaggaccctgtgggcctgatgagccgggtggcccagcctgccagcaagaagatcgatcagaacaagctgaaacctgagatggacgagaagggcaacctgaccaccgccggctttgcctgctctcagtgtggccagcccctgttcgtgtacaagctggagcaggtgtctgagaagggcaaggcttacaccaactacttcggacggtgcaatgtggccgagcacgaaaagctgatcctgctggcccagctgaagcccgagaaggatagcgacgaagccgtgacatatagcctgggaaagtttgggcagagggccctggatttctacagcattcatgtgaccaaggagtccacccaccccgtgaagcccctggcccagatcgccggaaacagatacgcctccggacctgtgggaaaggccctgagcgacgcatgtatgggcacaatcgcctccttcctgtctaagtaccaggacatcatcatcgaacaccagaaggtggtgaagggcaaccagaagagactggagagcctgcgggagctggccggcaaggaaaacctggaataccctagcgtgaccctgccacctcagcctcacaccaaggagggcgttgatgcctacaacgaagtgatcgcccgggtgcgaatgtgggtgaacctgaacctgtggcagaagctgaagctaagcagagatgatgccaagcctctgctgagactgaagggattcccttcctttcctctggtcgagagacaggccaacgaagtggactggtgggacatggtgtgtaacgtgaagaagctgatcaacgagaaaaaggaggatggcaaggtgttttggcagaatctggctggctacaagagacaggaagccctgagaccatacctgagcagcgaggaagatcggaagaagggaaagaaattcgctcggtaccagctgggcgacctgctgctgcacctggaaaagaagcacggcgaggactggggaaaggtgtacgacgaggcctgggagcggattgacaagaaagtggaaggcctgagcaagcacatcaagctggaagaggaacggagaagcgaggacgcccagagcaaggccgccctgaccgactggctgcgggctaaggccagcttcgtgatcgagggcctgaaggaggccgacaaggacgagttctgcagatgcgagctgaagctgcagaagtggtacggggacctgcggggaaagcccttcgccatcgaagccgagaacagcatcctggacatcagcggcttcagcaagcagtacaactgtgccttcatctggcagaaggacggcgtgaagaagctgaacctgtacctgatcatcaactacttcaagggcggcaagctgcggttcaagaagatcaaacctgaagccttcgaagccaacagattctacaccgtgatcaacaaaaagagcggcgagatcgtgcccatggaggtgaacttcaacttcgacgaccccaacctgatcatcctgcctctggcctttggcaagagacagggcagagaattcatctggaacgacctgctgtccctggaaaccggcagcctgaagctggccaacggaagagtgatcgagaagacactgtacaacagaagaacccggcaggatgagcctgccctgttcgtggccctgaccttcgagcggcgggaggtcctggactcctccaatatcaaaccaatgaacctgatcggcgtggcaagaggcgaaaacatccccgccgtgatcgccctgaccgaccccgagggctgcccactgagccggtttaaggatagcctgggaaacccaacccacatcctgagaatcggcgagagctataaggagaagcagcggaccatccaggccaagaaggaggtggagcagcggagagccggcggctacagccggaagtacgccagcaaagccaagaatctggcagacgatatggtgagaaacaccgctagagatctgctgtactacgccgtgacccaggatgccatgctgatcttcgccaacctgagccggggcttcggccggcagggcaagcggaccttcatggccgagagacagtacacacggatggaggactggctgaccgccaagctggcctacgagggcctgagcaagacctacctgtccaagacactggcccagtacacctccaagacatgcagcaactgtgggtttaccatcaccagcgccgactacgacagggtgctggagaagctgaagaagacagcaacaggctggatgaccacaattaacggcaaggagctgaaggtggagggccagattacctactacaacagatacaagagacagaacgtagtcaaggacctgtccgtcgagctggatagactgagcgaagaatctgtgaacaacgacatctcctcctggacaaagggcagaagcggagaagctctgagcctcctgaagaaaagattctcccatagacccgtgcaggagaagttcgtgtgcctgaactgcggcttcgagacacacgcagccgagcaagccgccctgaacatcgccagatcctggctgttcctgcggagccaggagtacaagaaataccagacaaacaagacaaccggcaacaccgataagagagccttcgtcgagacctggcagtccttttaccggaagaagcttaaggaggtgtggaaacctgccgtgcggtctggcggatctggcggaggctccaccagccccaagaaaaagagaaaagtctaagctgccttctgcggggcttgccttctggccatgcccttcttctctcccttgcacctgtacctcttggtctttgaataaagcctgagtaggaaggctagcaaaaaaaaaaaaaaaaaaaaaaaaaaaaaaaaaaaaaaaaaaaaaaaaaaaaaaaaaaaaaaaaaaaaaaaaaaaaaaaagcccagccggctccccaacctctaccgaggagggcacctctgagtccgccacccccgagagcggccctggcacctccaccgagcccagcgagggcagcgcacccggcagccctgccggcagccccacctccacagaggagggaaccagcaccgagcccagcgaaggcagcgccccaggcaccagcaccgagcctagtgagcaggagattaaacggatcaacaagatcagaagaagacttgtgaaagacagcaacaccaagaaggccggcaagacaggccccatgaaaaccctgctggttagagtgatgacacccgatctgagagagcggctggaaaacctgagaaagaagcctgaaaatatcccccagcccatcagcaatacatctagagccaacctgaataagctgctgaccgattacaccgaaatgaagaaggcgatcctgcatgtgtactgggaagagttccagaaggaccctgtgggcctgatgagccgggtggcccagcctgccagcaagaagatcgatcagaacaagctgaaacctgagatggacgagaagggcaacctgaccaccgccggctttgcctgctctcagtgtggccagcccctgttcgtgtacaagctggagcaggtgtctgagaagggcaaggcttacaccaactacttcggacggtgcaatgtggccgagcacgaaaagctgatcctgctggcccagctgaagcccgagaaggatagcgacgaagccgtgacatatagcctgggaaagtttgggcagagggccctggatttctacagcattcatgtgaccaaggagtccacccaccccgtgaagcccctggcccagatcgccggaaacagatacgcctccggacctgtgggaaaggccctgagcgacgcatgtatgggcacaatcgcctccttcctgtctaagtaccaggacatcatcatcgaacaccagaaggtggtgaagggcaaccagaagagactggagagcctgcgggagctggccggcaaggaaaacctggaataccctagcgtgaccctgccacctcagcctcacaccaaggagggcgttgatgcctacaacgaagtgatcgcccgggtgcgaatgtgggtgaacctgaacctgtggcagaagctgaagctaagcagagatgatgccaagcctctgctgagactgaagggattcccttcctttcctctggtcgagagacaggccaacgaagtggactggtgggacatggtgtgtaacgtgaagaagctgatcaacgagaaaaaggaggatggcaaggtgttttggcagaatctggctggctacaagagacaggaagccctgagaccatacctgagcagcgaggaagatcggaagaagggaaagaaattcgctcggtaccagctgggcgacctgctgctgcacctggaaaagaagcacggcgaggactggggaaaggtgtacgacgaggcctgggagcggattgacaagaaagtggaaggcctgagcaagcacatcaagctggaagaggaacggagaagcgaggacgcccagagcaaggccgccctgaccgactggctgcgggctaaggccagcttcgtgatcgagggcctgaaggaggccgacaaggacgagttctgcagatgcgagctgaagctgcagaagtggtacggggacctgcggggaaagcccttcgccatcgaagccgagaacagcatcctggacatcagcggcttcagcaagcagtacaactgtgccttcatctggcagaaggacggcgtgaagaagctgaacctgtacctgatcatcaactacttcaagggcggcaagctgcggttcaagaagatcaaacctgaagccttcgaagccaacagattctacaccgtgatcaacaaaaagagcggcgagatcgtgcccatggaggtgaacttcaacttcgacgaccccaacctgatcatcctgcctctggcctttggcaagagacagggcagagaattcatctggaacgacctgctgtccctggaaaccggcagcctgaagctggccaacggaagagtgatcgagaagacactgtacaacagaagaacccggcaggatgagcctgccctgttcgtggccctgaccttcgagcggcgggaggtcctggactcctccaatatcaaaccaatgaacctgatcggcgtggcaagaggcgaaaacatccccgccgtgatcgccctgaccgaccccgagggctgcccactgagccggtttaaggatagcctgggaaacccaacccacatcctgagaatcggcgagagctataaggagaagcagcggaccatccaggccaagaaggaggtggagcagcggagagccggcggctacagccggaagtacgccagcaaagccaagaatctggcagacgatatggtgagaaacaccgctagagatctgctgtactacgccgtgacccaggatgccatgctgatcttcgccaacctgagccggggcttcggccggcagggcaagcggaccttcatggccgagagacagtacacacggatggaggactggctgaccgccaagctggcctacgagggcctgagcaagacctacctgtccaagacactggcccagtacacctccaagacatgcagcaactgtgggtttaccatcaccagcgccgactacgacagggtgctggagaagctgaagaagacagcaacaggctggatgaccacaattaacggcaaggagctgaaggtggagggccagattacctactacaacagatacaagagacagaacgtagtcaaggacctgtccgtcgagctggatagactgagcgaagaatctgtgaacaacgacatctcctcctggacaaagggcagaagcggagaagctctgagcctcctgaagaaaagattctcccatagacccgtgcaggagaagttcgtgtgcctgaactgcggcttcgagacacacgcagccgagcaagccgccctgaacatcgccagatcctggctgttcctgcggagccaggagtacaagaaataccagacaaacaagacaaccggcaacaccgataagagagccttcgtcgagacctggcagtccttttaccggaagaagcttaaggaggtgtggaaacctgccgtgcggtctggcggatctggcggaggctccaccagccccaagaaaaagagaaaagtctaagctgccttctgcggggcttgccttctggccatgcccttcttctctcccttgcacctgtacctcttggtctttgaataaagcctgagtaggaaggctagcaaaaaaaaaaaaaaaaaaaaaaaaaaaaaaaaaaaaaaaaaaaaaaaaaaaaaaaaaaaaaaaaaaaaaaaaaaaaaaaa

SEQ ID NO: 9887 - RNA, 8787 nt, synthetic construct
  source 1..8787: mol_type = other RNA
aggaaataagagagaaaagaagagtaagaagaaatataagagccaccatggcccctaagaagaagcgtaaagtgagccggatgaaccacgaccaggagttcgacccccctaaggtgtaccctcccgtccccgccgagaagagaaagcccatccgggtcctgagcctgttcgatggcatcgccaccggtctgctggtgctgaaggacctgggcatccaggtggataggtacattgcctccgaggtgtgcgaggactccatcaccgtgggaatggtgcgtcatcagggcaagatcatgtacgtgggcgacgtgcggagcgtgacacagaagcatatccaggagtggggccctttcgacctggtgatcggcggcagcccttgcaatgacctgagcatcgtgaacccagcccggaagggcctgtacgagggaaccggcagactgttcttcgagttttacagactgctgcacgacgcccggcctaaggaaggcgacgaccggcccttcttttggctgttcgagaatgtggtggccatgggagtcagcgacaagcgggatattagccggttcctggagagcaaccccgtgatgatcgatgccaaggaagtgagcgccgcccaccgggccagatacttctggggcaatctgcctggcatgaacagacccctggccagcaccgtgaacgacaagctggagctgcaggagtgcctggagcacggccggatcgccaagttcagcaaggtgagaaccatcaccacccgaagcaacagcatcaaacaaggcaaggaccagcactttcctgtgttcatgaacgagaaggaggacatcctgtggtgtaccgagatggagagagtgttcgggttcccagtccactacacagatgtcagcaacatgtctagactggccagacagagactgctgggaagaagctggtccgtccctgtgatcagacacctgttcgcccctctgaaggagtacttcgcctgcgtgagcagcggcaacagcaacgccaacagccggggccccagcttctctagcggcctggtgccactgtccctgagagggagccacatgggccccatggagatctacaaaaccgtgagcgcctggaagcggcagcctgtgcgcgtgctgagcctgtttcggaatatcgataaagtcctgaaaagcctgggattcctggagagcggctctggctccggcggtggcaccctgaagtacgtggaggatgtgacaaacgtggtcagacgggatgtggagaagtggggccccttcgatctggtgtacggcagcacccaacccctgggcagctcttgtgaccggtgccctggctggtacatgtttcagttccaccggatcctgcagtacgccctgccgagacaggagtcccagcggccattcttttggattttcatggacaacttgctgctgaccgaggatgaccaggaaactaccactcggttcctgcagaccgaagccgtgaccctgcaggacgtgagaggccgggactaccagaacgccatgcgggtgtggtccaacatccctggactgaaaagcaagcacgcacctctgacccctaaagaagaggagtacctgcaggcccaggtgcggagcagaagcaagctggacgcccctaaggtggatctgctggtgaagaattgcctcctgcccctgagagagtacttcaagtatttcagccagaatagtctgcccctgggaggcagcggcggcggcctgagggacctggtgaccttcgaggacgtggccgtggacttcacccaggaggagtgggccctgctggacgccagccagaggagcctgtacagggaggtgatgctggagaactgcaggaacctggccagcctgggctgccacgtggacaagcccagcctgatcagccagctggagcaggaggaccaggccatgaccgaggagaggggcaacctgcccggcacctgccccgacctggagaccgtgggcggcccaagcagcggcgcccctcctcccagcggcggcaggcggcccaagcagcggcgcccctcctcccagcggcggcagcccagccggctccccaacctctaccgaggagggcacctctgagtccgccacccccgagagcggccctggcacctccaccgagcccagcgagggcagcgcacccggcagccctgccggcagccccacctccacagaggagggaaccagcaccgagcccagcgaaggcagcgccccaggcaccagcaccgagcctagtgagcaggagattaaacggatcaacaagatcagaagaagacttgtgaaagacagcaacaccaagaaggccggcaagacaggccccatgaaaaccctgctggttagagtgatgacacccgatctgagagagcggctggaaaacctgagaaagaagcctgaaaatatcccccagcccatcagcaatacatctagagccaacctgaataagctgctgaccgattacaccgaaatgaagaaggcgatcctgcatgtgtactgggaagagttccagaaggaccctgtgggcctgatgagccgggtggcccagcctgccagcaagaagatcgatcagaacaagctgaaacctgagatggacgagaagggcaacctgaccaccgccggctttgcctgctctcagtgtggccagcccctgttcgtgtacaagctggagcaggtgtctgagaagggcaaggcttacaccaactacttcggacggtgcaatgtggccgagcacgaaaagctgatcctgctggcccagctgaagcccgagaaggatagcgacgaagccgtgacatatagcctgggaaagtttgggcagagggccctggatttctacagcattcatgtgaccaaggagtccacccaccccgtgaagcccctggcccagatcgccggaaacagatacgcctccggacctgtgggaaaggccctgagcgacgcatgtatgggcacaatcgcctccttcctgtctaagtaccaggacatcatcatcgaacaccagaaggtggtgaagggcaaccagaagagactggagagcctgcgggagctggccggcaaggaaaacctggaataccctagcgtgaccctgccacctcagcctcacaccaaggagggcgttgatgcctacaacgaagtgatcgcccgggtgcgaatgtgggtgaacctgaacctgtggcagaagctgaagctaagcagagatgatgccaagcctctgctgagactgaagggattcccttcctttcctctggtcgagagacaggccaacgaagtggactggtgggacatggtgtgtaacgtgaagaagctgatcaacgagaaaaaggaggatggcaaggtgttttggcagaatctggctggctacaagagacaggaagccctgagaccatacctgagcagcgaggaagatcggaagaagggaaagaaattcgctcggtaccagctgggcgacctgctgctgcacctggaaaagaagcacggcgaggactggggaaaggtgtacgacgaggcctgggagcggattgacaagaaagtggaaggcctgagcaagcacatcaagctggaagaggaacggagaagcgaggacgcccagagcaaggccgccctgaccgactggctgcgggctaaggccagcttcgtgatcgagggcctgaaggaggccgacaaggacgagttctgcagatgcgagctgaagctgcagaagtggtacggggacctgcggggaaagcccttcgccatcgaagccgagaacagcatcctggacatcagcggcttcagcaagcagtacaactgtgccttcatctggcagaaggacggcgtgaagaagctgaacctgtacctgatcatcaactacttcaagggcggcaagctgcggttcaagaagatcaaacctgaagccttcgaagccaacagattctacaccgtgatcaacaaaaagagcggcgagatcgtgcccatggaggtgaacttcaacttcgacgaccccaacctgatcatcctgcctctggcctttggcaagagacagggcagagaattcatctggaacgacctgctgtccctggaaaccggcagcctgaagctggccaacggaagagtgatcgagaagacactgtacaacagaagaacccggcaggatgagcctgccctgttcgtggccctgaccttcgagcggcgggaggtcctggactcctccaatatcaaaccaatgaacctgatcggcgtggcaagaggcgaaaacatccccgccgtgatcgccctgaccgaccccgagggctgcccactgagccggtttaaggatagcctgggaaacccaacccacatcctgagaatcggcgagagctataaggagaagcagcggaccatccaggccaagaaggaggtggagcagcggagagccggcggctacagccggaagtacgccagcaaagccaagaatctggcagacgatatggtgagaaacaccgctagagatctgctgtactacgccgtgacccaggatgccatgctgatcttcgccaacctgagccggggcttcggccggcagggcaagcggaccttcatggccgagagacagtacacacggatggaggactggctgaccgccaagctggcctacgagggcctgagcaagacctacctgtccaagacactggcccagtacacctccaagacatgcagcaactgtgggtttaccatcaccagcgccgactacgacagggtgctggagaagctgaagaagacagcaacaggctggatgaccacaattaacggcaaggagctgaaggtggagggccagattacctactacaacagatacaagagacagaacgtagtcaaggacctgtccgtcgagctggatagactgagcgaagaatctgtgaacaacgacatctcctcctggacaaagggcagaagcggagaagctctgagcctcctgaagaaaagattctcccatagacccgtgcaggagaagttcgtgtgcctgaactgcggcttcgagacacacgcagccgagcaagccgccctgaacatcgccagatcctggctgttcctgcggagccaggagtacaagaaataccagacaaacaagacaaccggcaacaccgataagagagccttcgtcgagacctggcagtccttttaccggaagaagcttaaggaggtgtggaaacctgccgtgcggtctggcggatctggcggaggctccaccagccccaagaaaaagagaaaagtctaagctgccttctgcggggcttgccttctggccatgcccttcttctctcccttgcacctgtacctcttggtctttgaataaagcctgagtaggaaggctagcaaaaaaaaaaaaaaaaaaaaaaaaaaaaaaaaaaaaaaaaaaaaaaaaaaaaaaaaaaaaaaaaaaaaaaaaaaaaaaaagcccagccggctccccaacctctaccgaggagggcacctctgagtccgccacccccgagagcggccctggcacctccaccgagcccagcgagggcagcgcacccggcagccctgccggcagccccacctccacagaggagggaaccagcaccgagcccagcgaaggcagcgccccaggcaccagcaccgagcctagtgagcaggagattaaacggatcaacaagatcagaagaagacttgtgaaagacagcaacaccaagaaggccggcaagacaggccccatgaaaaccctgctggttagagtgatgacacccgatctgagagagcggctggaaaacctgagaaagaagcctgaaaatatcccccagcccatcagcaatacatctagagccaacctgaataagctgctgaccgattacaccgaaatgaagaaggcgatcctgcatgtgtactgggaagagttccagaaggaccctgtgggcctgatgagccgggtggcccagcctgccagcaagaagatcgatcagaacaagctgaaacctgagatggacgagaagggcaacctgaccaccgccggctttgcctgctctcagtgtggccagcccctgttcgtgtacaagctggagcaggtgtctgagaagggcaaggcttacaccaactacttcggacggtgcaatgtggccgagcacgaaaagctgatcctgctggcccagctgaagcccgagaaggatagcgacgaagccgtgacatatagcctgggaaagtttgggcagagggccctggatttctacagcattcatgtgaccaaggagtccacccaccccgtgaagcccctggcccagatcgccggaaacagatacgcctccggacctgtgggaaaggccctgagcgacgcatgtatgggcacaatcgcctccttcctgtctaagtaccaggacatcatcatcgaacaccagaaggtggtgaagggcaaccagaagagactggagagcctgcgggagctggccggcaaggaaaacctggaataccctagcgtgaccctgccacctcagcctcacaccaaggagggcgttgatgcctacaacgaagtgatcgcccgggtgcgaatgtgggtgaacctgaacctgtggcagaagctgaagctaagcagagatgatgccaagcctctgctgagactgaagggattcccttcctttcctctggtcgagagacaggccaacgaagtggactggtgggacatggtgtgtaacgtgaagaagctgatcaacgagaaaaaggaggatggcaaggtgttttggcagaatctggctggctacaagagacaggaagccctgagaccatacctgagcagcgaggaagatcggaagaagggaaagaaattcgctcggtaccagctgggcgacctgctgctgcacctggaaaagaagcacggcgaggactggggaaaggtgtacgacgaggcctgggagcggattgacaagaaagtggaaggcctgagcaagcacatcaagctggaagaggaacggagaagcgaggacgcccagagcaaggccgccctgaccgactggctgcgggctaaggccagcttcgtgatcgagggcctgaaggaggccgacaaggacgagttctgcagatgcgagctgaagctgcagaagtggtacggggacctgcggggaaagcccttcgccatcgaagccgagaacagcatcctggacatcagcggcttcagcaagcagtacaactgtgccttcatctggcagaaggacggcgtgaagaagctgaacctgtacctgatcatcaactacttcaagggcggcaagctgcggttcaagaagatcaaacctgaagccttcgaagccaacagattctacaccgtgatcaacaaaaagagcggcgagatcgtgcccatggaggtgaacttcaacttcgacgaccccaacctgatcatcctgcctctggcctttggcaagagacagggcagagaattcatctggaacgacctgctgtccctggaaaccggcagcctgaagctggccaacggaagagtgatcgagaagacactgtacaacagaagaacccggcaggatgagcctgccctgttcgtggccctgaccttcgagcggcgggaggtcctggactcctccaatatcaaaccaatgaacctgatcggcgtggcaagaggcgaaaacatccccgccgtgatcgccctgaccgaccccgagggctgcccactgagccggtttaaggatagcctgggaaacccaacccacatcctgagaatcggcgagagctataaggagaagcagcggaccatccaggccaagaaggaggtggagcagcggagagccggcggctacagccggaagtacgccagcaaagccaagaatctggcagacgatatggtgagaaacaccgctagagatctgctgtactacgccgtgacccaggatgccatgctgatcttcgccaacctgagccggggcttcggccggcagggcaagcggaccttcatggccgagagacagtacacacggatggaggactggctgaccgccaagctggcctacgagggcctgagcaagacctacctgtccaagacactggcccagtacacctccaagacatgcagcaactgtgggtttaccatcaccagcgccgactacgacagggtgctggagaagctgaagaagacagcaacaggctggatgaccacaattaacggcaaggagctgaaggtggagggccagattacctactacaacagatacaagagacagaacgtagtcaaggacctgtccgtcgagctggatagactgagcgaagaatctgtgaacaacgacatctcctcctggacaaagggcagaagcggagaagctctgagcctcctgaagaaaagattctcccatagacccgtgcaggagaagttcgtgtgcctgaactgcggcttcgagacacacgcagccgagcaagccgccctgaacatcgccagatcctggctgttcctgcggagccaggagtacaagaaataccagacaaacaagacaaccggcaacaccgataagagagccttcgtcgagacctggcagtccttttaccggaagaagcttaaggaggtgtggaaacctgccgtgcggtctggcggatctggcggaggctccaccagccccaagaaaaagagaaaagtctaagctgccttctgcggggcttgccttctggccatgcccttcttctctcccttgcacctgtacctcttggtctttgaataaagcctgagtaggaaggctagcaaaaaaaaaaaaaaaaaaaaaaaaaaaaaaaaaaaaaaaaaaaaaaaaaaaaaaaaaaaaaaaaaaaaaaaaaaaaaaaa

SEQ ID NO: 9888 - RNA, 8787 nt, synthetic construct
  source 1..8787: mol_type = other RNA
aggaaataagagagaaaagaagagtaagaagaaatataagagccaccatggcccctaagaagaagcgtaaagtgagccggatgaaccacgaccaggagttcgacccccctaaggtgtaccctcccgtccccgccgagaagagaaagcccatccgggtcctgagcctgttcgatggcatcgccaccggtctgctggtgctgaaggacctgggcatccaggtggataggtacattgcctccgaggtgtgcgaggactccatcaccgtgggaatggtgcgtcatcagggcaagatcatgtacgtgggcgacgtgcggagcgtgacacagaagcatatccaggagtggggccctttcgacctggtgatcggcggcagcccttgcaatgacctgagcatcgtgaacccagcccggaagggcctgtacgagggaaccggcagactgttcttcgagttttacagactgctgcacgacgcccggcctaaggaaggcgacgaccggcccttcttttggctgttcgagaatgtggtggccatgggagtcagcgacaagcgggatattagccggttcctggagagcaaccccgtgatgatcgatgccaaggaagtgagcgccgcccaccgggccagatacttctggggcaatctgcctggcatgaacagacccctggccagcaccgtgaacgacaagctggagctgcaggagtgcctggagcacggccggatcgccaagttcagcaaggtgagaaccatcaccacccgaagcaacagcatcaaacaaggcaaggaccagcactttcctgtgttcatgaacgagaaggaggacatcctgtggtgtaccgagatggagagagtgttcgggttcccagtccactacacagatgtcagcaacatgtctagactggccagacagagactgctgggaagaagctggtccgtccctgtgatcagacacctgttcgcccctctgaaggagtacttcgcctgcgtgagcagcggcaacagcaacgccaacagccggggccccagcttctctagcggcctggtgccactgtccctgagagggagccacatgggccccatggagatctacaaaaccgtgagcgcctggaagcggcagcctgtgcgcgtgctgagcctgtttcggaatatcgataaagtcctgaaaagcctgggattcctggagagcggctctggctccggcggtggcaccctgaagtacgtggaggatgtgacaaacgtggtcagacgggatgtggagaagtggggccccttcgatctggtgtacggcagcacccaacccctgggcagctcttgtgaccggtgccctggctggtacatgtttcagttccaccggatcctgcagtacgccctgccgagacaggagtcccagcggccattcttttggattttcatggacaacttgctgctgaccgaggatgaccaggaaactaccactcggttcctgcagaccgaagccgtgaccctgcaggacgtgagaggccgggactaccagaacgccatgcgggtgtggtccaacatccctggactgaaaagcaagcacgcacctctgacccctaaagaagaggagtacctgcaggcccaggtgcggagcagaagcaagctggacgcccctaaggtggatctgctggtgaagaattgcctcctgcccctgagagagtacttcaagtatttcagccagaatagtctgcccctgggaggcagcggcggcggcgcccagaggcccgtgaccttcgaggacgtggccgtgtacttcagcgaggcccagggcaccctgctggaccccgaccagaaggccctgtacagggaggtgatgatggagaactacgagaacgtggccagcctgggcagcctgacccccaagcccgagctgatcatcaggctggagaggggcgaggagccctgggtgagcgaccccggcgacgcccccgtgagcggcgacttcaggaagagccacggcggcccaagcagcggcgcccctcctcccagcggcggcaggcggcccaagcagcggcgcccctcctcccagcggcggcagcccagccggctccccaacctctaccgaggagggcacctctgagtccgccacccccgagagcggccctggcacctccaccgagcccagcgagggcagcgcacccggcagccctgccggcagccccacctccacagaggagggaaccagcaccgagcccagcgaaggcagcgccccaggcaccagcaccgagcctagtgagcaggagattaaacggatcaacaagatcagaagaagacttgtgaaagacagcaacaccaagaaggccggcaagacaggccccatgaaaaccctgctggttagagtgatgacacccgatctgagagagcggctggaaaacctgagaaagaagcctgaaaatatcccccagcccatcagcaatacatctagagccaacctgaataagctgctgaccgattacaccgaaatgaagaaggcgatcctgcatgtgtactgggaagagttccagaaggaccctgtgggcctgatgagccgggtggcccagcctgccagcaagaagatcgatcagaacaagctgaaacctgagatggacgagaagggcaacctgaccaccgccggctttgcctgctctcagtgtggccagcccctgttcgtgtacaagctggagcaggtgtctgagaagggcaaggcttacaccaactacttcggacggtgcaatgtggccgagcacgaaaagctgatcctgctggcccagctgaagcccgagaaggatagcgacgaagccgtgacatatagcctgggaaagtttgggcagagggccctggatttctacagcattcatgtgaccaaggagtccacccaccccgtgaagcccctggcccagatcgccggaaacagatacgcctccggacctgtgggaaaggccctgagcgacgcatgtatgggcacaatcgcctccttcctgtctaagtaccaggacatcatcatcgaacaccagaaggtggtgaagggcaaccagaagagactggagagcctgcgggagctggccggcaaggaaaacctggaataccctagcgtgaccctgccacctcagcctcacaccaaggagggcgttgatgcctacaacgaagtgatcgcccgggtgcgaatgtgggtgaacctgaacctgtggcagaagctgaagctaagcagagatgatgccaagcctctgctgagactgaagggattcccttcctttcctctggtcgagagacaggccaacgaagtggactggtgggacatggtgtgtaacgtgaagaagctgatcaacgagaaaaaggaggatggcaaggtgttttggcagaatctggctggctacaagagacaggaagccctgagaccatacctgagcagcgaggaagatcggaagaagggaaagaaattcgctcggtaccagctgggcgacctgctgctgcacctggaaaagaagcacggcgaggactggggaaaggtgtacgacgaggcctgggagcggattgacaagaaagtggaaggcctgagcaagcacatcaagctggaagaggaacggagaagcgaggacgcccagagcaaggccgccctgaccgactggctgcgggctaaggccagcttcgtgatcgagggcctgaaggaggccgacaaggacgagttctgcagatgcgagctgaagctgcagaagtggtacggggacctgcggggaaagcccttcgccatcgaagccgagaacagcatcctggacatcagcggcttcagcaagcagtacaactgtgccttcatctggcagaaggacggcgtgaagaagctgaacctgtacctgatcatcaactacttcaagggcggcaagctgcggttcaagaagatcaaacctgaagccttcgaagccaacagattctacaccgtgatcaacaaaaagagcggcgagatcgtgcccatggaggtgaacttcaacttcgacgaccccaacctgatcatcctgcctctggcctttggcaagagacagggcagagaattcatctggaacgacctgctgtccctggaaaccggcagcctgaagctggccaacggaagagtgatcgagaagacactgtacaacagaagaacccggcaggatgagcctgccctgttcgtggccctgaccttcgagcggcgggaggtcctggactcctccaatatcaaaccaatgaacctgatcggcgtggcaagaggcgaaaacatccccgccgtgatcgccctgaccgaccccgagggctgcccactgagccggtttaaggatagcctgggaaacccaacccacatcctgagaatcggcgagagctataaggagaagcagcggaccatccaggccaagaaggaggtggagcagcggagagccggcggctacagccggaagtacgccagcaaagccaagaatctggcagacgatatggtgagaaacaccgctagagatctgctgtactacgccgtgacccaggatgccatgctgatcttcgccaacctgagccggggcttcggccggcagggcaagcggaccttcatggccgagagacagtacacacggatggaggactggctgaccgccaagctggcctacgagggcctgagcaagacctacctgtccaagacactggcccagtacacctccaagacatgcagcaactgtgggtttaccatcaccagcgccgactacgacagggtgctggagaagctgaagaagacagcaacaggctggatgaccacaattaacggcaaggagctgaaggtggagggccagattacctactacaacagatacaagagacagaacgtagtcaaggacctgtccgtcgagctggatagactgagcgaagaatctgtgaacaacgacatctcctcctggacaaagggcagaagcggagaagctctgagcctcctgaagaaaagattctcccatagacccgtgcaggagaagttcgtgtgcctgaactgcggcttcgagacacacgcagccgagcaagccgccctgaacatcgccagatcctggctgttcctgcggagccaggagtacaagaaataccagacaaacaagacaaccggcaacaccgataagagagccttcgtcgagacctggcagtccttttaccggaagaagcttaaggaggtgtggaaacctgccgtgcggtctggcggatctggcggaggctccaccagccccaagaaaaagagaaaagtctaagctgccttctgcggggcttgccttctggccatgcccttcttctctcccttgcacctgtacctcttggtctttgaataaagcctgagtaggaaggctagcaaaaaaaaaaaaaaaaaaaaaaaaaaaaaaaaaaaaaaaaaaaaaaaaaaaaaaaaaaaaaaaaaaaaaaaaaaaaaaaagcccagccggctccccaacctctaccgaggagggcacctctgagtccgccacccccgagagcggccctggcacctccaccgagcccagcgagggcagcgcacccggcagccctgccggcagccccacctccacagaggagggaaccagcaccgagcccagcgaaggcagcgccccaggcaccagcaccgagcctagtgagcaggagattaaacggatcaacaagatcagaagaagacttgtgaaagacagcaacaccaagaaggccggcaagacaggccccatgaaaaccctgctggttagagtgatgacacccgatctgagagagcggctggaaaacctgagaaagaagcctgaaaatatcccccagcccatcagcaatacatctagagccaacctgaataagctgctgaccgattacaccgaaatgaagaaggcgatcctgcatgtgtactgggaagagttccagaaggaccctgtgggcctgatgagccgggtggcccagcctgccagcaagaagatcgatcagaacaagctgaaacctgagatggacgagaagggcaacctgaccaccgccggctttgcctgctctcagtgtggccagcccctgttcgtgtacaagctggagcaggtgtctgagaagggcaaggcttacaccaactacttcggacggtgcaatgtggccgagcacgaaaagctgatcctgctggcccagctgaagcccgagaaggatagcgacgaagccgtgacatatagcctgggaaagtttgggcagagggccctggatttctacagcattcatgtgaccaaggagtccacccaccccgtgaagcccctggcccagatcgccggaaacagatacgcctccggacctgtgggaaaggccctgagcgacgcatgtatgggcacaatcgcctccttcctgtctaagtaccaggacatcatcatcgaacaccagaaggtggtgaagggcaaccagaagagactggagagcctgcgggagctggccggcaaggaaaacctggaataccctagcgtgaccctgccacctcagcctcacaccaaggagggcgttgatgcctacaacgaagtgatcgcccgggtgcgaatgtgggtgaacctgaacctgtggcagaagctgaagctaagcagagatgatgccaagcctctgctgagactgaagggattcccttcctttcctctggtcgagagacaggccaacgaagtggactggtgggacatggtgtgtaacgtgaagaagctgatcaacgagaaaaaggaggatggcaaggtgttttggcagaatctggctggctacaagagacaggaagccctgagaccatacctgagcagcgaggaagatcggaagaagggaaagaaattcgctcggtaccagctgggcgacctgctgctgcacctggaaaagaagcacggcgaggactggggaaaggtgtacgacgaggcctgggagcggattgacaagaaagtggaaggcctgagcaagcacatcaagctggaagaggaacggagaagcgaggacgcccagagcaaggccgccctgaccgactggctgcgggctaaggccagcttcgtgatcgagggcctgaaggaggccgacaaggacgagttctgcagatgcgagctgaagctgcagaagtggtacggggacctgcggggaaagcccttcgccatcgaagccgagaacagcatcctggacatcagcggcttcagcaagcagtacaactgtgccttcatctggcagaaggacggcgtgaagaagctgaacctgtacctgatcatcaactacttcaagggcggcaagctgcggttcaagaagatcaaacctgaagccttcgaagccaacagattctacaccgtgatcaacaaaaagagcggcgagatcgtgcccatggaggtgaacttcaacttcgacgaccccaacctgatcatcctgcctctggcctttggcaagagacagggcagagaattcatctggaacgacctgctgtccctggaaaccggcagcctgaagctggccaacggaagagtgatcgagaagacactgtacaacagaagaacccggcaggatgagcctgccctgttcgtggccctgaccttcgagcggcgggaggtcctggactcctccaatatcaaaccaatgaacctgatcggcgtggcaagaggcgaaaacatccccgccgtgatcgccctgaccgaccccgagggctgcccactgagccggtttaaggatagcctgggaaacccaacccacatcctgagaatcggcgagagctataaggagaagcagcggaccatccaggccaagaaggaggtggagcagcggagagccggcggctacagccggaagtacgccagcaaagccaagaatctggcagacgatatggtgagaaacaccgctagagatctgctgtactacgccgtgacccaggatgccatgctgatcttcgccaacctgagccggggcttcggccggcagggcaagcggaccttcatggccgagagacagtacacacggatggaggactggctgaccgccaagctggcctacgagggcctgagcaagacctacctgtccaagacactggcccagtacacctccaagacatgcagcaactgtgggtttaccatcaccagcgccgactacgacagggtgctggagaagctgaagaagacagcaacaggctggatgaccacaattaacggcaaggagctgaaggtggagggccagattacctactacaacagatacaagagacagaacgtagtcaaggacctgtccgtcgagctggatagactgagcgaagaatctgtgaacaacgacatctcctcctggacaaagggcagaagcggagaagctctgagcctcctgaagaaaagattctcccatagacccgtgcaggagaagttcgtgtgcctgaactgcggcttcgagacacacgcagccgagcaagccgccctgaacatcgccagatcctggctgttcctgcggagccaggagtacaagaaataccagacaaacaagacaaccggcaacaccgataagagagccttcgtcgagacctggcagtccttttaccggaagaagcttaaggaggtgtggaaacctgccgtgcggtctggcggatctggcggaggctccaccagccccaagaaaaagagaaaagtctaagctgccttctgcggggcttgccttctggccatgcccttcttctctcccttgcacctgtacctcttggtctttgaataaagcctgagtaggaaggctagcaaaaaaaaaaaaaaaaaaaaaaaaaaaaaaaaaaaaaaaaaaaaaaaaaaaaaaaaaaaaaaaaaaaaaaaaaaaaaaaa

SEQ ID NO: 9889 - RNA, 8787 nt, synthetic construct
  source 1..8787: mol_type = other RNA
aggaaataagagagaaaagaagagtaagaagaaatataagagccaccatggcccctaagaagaagcgtaaagtgagccggatgaaccacgaccaggagttcgacccccctaaggtgtaccctcccgtccccgccgagaagagaaagcccatccgggtcctgagcctgttcgatggcatcgccaccggtctgctggtgctgaaggacctgggcatccaggtggataggtacattgcctccgaggtgtgcgaggactccatcaccgtgggaatggtgcgtcatcagggcaagatcatgtacgtgggcgacgtgcggagcgtgacacagaagcatatccaggagtggggccctttcgacctggtgatcggcggcagcccttgcaatgacctgagcatcgtgaacccagcccggaagggcctgtacgagggaaccggcagactgttcttcgagttttacagactgctgcacgacgcccggcctaaggaaggcgacgaccggcccttcttttggctgttcgagaatgtggtggccatgggagtcagcgacaagcgggatattagccggttcctggagagcaaccccgtgatgatcgatgccaaggaagtgagcgccgcccaccgggccagatacttctggggcaatctgcctggcatgaacagacccctggccagcaccgtgaacgacaagctggagctgcaggagtgcctggagcacggccggatcgccaagttcagcaaggtgagaaccatcaccacccgaagcaacagcatcaaacaaggcaaggaccagcactttcctgtgttcatgaacgagaaggaggacatcctgtggtgtaccgagatggagagagtgttcgggttcccagtccactacacagatgtcagcaacatgtctagactggccagacagagactgctgggaagaagctggtccgtccctgtgatcagacacctgttcgcccctctgaaggagtacttcgcctgcgtgagcagcggcaacagcaacgccaacagccggggccccagcttctctagcggcctggtgccactgtccctgagagggagccacatgggccccatggagatctacaaaaccgtgagcgcctggaagcggcagcctgtgcgcgtgctgagcctgtttcggaatatcgataaagtcctgaaaagcctgggattcctggagagcggctctggctccggcggtggcaccctgaagtacgtggaggatgtgacaaacgtggtcagacgggatgtggagaagtggggccccttcgatctggtgtacggcagcacccaacccctgggcagctcttgtgaccggtgccctggctggtacatgtttcagttccaccggatcctgcagtacgccctgccgagacaggagtcccagcggccattcttttggattttcatggacaacttgctgctgaccgaggatgaccaggaaactaccactcggttcctgcagaccgaagccgtgaccctgcaggacgtgagaggccgggactaccagaacgccatgcgggtgtggtccaacatccctggactgaaaagcaagcacgcacctctgacccctaaagaagaggagtacctgcaggcccaggtgcggagcagaagcaagctggacgcccctaaggtggatctgctggtgaagaattgcctcctgcccctgagagagtacttcaagtatttcagccagaatagtctgcccctgggaggcagcggcggcggcgcccaggtgcccgtgaccttcgaggaggtggccgtgtacttcaccgccggccagggcgccctgctgggccccaaccagagggccctgtacagggacgtgatgcaggagaactacgagaccgtggccagcctgggcttcagcatccccaagcccgacctgatcacccagctggagaggggcgaggagccctgggtgcccgacctgcagcccagcaaggagatggagttcctgaggggcacctgcggcggcccaagcagcggcgcccctcctcccagcggcggcaggcggcccaagcagcggcgcccctcctcccagcggcggcagcccagccggctccccaacctctaccgaggagggcacctctgagtccgccacccccgagagcggccctggcacctccaccgagcccagcgagggcagcgcacccggcagccctgccggcagccccacctccacagaggagggaaccagcaccgagcccagcgaaggcagcgccccaggcaccagcaccgagcctagtgagcaggagattaaacggatcaacaagatcagaagaagacttgtgaaagacagcaacaccaagaaggccggcaagacaggccccatgaaaaccctgctggttagagtgatgacacccgatctgagagagcggctggaaaacctgagaaagaagcctgaaaatatcccccagcccatcagcaatacatctagagccaacctgaataagctgctgaccgattacaccgaaatgaagaaggcgatcctgcatgtgtactgggaagagttccagaaggaccctgtgggcctgatgagccgggtggcccagcctgccagcaagaagatcgatcagaacaagctgaaacctgagatggacgagaagggcaacctgaccaccgccggctttgcctgctctcagtgtggccagcccctgttcgtgtacaagctggagcaggtgtctgagaagggcaaggcttacaccaactacttcggacggtgcaatgtggccgagcacgaaaagctgatcctgctggcccagctgaagcccgagaaggatagcgacgaagccgtgacatatagcctgggaaagtttgggcagagggccctggatttctacagcattcatgtgaccaaggagtccacccaccccgtgaagcccctggcccagatcgccggaaacagatacgcctccggacctgtgggaaaggccctgagcgacgcatgtatgggcacaatcgcctccttcctgtctaagtaccaggacatcatcatcgaacaccagaaggtggtgaagggcaaccagaagagactggagagcctgcgggagctggccggcaaggaaaacctggaataccctagcgtgaccctgccacctcagcctcacaccaaggagggcgttgatgcctacaacgaagtgatcgcccgggtgcgaatgtgggtgaacctgaacctgtggcagaagctgaagctaagcagagatgatgccaagcctctgctgagactgaagggattcccttcctttcctctggtcgagagacaggccaacgaagtggactggtgggacatggtgtgtaacgtgaagaagctgatcaacgagaaaaaggaggatggcaaggtgttttggcagaatctggctggctacaagagacaggaagccctgagaccatacctgagcagcgaggaagatcggaagaagggaaagaaattcgctcggtaccagctgggcgacctgctgctgcacctggaaaagaagcacggcgaggactggggaaaggtgtacgacgaggcctgggagcggattgacaagaaagtggaaggcctgagcaagcacatcaagctggaagaggaacggagaagcgaggacgcccagagcaaggccgccctgaccgactggctgcgggctaaggccagcttcgtgatcgagggcctgaaggaggccgacaaggacgagttctgcagatgcgagctgaagctgcagaagtggtacggggacctgcggggaaagcccttcgccatcgaagccgagaacagcatcctggacatcagcggcttcagcaagcagtacaactgtgccttcatctggcagaaggacggcgtgaagaagctgaacctgtacctgatcatcaactacttcaagggcggcaagctgcggttcaagaagatcaaacctgaagccttcgaagccaacagattctacaccgtgatcaacaaaaagagcggcgagatcgtgcccatggaggtgaacttcaacttcgacgaccccaacctgatcatcctgcctctggcctttggcaagagacagggcagagaattcatctggaacgacctgctgtccctggaaaccggcagcctgaagctggccaacggaagagtgatcgagaagacactgtacaacagaagaacccggcaggatgagcctgccctgttcgtggccctgaccttcgagcggcgggaggtcctggactcctccaatatcaaaccaatgaacctgatcggcgtggcaagaggcgaaaacatccccgccgtgatcgccctgaccgaccccgagggctgcccactgagccggtttaaggatagcctgggaaacccaacccacatcctgagaatcggcgagagctataaggagaagcagcggaccatccaggccaagaaggaggtggagcagcggagagccggcggctacagccggaagtacgccagcaaagccaagaatctggcagacgatatggtgagaaacaccgctagagatctgctgtactacgccgtgacccaggatgccatgctgatcttcgccaacctgagccggggcttcggccggcagggcaagcggaccttcatggccgagagacagtacacacggatggaggactggctgaccgccaagctggcctacgagggcctgagcaagacctacctgtccaagacactggcccagtacacctccaagacatgcagcaactgtgggtttaccatcaccagcgccgactacgacagggtgctggagaagctgaagaagacagcaacaggctggatgaccacaattaacggcaaggagctgaaggtggagggccagattacctactacaacagatacaagagacagaacgtagtcaaggacctgtccgtcgagctggatagactgagcgaagaatctgtgaacaacgacatctcctcctggacaaagggcagaagcggagaagctctgagcctcctgaagaaaagattctcccatagacccgtgcaggagaagttcgtgtgcctgaactgcggcttcgagacacacgcagccgagcaagccgccctgaacatcgccagatcctggctgttcctgcggagccaggagtacaagaaataccagacaaacaagacaaccggcaacaccgataagagagccttcgtcgagacctggcagtccttttaccggaagaagcttaaggaggtgtggaaacctgccgtgcggtctggcggatctggcggaggctccaccagccccaagaaaaagagaaaagtctaagctgccttctgcggggcttgccttctggccatgcccttcttctctcccttgcacctgtacctcttggtctttgaataaagcctgagtaggaaggctagcaaaaaaaaaaaaaaaaaaaaaaaaaaaaaaaaaaaaaaaaaaaaaaaaaaaaaaaaaaaaaaaaaaaaaaaaaaaaaaaagcccagccggctccccaacctctaccgaggagggcacctctgagtccgccacccccgagagcggccctggcacctccaccgagcccagcgagggcagcgcacccggcagccctgccggcagccccacctccacagaggagggaaccagcaccgagcccagcgaaggcagcgccccaggcaccagcaccgagcctagtgagcaggagattaaacggatcaacaagatcagaagaagacttgtgaaagacagcaacaccaagaaggccggcaagacaggccccatgaaaaccctgctggttagagtgatgacacccgatctgagagagcggctggaaaacctgagaaagaagcctgaaaatatcccccagcccatcagcaatacatctagagccaacctgaataagctgctgaccgattacaccgaaatgaagaaggcgatcctgcatgtgtactgggaagagttccagaaggaccctgtgggcctgatgagccgggtggcccagcctgccagcaagaagatcgatcagaacaagctgaaacctgagatggacgagaagggcaacctgaccaccgccggctttgcctgctctcagtgtggccagcccctgttcgtgtacaagctggagcaggtgtctgagaagggcaaggcttacaccaactacttcggacggtgcaatgtggccgagcacgaaaagctgatcctgctggcccagctgaagcccgagaaggatagcgacgaagccgtgacatatagcctgggaaagtttgggcagagggccctggatttctacagcattcatgtgaccaaggagtccacccaccccgtgaagcccctggcccagatcgccggaaacagatacgcctccggacctgtgggaaaggccctgagcgacgcatgtatgggcacaatcgcctccttcctgtctaagtaccaggacatcatcatcgaacaccagaaggtggtgaagggcaaccagaagagactggagagcctgcgggagctggccggcaaggaaaacctggaataccctagcgtgaccctgccacctcagcctcacaccaaggagggcgttgatgcctacaacgaagtgatcgcccgggtgcgaatgtgggtgaacctgaacctgtggcagaagctgaagctaagcagagatgatgccaagcctctgctgagactgaagggattcccttcctttcctctggtcgagagacaggccaacgaagtggactggtgggacatggtgtgtaacgtgaagaagctgatcaacgagaaaaaggaggatggcaaggtgttttggcagaatctggctggctacaagagacaggaagccctgagaccatacctgagcagcgaggaagatcggaagaagggaaagaaattcgctcggtaccagctgggcgacctgctgctgcacctggaaaagaagcacggcgaggactggggaaaggtgtacgacgaggcctgggagcggattgacaagaaagtggaaggcctgagcaagcacatcaagctggaagaggaacggagaagcgaggacgcccagagcaaggccgccctgaccgactggctgcgggctaaggccagcttcgtgatcgagggcctgaaggaggccgacaaggacgagttctgcagatgcgagctgaagctgcagaagtggtacggggacctgcggggaaagcccttcgccatcgaagccgagaacagcatcctggacatcagcggcttcagcaagcagtacaactgtgccttcatctggcagaaggacggcgtgaagaagctgaacctgtacctgatcatcaactacttcaagggcggcaagctgcggttcaagaagatcaaacctgaagccttcgaagccaacagattctacaccgtgatcaacaaaaagagcggcgagatcgtgcccatggaggtgaacttcaacttcgacgaccccaacctgatcatcctgcctctggcctttggcaagagacagggcagagaattcatctggaacgacctgctgtccctggaaaccggcagcctgaagctggccaacggaagagtgatcgagaagacactgtacaacagaagaacccggcaggatgagcctgccctgttcgtggccctgaccttcgagcggcgggaggtcctggactcctccaatatcaaaccaatgaacctgatcggcgtggcaagaggcgaaaacatccccgccgtgatcgccctgaccgaccccgagggctgcccactgagccggtttaaggatagcctgggaaacccaacccacatcctgagaatcggcgagagctataaggagaagcagcggaccatccaggccaagaaggaggtggagcagcggagagccggcggctacagccggaagtacgccagcaaagccaagaatctggcagacgatatggtgagaaacaccgctagagatctgctgtactacgccgtgacccaggatgccatgctgatcttcgccaacctgagccggggcttcggccggcagggcaagcggaccttcatggccgagagacagtacacacggatggaggactggctgaccgccaagctggcctacgagggcctgagcaagacctacctgtccaagacactggcccagtacacctccaagacatgcagcaactgtgggtttaccatcaccagcgccgactacgacagggtgctggagaagctgaagaagacagcaacaggctggatgaccacaattaacggcaaggagctgaaggtggagggccagattacctactacaacagatacaagagacagaacgtagtcaaggacctgtccgtcgagctggatagactgagcgaagaatctgtgaacaacgacatctcctcctggacaaagggcagaagcggagaagctctgagcctcctgaagaaaagattctcccatagacccgtgcaggagaagttcgtgtgcctgaactgcggcttcgagacacacgcagccgagcaagccgccctgaacatcgccagatcctggctgttcctgcggagccaggagtacaagaaataccagacaaacaagacaaccggcaacaccgataagagagccttcgtcgagacctggcagtccttttaccggaagaagcttaaggaggtgtggaaacctgccgtgcggtctggcggatctggcggaggctccaccagccccaagaaaaagagaaaagtctaagctgccttctgcggggcttgccttctggccatgcccttcttctctcccttgcacctgtacctcttggtctttgaataaagcctgagtaggaaggctagcaaaaaaaaaaaaaaaaaaaaaaaaaaaaaaaaaaaaaaaaaaaaaaaaaaaaaaaaaaaaaaaaaaaaaaaaaaaaaaaa

SEQ ID NO: 9890 - RNA, 8787 nt, synthetic construct
  source 1..8787: mol_type = other RNA
aggaaataagagagaaaagaagagtaagaagaaatataagagccaccatggcccctaagaagaagcgtaaagtgagccggatgaaccacgaccaggagttcgacccccctaaggtgtaccctcccgtccccgccgagaagagaaagcccatccgggtcctgagcctgttcgatggcatcgccaccggtctgctggtgctgaaggacctgggcatccaggtggataggtacattgcctccgaggtgtgcgaggactccatcaccgtgggaatggtgcgtcatcagggcaagatcatgtacgtgggcgacgtgcggagcgtgacacagaagcatatccaggagtggggccctttcgacctggtgatcggcggcagcccttgcaatgacctgagcatcgtgaacccagcccggaagggcctgtacgagggaaccggcagactgttcttcgagttttacagactgctgcacgacgcccggcctaaggaaggcgacgaccggcccttcttttggctgttcgagaatgtggtggccatgggagtcagcgacaagcgggatattagccggttcctggagagcaaccccgtgatgatcgatgccaaggaagtgagcgccgcccaccgggccagatacttctggggcaatctgcctggcatgaacagacccctggccagcaccgtgaacgacaagctggagctgcaggagtgcctggagcacggccggatcgccaagttcagcaaggtgagaaccatcaccacccgaagcaacagcatcaaacaaggcaaggaccagcactttcctgtgttcatgaacgagaaggaggacatcctgtggtgtaccgagatggagagagtgttcgggttcccagtccactacacagatgtcagcaacatgtctagactggccagacagagactgctgggaagaagctggtccgtccctgtgatcagacacctgttcgcccctctgaaggagtacttcgcctgcgtgagcagcggcaacagcaacgccaacagccggggccccagcttctctagcggcctggtgccactgtccctgagagggagccacatgggccccatggagatctacaaaaccgtgagcgcctggaagcggcagcctgtgcgcgtgctgagcctgtttcggaatatcgataaagtcctgaaaagcctgggattcctggagagcggctctggctccggcggtggcaccctgaagtacgtggaggatgtgacaaacgtggtcagacgggatgtggagaagtggggccccttcgatctggtgtacggcagcacccaacccctgggcagctcttgtgaccggtgccctggctggtacatgtttcagttccaccggatcctgcagtacgccctgccgagacaggagtcccagcggccattcttttggattttcatggacaacttgctgctgaccgaggatgaccaggaaactaccactcggttcctgcagaccgaagccgtgaccctgcaggacgtgagaggccgggactaccagaacgccatgcgggtgtggtccaacatccctggactgaaaagcaagcacgcacctctgacccctaaagaagaggagtacctgcaggcccaggtgcggagcagaagcaagctggacgcccctaaggtggatctgctggtgaagaattgcctcctgcccctgagagagtacttcaagtatttcagccagaatagtctgcccctgggaggcagcggcggcggccccaacgccctggtgaccttccaggacgtgttcgtggacttcagccccgaggagctggccagcctgagcgccgcccagaggaggctgcacagggaggtgaccctggagaactacaggaacctggtgagcctgggctaccagttccccaggcccgacatcatcacccagctggaggaggaggagagcagcgccatggaggaggacagcaacaccaagaccggccccgactgggagaccggccccggcggcccaagcagcggcgcccctcctcccagcggcggcaggcggcccaagcagcggcgcccctcctcccagcggcggcagcccagccggctccccaacctctaccgaggagggcacctctgagtccgccacccccgagagcggccctggcacctccaccgagcccagcgagggcagcgcacccggcagccctgccggcagccccacctccacagaggagggaaccagcaccgagcccagcgaaggcagcgccccaggcaccagcaccgagcctagtgagcaggagattaaacggatcaacaagatcagaagaagacttgtgaaagacagcaacaccaagaaggccggcaagacaggccccatgaaaaccctgctggttagagtgatgacacccgatctgagagagcggctggaaaacctgagaaagaagcctgaaaatatcccccagcccatcagcaatacatctagagccaacctgaataagctgctgaccgattacaccgaaatgaagaaggcgatcctgcatgtgtactgggaagagttccagaaggaccctgtgggcctgatgagccgggtggcccagcctgccagcaagaagatcgatcagaacaagctgaaacctgagatggacgagaagggcaacctgaccaccgccggctttgcctgctctcagtgtggccagcccctgttcgtgtacaagctggagcaggtgtctgagaagggcaaggcttacaccaactacttcggacggtgcaatgtggccgagcacgaaaagctgatcctgctggcccagctgaagcccgagaaggatagcgacgaagccgtgacatatagcctgggaaagtttgggcagagggccctggatttctacagcattcatgtgaccaaggagtccacccaccccgtgaagcccctggcccagatcgccggaaacagatacgcctccggacctgtgggaaaggccctgagcgacgcatgtatgggcacaatcgcctccttcctgtctaagtaccaggacatcatcatcgaacaccagaaggtggtgaagggcaaccagaagagactggagagcctgcgggagctggccggcaaggaaaacctggaataccctagcgtgaccctgccacctcagcctcacaccaaggagggcgttgatgcctacaacgaagtgatcgcccgggtgcgaatgtgggtgaacctgaacctgtggcagaagctgaagctaagcagagatgatgccaagcctctgctgagactgaagggattcccttcctttcctctggtcgagagacaggccaacgaagtggactggtgggacatggtgtgtaacgtgaagaagctgatcaacgagaaaaaggaggatggcaaggtgttttggcagaatctggctggctacaagagacaggaagccctgagaccatacctgagcagcgaggaagatcggaagaagggaaagaaattcgctcggtaccagctgggcgacctgctgctgcacctggaaaagaagcacggcgaggactggggaaaggtgtacgacgaggcctgggagcggattgacaagaaagtggaaggcctgagcaagcacatcaagctggaagaggaacggagaagcgaggacgcccagagcaaggccgccctgaccgactggctgcgggctaaggccagcttcgtgatcgagggcctgaaggaggccgacaaggacgagttctgcagatgcgagctgaagctgcagaagtggtacggggacctgcggggaaagcccttcgccatcgaagccgagaacagcatcctggacatcagcggcttcagcaagcagtacaactgtgccttcatctggcagaaggacggcgtgaagaagctgaacctgtacctgatcatcaactacttcaagggcggcaagctgcggttcaagaagatcaaacctgaagccttcgaagccaacagattctacaccgtgatcaacaaaaagagcggcgagatcgtgcccatggaggtgaacttcaacttcgacgaccccaacctgatcatcctgcctctggcctttggcaagagacagggcagagaattcatctggaacgacctgctgtccctggaaaccggcagcctgaagctggccaacggaagagtgatcgagaagacactgtacaacagaagaacccggcaggatgagcctgccctgttcgtggccctgaccttcgagcggcgggaggtcctggactcctccaatatcaaaccaatgaacctgatcggcgtggcaagaggcgaaaacatccccgccgtgatcgccctgaccgaccccgagggctgcccactgagccggtttaaggatagcctgggaaacccaacccacatcctgagaatcggcgagagctataaggagaagcagcggaccatccaggccaagaaggaggtggagcagcggagagccggcggctacagccggaagtacgccagcaaagccaagaatctggcagacgatatggtgagaaacaccgctagagatctgctgtactacgccgtgacccaggatgccatgctgatcttcgccaacctgagccggggcttcggccggcagggcaagcggaccttcatggccgagagacagtacacacggatggaggactggctgaccgccaagctggcctacgagggcctgagcaagacctacctgtccaagacactggcccagtacacctccaagacatgcagcaactgtgggtttaccatcaccagcgccgactacgacagggtgctggagaagctgaagaagacagcaacaggctggatgaccacaattaacggcaaggagctgaaggtggagggccagattacctactacaacagatacaagagacagaacgtagtcaaggacctgtccgtcgagctggatagactgagcgaagaatctgtgaacaacgacatctcctcctggacaaagggcagaagcggagaagctctgagcctcctgaagaaaagattctcccatagacccgtgcaggagaagttcgtgtgcctgaactgcggcttcgagacacacgcagccgagcaagccgccctgaacatcgccagatcctggctgttcctgcggagccaggagtacaagaaataccagacaaacaagacaaccggcaacaccgataagagagccttcgtcgagacctggcagtccttttaccggaagaagcttaaggaggtgtggaaacctgccgtgcggtctggcggatctggcggaggctccaccagccccaagaaaaagagaaaagtctaagctgccttctgcggggcttgccttctggccatgcccttcttctctcccttgcacctgtacctcttggtctttgaataaagcctgagtaggaaggctagcaaaaaaaaaaaaaaaaaaaaaaaaaaaaaaaaaaaaaaaaaaaaaaaaaaaaaaaaaaaaaaaaaaaaaaaaaaaaaaaagcccagccggctccccaacctctaccgaggagggcacctctgagtccgccacccccgagagcggccctggcacctccaccgagcccagcgagggcagcgcacccggcagccctgccggcagccccacctccacagaggagggaaccagcaccgagcccagcgaaggcagcgccccaggcaccagcaccgagcctagtgagcaggagattaaacggatcaacaagatcagaagaagacttgtgaaagacagcaacaccaagaaggccggcaagacaggccccatgaaaaccctgctggttagagtgatgacacccgatctgagagagcggctggaaaacctgagaaagaagcctgaaaatatcccccagcccatcagcaatacatctagagccaacctgaataagctgctgaccgattacaccgaaatgaagaaggcgatcctgcatgtgtactgggaagagttccagaaggaccctgtgggcctgatgagccgggtggcccagcctgccagcaagaagatcgatcagaacaagctgaaacctgagatggacgagaagggcaacctgaccaccgccggctttgcctgctctcagtgtggccagcccctgttcgtgtacaagctggagcaggtgtctgagaagggcaaggcttacaccaactacttcggacggtgcaatgtggccgagcacgaaaagctgatcctgctggcccagctgaagcccgagaaggatagcgacgaagccgtgacatatagcctgggaaagtttgggcagagggccctggatttctacagcattcatgtgaccaaggagtccacccaccccgtgaagcccctggcccagatcgccggaaacagatacgcctccggacctgtgggaaaggccctgagcgacgcatgtatgggcacaatcgcctccttcctgtctaagtaccaggacatcatcatcgaacaccagaaggtggtgaagggcaaccagaagagactggagagcctgcgggagctggccggcaaggaaaacctggaataccctagcgtgaccctgccacctcagcctcacaccaaggagggcgttgatgcctacaacgaagtgatcgcccgggtgcgaatgtgggtgaacctgaacctgtggcagaagctgaagctaagcagagatgatgccaagcctctgctgagactgaagggattcccttcctttcctctggtcgagagacaggccaacgaagtggactggtgggacatggtgtgtaacgtgaagaagctgatcaacgagaaaaaggaggatggcaaggtgttttggcagaatctggctggctacaagagacaggaagccctgagaccatacctgagcagcgaggaagatcggaagaagggaaagaaattcgctcggtaccagctgggcgacctgctgctgcacctggaaaagaagcacggcgaggactggggaaaggtgtacgacgaggcctgggagcggattgacaagaaagtggaaggcctgagcaagcacatcaagctggaagaggaacggagaagcgaggacgcccagagcaaggccgccctgaccgactggctgcgggctaaggccagcttcgtgatcgagggcctgaaggaggccgacaaggacgagttctgcagatgcgagctgaagctgcagaagtggtacggggacctgcggggaaagcccttcgccatcgaagccgagaacagcatcctggacatcagcggcttcagcaagcagtacaactgtgccttcatctggcagaaggacggcgtgaagaagctgaacctgtacctgatcatcaactacttcaagggcggcaagctgcggttcaagaagatcaaacctgaagccttcgaagccaacagattctacaccgtgatcaacaaaaagagcggcgagatcgtgcccatggaggtgaacttcaacttcgacgaccccaacctgatcatcctgcctctggcctttggcaagagacagggcagagaattcatctggaacgacctgctgtccctggaaaccggcagcctgaagctggccaacggaagagtgatcgagaagacactgtacaacagaagaacccggcaggatgagcctgccctgttcgtggccctgaccttcgagcggcgggaggtcctggactcctccaatatcaaaccaatgaacctgatcggcgtggcaagaggcgaaaacatccccgccgtgatcgccctgaccgaccccgagggctgcccactgagccggtttaaggatagcctgggaaacccaacccacatcctgagaatcggcgagagctataaggagaagcagcggaccatccaggccaagaaggaggtggagcagcggagagccggcggctacagccggaagtacgccagcaaagccaagaatctggcagacgatatggtgagaaacaccgctagagatctgctgtactacgccgtgacccaggatgccatgctgatcttcgccaacctgagccggggcttcggccggcagggcaagcggaccttcatggccgagagacagtacacacggatggaggactggctgaccgccaagctggcctacgagggcctgagcaagacctacctgtccaagacactggcccagtacacctccaagacatgcagcaactgtgggtttaccatcaccagcgccgactacgacagggtgctggagaagctgaagaagacagcaacaggctggatgaccacaattaacggcaaggagctgaaggtggagggccagattacctactacaacagatacaagagacagaacgtagtcaaggacctgtccgtcgagctggatagactgagcgaagaatctgtgaacaacgacatctcctcctggacaaagggcagaagcggagaagctctgagcctcctgaagaaaagattctcccatagacccgtgcaggagaagttcgtgtgcctgaactgcggcttcgagacacacgcagccgagcaagccgccctgaacatcgccagatcctggctgttcctgcggagccaggagtacaagaaataccagacaaacaagacaaccggcaacaccgataagagagccttcgtcgagacctggcagtccttttaccggaagaagcttaaggaggtgtggaaacctgccgtgcggtctggcggatctggcggaggctccaccagccccaagaaaaagagaaaagtctaagctgccttctgcggggcttgccttctggccatgcccttcttctctcccttgcacctgtacctcttggtctttgaataaagcctgagtaggaaggctagcaaaaaaaaaaaaaaaaaaaaaaaaaaaaaaaaaaaaaaaaaaaaaaaaaaaaaaaaaaaaaaaaaaaaaaaaaaaaaaaa

SEQ ID NO: 9891 - RNA, 8787 nt, synthetic construct
  source 1..8787: mol_type = other RNA
aggaaataagagagaaaagaagagtaagaagaaatataagagccaccatggcccctaagaagaagcgtaaagtgagccggatgaaccacgaccaggagttcgacccccctaaggtgtaccctcccgtccccgccgagaagagaaagcccatccgggtcctgagcctgttcgatggcatcgccaccggtctgctggtgctgaaggacctgggcatccaggtggataggtacattgcctccgaggtgtgcgaggactccatcaccgtgggaatggtgcgtcatcagggcaagatcatgtacgtgggcgacgtgcggagcgtgacacagaagcatatccaggagtggggccctttcgacctggtgatcggcggcagcccttgcaatgacctgagcatcgtgaacccagcccggaagggcctgtacgagggaaccggcagactgttcttcgagttttacagactgctgcacgacgcccggcctaaggaaggcgacgaccggcccttcttttggctgttcgagaatgtggtggccatgggagtcagcgacaagcgggatattagccggttcctggagagcaaccccgtgatgatcgatgccaaggaagtgagcgccgcccaccgggccagatacttctggggcaatctgcctggcatgaacagacccctggccagcaccgtgaacgacaagctggagctgcaggagtgcctggagcacggccggatcgccaagttcagcaaggtgagaaccatcaccacccgaagcaacagcatcaaacaaggcaaggaccagcactttcctgtgttcatgaacgagaaggaggacatcctgtggtgtaccgagatggagagagtgttcgggttcccagtccactacacagatgtcagcaacatgtctagactggccagacagagactgctgggaagaagctggtccgtccctgtgatcagacacctgttcgcccctctgaaggagtacttcgcctgcgtgagcagcggcaacagcaacgccaacagccggggccccagcttctctagcggcctggtgccactgtccctgagagggagccacatgggccccatggagatctacaaaaccgtgagcgcctggaagcggcagcctgtgcgcgtgctgagcctgtttcggaatatcgataaagtcctgaaaagcctgggattcctggagagcggctctggctccggcggtggcaccctgaagtacgtggaggatgtgacaaacgtggtcagacgggatgtggagaagtggggccccttcgatctggtgtacggcagcacccaacccctgggcagctcttgtgaccggtgccctggctggtacatgtttcagttccaccggatcctgcagtacgccctgccgagacaggagtcccagcggccattcttttggattttcatggacaacttgctgctgaccgaggatgaccaggaaactaccactcggttcctgcagaccgaagccgtgaccctgcaggacgtgagaggccgggactaccagaacgccatgcgggtgtggtccaacatccctggactgaaaagcaagcacgcacctctgacccctaaagaagaggagtacctgcaggcccaggtgcggagcagaagcaagctggacgcccctaaggtggatctgctggtgaagaattgcctcctgcccctgagagagtacttcaagtatttcagccagaatagtctgcccctgggaggcagcggcggcggcgcccaggagagcgtgatgttcagcgacgtgagcatcgacttcagccaggaggagtgggagtgcctgaacgacgaccagagggacctgtacagggacgtgatgctggagaactacagcaacctggtgagcatgggccacagcatcagcaagcccaacgtgatcagctacctggagcagggcaaggagccctggctggtggacagggagctgaccaggggccagtggcccgtgctggagagcaggggcggcccaagcagcggcgcccctcctcccagcggcggcaggcggcccaagcagcggcgcccctcctcccagcggcggcagcccagccggctccccaacctctaccgaggagggcacctctgagtccgccacccccgagagcggccctggcacctccaccgagcccagcgagggcagcgcacccggcagccctgccggcagccccacctccacagaggagggaaccagcaccgagcccagcgaaggcagcgccccaggcaccagcaccgagcctagtgagcaggagattaaacggatcaacaagatcagaagaagacttgtgaaagacagcaacaccaagaaggccggcaagacaggccccatgaaaaccctgctggttagagtgatgacacccgatctgagagagcggctggaaaacctgagaaagaagcctgaaaatatcccccagcccatcagcaatacatctagagccaacctgaataagctgctgaccgattacaccgaaatgaagaaggcgatcctgcatgtgtactgggaagagttccagaaggaccctgtgggcctgatgagccgggtggcccagcctgccagcaagaagatcgatcagaacaagctgaaacctgagatggacgagaagggcaacctgaccaccgccggctttgcctgctctcagtgtggccagcccctgttcgtgtacaagctggagcaggtgtctgagaagggcaaggcttacaccaactacttcggacggtgcaatgtggccgagcacgaaaagctgatcctgctggcccagctgaagcccgagaaggatagcgacgaagccgtgacatatagcctgggaaagtttgggcagagggccctggatttctacagcattcatgtgaccaaggagtccacccaccccgtgaagcccctggcccagatcgccggaaacagatacgcctccggacctgtgggaaaggccctgagcgacgcatgtatgggcacaatcgcctccttcctgtctaagtaccaggacatcatcatcgaacaccagaaggtggtgaagggcaaccagaagagactggagagcctgcgggagctggccggcaaggaaaacctggaataccctagcgtgaccctgccacctcagcctcacaccaaggagggcgttgatgcctacaacgaagtgatcgcccgggtgcgaatgtgggtgaacctgaacctgtggcagaagctgaagctaagcagagatgatgccaagcctctgctgagactgaagggattcccttcctttcctctggtcgagagacaggccaacgaagtggactggtgggacatggtgtgtaacgtgaagaagctgatcaacgagaaaaaggaggatggcaaggtgttttggcagaatctggctggctacaagagacaggaagccctgagaccatacctgagcagcgaggaagatcggaagaagggaaagaaattcgctcggtaccagctgggcgacctgctgctgcacctggaaaagaagcacggcgaggactggggaaaggtgtacgacgaggcctgggagcggattgacaagaaagtggaaggcctgagcaagcacatcaagctggaagaggaacggagaagcgaggacgcccagagcaaggccgccctgaccgactggctgcgggctaaggccagcttcgtgatcgagggcctgaaggaggccgacaaggacgagttctgcagatgcgagctgaagctgcagaagtggtacggggacctgcggggaaagcccttcgccatcgaagccgagaacagcatcctggacatcagcggcttcagcaagcagtacaactgtgccttcatctggcagaaggacggcgtgaagaagctgaacctgtacctgatcatcaactacttcaagggcggcaagctgcggttcaagaagatcaaacctgaagccttcgaagccaacagattctacaccgtgatcaacaaaaagagcggcgagatcgtgcccatggaggtgaacttcaacttcgacgaccccaacctgatcatcctgcctctggcctttggcaagagacagggcagagaattcatctggaacgacctgctgtccctggaaaccggcagcctgaagctggccaacggaagagtgatcgagaagacactgtacaacagaagaacccggcaggatgagcctgccctgttcgtggccctgaccttcgagcggcgggaggtcctggactcctccaatatcaaaccaatgaacctgatcggcgtggcaagaggcgaaaacatccccgccgtgatcgccctgaccgaccccgagggctgcccactgagccggtttaaggatagcctgggaaacccaacccacatcctgagaatcggcgagagctataaggagaagcagcggaccatccaggccaagaaggaggtggagcagcggagagccggcggctacagccggaagtacgccagcaaagccaagaatctggcagacgatatggtgagaaacaccgctagagatctgctgtactacgccgtgacccaggatgccatgctgatcttcgccaacctgagccggggcttcggccggcagggcaagcggaccttcatggccgagagacagtacacacggatggaggactggctgaccgccaagctggcctacgagggcctgagcaagacctacctgtccaagacactggcccagtacacctccaagacatgcagcaactgtgggtttaccatcaccagcgccgactacgacagggtgctggagaagctgaagaagacagcaacaggctggatgaccacaattaacggcaaggagctgaaggtggagggccagattacctactacaacagatacaagagacagaacgtagtcaaggacctgtccgtcgagctggatagactgagcgaagaatctgtgaacaacgacatctcctcctggacaaagggcagaagcggagaagctctgagcctcctgaagaaaagattctcccatagacccgtgcaggagaagttcgtgtgcctgaactgcggcttcgagacacacgcagccgagcaagccgccctgaacatcgccagatcctggctgttcctgcggagccaggagtacaagaaataccagacaaacaagacaaccggcaacaccgataagagagccttcgtcgagacctggcagtccttttaccggaagaagcttaaggaggtgtggaaacctgccgtgcggtctggcggatctggcggaggctccaccagccccaagaaaaagagaaaagtctaagctgccttctgcggggcttgccttctggccatgcccttcttctctcccttgcacctgtacctcttggtctttgaataaagcctgagtaggaaggctagcaaaaaaaaaaaaaaaaaaaaaaaaaaaaaaaaaaaaaaaaaaaaaaaaaaaaaaaaaaaaaaaaaaaaaaaaaaaaaaaagcccagccggctccccaacctctaccgaggagggcacctctgagtccgccacccccgagagcggccctggcacctccaccgagcccagcgagggcagcgcacccggcagccctgccggcagccccacctccacagaggagggaaccagcaccgagcccagcgaaggcagcgccccaggcaccagcaccgagcctagtgagcaggagattaaacggatcaacaagatcagaagaagacttgtgaaagacagcaacaccaagaaggccggcaagacaggccccatgaaaaccctgctggttagagtgatgacacccgatctgagagagcggctggaaaacctgagaaagaagcctgaaaatatcccccagcccatcagcaatacatctagagccaacctgaataagctgctgaccgattacaccgaaatgaagaaggcgatcctgcatgtgtactgggaagagttccagaaggaccctgtgggcctgatgagccgggtggcccagcctgccagcaagaagatcgatcagaacaagctgaaacctgagatggacgagaagggcaacctgaccaccgccggctttgcctgctctcagtgtggccagcccctgttcgtgtacaagctggagcaggtgtctgagaagggcaaggcttacaccaactacttcggacggtgcaatgtggccgagcacgaaaagctgatcctgctggcccagctgaagcccgagaaggatagcgacgaagccgtgacatatagcctgggaaagtttgggcagagggccctggatttctacagcattcatgtgaccaaggagtccacccaccccgtgaagcccctggcccagatcgccggaaacagatacgcctccggacctgtgggaaaggccctgagcgacgcatgtatgggcacaatcgcctccttcctgtctaagtaccaggacatcatcatcgaacaccagaaggtggtgaagggcaaccagaagagactggagagcctgcgggagctggccggcaaggaaaacctggaataccctagcgtgaccctgccacctcagcctcacaccaaggagggcgttgatgcctacaacgaagtgatcgcccgggtgcgaatgtgggtgaacctgaacctgtggcagaagctgaagctaagcagagatgatgccaagcctctgctgagactgaagggattcccttcctttcctctggtcgagagacaggccaacgaagtggactggtgggacatggtgtgtaacgtgaagaagctgatcaacgagaaaaaggaggatggcaaggtgttttggcagaatctggctggctacaagagacaggaagccctgagaccatacctgagcagcgaggaagatcggaagaagggaaagaaattcgctcggtaccagctgggcgacctgctgctgcacctggaaaagaagcacggcgaggactggggaaaggtgtacgacgaggcctgggagcggattgacaagaaagtggaaggcctgagcaagcacatcaagctggaagaggaacggagaagcgaggacgcccagagcaaggccgccctgaccgactggctgcgggctaaggccagcttcgtgatcgagggcctgaaggaggccgacaaggacgagttctgcagatgcgagctgaagctgcagaagtggtacggggacctgcggggaaagcccttcgccatcgaagccgagaacagcatcctggacatcagcggcttcagcaagcagtacaactgtgccttcatctggcagaaggacggcgtgaagaagctgaacctgtacctgatcatcaactacttcaagggcggcaagctgcggttcaagaagatcaaacctgaagccttcgaagccaacagattctacaccgtgatcaacaaaaagagcggcgagatcgtgcccatggaggtgaacttcaacttcgacgaccccaacctgatcatcctgcctctggcctttggcaagagacagggcagagaattcatctggaacgacctgctgtccctggaaaccggcagcctgaagctggccaacggaagagtgatcgagaagacactgtacaacagaagaacccggcaggatgagcctgccctgttcgtggccctgaccttcgagcggcgggaggtcctggactcctccaatatcaaaccaatgaacctgatcggcgtggcaagaggcgaaaacatccccgccgtgatcgccctgaccgaccccgagggctgcccactgagccggtttaaggatagcctgggaaacccaacccacatcctgagaatcggcgagagctataaggagaagcagcggaccatccaggccaagaaggaggtggagcagcggagagccggcggctacagccggaagtacgccagcaaagccaagaatctggcagacgatatggtgagaaacaccgctagagatctgctgtactacgccgtgacccaggatgccatgctgatcttcgccaacctgagccggggcttcggccggcagggcaagcggaccttcatggccgagagacagtacacacggatggaggactggctgaccgccaagctggcctacgagggcctgagcaagacctacctgtccaagacactggcccagtacacctccaagacatgcagcaactgtgggtttaccatcaccagcgccgactacgacagggtgctggagaagctgaagaagacagcaacaggctggatgaccacaattaacggcaaggagctgaaggtggagggccagattacctactacaacagatacaagagacagaacgtagtcaaggacctgtccgtcgagctggatagactgagcgaagaatctgtgaacaacgacatctcctcctggacaaagggcagaagcggagaagctctgagcctcctgaagaaaagattctcccatagacccgtgcaggagaagttcgtgtgcctgaactgcggcttcgagacacacgcagccgagcaagccgccctgaacatcgccagatcctggctgttcctgcggagccaggagtacaagaaataccagacaaacaagacaaccggcaacaccgataagagagccttcgtcgagacctggcagtccttttaccggaagaagcttaaggaggtgtggaaacctgccgtgcggtctggcggatctggcggaggctccaccagccccaagaaaaagagaaaagtctaagctgccttctgcggggcttgccttctggccatgcccttcttctctcccttgcacctgtacctcttggtctttgaataaagcctgagtaggaaggctagcaaaaaaaaaaaaaaaaaaaaaaaaaaaaaaaaaaaaaaaaaaaaaaaaaaaaaaaaaaaaaaaaaaaaaaaaaaaaaaaa

SEQ ID NO: 9892 - RNA, 8787 nt, synthetic construct
  source 1..8787: mol_type = other RNA
aggaaataagagagaaaagaagagtaagaagaaatataagagccaccatggcccctaagaagaagcgtaaagtgagccggatgaaccacgaccaggagttcgacccccctaaggtgtaccctcccgtccccgccgagaagagaaagcccatccgggtcctgagcctgttcgatggcatcgccaccggtctgctggtgctgaaggacctgggcatccaggtggataggtacattgcctccgaggtgtgcgaggactccatcaccgtgggaatggtgcgtcatcagggcaagatcatgtacgtgggcgacgtgcggagcgtgacacagaagcatatccaggagtggggccctttcgacctggtgatcggcggcagcccttgcaatgacctgagcatcgtgaacccagcccggaagggcctgtacgagggaaccggcagactgttcttcgagttttacagactgctgcacgacgcccggcctaaggaaggcgacgaccggcccttcttttggctgttcgagaatgtggtggccatgggagtcagcgacaagcgggatattagccggttcctggagagcaaccccgtgatgatcgatgccaaggaagtgagcgccgcccaccgggccagatacttctggggcaatctgcctggcatgaacagacccctggccagcaccgtgaacgacaagctggagctgcaggagtgcctggagcacggccggatcgccaagttcagcaaggtgagaaccatcaccacccgaagcaacagcatcaaacaaggcaaggaccagcactttcctgtgttcatgaacgagaaggaggacatcctgtggtgtaccgagatggagagagtgttcgggttcccagtccactacacagatgtcagcaacatgtctagactggccagacagagactgctgggaagaagctggtccgtccctgtgatcagacacctgttcgcccctctgaaggagtacttcgcctgcgtgagcagcggcaacagcaacgccaacagccggggccccagcttctctagcggcctggtgccactgtccctgagagggagccacatgggccccatggagatctacaaaaccgtgagcgcctggaagcggcagcctgtgcgcgtgctgagcctgtttcggaatatcgataaagtcctgaaaagcctgggattcctggagagcggctctggctccggcggtggcaccctgaagtacgtggaggatgtgacaaacgtggtcagacgggatgtggagaagtggggccccttcgatctggtgtacggcagcacccaacccctgggcagctcttgtgaccggtgccctggctggtacatgtttcagttccaccggatcctgcagtacgccctgccgagacaggagtcccagcggccattcttttggattttcatggacaacttgctgctgaccgaggatgaccaggaaactaccactcggttcctgcagaccgaagccgtgaccctgcaggacgtgagaggccgggactaccagaacgccatgcgggtgtggtccaacatccctggactgaaaagcaagcacgcacctctgacccctaaagaagaggagtacctgcaggcccaggtgcggagcagaagcaagctggacgcccctaaggtggatctgctggtgaagaattgcctcctgcccctgagagagtacttcaagtatttcagccagaatagtctgcccctgggaggcagcggcggcggcaccatgagctgcagcagggccggcggcatcaccggctgcatcaagtacagcaccgccagcgtggccttcagggacgtggccgtggacttcacccaggaggagtggaggctgctgagccccgcccagaggaccctgcacagggaggtgatgctggagacctacaaccacctggtgagcctggagatccccagcagcaagcccaagctgatcgcccagctggagaggggcgaggagccctggaggggcggcccaagcagcggcgcccctcctcccagcggcggcaggcggcccaagcagcggcgcccctcctcccagcggcggcagcccagccggctccccaacctctaccgaggagggcacctctgagtccgccacccccgagagcggccctggcacctccaccgagcccagcgagggcagcgcacccggcagccctgccggcagccccacctccacagaggagggaaccagcaccgagcccagcgaaggcagcgccccaggcaccagcaccgagcctagtgagcaggagattaaacggatcaacaagatcagaagaagacttgtgaaagacagcaacaccaagaaggccggcaagacaggccccatgaaaaccctgctggttagagtgatgacacccgatctgagagagcggctggaaaacctgagaaagaagcctgaaaatatcccccagcccatcagcaatacatctagagccaacctgaataagctgctgaccgattacaccgaaatgaagaaggcgatcctgcatgtgtactgggaagagttccagaaggaccctgtgggcctgatgagccgggtggcccagcctgccagcaagaagatcgatcagaacaagctgaaacctgagatggacgagaagggcaacctgaccaccgccggctttgcctgctctcagtgtggccagcccctgttcgtgtacaagctggagcaggtgtctgagaagggcaaggcttacaccaactacttcggacggtgcaatgtggccgagcacgaaaagctgatcctgctggcccagctgaagcccgagaaggatagcgacgaagccgtgacatatagcctgggaaagtttgggcagagggccctggatttctacagcattcatgtgaccaaggagtccacccaccccgtgaagcccctggcccagatcgccggaaacagatacgcctccggacctgtgggaaaggccctgagcgacgcatgtatgggcacaatcgcctccttcctgtctaagtaccaggacatcatcatcgaacaccagaaggtggtgaagggcaaccagaagagactggagagcctgcgggagctggccggcaaggaaaacctggaataccctagcgtgaccctgccacctcagcctcacaccaaggagggcgttgatgcctacaacgaagtgatcgcccgggtgcgaatgtgggtgaacctgaacctgtggcagaagctgaagctaagcagagatgatgccaagcctctgctgagactgaagggattcccttcctttcctctggtcgagagacaggccaacgaagtggactggtgggacatggtgtgtaacgtgaagaagctgatcaacgagaaaaaggaggatggcaaggtgttttggcagaatctggctggctacaagagacaggaagccctgagaccatacctgagcagcgaggaagatcggaagaagggaaagaaattcgctcggtaccagctgggcgacctgctgctgcacctggaaaagaagcacggcgaggactggggaaaggtgtacgacgaggcctgggagcggattgacaagaaagtggaaggcctgagcaagcacatcaagctggaagaggaacggagaagcgaggacgcccagagcaaggccgccctgaccgactggctgcgggctaaggccagcttcgtgatcgagggcctgaaggaggccgacaaggacgagttctgcagatgcgagctgaagctgcagaagtggtacggggacctgcggggaaagcccttcgccatcgaagccgagaacagcatcctggacatcagcggcttcagcaagcagtacaactgtgccttcatctggcagaaggacggcgtgaagaagctgaacctgtacctgatcatcaactacttcaagggcggcaagctgcggttcaagaagatcaaacctgaagccttcgaagccaacagattctacaccgtgatcaacaaaaagagcggcgagatcgtgcccatggaggtgaacttcaacttcgacgaccccaacctgatcatcctgcctctggcctttggcaagagacagggcagagaattcatctggaacgacctgctgtccctggaaaccggcagcctgaagctggccaacggaagagtgatcgagaagacactgtacaacagaagaacccggcaggatgagcctgccctgttcgtggccctgaccttcgagcggcgggaggtcctggactcctccaatatcaaaccaatgaacctgatcggcgtggcaagaggcgaaaacatccccgccgtgatcgccctgaccgaccccgagggctgcccactgagccggtttaaggatagcctgggaaacccaacccacatcctgagaatcggcgagagctataaggagaagcagcggaccatccaggccaagaaggaggtggagcagcggagagccggcggctacagccggaagtacgccagcaaagccaagaatctggcagacgatatggtgagaaacaccgctagagatctgctgtactacgccgtgacccaggatgccatgctgatcttcgccaacctgagccggggcttcggccggcagggcaagcggaccttcatggccgagagacagtacacacggatggaggactggctgaccgccaagctggcctacgagggcctgagcaagacctacctgtccaagacactggcccagtacacctccaagacatgcagcaactgtgggtttaccatcaccagcgccgactacgacagggtgctggagaagctgaagaagacagcaacaggctggatgaccacaattaacggcaaggagctgaaggtggagggccagattacctactacaacagatacaagagacagaacgtagtcaaggacctgtccgtcgagctggatagactgagcgaagaatctgtgaacaacgacatctcctcctggacaaagggcagaagcggagaagctctgagcctcctgaagaaaagattctcccatagacccgtgcaggagaagttcgtgtgcctgaactgcggcttcgagacacacgcagccgagcaagccgccctgaacatcgccagatcctggctgttcctgcggagccaggagtacaagaaataccagacaaacaagacaaccggcaacaccgataagagagccttcgtcgagacctggcagtccttttaccggaagaagcttaaggaggtgtggaaacctgccgtgcggtctggcggatctggcggaggctccaccagccccaagaaaaagagaaaagtctaagctgccttctgcggggcttgccttctggccatgcccttcttctctcccttgcacctgtacctcttggtctttgaataaagcctgagtaggaaggctagcaaaaaaaaaaaaaaaaaaaaaaaaaaaaaaaaaaaaaaaaaaaaaaaaaaaaaaaaaaaaaaaaaaaaaaaaaaaaaaaagcccagccggctccccaacctctaccgaggagggcacctctgagtccgccacccccgagagcggccctggcacctccaccgagcccagcgagggcagcgcacccggcagccctgccggcagccccacctccacagaggagggaaccagcaccgagcccagcgaaggcagcgccccaggcaccagcaccgagcctagtgagcaggagattaaacggatcaacaagatcagaagaagacttgtgaaagacagcaacaccaagaaggccggcaagacaggccccatgaaaaccctgctggttagagtgatgacacccgatctgagagagcggctggaaaacctgagaaagaagcctgaaaatatcccccagcccatcagcaatacatctagagccaacctgaataagctgctgaccgattacaccgaaatgaagaaggcgatcctgcatgtgtactgggaagagttccagaaggaccctgtgggcctgatgagccgggtggcccagcctgccagcaagaagatcgatcagaacaagctgaaacctgagatggacgagaagggcaacctgaccaccgccggctttgcctgctctcagtgtggccagcccctgttcgtgtacaagctggagcaggtgtctgagaagggcaaggcttacaccaactacttcggacggtgcaatgtggccgagcacgaaaagctgatcctgctggcccagctgaagcccgagaaggatagcgacgaagccgtgacatatagcctgggaaagtttgggcagagggccctggatttctacagcattcatgtgaccaaggagtccacccaccccgtgaagcccctggcccagatcgccggaaacagatacgcctccggacctgtgggaaaggccctgagcgacgcatgtatgggcacaatcgcctccttcctgtctaagtaccaggacatcatcatcgaacaccagaaggtggtgaagggcaaccagaagagactggagagcctgcgggagctggccggcaaggaaaacctggaataccctagcgtgaccctgccacctcagcctcacaccaaggagggcgttgatgcctacaacgaagtgatcgcccgggtgcgaatgtgggtgaacctgaacctgtggcagaagctgaagctaagcagagatgatgccaagcctctgctgagactgaagggattcccttcctttcctctggtcgagagacaggccaacgaagtggactggtgggacatggtgtgtaacgtgaagaagctgatcaacgagaaaaaggaggatggcaaggtgttttggcagaatctggctggctacaagagacaggaagccctgagaccatacctgagcagcgaggaagatcggaagaagggaaagaaattcgctcggtaccagctgggcgacctgctgctgcacctggaaaagaagcacggcgaggactggggaaaggtgtacgacgaggcctgggagcggattgacaagaaagtggaaggcctgagcaagcacatcaagctggaagaggaacggagaagcgaggacgcccagagcaaggccgccctgaccgactggctgcgggctaaggccagcttcgtgatcgagggcctgaaggaggccgacaaggacgagttctgcagatgcgagctgaagctgcagaagtggtacggggacctgcggggaaagcccttcgccatcgaagccgagaacagcatcctggacatcagcggcttcagcaagcagtacaactgtgccttcatctggcagaaggacggcgtgaagaagctgaacctgtacctgatcatcaactacttcaagggcggcaagctgcggttcaagaagatcaaacctgaagccttcgaagccaacagattctacaccgtgatcaacaaaaagagcggcgagatcgtgcccatggaggtgaacttcaacttcgacgaccccaacctgatcatcctgcctctggcctttggcaagagacagggcagagaattcatctggaacgacctgctgtccctggaaaccggcagcctgaagctggccaacggaagagtgatcgagaagacactgtacaacagaagaacccggcaggatgagcctgccctgttcgtggccctgaccttcgagcggcgggaggtcctggactcctccaatatcaaaccaatgaacctgatcggcgtggcaagaggcgaaaacatccccgccgtgatcgccctgaccgaccccgagggctgcccactgagccggtttaaggatagcctgggaaacccaacccacatcctgagaatcggcgagagctataaggagaagcagcggaccatccaggccaagaaggaggtggagcagcggagagccggcggctacagccggaagtacgccagcaaagccaagaatctggcagacgatatggtgagaaacaccgctagagatctgctgtactacgccgtgacccaggatgccatgctgatcttcgccaacctgagccggggcttcggccggcagggcaagcggaccttcatggccgagagacagtacacacggatggaggactggctgaccgccaagctggcctacgagggcctgagcaagacctacctgtccaagacactggcccagtacacctccaagacatgcagcaactgtgggtttaccatcaccagcgccgactacgacagggtgctggagaagctgaagaagacagcaacaggctggatgaccacaattaacggcaaggagctgaaggtggagggccagattacctactacaacagatacaagagacagaacgtagtcaaggacctgtccgtcgagctggatagactgagcgaagaatctgtgaacaacgacatctcctcctggacaaagggcagaagcggagaagctctgagcctcctgaagaaaagattctcccatagacccgtgcaggagaagttcgtgtgcctgaactgcggcttcgagacacacgcagccgagcaagccgccctgaacatcgccagatcctggctgttcctgcggagccaggagtacaagaaataccagacaaacaagacaaccggcaacaccgataagagagccttcgtcgagacctggcagtccttttaccggaagaagcttaaggaggtgtggaaacctgccgtgcggtctggcggatctggcggaggctccaccagccccaagaaaaagagaaaagtctaagctgccttctgcggggcttgccttctggccatgcccttcttctctcccttgcacctgtacctcttggtctttgaataaagcctgagtaggaaggctagcaaaaaaaaaaaaaaaaaaaaaaaaaaaaaaaaaaaaaaaaaaaaaaaaaaaaaaaaaaaaaaaaaaaaaaaaaaaaaaaa

SEQ ID NO: 9893 - RNA, 8787 nt, synthetic construct
  source 1..8787: mol_type = other RNA
aggaaataagagagaaaagaagagtaagaagaaatataagagccaccatggcccctaagaagaagcgtaaagtgagccggatgaaccacgaccaggagttcgacccccctaaggtgtaccctcccgtccccgccgagaagagaaagcccatccgggtcctgagcctgttcgatggcatcgccaccggtctgctggtgctgaaggacctgggcatccaggtggataggtacattgcctccgaggtgtgcgaggactccatcaccgtgggaatggtgcgtcatcagggcaagatcatgtacgtgggcgacgtgcggagcgtgacacagaagcatatccaggagtggggccctttcgacctggtgatcggcggcagcccttgcaatgacctgagcatcgtgaacccagcccggaagggcctgtacgagggaaccggcagactgttcttcgagttttacagactgctgcacgacgcccggcctaaggaaggcgacgaccggcccttcttttggctgttcgagaatgtggtggccatgggagtcagcgacaagcgggatattagccggttcctggagagcaaccccgtgatgatcgatgccaaggaagtgagcgccgcccaccgggccagatacttctggggcaatctgcctggcatgaacagacccctggccagcaccgtgaacgacaagctggagctgcaggagtgcctggagcacggccggatcgccaagttcagcaaggtgagaaccatcaccacccgaagcaacagcatcaaacaaggcaaggaccagcactttcctgtgttcatgaacgagaaggaggacatcctgtggtgtaccgagatggagagagtgttcgggttcccagtccactacacagatgtcagcaacatgtctagactggccagacagagactgctgggaagaagctggtccgtccctgtgatcagacacctgttcgcccctctgaaggagtacttcgcctgcgtgagcagcggcaacagcaacgccaacagccggggccccagcttctctagcggcctggtgccactgtccctgagagggagccacatgggccccatggagatctacaaaaccgtgagcgcctggaagcggcagcctgtgcgcgtgctgagcctgtttcggaatatcgataaagtcctgaaaagcctgggattcctggagagcggctctggctccggcggtggcaccctgaagtacgtggaggatgtgacaaacgtggtcagacgggatgtggagaagtggggccccttcgatctggtgtacggcagcacccaacccctgggcagctcttgtgaccggtgccctggctggtacatgtttcagttccaccggatcctgcagtacgccctgccgagacaggagtcccagcggccattcttttggattttcatggacaacttgctgctgaccgaggatgaccaggaaactaccactcggttcctgcagaccgaagccgtgaccctgcaggacgtgagaggccgggactaccagaacgccatgcgggtgtggtccaacatccctggactgaaaagcaagcacgcacctctgacccctaaagaagaggagtacctgcaggcccaggtgcggagcagaagcaagctggacgcccctaaggtggatctgctggtgaagaattgcctcctgcccctgagagagtacttcaagtatttcagccagaatagtctgcccctgggaggcagcggcggcggcgacatgggcctggtgagcttcgaggacgtggccgtggacttcacctggcaggagtggcaggagctggacgccgcccagaggaccctgtacagggacgtgatgctggagaactacagcagcctggtgagcctgggcaactgcctggacaagcccgagctgatcagcaagctggagcagggcctggtgccctggagcggcgccgaggccaccgagcagtaccagcccgacgtgcacaagtggagcggcggcccaagcagcggcgcccctcctcccagcggcggcaggcggcccaagcagcggcgcccctcctcccagcggcggcagcccagccggctccccaacctctaccgaggagggcacctctgagtccgccacccccgagagcggccctggcacctccaccgagcccagcgagggcagcgcacccggcagccctgccggcagccccacctccacagaggagggaaccagcaccgagcccagcgaaggcagcgccccaggcaccagcaccgagcctagtgagcaggagattaaacggatcaacaagatcagaagaagacttgtgaaagacagcaacaccaagaaggccggcaagacaggccccatgaaaaccctgctggttagagtgatgacacccgatctgagagagcggctggaaaacctgagaaagaagcctgaaaatatcccccagcccatcagcaatacatctagagccaacctgaataagctgctgaccgattacaccgaaatgaagaaggcgatcctgcatgtgtactgggaagagttccagaaggaccctgtgggcctgatgagccgggtggcccagcctgccagcaagaagatcgatcagaacaagctgaaacctgagatggacgagaagggcaacctgaccaccgccggctttgcctgctctcagtgtggccagcccctgttcgtgtacaagctggagcaggtgtctgagaagggcaaggcttacaccaactacttcggacggtgcaatgtggccgagcacgaaaagctgatcctgctggcccagctgaagcccgagaaggatagcgacgaagccgtgacatatagcctgggaaagtttgggcagagggccctggatttctacagcattcatgtgaccaaggagtccacccaccccgtgaagcccctggcccagatcgccggaaacagatacgcctccggacctgtgggaaaggccctgagcgacgcatgtatgggcacaatcgcctccttcctgtctaagtaccaggacatcatcatcgaacaccagaaggtggtgaagggcaaccagaagagactggagagcctgcgggagctggccggcaaggaaaacctggaataccctagcgtgaccctgccacctcagcctcacaccaaggagggcgttgatgcctacaacgaagtgatcgcccgggtgcgaatgtgggtgaacctgaacctgtggcagaagctgaagctaagcagagatgatgccaagcctctgctgagactgaagggattcccttcctttcctctggtcgagagacaggccaacgaagtggactggtgggacatggtgtgtaacgtgaagaagctgatcaacgagaaaaaggaggatggcaaggtgttttggcagaatctggctggctacaagagacaggaagccctgagaccatacctgagcagcgaggaagatcggaagaagggaaagaaattcgctcggtaccagctgggcgacctgctgctgcacctggaaaagaagcacggcgaggactggggaaaggtgtacgacgaggcctgggagcggattgacaagaaagtggaaggcctgagcaagcacatcaagctggaagaggaacggagaagcgaggacgcccagagcaaggccgccctgaccgactggctgcgggctaaggccagcttcgtgatcgagggcctgaaggaggccgacaaggacgagttctgcagatgcgagctgaagctgcagaagtggtacggggacctgcggggaaagcccttcgccatcgaagccgagaacagcatcctggacatcagcggcttcagcaagcagtacaactgtgccttcatctggcagaaggacggcgtgaagaagctgaacctgtacctgatcatcaactacttcaagggcggcaagctgcggttcaagaagatcaaacctgaagccttcgaagccaacagattctacaccgtgatcaacaaaaagagcggcgagatcgtgcccatggaggtgaacttcaacttcgacgaccccaacctgatcatcctgcctctggcctttggcaagagacagggcagagaattcatctggaacgacctgctgtccctggaaaccggcagcctgaagctggccaacggaagagtgatcgagaagacactgtacaacagaagaacccggcaggatgagcctgccctgttcgtggccctgaccttcgagcggcgggaggtcctggactcctccaatatcaaaccaatgaacctgatcggcgtggcaagaggcgaaaacatccccgccgtgatcgccctgaccgaccccgagggctgcccactgagccggtttaaggatagcctgggaaacccaacccacatcctgagaatcggcgagagctataaggagaagcagcggaccatccaggccaagaaggaggtggagcagcggagagccggcggctacagccggaagtacgccagcaaagccaagaatctggcagacgatatggtgagaaacaccgctagagatctgctgtactacgccgtgacccaggatgccatgctgatcttcgccaacctgagccggggcttcggccggcagggcaagcggaccttcatggccgagagacagtacacacggatggaggactggctgaccgccaagctggcctacgagggcctgagcaagacctacctgtccaagacactggcccagtacacctccaagacatgcagcaactgtgggtttaccatcaccagcgccgactacgacagggtgctggagaagctgaagaagacagcaacaggctggatgaccacaattaacggcaaggagctgaaggtggagggccagattacctactacaacagatacaagagacagaacgtagtcaaggacctgtccgtcgagctggatagactgagcgaagaatctgtgaacaacgacatctcctcctggacaaagggcagaagcggagaagctctgagcctcctgaagaaaagattctcccatagacccgtgcaggagaagttcgtgtgcctgaactgcggcttcgagacacacgcagccgagcaagccgccctgaacatcgccagatcctggctgttcctgcggagccaggagtacaagaaataccagacaaacaagacaaccggcaacaccgataagagagccttcgtcgagacctggcagtccttttaccggaagaagcttaaggaggtgtggaaacctgccgtgcggtctggcggatctggcggaggctccaccagccccaagaaaaagagaaaagtctaagctgccttctgcggggcttgccttctggccatgcccttcttctctcccttgcacctgtacctcttggtctttgaataaagcctgagtaggaaggctagcaaaaaaaaaaaaaaaaaaaaaaaaaaaaaaaaaaaaaaaaaaaaaaaaaaaaaaaaaaaaaaaaaaaaaaaaaaaaaaaagcccagccggctccccaacctctaccgaggagggcacctctgagtccgccacccccgagagcggccctggcacctccaccgagcccagcgagggcagcgcacccggcagccctgccggcagccccacctccacagaggagggaaccagcaccgagcccagcgaaggcagcgccccaggcaccagcaccgagcctagtgagcaggagattaaacggatcaacaagatcagaagaagacttgtgaaagacagcaacaccaagaaggccggcaagacaggccccatgaaaaccctgctggttagagtgatgacacccgatctgagagagcggctggaaaacctgagaaagaagcctgaaaatatcccccagcccatcagcaatacatctagagccaacctgaataagctgctgaccgattacaccgaaatgaagaaggcgatcctgcatgtgtactgggaagagttccagaaggaccctgtgggcctgatgagccgggtggcccagcctgccagcaagaagatcgatcagaacaagctgaaacctgagatggacgagaagggcaacctgaccaccgccggctttgcctgctctcagtgtggccagcccctgttcgtgtacaagctggagcaggtgtctgagaagggcaaggcttacaccaactacttcggacggtgcaatgtggccgagcacgaaaagctgatcctgctggcccagctgaagcccgagaaggatagcgacgaagccgtgacatatagcctgggaaagtttgggcagagggccctggatttctacagcattcatgtgaccaaggagtccacccaccccgtgaagcccctggcccagatcgccggaaacagatacgcctccggacctgtgggaaaggccctgagcgacgcatgtatgggcacaatcgcctccttcctgtctaagtaccaggacatcatcatcgaacaccagaaggtggtgaagggcaaccagaagagactggagagcctgcgggagctggccggcaaggaaaacctggaataccctagcgtgaccctgccacctcagcctcacaccaaggagggcgttgatgcctacaacgaagtgatcgcccgggtgcgaatgtgggtgaacctgaacctgtggcagaagctgaagctaagcagagatgatgccaagcctctgctgagactgaagggattcccttcctttcctctggtcgagagacaggccaacgaagtggactggtgggacatggtgtgtaacgtgaagaagctgatcaacgagaaaaaggaggatggcaaggtgttttggcagaatctggctggctacaagagacaggaagccctgagaccatacctgagcagcgaggaagatcggaagaagggaaagaaattcgctcggtaccagctgggcgacctgctgctgcacctggaaaagaagcacggcgaggactggggaaaggtgtacgacgaggcctgggagcggattgacaagaaagtggaaggcctgagcaagcacatcaagctggaagaggaacggagaagcgaggacgcccagagcaaggccgccctgaccgactggctgcgggctaaggccagcttcgtgatcgagggcctgaaggaggccgacaaggacgagttctgcagatgcgagctgaagctgcagaagtggtacggggacctgcggggaaagcccttcgccatcgaagccgagaacagcatcctggacatcagcggcttcagcaagcagtacaactgtgccttcatctggcagaaggacggcgtgaagaagctgaacctgtacctgatcatcaactacttcaagggcggcaagctgcggttcaagaagatcaaacctgaagccttcgaagccaacagattctacaccgtgatcaacaaaaagagcggcgagatcgtgcccatggaggtgaacttcaacttcgacgaccccaacctgatcatcctgcctctggcctttggcaagagacagggcagagaattcatctggaacgacctgctgtccctggaaaccggcagcctgaagctggccaacggaagagtgatcgagaagacactgtacaacagaagaacccggcaggatgagcctgccctgttcgtggccctgaccttcgagcggcgggaggtcctggactcctccaatatcaaaccaatgaacctgatcggcgtggcaagaggcgaaaacatccccgccgtgatcgccctgaccgaccccgagggctgcccactgagccggtttaaggatagcctgggaaacccaacccacatcctgagaatcggcgagagctataaggagaagcagcggaccatccaggccaagaaggaggtggagcagcggagagccggcggctacagccggaagtacgccagcaaagccaagaatctggcagacgatatggtgagaaacaccgctagagatctgctgtactacgccgtgacccaggatgccatgctgatcttcgccaacctgagccggggcttcggccggcagggcaagcggaccttcatggccgagagacagtacacacggatggaggactggctgaccgccaagctggcctacgagggcctgagcaagacctacctgtccaagacactggcccagtacacctccaagacatgcagcaactgtgggtttaccatcaccagcgccgactacgacagggtgctggagaagctgaagaagacagcaacaggctggatgaccacaattaacggcaaggagctgaaggtggagggccagattacctactacaacagatacaagagacagaacgtagtcaaggacctgtccgtcgagctggatagactgagcgaagaatctgtgaacaacgacatctcctcctggacaaagggcagaagcggagaagctctgagcctcctgaagaaaagattctcccatagacccgtgcaggagaagttcgtgtgcctgaactgcggcttcgagacacacgcagccgagcaagccgccctgaacatcgccagatcctggctgttcctgcggagccaggagtacaagaaataccagacaaacaagacaaccggcaacaccgataagagagccttcgtcgagacctggcagtccttttaccggaagaagcttaaggaggtgtggaaacctgccgtgcggtctggcggatctggcggaggctccaccagccccaagaaaaagagaaaagtctaagctgccttctgcggggcttgccttctggccatgcccttcttctctcccttgcacctgtacctcttggtctttgaataaagcctgagtaggaaggctagcaaaaaaaaaaaaaaaaaaaaaaaaaaaaaaaaaaaaaaaaaaaaaaaaaaaaaaaaaaaaaaaaaaaaaaaaaaaaaaaa

SEQ ID NO: 9894 - RNA, 8787 nt, synthetic construct
  source 1..8787: mol_type = other RNA
aggaaataagagagaaaagaagagtaagaagaaatataagagccaccatggcccctaagaagaagcgtaaagtgagccggatgaaccacgaccaggagttcgacccccctaaggtgtaccctcccgtccccgccgagaagagaaagcccatccgggtcctgagcctgttcgatggcatcgccaccggtctgctggtgctgaaggacctgggcatccaggtggataggtacattgcctccgaggtgtgcgaggactccatcaccgtgggaatggtgcgtcatcagggcaagatcatgtacgtgggcgacgtgcggagcgtgacacagaagcatatccaggagtggggccctttcgacctggtgatcggcggcagcccttgcaatgacctgagcatcgtgaacccagcccggaagggcctgtacgagggaaccggcagactgttcttcgagttttacagactgctgcacgacgcccggcctaaggaaggcgacgaccggcccttcttttggctgttcgagaatgtggtggccatgggagtcagcgacaagcgggatattagccggttcctggagagcaaccccgtgatgatcgatgccaaggaagtgagcgccgcccaccgggccagatacttctggggcaatctgcctggcatgaacagacccctggccagcaccgtgaacgacaagctggagctgcaggagtgcctggagcacggccggatcgccaagttcagcaaggtgagaaccatcaccacccgaagcaacagcatcaaacaaggcaaggaccagcactttcctgtgttcatgaacgagaaggaggacatcctgtggtgtaccgagatggagagagtgttcgggttcccagtccactacacagatgtcagcaacatgtctagactggccagacagagactgctgggaagaagctggtccgtccctgtgatcagacacctgttcgcccctctgaaggagtacttcgcctgcgtgagcagcggcaacagcaacgccaacagccggggccccagcttctctagcggcctggtgccactgtccctgagagggagccacatgggccccatggagatctacaaaaccgtgagcgcctggaagcggcagcctgtgcgcgtgctgagcctgtttcggaatatcgataaagtcctgaaaagcctgggattcctggagagcggctctggctccggcggtggcaccctgaagtacgtggaggatgtgacaaacgtggtcagacgggatgtggagaagtggggccccttcgatctggtgtacggcagcacccaacccctgggcagctcttgtgaccggtgccctggctggtacatgtttcagttccaccggatcctgcagtacgccctgccgagacaggagtcccagcggccattcttttggattttcatggacaacttgctgctgaccgaggatgaccaggaaactaccactcggttcctgcagaccgaagccgtgaccctgcaggacgtgagaggccgggactaccagaacgccatgcgggtgtggtccaacatccctggactgaaaagcaagcacgcacctctgacccctaaagaagaggagtacctgcaggcccaggtgcggagcagaagcaagctggacgcccctaaggtggatctgctggtgaagaattgcctcctgcccctgagagagtacttcaagtatttcagccagaatagtctgcccctgggaggcagcggcggcggcagccaggtgagcgtgaccttcgaggacgtggccgtgctgttcaccagggacgagtggaagaagctggaccacagccagaggagcctgtacagggaggtgatgctggagaactacagcaacctggccagcctgggcttccccttcgccaagcccgagatgatcagcgtgctgcagcagggcgaggagccctggaaggtggagaagaggagcctgggcttcagcctgggctgcaacagcagcctgggcggcccaagcagcggcgcccctcctcccagcggcggcaggcggcccaagcagcggcgcccctcctcccagcggcggcagcccagccggctccccaacctctaccgaggagggcacctctgagtccgccacccccgagagcggccctggcacctccaccgagcccagcgagggcagcgcacccggcagccctgccggcagccccacctccacagaggagggaaccagcaccgagcccagcgaaggcagcgccccaggcaccagcaccgagcctagtgagcaggagattaaacggatcaacaagatcagaagaagacttgtgaaagacagcaacaccaagaaggccggcaagacaggccccatgaaaaccctgctggttagagtgatgacacccgatctgagagagcggctggaaaacctgagaaagaagcctgaaaatatcccccagcccatcagcaatacatctagagccaacctgaataagctgctgaccgattacaccgaaatgaagaaggcgatcctgcatgtgtactgggaagagttccagaaggaccctgtgggcctgatgagccgggtggcccagcctgccagcaagaagatcgatcagaacaagctgaaacctgagatggacgagaagggcaacctgaccaccgccggctttgcctgctctcagtgtggccagcccctgttcgtgtacaagctggagcaggtgtctgagaagggcaaggcttacaccaactacttcggacggtgcaatgtggccgagcacgaaaagctgatcctgctggcccagctgaagcccgagaaggatagcgacgaagccgtgacatatagcctgggaaagtttgggcagagggccctggatttctacagcattcatgtgaccaaggagtccacccaccccgtgaagcccctggcccagatcgccggaaacagatacgcctccggacctgtgggaaaggccctgagcgacgcatgtatgggcacaatcgcctccttcctgtctaagtaccaggacatcatcatcgaacaccagaaggtggtgaagggcaaccagaagagactggagagcctgcgggagctggccggcaaggaaaacctggaataccctagcgtgaccctgccacctcagcctcacaccaaggagggcgttgatgcctacaacgaagtgatcgcccgggtgcgaatgtgggtgaacctgaacctgtggcagaagctgaagctaagcagagatgatgccaagcctctgctgagactgaagggattcccttcctttcctctggtcgagagacaggccaacgaagtggactggtgggacatggtgtgtaacgtgaagaagctgatcaacgagaaaaaggaggatggcaaggtgttttggcagaatctggctggctacaagagacaggaagccctgagaccatacctgagcagcgaggaagatcggaagaagggaaagaaattcgctcggtaccagctgggcgacctgctgctgcacctggaaaagaagcacggcgaggactggggaaaggtgtacgacgaggcctgggagcggattgacaagaaagtggaaggcctgagcaagcacatcaagctggaagaggaacggagaagcgaggacgcccagagcaaggccgccctgaccgactggctgcgggctaaggccagcttcgtgatcgagggcctgaaggaggccgacaaggacgagttctgcagatgcgagctgaagctgcagaagtggtacggggacctgcggggaaagcccttcgccatcgaagccgagaacagcatcctggacatcagcggcttcagcaagcagtacaactgtgccttcatctggcagaaggacggcgtgaagaagctgaacctgtacctgatcatcaactacttcaagggcggcaagctgcggttcaagaagatcaaacctgaagccttcgaagccaacagattctacaccgtgatcaacaaaaagagcggcgagatcgtgcccatggaggtgaacttcaacttcgacgaccccaacctgatcatcctgcctctggcctttggcaagagacagggcagagaattcatctggaacgacctgctgtccctggaaaccggcagcctgaagctggccaacggaagagtgatcgagaagacactgtacaacagaagaacccggcaggatgagcctgccctgttcgtggccctgaccttcgagcggcgggaggtcctggactcctccaatatcaaaccaatgaacctgatcggcgtggcaagaggcgaaaacatccccgccgtgatcgccctgaccgaccccgagggctgcccactgagccggtttaaggatagcctgggaaacccaacccacatcctgagaatcggcgagagctataaggagaagcagcggaccatccaggccaagaaggaggtggagcagcggagagccggcggctacagccggaagtacgccagcaaagccaagaatctggcagacgatatggtgagaaacaccgctagagatctgctgtactacgccgtgacccaggatgccatgctgatcttcgccaacctgagccggggcttcggccggcagggcaagcggaccttcatggccgagagacagtacacacggatggaggactggctgaccgccaagctggcctacgagggcctgagcaagacctacctgtccaagacactggcccagtacacctccaagacatgcagcaactgtgggtttaccatcaccagcgccgactacgacagggtgctggagaagctgaagaagacagcaacaggctggatgaccacaattaacggcaaggagctgaaggtggagggccagattacctactacaacagatacaagagacagaacgtagtcaaggacctgtccgtcgagctggatagactgagcgaagaatctgtgaacaacgacatctcctcctggacaaagggcagaagcggagaagctctgagcctcctgaagaaaagattctcccatagacccgtgcaggagaagttcgtgtgcctgaactgcggcttcgagacacacgcagccgagcaagccgccctgaacatcgccagatcctggctgttcctgcggagccaggagtacaagaaataccagacaaacaagacaaccggcaacaccgataagagagccttcgtcgagacctggcagtccttttaccggaagaagcttaaggaggtgtggaaacctgccgtgcggtctggcggatctggcggaggctccaccagccccaagaaaaagagaaaagtctaagctgccttctgcggggcttgccttctggccatgcccttcttctctcccttgcacctgtacctcttggtctttgaataaagcctgagtaggaaggctagcaaaaaaaaaaaaaaaaaaaaaaaaaaaaaaaaaaaaaaaaaaaaaaaaaaaaaaaaaaaaaaaaaaaaaaaaaaaaaaaagcccagccggctccccaacctctaccgaggagggcacctctgagtccgccacccccgagagcggccctggcacctccaccgagcccagcgagggcagcgcacccggcagccctgccggcagccccacctccacagaggagggaaccagcaccgagcccagcgaaggcagcgccccaggcaccagcaccgagcctagtgagcaggagattaaacggatcaacaagatcagaagaagacttgtgaaagacagcaacaccaagaaggccggcaagacaggccccatgaaaaccctgctggttagagtgatgacacccgatctgagagagcggctggaaaacctgagaaagaagcctgaaaatatcccccagcccatcagcaatacatctagagccaacctgaataagctgctgaccgattacaccgaaatgaagaaggcgatcctgcatgtgtactgggaagagttccagaaggaccctgtgggcctgatgagccgggtggcccagcctgccagcaagaagatcgatcagaacaagctgaaacctgagatggacgagaagggcaacctgaccaccgccggctttgcctgctctcagtgtggccagcccctgttcgtgtacaagctggagcaggtgtctgagaagggcaaggcttacaccaactacttcggacggtgcaatgtggccgagcacgaaaagctgatcctgctggcccagctgaagcccgagaaggatagcgacgaagccgtgacatatagcctgggaaagtttgggcagagggccctggatttctacagcattcatgtgaccaaggagtccacccaccccgtgaagcccctggcccagatcgccggaaacagatacgcctccggacctgtgggaaaggccctgagcgacgcatgtatgggcacaatcgcctccttcctgtctaagtaccaggacatcatcatcgaacaccagaaggtggtgaagggcaaccagaagagactggagagcctgcgggagctggccggcaaggaaaacctggaataccctagcgtgaccctgccacctcagcctcacaccaaggagggcgttgatgcctacaacgaagtgatcgcccgggtgcgaatgtgggtgaacctgaacctgtggcagaagctgaagctaagcagagatgatgccaagcctctgctgagactgaagggattcccttcctttcctctggtcgagagacaggccaacgaagtggactggtgggacatggtgtgtaacgtgaagaagctgatcaacgagaaaaaggaggatggcaaggtgttttggcagaatctggctggctacaagagacaggaagccctgagaccatacctgagcagcgaggaagatcggaagaagggaaagaaattcgctcggtaccagctgggcgacctgctgctgcacctggaaaagaagcacggcgaggactggggaaaggtgtacgacgaggcctgggagcggattgacaagaaagtggaaggcctgagcaagcacatcaagctggaagaggaacggagaagcgaggacgcccagagcaaggccgccctgaccgactggctgcgggctaaggccagcttcgtgatcgagggcctgaaggaggccgacaaggacgagttctgcagatgcgagctgaagctgcagaagtggtacggggacctgcggggaaagcccttcgccatcgaagccgagaacagcatcctggacatcagcggcttcagcaagcagtacaactgtgccttcatctggcagaaggacggcgtgaagaagctgaacctgtacctgatcatcaactacttcaagggcggcaagctgcggttcaagaagatcaaacctgaagccttcgaagccaacagattctacaccgtgatcaacaaaaagagcggcgagatcgtgcccatggaggtgaacttcaacttcgacgaccccaacctgatcatcctgcctctggcctttggcaagagacagggcagagaattcatctggaacgacctgctgtccctggaaaccggcagcctgaagctggccaacggaagagtgatcgagaagacactgtacaacagaagaacccggcaggatgagcctgccctgttcgtggccctgaccttcgagcggcgggaggtcctggactcctccaatatcaaaccaatgaacctgatcggcgtggcaagaggcgaaaacatccccgccgtgatcgccctgaccgaccccgagggctgcccactgagccggtttaaggatagcctgggaaacccaacccacatcctgagaatcggcgagagctataaggagaagcagcggaccatccaggccaagaaggaggtggagcagcggagagccggcggctacagccggaagtacgccagcaaagccaagaatctggcagacgatatggtgagaaacaccgctagagatctgctgtactacgccgtgacccaggatgccatgctgatcttcgccaacctgagccggggcttcggccggcagggcaagcggaccttcatggccgagagacagtacacacggatggaggactggctgaccgccaagctggcctacgagggcctgagcaagacctacctgtccaagacactggcccagtacacctccaagacatgcagcaactgtgggtttaccatcaccagcgccgactacgacagggtgctggagaagctgaagaagacagcaacaggctggatgaccacaattaacggcaaggagctgaaggtggagggccagattacctactacaacagatacaagagacagaacgtagtcaaggacctgtccgtcgagctggatagactgagcgaagaatctgtgaacaacgacatctcctcctggacaaagggcagaagcggagaagctctgagcctcctgaagaaaagattctcccatagacccgtgcaggagaagttcgtgtgcctgaactgcggcttcgagacacacgcagccgagcaagccgccctgaacatcgccagatcctggctgttcctgcggagccaggagtacaagaaataccagacaaacaagacaaccggcaacaccgataagagagccttcgtcgagacctggcagtccttttaccggaagaagcttaaggaggtgtggaaacctgccgtgcggtctggcggatctggcggaggctccaccagccccaagaaaaagagaaaagtctaagctgccttctgcggggcttgccttctggccatgcccttcttctctcccttgcacctgtacctcttggtctttgaataaagcctgagtaggaaggctagcaaaaaaaaaaaaaaaaaaaaaaaaaaaaaaaaaaaaaaaaaaaaaaaaaaaaaaaaaaaaaaaaaaaaaaaaaaaaaaaa

SEQ ID NO: 9895 - RNA, 8787 nt, synthetic construct
  source 1..8787: mol_type = other RNA
aggaaataagagagaaaagaagagtaagaagaaatataagagccaccatggcccctaagaagaagcgtaaagtgagccggatgaaccacgaccaggagttcgacccccctaaggtgtaccctcccgtccccgccgagaagagaaagcccatccgggtcctgagcctgttcgatggcatcgccaccggtctgctggtgctgaaggacctgggcatccaggtggataggtacattgcctccgaggtgtgcgaggactccatcaccgtgggaatggtgcgtcatcagggcaagatcatgtacgtgggcgacgtgcggagcgtgacacagaagcatatccaggagtggggccctttcgacctggtgatcggcggcagcccttgcaatgacctgagcatcgtgaacccagcccggaagggcctgtacgagggaaccggcagactgttcttcgagttttacagactgctgcacgacgcccggcctaaggaaggcgacgaccggcccttcttttggctgttcgagaatgtggtggccatgggagtcagcgacaagcgggatattagccggttcctggagagcaaccccgtgatgatcgatgccaaggaagtgagcgccgcccaccgggccagatacttctggggcaatctgcctggcatgaacagacccctggccagcaccgtgaacgacaagctggagctgcaggagtgcctggagcacggccggatcgccaagttcagcaaggtgagaaccatcaccacccgaagcaacagcatcaaacaaggcaaggaccagcactttcctgtgttcatgaacgagaaggaggacatcctgtggtgtaccgagatggagagagtgttcgggttcccagtccactacacagatgtcagcaacatgtctagactggccagacagagactgctgggaagaagctggtccgtccctgtgatcagacacctgttcgcccctctgaaggagtacttcgcctgcgtgagcagcggcaacagcaacgccaacagccggggccccagcttctctagcggcctggtgccactgtccctgagagggagccacatgggccccatggagatctacaaaaccgtgagcgcctggaagcggcagcctgtgcgcgtgctgagcctgtttcggaatatcgataaagtcctgaaaagcctgggattcctggagagcggctctggctccggcggtggcaccctgaagtacgtggaggatgtgacaaacgtggtcagacgggatgtggagaagtggggccccttcgatctggtgtacggcagcacccaacccctgggcagctcttgtgaccggtgccctggctggtacatgtttcagttccaccggatcctgcagtacgccctgccgagacaggagtcccagcggccattcttttggattttcatggacaacttgctgctgaccgaggatgaccaggaaactaccactcggttcctgcagaccgaagccgtgaccctgcaggacgtgagaggccgggactaccagaacgccatgcgggtgtggtccaacatccctggactgaaaagcaagcacgcacctctgacccctaaagaagaggagtacctgcaggcccaggtgcggagcagaagcaagctggacgcccctaaggtggatctgctggtgaagaattgcctcctgcccctgagagagtacttcaagtatttcagccagaatagtctgcccctgggaggcagcggcggcggccaggaggaccccgtgaccttccaggacgtggccgtggtgttcacccaggagcagtggggctacctggaccccagccagaaggagctgtacagggacgtgatgctggagaactaccagaacctgctgtgcctgggcctggccgtgagcaagcccgaggtgatctgccagctggagcagggcgaggccccctggaggcccgagggcagggtgcccggcagcagccaccccgacggcgaggtgaggggcggcccaagcagcggcgcccctcctcccagcggcggcaggcggcccaagcagcggcgcccctcctcccagcggcggcagcccagccggctccccaacctctaccgaggagggcacctctgagtccgccacccccgagagcggccctggcacctccaccgagcccagcgagggcagcgcacccggcagccctgccggcagccccacctccacagaggagggaaccagcaccgagcccagcgaaggcagcgccccaggcaccagcaccgagcctagtgagcaggagattaaacggatcaacaagatcagaagaagacttgtgaaagacagcaacaccaagaaggccggcaagacaggccccatgaaaaccctgctggttagagtgatgacacccgatctgagagagcggctggaaaacctgagaaagaagcctgaaaatatcccccagcccatcagcaatacatctagagccaacctgaataagctgctgaccgattacaccgaaatgaagaaggcgatcctgcatgtgtactgggaagagttccagaaggaccctgtgggcctgatgagccgggtggcccagcctgccagcaagaagatcgatcagaacaagctgaaacctgagatggacgagaagggcaacctgaccaccgccggctttgcctgctctcagtgtggccagcccctgttcgtgtacaagctggagcaggtgtctgagaagggcaaggcttacaccaactacttcggacggtgcaatgtggccgagcacgaaaagctgatcctgctggcccagctgaagcccgagaaggatagcgacgaagccgtgacatatagcctgggaaagtttgggcagagggccctggatttctacagcattcatgtgaccaaggagtccacccaccccgtgaagcccctggcccagatcgccggaaacagatacgcctccggacctgtgggaaaggccctgagcgacgcatgtatgggcacaatcgcctccttcctgtctaagtaccaggacatcatcatcgaacaccagaaggtggtgaagggcaaccagaagagactggagagcctgcgggagctggccggcaaggaaaacctggaataccctagcgtgaccctgccacctcagcctcacaccaaggagggcgttgatgcctacaacgaagtgatcgcccgggtgcgaatgtgggtgaacctgaacctgtggcagaagctgaagctaagcagagatgatgccaagcctctgctgagactgaagggattcccttcctttcctctggtcgagagacaggccaacgaagtggactggtgggacatggtgtgtaacgtgaagaagctgatcaacgagaaaaaggaggatggcaaggtgttttggcagaatctggctggctacaagagacaggaagccctgagaccatacctgagcagcgaggaagatcggaagaagggaaagaaattcgctcggtaccagctgggcgacctgctgctgcacctggaaaagaagcacggcgaggactggggaaaggtgtacgacgaggcctgggagcggattgacaagaaagtggaaggcctgagcaagcacatcaagctggaagaggaacggagaagcgaggacgcccagagcaaggccgccctgaccgactggctgcgggctaaggccagcttcgtgatcgagggcctgaaggaggccgacaaggacgagttctgcagatgcgagctgaagctgcagaagtggtacggggacctgcggggaaagcccttcgccatcgaagccgagaacagcatcctggacatcagcggcttcagcaagcagtacaactgtgccttcatctggcagaaggacggcgtgaagaagctgaacctgtacctgatcatcaactacttcaagggcggcaagctgcggttcaagaagatcaaacctgaagccttcgaagccaacagattctacaccgtgatcaacaaaaagagcggcgagatcgtgcccatggaggtgaacttcaacttcgacgaccccaacctgatcatcctgcctctggcctttggcaagagacagggcagagaattcatctggaacgacctgctgtccctggaaaccggcagcctgaagctggccaacggaagagtgatcgagaagacactgtacaacagaagaacccggcaggatgagcctgccctgttcgtggccctgaccttcgagcggcgggaggtcctggactcctccaatatcaaaccaatgaacctgatcggcgtggcaagaggcgaaaacatccccgccgtgatcgccctgaccgaccccgagggctgcccactgagccggtttaaggatagcctgggaaacccaacccacatcctgagaatcggcgagagctataaggagaagcagcggaccatccaggccaagaaggaggtggagcagcggagagccggcggctacagccggaagtacgccagcaaagccaagaatctggcagacgatatggtgagaaacaccgctagagatctgctgtactacgccgtgacccaggatgccatgctgatcttcgccaacctgagccggggcttcggccggcagggcaagcggaccttcatggccgagagacagtacacacggatggaggactggctgaccgccaagctggcctacgagggcctgagcaagacctacctgtccaagacactggcccagtacacctccaagacatgcagcaactgtgggtttaccatcaccagcgccgactacgacagggtgctggagaagctgaagaagacagcaacaggctggatgaccacaattaacggcaaggagctgaaggtggagggccagattacctactacaacagatacaagagacagaacgtagtcaaggacctgtccgtcgagctggatagactgagcgaagaatctgtgaacaacgacatctcctcctggacaaagggcagaagcggagaagctctgagcctcctgaagaaaagattctcccatagacccgtgcaggagaagttcgtgtgcctgaactgcggcttcgagacacacgcagccgagcaagccgccctgaacatcgccagatcctggctgttcctgcggagccaggagtacaagaaataccagacaaacaagacaaccggcaacaccgataagagagccttcgtcgagacctggcagtccttttaccggaagaagcttaaggaggtgtggaaacctgccgtgcggtctggcggatctggcggaggctccaccagccccaagaaaaagagaaaagtctaagctgccttctgcggggcttgccttctggccatgcccttcttctctcccttgcacctgtacctcttggtctttgaataaagcctgagtaggaaggctagcaaaaaaaaaaaaaaaaaaaaaaaaaaaaaaaaaaaaaaaaaaaaaaaaaaaaaaaaaaaaaaaaaaaaaaaaaaaaaaaagcccagccggctccccaacctctaccgaggagggcacctctgagtccgccacccccgagagcggccctggcacctccaccgagcccagcgagggcagcgcacccggcagccctgccggcagccccacctccacagaggagggaaccagcaccgagcccagcgaaggcagcgccccaggcaccagcaccgagcctagtgagcaggagattaaacggatcaacaagatcagaagaagacttgtgaaagacagcaacaccaagaaggccggcaagacaggccccatgaaaaccctgctggttagagtgatgacacccgatctgagagagcggctggaaaacctgagaaagaagcctgaaaatatcccccagcccatcagcaatacatctagagccaacctgaataagctgctgaccgattacaccgaaatgaagaaggcgatcctgcatgtgtactgggaagagttccagaaggaccctgtgggcctgatgagccgggtggcccagcctgccagcaagaagatcgatcagaacaagctgaaacctgagatggacgagaagggcaacctgaccaccgccggctttgcctgctctcagtgtggccagcccctgttcgtgtacaagctggagcaggtgtctgagaagggcaaggcttacaccaactacttcggacggtgcaatgtggccgagcacgaaaagctgatcctgctggcccagctgaagcccgagaaggatagcgacgaagccgtgacatatagcctgggaaagtttgggcagagggccctggatttctacagcattcatgtgaccaaggagtccacccaccccgtgaagcccctggcccagatcgccggaaacagatacgcctccggacctgtgggaaaggccctgagcgacgcatgtatgggcacaatcgcctccttcctgtctaagtaccaggacatcatcatcgaacaccagaaggtggtgaagggcaaccagaagagactggagagcctgcgggagctggccggcaaggaaaacctggaataccctagcgtgaccctgccacctcagcctcacaccaaggagggcgttgatgcctacaacgaagtgatcgcccgggtgcgaatgtgggtgaacctgaacctgtggcagaagctgaagctaagcagagatgatgccaagcctctgctgagactgaagggattcccttcctttcctctggtcgagagacaggccaacgaagtggactggtgggacatggtgtgtaacgtgaagaagctgatcaacgagaaaaaggaggatggcaaggtgttttggcagaatctggctggctacaagagacaggaagccctgagaccatacctgagcagcgaggaagatcggaagaagggaaagaaattcgctcggtaccagctgggcgacctgctgctgcacctggaaaagaagcacggcgaggactggggaaaggtgtacgacgaggcctgggagcggattgacaagaaagtggaaggcctgagcaagcacatcaagctggaagaggaacggagaagcgaggacgcccagagcaaggccgccctgaccgactggctgcgggctaaggccagcttcgtgatcgagggcctgaaggaggccgacaaggacgagttctgcagatgcgagctgaagctgcagaagtggtacggggacctgcggggaaagcccttcgccatcgaagccgagaacagcatcctggacatcagcggcttcagcaagcagtacaactgtgccttcatctggcagaaggacggcgtgaagaagctgaacctgtacctgatcatcaactacttcaagggcggcaagctgcggttcaagaagatcaaacctgaagccttcgaagccaacagattctacaccgtgatcaacaaaaagagcggcgagatcgtgcccatggaggtgaacttcaacttcgacgaccccaacctgatcatcctgcctctggcctttggcaagagacagggcagagaattcatctggaacgacctgctgtccctggaaaccggcagcctgaagctggccaacggaagagtgatcgagaagacactgtacaacagaagaacccggcaggatgagcctgccctgttcgtggccctgaccttcgagcggcgggaggtcctggactcctccaatatcaaaccaatgaacctgatcggcgtggcaagaggcgaaaacatccccgccgtgatcgccctgaccgaccccgagggctgcccactgagccggtttaaggatagcctgggaaacccaacccacatcctgagaatcggcgagagctataaggagaagcagcggaccatccaggccaagaaggaggtggagcagcggagagccggcggctacagccggaagtacgccagcaaagccaagaatctggcagacgatatggtgagaaacaccgctagagatctgctgtactacgccgtgacccaggatgccatgctgatcttcgccaacctgagccggggcttcggccggcagggcaagcggaccttcatggccgagagacagtacacacggatggaggactggctgaccgccaagctggcctacgagggcctgagcaagacctacctgtccaagacactggcccagtacacctccaagacatgcagcaactgtgggtttaccatcaccagcgccgactacgacagggtgctggagaagctgaagaagacagcaacaggctggatgaccacaattaacggcaaggagctgaaggtggagggccagattacctactacaacagatacaagagacagaacgtagtcaaggacctgtccgtcgagctggatagactgagcgaagaatctgtgaacaacgacatctcctcctggacaaagggcagaagcggagaagctctgagcctcctgaagaaaagattctcccatagacccgtgcaggagaagttcgtgtgcctgaactgcggcttcgagacacacgcagccgagcaagccgccctgaacatcgccagatcctggctgttcctgcggagccaggagtacaagaaataccagacaaacaagacaaccggcaacaccgataagagagccttcgtcgagacctggcagtccttttaccggaagaagcttaaggaggtgtggaaacctgccgtgcggtctggcggatctggcggaggctccaccagccccaagaaaaagagaaaagtctaagctgccttctgcggggcttgccttctggccatgcccttcttctctcccttgcacctgtacctcttggtctttgaataaagcctgagtaggaaggctagcaaaaaaaaaaaaaaaaaaaaaaaaaaaaaaaaaaaaaaaaaaaaaaaaaaaaaaaaaaaaaaaaaaaaaaaaaaaaaaaa

SEQ ID NO: 9896 - RNA, 8787 nt, synthetic construct
  source 1..8787: mol_type = other RNA
aggaaataagagagaaaagaagagtaagaagaaatataagagccaccatggcccctaagaagaagcgtaaagtgagccggatgaaccacgaccaggagttcgacccccctaaggtgtaccctcccgtccccgccgagaagagaaagcccatccgggtcctgagcctgttcgatggcatcgccaccggtctgctggtgctgaaggacctgggcatccaggtggataggtacattgcctccgaggtgtgcgaggactccatcaccgtgggaatggtgcgtcatcagggcaagatcatgtacgtgggcgacgtgcggagcgtgacacagaagcatatccaggagtggggccctttcgacctggtgatcggcggcagcccttgcaatgacctgagcatcgtgaacccagcccggaagggcctgtacgagggaaccggcagactgttcttcgagttttacagactgctgcacgacgcccggcctaaggaaggcgacgaccggcccttcttttggctgttcgagaatgtggtggccatgggagtcagcgacaagcgggatattagccggttcctggagagcaaccccgtgatgatcgatgccaaggaagtgagcgccgcccaccgggccagatacttctggggcaatctgcctggcatgaacagacccctggccagcaccgtgaacgacaagctggagctgcaggagtgcctggagcacggccggatcgccaagttcagcaaggtgagaaccatcaccacccgaagcaacagcatcaaacaaggcaaggaccagcactttcctgtgttcatgaacgagaaggaggacatcctgtggtgtaccgagatggagagagtgttcgggttcccagtccactacacagatgtcagcaacatgtctagactggccagacagagactgctgggaagaagctggtccgtccctgtgatcagacacctgttcgcccctctgaaggagtacttcgcctgcgtgagcagcggcaacagcaacgccaacagccggggccccagcttctctagcggcctggtgccactgtccctgagagggagccacatgggccccatggagatctacaaaaccgtgagcgcctggaagcggcagcctgtgcgcgtgctgagcctgtttcggaatatcgataaagtcctgaaaagcctgggattcctggagagcggctctggctccggcggtggcaccctgaagtacgtggaggatgtgacaaacgtggtcagacgggatgtggagaagtggggccccttcgatctggtgtacggcagcacccaacccctgggcagctcttgtgaccggtgccctggctggtacatgtttcagttccaccggatcctgcagtacgccctgccgagacaggagtcccagcggccattcttttggattttcatggacaacttgctgctgaccgaggatgaccaggaaactaccactcggttcctgcagaccgaagccgtgaccctgcaggacgtgagaggccgggactaccagaacgccatgcgggtgtggtccaacatccctggactgaaaagcaagcacgcacctctgacccctaaagaagaggagtacctgcaggcccaggtgcggagcagaagcaagctggacgcccctaaggtggatctgctggtgaagaattgcctcctgcccctgagagagtacttcaagtatttcagccagaatagtctgcccctgggaggcagcggcggcggcatggacgccctgaccttcgacgacgtgcacgtgcacttcaccagggaggagtggagcctgctggaccccagccagaagaggctgtacaaggacgtgatgctggagatctacaagaacctgaccgccatcggctacaagtggaaggaccacaacgtgggcgagcacagccagaacgacaggaggtacggcaggcacgagaggagccccgccggcgagaaccacaacgagtacacccagtgcgacggcggcccaagcagcggcgcccctcctcccagcggcggcaggcggcccaagcagcggcgcccctcctcccagcggcggcagcccagccggctccccaacctctaccgaggagggcacctctgagtccgccacccccgagagcggccctggcacctccaccgagcccagcgagggcagcgcacccggcagccctgccggcagccccacctccacagaggagggaaccagcaccgagcccagcgaaggcagcgccccaggcaccagcaccgagcctagtgagcaggagattaaacggatcaacaagatcagaagaagacttgtgaaagacagcaacaccaagaaggccggcaagacaggccccatgaaaaccctgctggttagagtgatgacacccgatctgagagagcggctggaaaacctgagaaagaagcctgaaaatatcccccagcccatcagcaatacatctagagccaacctgaataagctgctgaccgattacaccgaaatgaagaaggcgatcctgcatgtgtactgggaagagttccagaaggaccctgtgggcctgatgagccgggtggcccagcctgccagcaagaagatcgatcagaacaagctgaaacctgagatggacgagaagggcaacctgaccaccgccggctttgcctgctctcagtgtggccagcccctgttcgtgtacaagctggagcaggtgtctgagaagggcaaggcttacaccaactacttcggacggtgcaatgtggccgagcacgaaaagctgatcctgctggcccagctgaagcccgagaaggatagcgacgaagccgtgacatatagcctgggaaagtttgggcagagggccctggatttctacagcattcatgtgaccaaggagtccacccaccccgtgaagcccctggcccagatcgccggaaacagatacgcctccggacctgtgggaaaggccctgagcgacgcatgtatgggcacaatcgcctccttcctgtctaagtaccaggacatcatcatcgaacaccagaaggtggtgaagggcaaccagaagagactggagagcctgcgggagctggccggcaaggaaaacctggaataccctagcgtgaccctgccacctcagcctcacaccaaggagggcgttgatgcctacaacgaagtgatcgcccgggtgcgaatgtgggtgaacctgaacctgtggcagaagctgaagctaagcagagatgatgccaagcctctgctgagactgaagggattcccttcctttcctctggtcgagagacaggccaacgaagtggactggtgggacatggtgtgtaacgtgaagaagctgatcaacgagaaaaaggaggatggcaaggtgttttggcagaatctggctggctacaagagacaggaagccctgagaccatacctgagcagcgaggaagatcggaagaagggaaagaaattcgctcggtaccagctgggcgacctgctgctgcacctggaaaagaagcacggcgaggactggggaaaggtgtacgacgaggcctgggagcggattgacaagaaagtggaaggcctgagcaagcacatcaagctggaagaggaacggagaagcgaggacgcccagagcaaggccgccctgaccgactggctgcgggctaaggccagcttcgtgatcgagggcctgaaggaggccgacaaggacgagttctgcagatgcgagctgaagctgcagaagtggtacggggacctgcggggaaagcccttcgccatcgaagccgagaacagcatcctggacatcagcggcttcagcaagcagtacaactgtgccttcatctggcagaaggacggcgtgaagaagctgaacctgtacctgatcatcaactacttcaagggcggcaagctgcggttcaagaagatcaaacctgaagccttcgaagccaacagattctacaccgtgatcaacaaaaagagcggcgagatcgtgcccatggaggtgaacttcaacttcgacgaccccaacctgatcatcctgcctctggcctttggcaagagacagggcagagaattcatctggaacgacctgctgtccctggaaaccggcagcctgaagctggccaacggaagagtgatcgagaagacactgtacaacagaagaacccggcaggatgagcctgccctgttcgtggccctgaccttcgagcggcgggaggtcctggactcctccaatatcaaaccaatgaacctgatcggcgtggcaagaggcgaaaacatccccgccgtgatcgccctgaccgaccccgagggctgcccactgagccggtttaaggatagcctgggaaacccaacccacatcctgagaatcggcgagagctataaggagaagcagcggaccatccaggccaagaaggaggtggagcagcggagagccggcggctacagccggaagtacgccagcaaagccaagaatctggcagacgatatggtgagaaacaccgctagagatctgctgtactacgccgtgacccaggatgccatgctgatcttcgccaacctgagccggggcttcggccggcagggcaagcggaccttcatggccgagagacagtacacacggatggaggactggctgaccgccaagctggcctacgagggcctgagcaagacctacctgtccaagacactggcccagtacacctccaagacatgcagcaactgtgggtttaccatcaccagcgccgactacgacagggtgctggagaagctgaagaagacagcaacaggctggatgaccacaattaacggcaaggagctgaaggtggagggccagattacctactacaacagatacaagagacagaacgtagtcaaggacctgtccgtcgagctggatagactgagcgaagaatctgtgaacaacgacatctcctcctggacaaagggcagaagcggagaagctctgagcctcctgaagaaaagattctcccatagacccgtgcaggagaagttcgtgtgcctgaactgcggcttcgagacacacgcagccgagcaagccgccctgaacatcgccagatcctggctgttcctgcggagccaggagtacaagaaataccagacaaacaagacaaccggcaacaccgataagagagccttcgtcgagacctggcagtccttttaccggaagaagcttaaggaggtgtggaaacctgccgtgcggtctggcggatctggcggaggctccaccagccccaagaaaaagagaaaagtctaagctgccttctgcggggcttgccttctggccatgcccttcttctctcccttgcacctgtacctcttggtctttgaataaagcctgagtaggaaggctagcaaaaaaaaaaaaaaaaaaaaaaaaaaaaaaaaaaaaaaaaaaaaaaaaaaaaaaaaaaaaaaaaaaaaaaaaaaaaaaaagcccagccggctccccaacctctaccgaggagggcacctctgagtccgccacccccgagagcggccctggcacctccaccgagcccagcgagggcagcgcacccggcagccctgccggcagccccacctccacagaggagggaaccagcaccgagcccagcgaaggcagcgccccaggcaccagcaccgagcctagtgagcaggagattaaacggatcaacaagatcagaagaagacttgtgaaagacagcaacaccaagaaggccggcaagacaggccccatgaaaaccctgctggttagagtgatgacacccgatctgagagagcggctggaaaacctgagaaagaagcctgaaaatatcccccagcccatcagcaatacatctagagccaacctgaataagctgctgaccgattacaccgaaatgaagaaggcgatcctgcatgtgtactgggaagagttccagaaggaccctgtgggcctgatgagccgggtggcccagcctgccagcaagaagatcgatcagaacaagctgaaacctgagatggacgagaagggcaacctgaccaccgccggctttgcctgctctcagtgtggccagcccctgttcgtgtacaagctggagcaggtgtctgagaagggcaaggcttacaccaactacttcggacggtgcaatgtggccgagcacgaaaagctgatcctgctggcccagctgaagcccgagaaggatagcgacgaagccgtgacatatagcctgggaaagtttgggcagagggccctggatttctacagcattcatgtgaccaaggagtccacccaccccgtgaagcccctggcccagatcgccggaaacagatacgcctccggacctgtgggaaaggccctgagcgacgcatgtatgggcacaatcgcctccttcctgtctaagtaccaggacatcatcatcgaacaccagaaggtggtgaagggcaaccagaagagactggagagcctgcgggagctggccggcaaggaaaacctggaataccctagcgtgaccctgccacctcagcctcacaccaaggagggcgttgatgcctacaacgaagtgatcgcccgggtgcgaatgtgggtgaacctgaacctgtggcagaagctgaagctaagcagagatgatgccaagcctctgctgagactgaagggattcccttcctttcctctggtcgagagacaggccaacgaagtggactggtgggacatggtgtgtaacgtgaagaagctgatcaacgagaaaaaggaggatggcaaggtgttttggcagaatctggctggctacaagagacaggaagccctgagaccatacctgagcagcgaggaagatcggaagaagggaaagaaattcgctcggtaccagctgggcgacctgctgctgcacctggaaaagaagcacggcgaggactggggaaaggtgtacgacgaggcctgggagcggattgacaagaaagtggaaggcctgagcaagcacatcaagctggaagaggaacggagaagcgaggacgcccagagcaaggccgccctgaccgactggctgcgggctaaggccagcttcgtgatcgagggcctgaaggaggccgacaaggacgagttctgcagatgcgagctgaagctgcagaagtggtacggggacctgcggggaaagcccttcgccatcgaagccgagaacagcatcctggacatcagcggcttcagcaagcagtacaactgtgccttcatctggcagaaggacggcgtgaagaagctgaacctgtacctgatcatcaactacttcaagggcggcaagctgcggttcaagaagatcaaacctgaagccttcgaagccaacagattctacaccgtgatcaacaaaaagagcggcgagatcgtgcccatggaggtgaacttcaacttcgacgaccccaacctgatcatcctgcctctggcctttggcaagagacagggcagagaattcatctggaacgacctgctgtccctggaaaccggcagcctgaagctggccaacggaagagtgatcgagaagacactgtacaacagaagaacccggcaggatgagcctgccctgttcgtggccctgaccttcgagcggcgggaggtcctggactcctccaatatcaaaccaatgaacctgatcggcgtggcaagaggcgaaaacatccccgccgtgatcgccctgaccgaccccgagggctgcccactgagccggtttaaggatagcctgggaaacccaacccacatcctgagaatcggcgagagctataaggagaagcagcggaccatccaggccaagaaggaggtggagcagcggagagccggcggctacagccggaagtacgccagcaaagccaagaatctggcagacgatatggtgagaaacaccgctagagatctgctgtactacgccgtgacccaggatgccatgctgatcttcgccaacctgagccggggcttcggccggcagggcaagcggaccttcatggccgagagacagtacacacggatggaggactggctgaccgccaagctggcctacgagggcctgagcaagacctacctgtccaagacactggcccagtacacctccaagacatgcagcaactgtgggtttaccatcaccagcgccgactacgacagggtgctggagaagctgaagaagacagcaacaggctggatgaccacaattaacggcaaggagctgaaggtggagggccagattacctactacaacagatacaagagacagaacgtagtcaaggacctgtccgtcgagctggatagactgagcgaagaatctgtgaacaacgacatctcctcctggacaaagggcagaagcggagaagctctgagcctcctgaagaaaagattctcccatagacccgtgcaggagaagttcgtgtgcctgaactgcggcttcgagacacacgcagccgagcaagccgccctgaacatcgccagatcctggctgttcctgcggagccaggagtacaagaaataccagacaaacaagacaaccggcaacaccgataagagagccttcgtcgagacctggcagtccttttaccggaagaagcttaaggaggtgtggaaacctgccgtgcggtctggcggatctggcggaggctccaccagccccaagaaaaagagaaaagtctaagctgccttctgcggggcttgccttctggccatgcccttcttctctcccttgcacctgtacctcttggtctttgaataaagcctgagtaggaaggctagcaaaaaaaaaaaaaaaaaaaaaaaaaaaaaaaaaaaaaaaaaaaaaaaaaaaaaaaaaaaaaaaaaaaaaaaaaaaaaaaa

SEQ ID NO: 9897 - RNA, 8787 nt, synthetic construct
  source 1..8787: mol_type = other RNA
aggaaataagagagaaaagaagagtaagaagaaatataagagccaccatggcccctaagaagaagcgtaaagtgagccggatgaaccacgaccaggagttcgacccccctaaggtgtaccctcccgtccccgccgagaagagaaagcccatccgggtcctgagcctgttcgatggcatcgccaccggtctgctggtgctgaaggacctgggcatccaggtggataggtacattgcctccgaggtgtgcgaggactccatcaccgtgggaatggtgcgtcatcagggcaagatcatgtacgtgggcgacgtgcggagcgtgacacagaagcatatccaggagtggggccctttcgacctggtgatcggcggcagcccttgcaatgacctgagcatcgtgaacccagcccggaagggcctgtacgagggaaccggcagactgttcttcgagttttacagactgctgcacgacgcccggcctaaggaaggcgacgaccggcccttcttttggctgttcgagaatgtggtggccatgggagtcagcgacaagcgggatattagccggttcctggagagcaaccccgtgatgatcgatgccaaggaagtgagcgccgcccaccgggccagatacttctggggcaatctgcctggcatgaacagacccctggccagcaccgtgaacgacaagctggagctgcaggagtgcctggagcacggccggatcgccaagttcagcaaggtgagaaccatcaccacccgaagcaacagcatcaaacaaggcaaggaccagcactttcctgtgttcatgaacgagaaggaggacatcctgtggtgtaccgagatggagagagtgttcgggttcccagtccactacacagatgtcagcaacatgtctagactggccagacagagactgctgggaagaagctggtccgtccctgtgatcagacacctgttcgcccctctgaaggagtacttcgcctgcgtgagcagcggcaacagcaacgccaacagccggggccccagcttctctagcggcctggtgccactgtccctgagagggagccacatgggccccatggagatctacaaaaccgtgagcgcctggaagcggcagcctgtgcgcgtgctgagcctgtttcggaatatcgataaagtcctgaaaagcctgggattcctggagagcggctctggctccggcggtggcaccctgaagtacgtggaggatgtgacaaacgtggtcagacgggatgtggagaagtggggccccttcgatctggtgtacggcagcacccaacccctgggcagctcttgtgaccggtgccctggctggtacatgtttcagttccaccggatcctgcagtacgccctgccgagacaggagtcccagcggccattcttttggattttcatggacaacttgctgctgaccgaggatgaccaggaaactaccactcggttcctgcagaccgaagccgtgaccctgcaggacgtgagaggccgggactaccagaacgccatgcgggtgtggtccaacatccctggactgaaaagcaagcacgcacctctgacccctaaagaagaggagtacctgcaggcccaggtgcggagcagaagcaagctggacgcccctaaggtggatctgctggtgaagaattgcctcctgcccctgagagagtacttcaagtatttcagccagaatagtctgcccctgggaggcagcggcggcggcagccaggagagcctgaccttcaaggacgtggccgtggacttcacccaggaggagtggggcaagctggacagcggccagaggtacctgtacagggacgtgatgctggagaactacaggaacctggtgagcctgggccaccagggcagcaagccctacgtgatcagccagctggagcagggccaggagccctggatcgtggagagggagatcagcaggggcaactgcaaggactggggcaccaggggcggcccaagcagcggcgcccctcctcccagcggcggcaggcggcccaagcagcggcgcccctcctcccagcggcggcagcccagccggctccccaacctctaccgaggagggcacctctgagtccgccacccccgagagcggccctggcacctccaccgagcccagcgagggcagcgcacccggcagccctgccggcagccccacctccacagaggagggaaccagcaccgagcccagcgaaggcagcgccccaggcaccagcaccgagcctagtgagcaggagattaaacggatcaacaagatcagaagaagacttgtgaaagacagcaacaccaagaaggccggcaagacaggccccatgaaaaccctgctggttagagtgatgacacccgatctgagagagcggctggaaaacctgagaaagaagcctgaaaatatcccccagcccatcagcaatacatctagagccaacctgaataagctgctgaccgattacaccgaaatgaagaaggcgatcctgcatgtgtactgggaagagttccagaaggaccctgtgggcctgatgagccgggtggcccagcctgccagcaagaagatcgatcagaacaagctgaaacctgagatggacgagaagggcaacctgaccaccgccggctttgcctgctctcagtgtggccagcccctgttcgtgtacaagctggagcaggtgtctgagaagggcaaggcttacaccaactacttcggacggtgcaatgtggccgagcacgaaaagctgatcctgctggcccagctgaagcccgagaaggatagcgacgaagccgtgacatatagcctgggaaagtttgggcagagggccctggatttctacagcattcatgtgaccaaggagtccacccaccccgtgaagcccctggcccagatcgccggaaacagatacgcctccggacctgtgggaaaggccctgagcgacgcatgtatgggcacaatcgcctccttcctgtctaagtaccaggacatcatcatcgaacaccagaaggtggtgaagggcaaccagaagagactggagagcctgcgggagctggccggcaaggaaaacctggaataccctagcgtgaccctgccacctcagcctcacaccaaggagggcgttgatgcctacaacgaagtgatcgcccgggtgcgaatgtgggtgaacctgaacctgtggcagaagctgaagctaagcagagatgatgccaagcctctgctgagactgaagggattcccttcctttcctctggtcgagagacaggccaacgaagtggactggtgggacatggtgtgtaacgtgaagaagctgatcaacgagaaaaaggaggatggcaaggtgttttggcagaatctggctggctacaagagacaggaagccctgagaccatacctgagcagcgaggaagatcggaagaagggaaagaaattcgctcggtaccagctgggcgacctgctgctgcacctggaaaagaagcacggcgaggactggggaaaggtgtacgacgaggcctgggagcggattgacaagaaagtggaaggcctgagcaagcacatcaagctggaagaggaacggagaagcgaggacgcccagagcaaggccgccctgaccgactggctgcgggctaaggccagcttcgtgatcgagggcctgaaggaggccgacaaggacgagttctgcagatgcgagctgaagctgcagaagtggtacggggacctgcggggaaagcccttcgccatcgaagccgagaacagcatcctggacatcagcggcttcagcaagcagtacaactgtgccttcatctggcagaaggacggcgtgaagaagctgaacctgtacctgatcatcaactacttcaagggcggcaagctgcggttcaagaagatcaaacctgaagccttcgaagccaacagattctacaccgtgatcaacaaaaagagcggcgagatcgtgcccatggaggtgaacttcaacttcgacgaccccaacctgatcatcctgcctctggcctttggcaagagacagggcagagaattcatctggaacgacctgctgtccctggaaaccggcagcctgaagctggccaacggaagagtgatcgagaagacactgtacaacagaagaacccggcaggatgagcctgccctgttcgtggccctgaccttcgagcggcgggaggtcctggactcctccaatatcaaaccaatgaacctgatcggcgtggcaagaggcgaaaacatccccgccgtgatcgccctgaccgaccccgagggctgcccactgagccggtttaaggatagcctgggaaacccaacccacatcctgagaatcggcgagagctataaggagaagcagcggaccatccaggccaagaaggaggtggagcagcggagagccggcggctacagccggaagtacgccagcaaagccaagaatctggcagacgatatggtgagaaacaccgctagagatctgctgtactacgccgtgacccaggatgccatgctgatcttcgccaacctgagccggggcttcggccggcagggcaagcggaccttcatggccgagagacagtacacacggatggaggactggctgaccgccaagctggcctacgagggcctgagcaagacctacctgtccaagacactggcccagtacacctccaagacatgcagcaactgtgggtttaccatcaccagcgccgactacgacagggtgctggagaagctgaagaagacagcaacaggctggatgaccacaattaacggcaaggagctgaaggtggagggccagattacctactacaacagatacaagagacagaacgtagtcaaggacctgtccgtcgagctggatagactgagcgaagaatctgtgaacaacgacatctcctcctggacaaagggcagaagcggagaagctctgagcctcctgaagaaaagattctcccatagacccgtgcaggagaagttcgtgtgcctgaactgcggcttcgagacacacgcagccgagcaagccgccctgaacatcgccagatcctggctgttcctgcggagccaggagtacaagaaataccagacaaacaagacaaccggcaacaccgataagagagccttcgtcgagacctggcagtccttttaccggaagaagcttaaggaggtgtggaaacctgccgtgcggtctggcggatctggcggaggctccaccagccccaagaaaaagagaaaagtctaagctgccttctgcggggcttgccttctggccatgcccttcttctctcccttgcacctgtacctcttggtctttgaataaagcctgagtaggaaggctagcaaaaaaaaaaaaaaaaaaaaaaaaaaaaaaaaaaaaaaaaaaaaaaaaaaaaaaaaaaaaaaaaaaaaaaaaaaaaaaaagcccagccggctccccaacctctaccgaggagggcacctctgagtccgccacccccgagagcggccctggcacctccaccgagcccagcgagggcagcgcacccggcagccctgccggcagccccacctccacagaggagggaaccagcaccgagcccagcgaaggcagcgccccaggcaccagcaccgagcctagtgagcaggagattaaacggatcaacaagatcagaagaagacttgtgaaagacagcaacaccaagaaggccggcaagacaggccccatgaaaaccctgctggttagagtgatgacacccgatctgagagagcggctggaaaacctgagaaagaagcctgaaaatatcccccagcccatcagcaatacatctagagccaacctgaataagctgctgaccgattacaccgaaatgaagaaggcgatcctgcatgtgtactgggaagagttccagaaggaccctgtgggcctgatgagccgggtggcccagcctgccagcaagaagatcgatcagaacaagctgaaacctgagatggacgagaagggcaacctgaccaccgccggctttgcctgctctcagtgtggccagcccctgttcgtgtacaagctggagcaggtgtctgagaagggcaaggcttacaccaactacttcggacggtgcaatgtggccgagcacgaaaagctgatcctgctggcccagctgaagcccgagaaggatagcgacgaagccgtgacatatagcctgggaaagtttgggcagagggccctggatttctacagcattcatgtgaccaaggagtccacccaccccgtgaagcccctggcccagatcgccggaaacagatacgcctccggacctgtgggaaaggccctgagcgacgcatgtatgggcacaatcgcctccttcctgtctaagtaccaggacatcatcatcgaacaccagaaggtggtgaagggcaaccagaagagactggagagcctgcgggagctggccggcaaggaaaacctggaataccctagcgtgaccctgccacctcagcctcacaccaaggagggcgttgatgcctacaacgaagtgatcgcccgggtgcgaatgtgggtgaacctgaacctgtggcagaagctgaagctaagcagagatgatgccaagcctctgctgagactgaagggattcccttcctttcctctggtcgagagacaggccaacgaagtggactggtgggacatggtgtgtaacgtgaagaagctgatcaacgagaaaaaggaggatggcaaggtgttttggcagaatctggctggctacaagagacaggaagccctgagaccatacctgagcagcgaggaagatcggaagaagggaaagaaattcgctcggtaccagctgggcgacctgctgctgcacctggaaaagaagcacggcgaggactggggaaaggtgtacgacgaggcctgggagcggattgacaagaaagtggaaggcctgagcaagcacatcaagctggaagaggaacggagaagcgaggacgcccagagcaaggccgccctgaccgactggctgcgggctaaggccagcttcgtgatcgagggcctgaaggaggccgacaaggacgagttctgcagatgcgagctgaagctgcagaagtggtacggggacctgcggggaaagcccttcgccatcgaagccgagaacagcatcctggacatcagcggcttcagcaagcagtacaactgtgccttcatctggcagaaggacggcgtgaagaagctgaacctgtacctgatcatcaactacttcaagggcggcaagctgcggttcaagaagatcaaacctgaagccttcgaagccaacagattctacaccgtgatcaacaaaaagagcggcgagatcgtgcccatggaggtgaacttcaacttcgacgaccccaacctgatcatcctgcctctggcctttggcaagagacagggcagagaattcatctggaacgacctgctgtccctggaaaccggcagcctgaagctggccaacggaagagtgatcgagaagacactgtacaacagaagaacccggcaggatgagcctgccctgttcgtggccctgaccttcgagcggcgggaggtcctggactcctccaatatcaaaccaatgaacctgatcggcgtggcaagaggcgaaaacatccccgccgtgatcgccctgaccgaccccgagggctgcccactgagccggtttaaggatagcctgggaaacccaacccacatcctgagaatcggcgagagctataaggagaagcagcggaccatccaggccaagaaggaggtggagcagcggagagccggcggctacagccggaagtacgccagcaaagccaagaatctggcagacgatatggtgagaaacaccgctagagatctgctgtactacgccgtgacccaggatgccatgctgatcttcgccaacctgagccggggcttcggccggcagggcaagcggaccttcatggccgagagacagtacacacggatggaggactggctgaccgccaagctggcctacgagggcctgagcaagacctacctgtccaagacactggcccagtacacctccaagacatgcagcaactgtgggtttaccatcaccagcgccgactacgacagggtgctggagaagctgaagaagacagcaacaggctggatgaccacaattaacggcaaggagctgaaggtggagggccagattacctactacaacagatacaagagacagaacgtagtcaaggacctgtccgtcgagctggatagactgagcgaagaatctgtgaacaacgacatctcctcctggacaaagggcagaagcggagaagctctgagcctcctgaagaaaagattctcccatagacccgtgcaggagaagttcgtgtgcctgaactgcggcttcgagacacacgcagccgagcaagccgccctgaacatcgccagatcctggctgttcctgcggagccaggagtacaagaaataccagacaaacaagacaaccggcaacaccgataagagagccttcgtcgagacctggcagtccttttaccggaagaagcttaaggaggtgtggaaacctgccgtgcggtctggcggatctggcggaggctccaccagccccaagaaaaagagaaaagtctaagctgccttctgcggggcttgccttctggccatgcccttcttctctcccttgcacctgtacctcttggtctttgaataaagcctgagtaggaaggctagcaaaaaaaaaaaaaaaaaaaaaaaaaaaaaaaaaaaaaaaaaaaaaaaaaaaaaaaaaaaaaaaaaaaaaaaaaaaaaaaa

SEQ ID NO: 9898 - RNA, 8787 nt, synthetic construct
  source 1..8787: mol_type = other RNA
aggaaataagagagaaaagaagagtaagaagaaatataagagccaccatggcccctaagaagaagcgtaaagtgagccggatgaaccacgaccaggagttcgacccccctaaggtgtaccctcccgtccccgccgagaagagaaagcccatccgggtcctgagcctgttcgatggcatcgccaccggtctgctggtgctgaaggacctgggcatccaggtggataggtacattgcctccgaggtgtgcgaggactccatcaccgtgggaatggtgcgtcatcagggcaagatcatgtacgtgggcgacgtgcggagcgtgacacagaagcatatccaggagtggggccctttcgacctggtgatcggcggcagcccttgcaatgacctgagcatcgtgaacccagcccggaagggcctgtacgagggaaccggcagactgttcttcgagttttacagactgctgcacgacgcccggcctaaggaaggcgacgaccggcccttcttttggctgttcgagaatgtggtggccatgggagtcagcgacaagcgggatattagccggttcctggagagcaaccccgtgatgatcgatgccaaggaagtgagcgccgcccaccgggccagatacttctggggcaatctgcctggcatgaacagacccctggccagcaccgtgaacgacaagctggagctgcaggagtgcctggagcacggccggatcgccaagttcagcaaggtgagaaccatcaccacccgaagcaacagcatcaaacaaggcaaggaccagcactttcctgtgttcatgaacgagaaggaggacatcctgtggtgtaccgagatggagagagtgttcgggttcccagtccactacacagatgtcagcaacatgtctagactggccagacagagactgctgggaagaagctggtccgtccctgtgatcagacacctgttcgcccctctgaaggagtacttcgcctgcgtgagcagcggcaacagcaacgccaacagccggggccccagcttctctagcggcctggtgccactgtccctgagagggagccacatgggccccatggagatctacaaaaccgtgagcgcctggaagcggcagcctgtgcgcgtgctgagcctgtttcggaatatcgataaagtcctgaaaagcctgggattcctggagagcggctctggctccggcggtggcaccctgaagtacgtggaggatgtgacaaacgtggtcagacgggatgtggagaagtggggccccttcgatctggtgtacggcagcacccaacccctgggcagctcttgtgaccggtgccctggctggtacatgtttcagttccaccggatcctgcagtacgccctgccgagacaggagtcccagcggccattcttttggattttcatggacaacttgctgctgaccgaggatgaccaggaaactaccactcggttcctgcagaccgaagccgtgaccctgcaggacgtgagaggccgggactaccagaacgccatgcgggtgtggtccaacatccctggactgaaaagcaagcacgcacctctgacccctaaagaagaggagtacctgcaggcccaggtgcggagcagaagcaagctggacgcccctaaggtggatctgctggtgaagaattgcctcctgcccctgagagagtacttcaagtatttcagccagaatagtctgcccctgggaggcagcggcggcggcctgcagggcctgctgaccttcagggacgtggccatcgagttcagccaggacgagtggggctgcctgaaccagagccagagggagctgtacagggacgtgatgctggagacctacggccacctgctgttcctgggcctgatcgtgagcaagccccacctggtgatcttcctggagcagaagagggagctgtgggacgtgaagaggaagaagaccgtgaggacccagaagggcgagaacaccagcggcggcccaagcagcggcgcccctcctcccagcggcggcaggcggcccaagcagcggcgcccctcctcccagcggcggcagcccagccggctccccaacctctaccgaggagggcacctctgagtccgccacccccgagagcggccctggcacctccaccgagcccagcgagggcagcgcacccggcagccctgccggcagccccacctccacagaggagggaaccagcaccgagcccagcgaaggcagcgccccaggcaccagcaccgagcctagtgagcaggagattaaacggatcaacaagatcagaagaagacttgtgaaagacagcaacaccaagaaggccggcaagacaggccccatgaaaaccctgctggttagagtgatgacacccgatctgagagagcggctggaaaacctgagaaagaagcctgaaaatatcccccagcccatcagcaatacatctagagccaacctgaataagctgctgaccgattacaccgaaatgaagaaggcgatcctgcatgtgtactgggaagagttccagaaggaccctgtgggcctgatgagccgggtggcccagcctgccagcaagaagatcgatcagaacaagctgaaacctgagatggacgagaagggcaacctgaccaccgccggctttgcctgctctcagtgtggccagcccctgttcgtgtacaagctggagcaggtgtctgagaagggcaaggcttacaccaactacttcggacggtgcaatgtggccgagcacgaaaagctgatcctgctggcccagctgaagcccgagaaggatagcgacgaagccgtgacatatagcctgggaaagtttgggcagagggccctggatttctacagcattcatgtgaccaaggagtccacccaccccgtgaagcccctggcccagatcgccggaaacagatacgcctccggacctgtgggaaaggccctgagcgacgcatgtatgggcacaatcgcctccttcctgtctaagtaccaggacatcatcatcgaacaccagaaggtggtgaagggcaaccagaagagactggagagcctgcgggagctggccggcaaggaaaacctggaataccctagcgtgaccctgccacctcagcctcacaccaaggagggcgttgatgcctacaacgaagtgatcgcccgggtgcgaatgtgggtgaacctgaacctgtggcagaagctgaagctaagcagagatgatgccaagcctctgctgagactgaagggattcccttcctttcctctggtcgagagacaggccaacgaagtggactggtgggacatggtgtgtaacgtgaagaagctgatcaacgagaaaaaggaggatggcaaggtgttttggcagaatctggctggctacaagagacaggaagccctgagaccatacctgagcagcgaggaagatcggaagaagggaaagaaattcgctcggtaccagctgggcgacctgctgctgcacctggaaaagaagcacggcgaggactggggaaaggtgtacgacgaggcctgggagcggattgacaagaaagtggaaggcctgagcaagcacatcaagctggaagaggaacggagaagcgaggacgcccagagcaaggccgccctgaccgactggctgcgggctaaggccagcttcgtgatcgagggcctgaaggaggccgacaaggacgagttctgcagatgcgagctgaagctgcagaagtggtacggggacctgcggggaaagcccttcgccatcgaagccgagaacagcatcctggacatcagcggcttcagcaagcagtacaactgtgccttcatctggcagaaggacggcgtgaagaagctgaacctgtacctgatcatcaactacttcaagggcggcaagctgcggttcaagaagatcaaacctgaagccttcgaagccaacagattctacaccgtgatcaacaaaaagagcggcgagatcgtgcccatggaggtgaacttcaacttcgacgaccccaacctgatcatcctgcctctggcctttggcaagagacagggcagagaattcatctggaacgacctgctgtccctggaaaccggcagcctgaagctggccaacggaagagtgatcgagaagacactgtacaacagaagaacccggcaggatgagcctgccctgttcgtggccctgaccttcgagcggcgggaggtcctggactcctccaatatcaaaccaatgaacctgatcggcgtggcaagaggcgaaaacatccccgccgtgatcgccctgaccgaccccgagggctgcccactgagccggtttaaggatagcctgggaaacccaacccacatcctgagaatcggcgagagctataaggagaagcagcggaccatccaggccaagaaggaggtggagcagcggagagccggcggctacagccggaagtacgccagcaaagccaagaatctggcagacgatatggtgagaaacaccgctagagatctgctgtactacgccgtgacccaggatgccatgctgatcttcgccaacctgagccggggcttcggccggcagggcaagcggaccttcatggccgagagacagtacacacggatggaggactggctgaccgccaagctggcctacgagggcctgagcaagacctacctgtccaagacactggcccagtacacctccaagacatgcagcaactgtgggtttaccatcaccagcgccgactacgacagggtgctggagaagctgaagaagacagcaacaggctggatgaccacaattaacggcaaggagctgaaggtggagggccagattacctactacaacagatacaagagacagaacgtagtcaaggacctgtccgtcgagctggatagactgagcgaagaatctgtgaacaacgacatctcctcctggacaaagggcagaagcggagaagctctgagcctcctgaagaaaagattctcccatagacccgtgcaggagaagttcgtgtgcctgaactgcggcttcgagacacacgcagccgagcaagccgccctgaacatcgccagatcctggctgttcctgcggagccaggagtacaagaaataccagacaaacaagacaaccggcaacaccgataagagagccttcgtcgagacctggcagtccttttaccggaagaagcttaaggaggtgtggaaacctgccgtgcggtctggcggatctggcggaggctccaccagccccaagaaaaagagaaaagtctaagctgccttctgcggggcttgccttctggccatgcccttcttctctcccttgcacctgtacctcttggtctttgaataaagcctgagtaggaaggctagcaaaaaaaaaaaaaaaaaaaaaaaaaaaaaaaaaaaaaaaaaaaaaaaaaaaaaaaaaaaaaaaaaaaaaaaaaaaaaaaagcccagccggctccccaacctctaccgaggagggcacctctgagtccgccacccccgagagcggccctggcacctccaccgagcccagcgagggcagcgcacccggcagccctgccggcagccccacctccacagaggagggaaccagcaccgagcccagcgaaggcagcgccccaggcaccagcaccgagcctagtgagcaggagattaaacggatcaacaagatcagaagaagacttgtgaaagacagcaacaccaagaaggccggcaagacaggccccatgaaaaccctgctggttagagtgatgacacccgatctgagagagcggctggaaaacctgagaaagaagcctgaaaatatcccccagcccatcagcaatacatctagagccaacctgaataagctgctgaccgattacaccgaaatgaagaaggcgatcctgcatgtgtactgggaagagttccagaaggaccctgtgggcctgatgagccgggtggcccagcctgccagcaagaagatcgatcagaacaagctgaaacctgagatggacgagaagggcaacctgaccaccgccggctttgcctgctctcagtgtggccagcccctgttcgtgtacaagctggagcaggtgtctgagaagggcaaggcttacaccaactacttcggacggtgcaatgtggccgagcacgaaaagctgatcctgctggcccagctgaagcccgagaaggatagcgacgaagccgtgacatatagcctgggaaagtttgggcagagggccctggatttctacagcattcatgtgaccaaggagtccacccaccccgtgaagcccctggcccagatcgccggaaacagatacgcctccggacctgtgggaaaggccctgagcgacgcatgtatgggcacaatcgcctccttcctgtctaagtaccaggacatcatcatcgaacaccagaaggtggtgaagggcaaccagaagagactggagagcctgcgggagctggccggcaaggaaaacctggaataccctagcgtgaccctgccacctcagcctcacaccaaggagggcgttgatgcctacaacgaagtgatcgcccgggtgcgaatgtgggtgaacctgaacctgtggcagaagctgaagctaagcagagatgatgccaagcctctgctgagactgaagggattcccttcctttcctctggtcgagagacaggccaacgaagtggactggtgggacatggtgtgtaacgtgaagaagctgatcaacgagaaaaaggaggatggcaaggtgttttggcagaatctggctggctacaagagacaggaagccctgagaccatacctgagcagcgaggaagatcggaagaagggaaagaaattcgctcggtaccagctgggcgacctgctgctgcacctggaaaagaagcacggcgaggactggggaaaggtgtacgacgaggcctgggagcggattgacaagaaagtggaaggcctgagcaagcacatcaagctggaagaggaacggagaagcgaggacgcccagagcaaggccgccctgaccgactggctgcgggctaaggccagcttcgtgatcgagggcctgaaggaggccgacaaggacgagttctgcagatgcgagctgaagctgcagaagtggtacggggacctgcggggaaagcccttcgccatcgaagccgagaacagcatcctggacatcagcggcttcagcaagcagtacaactgtgccttcatctggcagaaggacggcgtgaagaagctgaacctgtacctgatcatcaactacttcaagggcggcaagctgcggttcaagaagatcaaacctgaagccttcgaagccaacagattctacaccgtgatcaacaaaaagagcggcgagatcgtgcccatggaggtgaacttcaacttcgacgaccccaacctgatcatcctgcctctggcctttggcaagagacagggcagagaattcatctggaacgacctgctgtccctggaaaccggcagcctgaagctggccaacggaagagtgatcgagaagacactgtacaacagaagaacccggcaggatgagcctgccctgttcgtggccctgaccttcgagcggcgggaggtcctggactcctccaatatcaaaccaatgaacctgatcggcgtggcaagaggcgaaaacatccccgccgtgatcgccctgaccgaccccgagggctgcccactgagccggtttaaggatagcctgggaaacccaacccacatcctgagaatcggcgagagctataaggagaagcagcggaccatccaggccaagaaggaggtggagcagcggagagccggcggctacagccggaagtacgccagcaaagccaagaatctggcagacgatatggtgagaaacaccgctagagatctgctgtactacgccgtgacccaggatgccatgctgatcttcgccaacctgagccggggcttcggccggcagggcaagcggaccttcatggccgagagacagtacacacggatggaggactggctgaccgccaagctggcctacgagggcctgagcaagacctacctgtccaagacactggcccagtacacctccaagacatgcagcaactgtgggtttaccatcaccagcgccgactacgacagggtgctggagaagctgaagaagacagcaacaggctggatgaccacaattaacggcaaggagctgaaggtggagggccagattacctactacaacagatacaagagacagaacgtagtcaaggacctgtccgtcgagctggatagactgagcgaagaatctgtgaacaacgacatctcctcctggacaaagggcagaagcggagaagctctgagcctcctgaagaaaagattctcccatagacccgtgcaggagaagttcgtgtgcctgaactgcggcttcgagacacacgcagccgagcaagccgccctgaacatcgccagatcctggctgttcctgcggagccaggagtacaagaaataccagacaaacaagacaaccggcaacaccgataagagagccttcgtcgagacctggcagtccttttaccggaagaagcttaaggaggtgtggaaacctgccgtgcggtctggcggatctggcggaggctccaccagccccaagaaaaagagaaaagtctaagctgccttctgcggggcttgccttctggccatgcccttcttctctcccttgcacctgtacctcttggtctttgaataaagcctgagtaggaaggctagcaaaaaaaaaaaaaaaaaaaaaaaaaaaaaaaaaaaaaaaaaaaaaaaaaaaaaaaaaaaaaaaaaaaaaaaaaaaaaaaa

SEQ ID NO: 9899 - RNA, 8787 nt, synthetic construct
  source 1..8787: mol_type = other RNA
aggaaataagagagaaaagaagagtaagaagaaatataagagccaccatggcccctaagaagaagcgtaaagtgagccggatgaaccacgaccaggagttcgacccccctaaggtgtaccctcccgtccccgccgagaagagaaagcccatccgggtcctgagcctgttcgatggcatcgccaccggtctgctggtgctgaaggacctgggcatccaggtggataggtacattgcctccgaggtgtgcgaggactccatcaccgtgggaatggtgcgtcatcagggcaagatcatgtacgtgggcgacgtgcggagcgtgacacagaagcatatccaggagtggggccctttcgacctggtgatcggcggcagcccttgcaatgacctgagcatcgtgaacccagcccggaagggcctgtacgagggaaccggcagactgttcttcgagttttacagactgctgcacgacgcccggcctaaggaaggcgacgaccggcccttcttttggctgttcgagaatgtggtggccatgggagtcagcgacaagcgggatattagccggttcctggagagcaaccccgtgatgatcgatgccaaggaagtgagcgccgcccaccgggccagatacttctggggcaatctgcctggcatgaacagacccctggccagcaccgtgaacgacaagctggagctgcaggagtgcctggagcacggccggatcgccaagttcagcaaggtgagaaccatcaccacccgaagcaacagcatcaaacaaggcaaggaccagcactttcctgtgttcatgaacgagaaggaggacatcctgtggtgtaccgagatggagagagtgttcgggttcccagtccactacacagatgtcagcaacatgtctagactggccagacagagactgctgggaagaagctggtccgtccctgtgatcagacacctgttcgcccctctgaaggagtacttcgcctgcgtgagcagcggcaacagcaacgccaacagccggggccccagcttctctagcggcctggtgccactgtccctgagagggagccacatgggccccatggagatctacaaaaccgtgagcgcctggaagcggcagcctgtgcgcgtgctgagcctgtttcggaatatcgataaagtcctgaaaagcctgggattcctggagagcggctctggctccggcggtggcaccctgaagtacgtggaggatgtgacaaacgtggtcagacgggatgtggagaagtggggccccttcgatctggtgtacggcagcacccaacccctgggcagctcttgtgaccggtgccctggctggtacatgtttcagttccaccggatcctgcagtacgccctgccgagacaggagtcccagcggccattcttttggattttcatggacaacttgctgctgaccgaggatgaccaggaaactaccactcggttcctgcagaccgaagccgtgaccctgcaggacgtgagaggccgggactaccagaacgccatgcgggtgtggtccaacatccctggactgaaaagcaagcacgcacctctgacccctaaagaagaggagtacctgcaggcccaggtgcggagcagaagcaagctggacgcccctaaggtggatctgctggtgaagaattgcctcctgcccctgagagagtacttcaagtatttcagccagaatagtctgcccctgggaggcagcggcggcggcgccctggagagcgtgaccttccaggacgtggccgtgaacttcacccacgaggagtggggccacctgaagcccgcccagaaggacctgtacagggaggtgatgatggagaactaccagaacttcgtgagcctgggcctgcccttcagcaagccccacgtgatcagccagctggagaagggcgaggccccctggatcaccgagaaggccagcctggtgcccagggtgagctgccaggacttcttcggcggcccaagcagcggcgcccctcctcccagcggcggcaggcggcccaagcagcggcgcccctcctcccagcggcggcagcccagccggctccccaacctctaccgaggagggcacctctgagtccgccacccccgagagcggccctggcacctccaccgagcccagcgagggcagcgcacccggcagccctgccggcagccccacctccacagaggagggaaccagcaccgagcccagcgaaggcagcgccccaggcaccagcaccgagcctagtgagcaggagattaaacggatcaacaagatcagaagaagacttgtgaaagacagcaacaccaagaaggccggcaagacaggccccatgaaaaccctgctggttagagtgatgacacccgatctgagagagcggctggaaaacctgagaaagaagcctgaaaatatcccccagcccatcagcaatacatctagagccaacctgaataagctgctgaccgattacaccgaaatgaagaaggcgatcctgcatgtgtactgggaagagttccagaaggaccctgtgggcctgatgagccgggtggcccagcctgccagcaagaagatcgatcagaacaagctgaaacctgagatggacgagaagggcaacctgaccaccgccggctttgcctgctctcagtgtggccagcccctgttcgtgtacaagctggagcaggtgtctgagaagggcaaggcttacaccaactacttcggacggtgcaatgtggccgagcacgaaaagctgatcctgctggcccagctgaagcccgagaaggatagcgacgaagccgtgacatatagcctgggaaagtttgggcagagggccctggatttctacagcattcatgtgaccaaggagtccacccaccccgtgaagcccctggcccagatcgccggaaacagatacgcctccggacctgtgggaaaggccctgagcgacgcatgtatgggcacaatcgcctccttcctgtctaagtaccaggacatcatcatcgaacaccagaaggtggtgaagggcaaccagaagagactggagagcctgcgggagctggccggcaaggaaaacctggaataccctagcgtgaccctgccacctcagcctcacaccaaggagggcgttgatgcctacaacgaagtgatcgcccgggtgcgaatgtgggtgaacctgaacctgtggcagaagctgaagctaagcagagatgatgccaagcctctgctgagactgaagggattcccttcctttcctctggtcgagagacaggccaacgaagtggactggtgggacatggtgtgtaacgtgaagaagctgatcaacgagaaaaaggaggatggcaaggtgttttggcagaatctggctggctacaagagacaggaagccctgagaccatacctgagcagcgaggaagatcggaagaagggaaagaaattcgctcggtaccagctgggcgacctgctgctgcacctggaaaagaagcacggcgaggactggggaaaggtgtacgacgaggcctgggagcggattgacaagaaagtggaaggcctgagcaagcacatcaagctggaagaggaacggagaagcgaggacgcccagagcaaggccgccctgaccgactggctgcgggctaaggccagcttcgtgatcgagggcctgaaggaggccgacaaggacgagttctgcagatgcgagctgaagctgcagaagtggtacggggacctgcggggaaagcccttcgccatcgaagccgagaacagcatcctggacatcagcggcttcagcaagcagtacaactgtgccttcatctggcagaaggacggcgtgaagaagctgaacctgtacctgatcatcaactacttcaagggcggcaagctgcggttcaagaagatcaaacctgaagccttcgaagccaacagattctacaccgtgatcaacaaaaagagcggcgagatcgtgcccatggaggtgaacttcaacttcgacgaccccaacctgatcatcctgcctctggcctttggcaagagacagggcagagaattcatctggaacgacctgctgtccctggaaaccggcagcctgaagctggccaacggaagagtgatcgagaagacactgtacaacagaagaacccggcaggatgagcctgccctgttcgtggccctgaccttcgagcggcgggaggtcctggactcctccaatatcaaaccaatgaacctgatcggcgtggcaagaggcgaaaacatccccgccgtgatcgccctgaccgaccccgagggctgcccactgagccggtttaaggatagcctgggaaacccaacccacatcctgagaatcggcgagagctataaggagaagcagcggaccatccaggccaagaaggaggtggagcagcggagagccggcggctacagccggaagtacgccagcaaagccaagaatctggcagacgatatggtgagaaacaccgctagagatctgctgtactacgccgtgacccaggatgccatgctgatcttcgccaacctgagccggggcttcggccggcagggcaagcggaccttcatggccgagagacagtacacacggatggaggactggctgaccgccaagctggcctacgagggcctgagcaagacctacctgtccaagacactggcccagtacacctccaagacatgcagcaactgtgggtttaccatcaccagcgccgactacgacagggtgctggagaagctgaagaagacagcaacaggctggatgaccacaattaacggcaaggagctgaaggtggagggccagattacctactacaacagatacaagagacagaacgtagtcaaggacctgtccgtcgagctggatagactgagcgaagaatctgtgaacaacgacatctcctcctggacaaagggcagaagcggagaagctctgagcctcctgaagaaaagattctcccatagacccgtgcaggagaagttcgtgtgcctgaactgcggcttcgagacacacgcagccgagcaagccgccctgaacatcgccagatcctggctgttcctgcggagccaggagtacaagaaataccagacaaacaagacaaccggcaacaccgataagagagccttcgtcgagacctggcagtccttttaccggaagaagcttaaggaggtgtggaaacctgccgtgcggtctggcggatctggcggaggctccaccagccccaagaaaaagagaaaagtctaagctgccttctgcggggcttgccttctggccatgcccttcttctctcccttgcacctgtacctcttggtctttgaataaagcctgagtaggaaggctagcaaaaaaaaaaaaaaaaaaaaaaaaaaaaaaaaaaaaaaaaaaaaaaaaaaaaaaaaaaaaaaaaaaaaaaaaaaaaaaaagcccagccggctccccaacctctaccgaggagggcacctctgagtccgccacccccgagagcggccctggcacctccaccgagcccagcgagggcagcgcacccggcagccctgccggcagccccacctccacagaggagggaaccagcaccgagcccagcgaaggcagcgccccaggcaccagcaccgagcctagtgagcaggagattaaacggatcaacaagatcagaagaagacttgtgaaagacagcaacaccaagaaggccggcaagacaggccccatgaaaaccctgctggttagagtgatgacacccgatctgagagagcggctggaaaacctgagaaagaagcctgaaaatatcccccagcccatcagcaatacatctagagccaacctgaataagctgctgaccgattacaccgaaatgaagaaggcgatcctgcatgtgtactgggaagagttccagaaggaccctgtgggcctgatgagccgggtggcccagcctgccagcaagaagatcgatcagaacaagctgaaacctgagatggacgagaagggcaacctgaccaccgccggctttgcctgctctcagtgtggccagcccctgttcgtgtacaagctggagcaggtgtctgagaagggcaaggcttacaccaactacttcggacggtgcaatgtggccgagcacgaaaagctgatcctgctggcccagctgaagcccgagaaggatagcgacgaagccgtgacatatagcctgggaaagtttgggcagagggccctggatttctacagcattcatgtgaccaaggagtccacccaccccgtgaagcccctggcccagatcgccggaaacagatacgcctccggacctgtgggaaaggccctgagcgacgcatgtatgggcacaatcgcctccttcctgtctaagtaccaggacatcatcatcgaacaccagaaggtggtgaagggcaaccagaagagactggagagcctgcgggagctggccggcaaggaaaacctggaataccctagcgtgaccctgccacctcagcctcacaccaaggagggcgttgatgcctacaacgaagtgatcgcccgggtgcgaatgtgggtgaacctgaacctgtggcagaagctgaagctaagcagagatgatgccaagcctctgctgagactgaagggattcccttcctttcctctggtcgagagacaggccaacgaagtggactggtgggacatggtgtgtaacgtgaagaagctgatcaacgagaaaaaggaggatggcaaggtgttttggcagaatctggctggctacaagagacaggaagccctgagaccatacctgagcagcgaggaagatcggaagaagggaaagaaattcgctcggtaccagctgggcgacctgctgctgcacctggaaaagaagcacggcgaggactggggaaaggtgtacgacgaggcctgggagcggattgacaagaaagtggaaggcctgagcaagcacatcaagctggaagaggaacggagaagcgaggacgcccagagcaaggccgccctgaccgactggctgcgggctaaggccagcttcgtgatcgagggcctgaaggaggccgacaaggacgagttctgcagatgcgagctgaagctgcagaagtggtacggggacctgcggggaaagcccttcgccatcgaagccgagaacagcatcctggacatcagcggcttcagcaagcagtacaactgtgccttcatctggcagaaggacggcgtgaagaagctgaacctgtacctgatcatcaactacttcaagggcggcaagctgcggttcaagaagatcaaacctgaagccttcgaagccaacagattctacaccgtgatcaacaaaaagagcggcgagatcgtgcccatggaggtgaacttcaacttcgacgaccccaacctgatcatcctgcctctggcctttggcaagagacagggcagagaattcatctggaacgacctgctgtccctggaaaccggcagcctgaagctggccaacggaagagtgatcgagaagacactgtacaacagaagaacccggcaggatgagcctgccctgttcgtggccctgaccttcgagcggcgggaggtcctggactcctccaatatcaaaccaatgaacctgatcggcgtggcaagaggcgaaaacatccccgccgtgatcgccctgaccgaccccgagggctgcccactgagccggtttaaggatagcctgggaaacccaacccacatcctgagaatcggcgagagctataaggagaagcagcggaccatccaggccaagaaggaggtggagcagcggagagccggcggctacagccggaagtacgccagcaaagccaagaatctggcagacgatatggtgagaaacaccgctagagatctgctgtactacgccgtgacccaggatgccatgctgatcttcgccaacctgagccggggcttcggccggcagggcaagcggaccttcatggccgagagacagtacacacggatggaggactggctgaccgccaagctggcctacgagggcctgagcaagacctacctgtccaagacactggcccagtacacctccaagacatgcagcaactgtgggtttaccatcaccagcgccgactacgacagggtgctggagaagctgaagaagacagcaacaggctggatgaccacaattaacggcaaggagctgaaggtggagggccagattacctactacaacagatacaagagacagaacgtagtcaaggacctgtccgtcgagctggatagactgagcgaagaatctgtgaacaacgacatctcctcctggacaaagggcagaagcggagaagctctgagcctcctgaagaaaagattctcccatagacccgtgcaggagaagttcgtgtgcctgaactgcggcttcgagacacacgcagccgagcaagccgccctgaacatcgccagatcctggctgttcctgcggagccaggagtacaagaaataccagacaaacaagacaaccggcaacaccgataagagagccttcgtcgagacctggcagtccttttaccggaagaagcttaaggaggtgtggaaacctgccgtgcggtctggcggatctggcggaggctccaccagccccaagaaaaagagaaaagtctaagctgccttctgcggggcttgccttctggccatgcccttcttctctcccttgcacctgtacctcttggtctttgaataaagcctgagtaggaaggctagcaaaaaaaaaaaaaaaaaaaaaaaaaaaaaaaaaaaaaaaaaaaaaaaaaaaaaaaaaaaaaaaaaaaaaaaaaaaaaaaa

SEQ ID NO: 9900 - RNA, 8787 nt, synthetic construct
  source 1..8787: mol_type = other RNA
aggaaataagagagaaaagaagagtaagaagaaatataagagccaccatggcccctaagaagaagcgtaaagtgagccggatgaaccacgaccaggagttcgacccccctaaggtgtaccctcccgtccccgccgagaagagaaagcccatccgggtcctgagcctgttcgatggcatcgccaccggtctgctggtgctgaaggacctgggcatccaggtggataggtacattgcctccgaggtgtgcgaggactccatcaccgtgggaatggtgcgtcatcagggcaagatcatgtacgtgggcgacgtgcggagcgtgacacagaagcatatccaggagtggggccctttcgacctggtgatcggcggcagcccttgcaatgacctgagcatcgtgaacccagcccggaagggcctgtacgagggaaccggcagactgttcttcgagttttacagactgctgcacgacgcccggcctaaggaaggcgacgaccggcccttcttttggctgttcgagaatgtggtggccatgggagtcagcgacaagcgggatattagccggttcctggagagcaaccccgtgatgatcgatgccaaggaagtgagcgccgcccaccgggccagatacttctggggcaatctgcctggcatgaacagacccctggccagcaccgtgaacgacaagctggagctgcaggagtgcctggagcacggccggatcgccaagttcagcaaggtgagaaccatcaccacccgaagcaacagcatcaaacaaggcaaggaccagcactttcctgtgttcatgaacgagaaggaggacatcctgtggtgtaccgagatggagagagtgttcgggttcccagtccactacacagatgtcagcaacatgtctagactggccagacagagactgctgggaagaagctggtccgtccctgtgatcagacacctgttcgcccctctgaaggagtacttcgcctgcgtgagcagcggcaacagcaacgccaacagccggggccccagcttctctagcggcctggtgccactgtccctgagagggagccacatgggccccatggagatctacaaaaccgtgagcgcctggaagcggcagcctgtgcgcgtgctgagcctgtttcggaatatcgataaagtcctgaaaagcctgggattcctggagagcggctctggctccggcggtggcaccctgaagtacgtggaggatgtgacaaacgtggtcagacgggatgtggagaagtggggccccttcgatctggtgtacggcagcacccaacccctgggcagctcttgtgaccggtgccctggctggtacatgtttcagttccaccggatcctgcagtacgccctgccgagacaggagtcccagcggccattcttttggattttcatggacaacttgctgctgaccgaggatgaccaggaaactaccactcggttcctgcagaccgaagccgtgaccctgcaggacgtgagaggccgggactaccagaacgccatgcgggtgtggtccaacatccctggactgaaaagcaagcacgcacctctgacccctaaagaagaggagtacctgcaggcccaggtgcggagcagaagcaagctggacgcccctaaggtggatctgctggtgaagaattgcctcctgcccctgagagagtacttcaagtatttcagccagaatagtctgcccctgggaggcagcggcggcggcaggaccggccccctgaccttcggcgacgtggccgtggagttcagcggcgaggagtgggcctggctggacagcgcccagaggagcctgcacaggagcgtgatgctggagaactacaggaacctggccagcctgggcctgtgcatgagcaagcccgagatgatcagcagcctggagcagagcaaggagccctgggccgtgaaggccaagagcaccaggggcaggtgccccgacctgaacctgtgcggcggcccaagcagcggcgcccctcctcccagcggcggcaggcggcccaagcagcggcgcccctcctcccagcggcggcagcccagccggctccccaacctctaccgaggagggcacctctgagtccgccacccccgagagcggccctggcacctccaccgagcccagcgagggcagcgcacccggcagccctgccggcagccccacctccacagaggagggaaccagcaccgagcccagcgaaggcagcgccccaggcaccagcaccgagcctagtgagcaggagattaaacggatcaacaagatcagaagaagacttgtgaaagacagcaacaccaagaaggccggcaagacaggccccatgaaaaccctgctggttagagtgatgacacccgatctgagagagcggctggaaaacctgagaaagaagcctgaaaatatcccccagcccatcagcaatacatctagagccaacctgaataagctgctgaccgattacaccgaaatgaagaaggcgatcctgcatgtgtactgggaagagttccagaaggaccctgtgggcctgatgagccgggtggcccagcctgccagcaagaagatcgatcagaacaagctgaaacctgagatggacgagaagggcaacctgaccaccgccggctttgcctgctctcagtgtggccagcccctgttcgtgtacaagctggagcaggtgtctgagaagggcaaggcttacaccaactacttcggacggtgcaatgtggccgagcacgaaaagctgatcctgctggcccagctgaagcccgagaaggatagcgacgaagccgtgacatatagcctgggaaagtttgggcagagggccctggatttctacagcattcatgtgaccaaggagtccacccaccccgtgaagcccctggcccagatcgccggaaacagatacgcctccggacctgtgggaaaggccctgagcgacgcatgtatgggcacaatcgcctccttcctgtctaagtaccaggacatcatcatcgaacaccagaaggtggtgaagggcaaccagaagagactggagagcctgcgggagctggccggcaaggaaaacctggaataccctagcgtgaccctgccacctcagcctcacaccaaggagggcgttgatgcctacaacgaagtgatcgcccgggtgcgaatgtgggtgaacctgaacctgtggcagaagctgaagctaagcagagatgatgccaagcctctgctgagactgaagggattcccttcctttcctctggtcgagagacaggccaacgaagtggactggtgggacatggtgtgtaacgtgaagaagctgatcaacgagaaaaaggaggatggcaaggtgttttggcagaatctggctggctacaagagacaggaagccctgagaccatacctgagcagcgaggaagatcggaagaagggaaagaaattcgctcggtaccagctgggcgacctgctgctgcacctggaaaagaagcacggcgaggactggggaaaggtgtacgacgaggcctgggagcggattgacaagaaagtggaaggcctgagcaagcacatcaagctggaagaggaacggagaagcgaggacgcccagagcaaggccgccctgaccgactggctgcgggctaaggccagcttcgtgatcgagggcctgaaggaggccgacaaggacgagttctgcagatgcgagctgaagctgcagaagtggtacggggacctgcggggaaagcccttcgccatcgaagccgagaacagcatcctggacatcagcggcttcagcaagcagtacaactgtgccttcatctggcagaaggacggcgtgaagaagctgaacctgtacctgatcatcaactacttcaagggcggcaagctgcggttcaagaagatcaaacctgaagccttcgaagccaacagattctacaccgtgatcaacaaaaagagcggcgagatcgtgcccatggaggtgaacttcaacttcgacgaccccaacctgatcatcctgcctctggcctttggcaagagacagggcagagaattcatctggaacgacctgctgtccctggaaaccggcagcctgaagctggccaacggaagagtgatcgagaagacactgtacaacagaagaacccggcaggatgagcctgccctgttcgtggccctgaccttcgagcggcgggaggtcctggactcctccaatatcaaaccaatgaacctgatcggcgtggcaagaggcgaaaacatccccgccgtgatcgccctgaccgaccccgagggctgcccactgagccggtttaaggatagcctgggaaacccaacccacatcctgagaatcggcgagagctataaggagaagcagcggaccatccaggccaagaaggaggtggagcagcggagagccggcggctacagccggaagtacgccagcaaagccaagaatctggcagacgatatggtgagaaacaccgctagagatctgctgtactacgccgtgacccaggatgccatgctgatcttcgccaacctgagccggggcttcggccggcagggcaagcggaccttcatggccgagagacagtacacacggatggaggactggctgaccgccaagctggcctacgagggcctgagcaagacctacctgtccaagacactggcccagtacacctccaagacatgcagcaactgtgggtttaccatcaccagcgccgactacgacagggtgctggagaagctgaagaagacagcaacaggctggatgaccacaattaacggcaaggagctgaaggtggagggccagattacctactacaacagatacaagagacagaacgtagtcaaggacctgtccgtcgagctggatagactgagcgaagaatctgtgaacaacgacatctcctcctggacaaagggcagaagcggagaagctctgagcctcctgaagaaaagattctcccatagacccgtgcaggagaagttcgtgtgcctgaactgcggcttcgagacacacgcagccgagcaagccgccctgaacatcgccagatcctggctgttcctgcggagccaggagtacaagaaataccagacaaacaagacaaccggcaacaccgataagagagccttcgtcgagacctggcagtccttttaccggaagaagcttaaggaggtgtggaaacctgccgtgcggtctggcggatctggcggaggctccaccagccccaagaaaaagagaaaagtctaagctgccttctgcggggcttgccttctggccatgcccttcttctctcccttgcacctgtacctcttggtctttgaataaagcctgagtaggaaggctagcaaaaaaaaaaaaaaaaaaaaaaaaaaaaaaaaaaaaaaaaaaaaaaaaaaaaaaaaaaaaaaaaaaaaaaaaaaaaaaaagcccagccggctccccaacctctaccgaggagggcacctctgagtccgccacccccgagagcggccctggcacctccaccgagcccagcgagggcagcgcacccggcagccctgccggcagccccacctccacagaggagggaaccagcaccgagcccagcgaaggcagcgccccaggcaccagcaccgagcctagtgagcaggagattaaacggatcaacaagatcagaagaagacttgtgaaagacagcaacaccaagaaggccggcaagacaggccccatgaaaaccctgctggttagagtgatgacacccgatctgagagagcggctggaaaacctgagaaagaagcctgaaaatatcccccagcccatcagcaatacatctagagccaacctgaataagctgctgaccgattacaccgaaatgaagaaggcgatcctgcatgtgtactgggaagagttccagaaggaccctgtgggcctgatgagccgggtggcccagcctgccagcaagaagatcgatcagaacaagctgaaacctgagatggacgagaagggcaacctgaccaccgccggctttgcctgctctcagtgtggccagcccctgttcgtgtacaagctggagcaggtgtctgagaagggcaaggcttacaccaactacttcggacggtgcaatgtggccgagcacgaaaagctgatcctgctggcccagctgaagcccgagaaggatagcgacgaagccgtgacatatagcctgggaaagtttgggcagagggccctggatttctacagcattcatgtgaccaaggagtccacccaccccgtgaagcccctggcccagatcgccggaaacagatacgcctccggacctgtgggaaaggccctgagcgacgcatgtatgggcacaatcgcctccttcctgtctaagtaccaggacatcatcatcgaacaccagaaggtggtgaagggcaaccagaagagactggagagcctgcgggagctggccggcaaggaaaacctggaataccctagcgtgaccctgccacctcagcctcacaccaaggagggcgttgatgcctacaacgaagtgatcgcccgggtgcgaatgtgggtgaacctgaacctgtggcagaagctgaagctaagcagagatgatgccaagcctctgctgagactgaagggattcccttcctttcctctggtcgagagacaggccaacgaagtggactggtgggacatggtgtgtaacgtgaagaagctgatcaacgagaaaaaggaggatggcaaggtgttttggcagaatctggctggctacaagagacaggaagccctgagaccatacctgagcagcgaggaagatcggaagaagggaaagaaattcgctcggtaccagctgggcgacctgctgctgcacctggaaaagaagcacggcgaggactggggaaaggtgtacgacgaggcctgggagcggattgacaagaaagtggaaggcctgagcaagcacatcaagctggaagaggaacggagaagcgaggacgcccagagcaaggccgccctgaccgactggctgcgggctaaggccagcttcgtgatcgagggcctgaaggaggccgacaaggacgagttctgcagatgcgagctgaagctgcagaagtggtacggggacctgcggggaaagcccttcgccatcgaagccgagaacagcatcctggacatcagcggcttcagcaagcagtacaactgtgccttcatctggcagaaggacggcgtgaagaagctgaacctgtacctgatcatcaactacttcaagggcggcaagctgcggttcaagaagatcaaacctgaagccttcgaagccaacagattctacaccgtgatcaacaaaaagagcggcgagatcgtgcccatggaggtgaacttcaacttcgacgaccccaacctgatcatcctgcctctggcctttggcaagagacagggcagagaattcatctggaacgacctgctgtccctggaaaccggcagcctgaagctggccaacggaagagtgatcgagaagacactgtacaacagaagaacccggcaggatgagcctgccctgttcgtggccctgaccttcgagcggcgggaggtcctggactcctccaatatcaaaccaatgaacctgatcggcgtggcaagaggcgaaaacatccccgccgtgatcgccctgaccgaccccgagggctgcccactgagccggtttaaggatagcctgggaaacccaacccacatcctgagaatcggcgagagctataaggagaagcagcggaccatccaggccaagaaggaggtggagcagcggagagccggcggctacagccggaagtacgccagcaaagccaagaatctggcagacgatatggtgagaaacaccgctagagatctgctgtactacgccgtgacccaggatgccatgctgatcttcgccaacctgagccggggcttcggccggcagggcaagcggaccttcatggccgagagacagtacacacggatggaggactggctgaccgccaagctggcctacgagggcctgagcaagacctacctgtccaagacactggcccagtacacctccaagacatgcagcaactgtgggtttaccatcaccagcgccgactacgacagggtgctggagaagctgaagaagacagcaacaggctggatgaccacaattaacggcaaggagctgaaggtggagggccagattacctactacaacagatacaagagacagaacgtagtcaaggacctgtccgtcgagctggatagactgagcgaagaatctgtgaacaacgacatctcctcctggacaaagggcagaagcggagaagctctgagcctcctgaagaaaagattctcccatagacccgtgcaggagaagttcgtgtgcctgaactgcggcttcgagacacacgcagccgagcaagccgccctgaacatcgccagatcctggctgttcctgcggagccaggagtacaagaaataccagacaaacaagacaaccggcaacaccgataagagagccttcgtcgagacctggcagtccttttaccggaagaagcttaaggaggtgtggaaacctgccgtgcggtctggcggatctggcggaggctccaccagccccaagaaaaagagaaaagtctaagctgccttctgcggggcttgccttctggccatgcccttcttctctcccttgcacctgtacctcttggtctttgaataaagcctgagtaggaaggctagcaaaaaaaaaaaaaaaaaaaaaaaaaaaaaaaaaaaaaaaaaaaaaaaaaaaaaaaaaaaaaaaaaaaaaaaaaaaaaaaa

SEQ ID NO: 9901 - RNA, 8787 nt, synthetic construct
  source 1..8787: mol_type = other RNA
aggaaataagagagaaaagaagagtaagaagaaatataagagccaccatggcccctaagaagaagcgtaaagtgagccggatgaaccacgaccaggagttcgacccccctaaggtgtaccctcccgtccccgccgagaagagaaagcccatccgggtcctgagcctgttcgatggcatcgccaccggtctgctggtgctgaaggacctgggcatccaggtggataggtacattgcctccgaggtgtgcgaggactccatcaccgtgggaatggtgcgtcatcagggcaagatcatgtacgtgggcgacgtgcggagcgtgacacagaagcatatccaggagtggggccctttcgacctggtgatcggcggcagcccttgcaatgacctgagcatcgtgaacccagcccggaagggcctgtacgagggaaccggcagactgttcttcgagttttacagactgctgcacgacgcccggcctaaggaaggcgacgaccggcccttcttttggctgttcgagaatgtggtggccatgggagtcagcgacaagcgggatattagccggttcctggagagcaaccccgtgatgatcgatgccaaggaagtgagcgccgcccaccgggccagatacttctggggcaatctgcctggcatgaacagacccctggccagcaccgtgaacgacaagctggagctgcaggagtgcctggagcacggccggatcgccaagttcagcaaggtgagaaccatcaccacccgaagcaacagcatcaaacaaggcaaggaccagcactttcctgtgttcatgaacgagaaggaggacatcctgtggtgtaccgagatggagagagtgttcgggttcccagtccactacacagatgtcagcaacatgtctagactggccagacagagactgctgggaagaagctggtccgtccctgtgatcagacacctgttcgcccctctgaaggagtacttcgcctgcgtgagcagcggcaacagcaacgccaacagccggggccccagcttctctagcggcctggtgccactgtccctgagagggagccacatgggccccatggagatctacaaaaccgtgagcgcctggaagcggcagcctgtgcgcgtgctgagcctgtttcggaatatcgataaagtcctgaaaagcctgggattcctggagagcggctctggctccggcggtggcaccctgaagtacgtggaggatgtgacaaacgtggtcagacgggatgtggagaagtggggccccttcgatctggtgtacggcagcacccaacccctgggcagctcttgtgaccggtgccctggctggtacatgtttcagttccaccggatcctgcagtacgccctgccgagacaggagtcccagcggccattcttttggattttcatggacaacttgctgctgaccgaggatgaccaggaaactaccactcggttcctgcagaccgaagccgtgaccctgcaggacgtgagaggccgggactaccagaacgccatgcgggtgtggtccaacatccctggactgaaaagcaagcacgcacctctgacccctaaagaagaggagtacctgcaggcccaggtgcggagcagaagcaagctggacgcccctaaggtggatctgctggtgaagaattgcctcctgcccctgagagagtacttcaagtatttcagccagaatagtctgcccctgggaggcagcggcggcggcatgggccccctgcagttcaaggacgtggccatcgagttcagcctggaggagtggcactgcctggacaccgcccagaggaacctgtacagggacgtgatgctggagaactacaggaacctggtgttcctgggcatcgtggtgagcaagcccgacctgatcgccaggctggagcagggcaagaagcccctgaccatgaagaggcacgagatggtggccaaccccagcggccccggcgtggtggtgggcggcccaagcagcggcgcccctcctcccagcggcggcaggcggcccaagcagcggcgcccctcctcccagcggcggcagcccagccggctccccaacctctaccgaggagggcacctctgagtccgccacccccgagagcggccctggcacctccaccgagcccagcgagggcagcgcacccggcagccctgccggcagccccacctccacagaggagggaaccagcaccgagcccagcgaaggcagcgccccaggcaccagcaccgagcctagtgagcaggagattaaacggatcaacaagatcagaagaagacttgtgaaagacagcaacaccaagaaggccggcaagacaggccccatgaaaaccctgctggttagagtgatgacacccgatctgagagagcggctggaaaacctgagaaagaagcctgaaaatatcccccagcccatcagcaatacatctagagccaacctgaataagctgctgaccgattacaccgaaatgaagaaggcgatcctgcatgtgtactgggaagagttccagaaggaccctgtgggcctgatgagccgggtggcccagcctgccagcaagaagatcgatcagaacaagctgaaacctgagatggacgagaagggcaacctgaccaccgccggctttgcctgctctcagtgtggccagcccctgttcgtgtacaagctggagcaggtgtctgagaagggcaaggcttacaccaactacttcggacggtgcaatgtggccgagcacgaaaagctgatcctgctggcccagctgaagcccgagaaggatagcgacgaagccgtgacatatagcctgggaaagtttgggcagagggccctggatttctacagcattcatgtgaccaaggagtccacccaccccgtgaagcccctggcccagatcgccggaaacagatacgcctccggacctgtgggaaaggccctgagcgacgcatgtatgggcacaatcgcctccttcctgtctaagtaccaggacatcatcatcgaacaccagaaggtggtgaagggcaaccagaagagactggagagcctgcgggagctggccggcaaggaaaacctggaataccctagcgtgaccctgccacctcagcctcacaccaaggagggcgttgatgcctacaacgaagtgatcgcccgggtgcgaatgtgggtgaacctgaacctgtggcagaagctgaagctaagcagagatgatgccaagcctctgctgagactgaagggattcccttcctttcctctggtcgagagacaggccaacgaagtggactggtgggacatggtgtgtaacgtgaagaagctgatcaacgagaaaaaggaggatggcaaggtgttttggcagaatctggctggctacaagagacaggaagccctgagaccatacctgagcagcgaggaagatcggaagaagggaaagaaattcgctcggtaccagctgggcgacctgctgctgcacctggaaaagaagcacggcgaggactggggaaaggtgtacgacgaggcctgggagcggattgacaagaaagtggaaggcctgagcaagcacatcaagctggaagaggaacggagaagcgaggacgcccagagcaaggccgccctgaccgactggctgcgggctaaggccagcttcgtgatcgagggcctgaaggaggccgacaaggacgagttctgcagatgcgagctgaagctgcagaagtggtacggggacctgcggggaaagcccttcgccatcgaagccgagaacagcatcctggacatcagcggcttcagcaagcagtacaactgtgccttcatctggcagaaggacggcgtgaagaagctgaacctgtacctgatcatcaactacttcaagggcggcaagctgcggttcaagaagatcaaacctgaagccttcgaagccaacagattctacaccgtgatcaacaaaaagagcggcgagatcgtgcccatggaggtgaacttcaacttcgacgaccccaacctgatcatcctgcctctggcctttggcaagagacagggcagagaattcatctggaacgacctgctgtccctggaaaccggcagcctgaagctggccaacggaagagtgatcgagaagacactgtacaacagaagaacccggcaggatgagcctgccctgttcgtggccctgaccttcgagcggcgggaggtcctggactcctccaatatcaaaccaatgaacctgatcggcgtggcaagaggcgaaaacatccccgccgtgatcgccctgaccgaccccgagggctgcccactgagccggtttaaggatagcctgggaaacccaacccacatcctgagaatcggcgagagctataaggagaagcagcggaccatccaggccaagaaggaggtggagcagcggagagccggcggctacagccggaagtacgccagcaaagccaagaatctggcagacgatatggtgagaaacaccgctagagatctgctgtactacgccgtgacccaggatgccatgctgatcttcgccaacctgagccggggcttcggccggcagggcaagcggaccttcatggccgagagacagtacacacggatggaggactggctgaccgccaagctggcctacgagggcctgagcaagacctacctgtccaagacactggcccagtacacctccaagacatgcagcaactgtgggtttaccatcaccagcgccgactacgacagggtgctggagaagctgaagaagacagcaacaggctggatgaccacaattaacggcaaggagctgaaggtggagggccagattacctactacaacagatacaagagacagaacgtagtcaaggacctgtccgtcgagctggatagactgagcgaagaatctgtgaacaacgacatctcctcctggacaaagggcagaagcggagaagctctgagcctcctgaagaaaagattctcccatagacccgtgcaggagaagttcgtgtgcctgaactgcggcttcgagacacacgcagccgagcaagccgccctgaacatcgccagatcctggctgttcctgcggagccaggagtacaagaaataccagacaaacaagacaaccggcaacaccgataagagagccttcgtcgagacctggcagtccttttaccggaagaagcttaaggaggtgtggaaacctgccgtgcggtctggcggatctggcggaggctccaccagccccaagaaaaagagaaaagtctaagctgccttctgcggggcttgccttctggccatgcccttcttctctcccttgcacctgtacctcttggtctttgaataaagcctgagtaggaaggctagcaaaaaaaaaaaaaaaaaaaaaaaaaaaaaaaaaaaaaaaaaaaaaaaaaaaaaaaaaaaaaaaaaaaaaaaaaaaaaaaagcccagccggctccccaacctctaccgaggagggcacctctgagtccgccacccccgagagcggccctggcacctccaccgagcccagcgagggcagcgcacccggcagccctgccggcagccccacctccacagaggagggaaccagcaccgagcccagcgaaggcagcgccccaggcaccagcaccgagcctagtgagcaggagattaaacggatcaacaagatcagaagaagacttgtgaaagacagcaacaccaagaaggccggcaagacaggccccatgaaaaccctgctggttagagtgatgacacccgatctgagagagcggctggaaaacctgagaaagaagcctgaaaatatcccccagcccatcagcaatacatctagagccaacctgaataagctgctgaccgattacaccgaaatgaagaaggcgatcctgcatgtgtactgggaagagttccagaaggaccctgtgggcctgatgagccgggtggcccagcctgccagcaagaagatcgatcagaacaagctgaaacctgagatggacgagaagggcaacctgaccaccgccggctttgcctgctctcagtgtggccagcccctgttcgtgtacaagctggagcaggtgtctgagaagggcaaggcttacaccaactacttcggacggtgcaatgtggccgagcacgaaaagctgatcctgctggcccagctgaagcccgagaaggatagcgacgaagccgtgacatatagcctgggaaagtttgggcagagggccctggatttctacagcattcatgtgaccaaggagtccacccaccccgtgaagcccctggcccagatcgccggaaacagatacgcctccggacctgtgggaaaggccctgagcgacgcatgtatgggcacaatcgcctccttcctgtctaagtaccaggacatcatcatcgaacaccagaaggtggtgaagggcaaccagaagagactggagagcctgcgggagctggccggcaaggaaaacctggaataccctagcgtgaccctgccacctcagcctcacaccaaggagggcgttgatgcctacaacgaagtgatcgcccgggtgcgaatgtgggtgaacctgaacctgtggcagaagctgaagctaagcagagatgatgccaagcctctgctgagactgaagggattcccttcctttcctctggtcgagagacaggccaacgaagtggactggtgggacatggtgtgtaacgtgaagaagctgatcaacgagaaaaaggaggatggcaaggtgttttggcagaatctggctggctacaagagacaggaagccctgagaccatacctgagcagcgaggaagatcggaagaagggaaagaaattcgctcggtaccagctgggcgacctgctgctgcacctggaaaagaagcacggcgaggactggggaaaggtgtacgacgaggcctgggagcggattgacaagaaagtggaaggcctgagcaagcacatcaagctggaagaggaacggagaagcgaggacgcccagagcaaggccgccctgaccgactggctgcgggctaaggccagcttcgtgatcgagggcctgaaggaggccgacaaggacgagttctgcagatgcgagctgaagctgcagaagtggtacggggacctgcggggaaagcccttcgccatcgaagccgagaacagcatcctggacatcagcggcttcagcaagcagtacaactgtgccttcatctggcagaaggacggcgtgaagaagctgaacctgtacctgatcatcaactacttcaagggcggcaagctgcggttcaagaagatcaaacctgaagccttcgaagccaacagattctacaccgtgatcaacaaaaagagcggcgagatcgtgcccatggaggtgaacttcaacttcgacgaccccaacctgatcatcctgcctctggcctttggcaagagacagggcagagaattcatctggaacgacctgctgtccctggaaaccggcagcctgaagctggccaacggaagagtgatcgagaagacactgtacaacagaagaacccggcaggatgagcctgccctgttcgtggccctgaccttcgagcggcgggaggtcctggactcctccaatatcaaaccaatgaacctgatcggcgtggcaagaggcgaaaacatccccgccgtgatcgccctgaccgaccccgagggctgcccactgagccggtttaaggatagcctgggaaacccaacccacatcctgagaatcggcgagagctataaggagaagcagcggaccatccaggccaagaaggaggtggagcagcggagagccggcggctacagccggaagtacgccagcaaagccaagaatctggcagacgatatggtgagaaacaccgctagagatctgctgtactacgccgtgacccaggatgccatgctgatcttcgccaacctgagccggggcttcggccggcagggcaagcggaccttcatggccgagagacagtacacacggatggaggactggctgaccgccaagctggcctacgagggcctgagcaagacctacctgtccaagacactggcccagtacacctccaagacatgcagcaactgtgggtttaccatcaccagcgccgactacgacagggtgctggagaagctgaagaagacagcaacaggctggatgaccacaattaacggcaaggagctgaaggtggagggccagattacctactacaacagatacaagagacagaacgtagtcaaggacctgtccgtcgagctggatagactgagcgaagaatctgtgaacaacgacatctcctcctggacaaagggcagaagcggagaagctctgagcctcctgaagaaaagattctcccatagacccgtgcaggagaagttcgtgtgcctgaactgcggcttcgagacacacgcagccgagcaagccgccctgaacatcgccagatcctggctgttcctgcggagccaggagtacaagaaataccagacaaacaagacaaccggcaacaccgataagagagccttcgtcgagacctggcagtccttttaccggaagaagcttaaggaggtgtggaaacctgccgtgcggtctggcggatctggcggaggctccaccagccccaagaaaaagagaaaagtctaagctgccttctgcggggcttgccttctggccatgcccttcttctctcccttgcacctgtacctcttggtctttgaataaagcctgagtaggaaggctagcaaaaaaaaaaaaaaaaaaaaaaaaaaaaaaaaaaaaaaaaaaaaaaaaaaaaaaaaaaaaaaaaaaaaaaaaaaaaaaaa

SEQ ID NO: 9902 - RNA, 8787 nt, synthetic construct
  source 1..8787: mol_type = other RNA
aggaaataagagagaaaagaagagtaagaagaaatataagagccaccatggcccctaagaagaagcgtaaagtgagccggatgaaccacgaccaggagttcgacccccctaaggtgtaccctcccgtccccgccgagaagagaaagcccatccgggtcctgagcctgttcgatggcatcgccaccggtctgctggtgctgaaggacctgggcatccaggtggataggtacattgcctccgaggtgtgcgaggactccatcaccgtgggaatggtgcgtcatcagggcaagatcatgtacgtgggcgacgtgcggagcgtgacacagaagcatatccaggagtggggccctttcgacctggtgatcggcggcagcccttgcaatgacctgagcatcgtgaacccagcccggaagggcctgtacgagggaaccggcagactgttcttcgagttttacagactgctgcacgacgcccggcctaaggaaggcgacgaccggcccttcttttggctgttcgagaatgtggtggccatgggagtcagcgacaagcgggatattagccggttcctggagagcaaccccgtgatgatcgatgccaaggaagtgagcgccgcccaccgggccagatacttctggggcaatctgcctggcatgaacagacccctggccagcaccgtgaacgacaagctggagctgcaggagtgcctggagcacggccggatcgccaagttcagcaaggtgagaaccatcaccacccgaagcaacagcatcaaacaaggcaaggaccagcactttcctgtgttcatgaacgagaaggaggacatcctgtggtgtaccgagatggagagagtgttcgggttcccagtccactacacagatgtcagcaacatgtctagactggccagacagagactgctgggaagaagctggtccgtccctgtgatcagacacctgttcgcccctctgaaggagtacttcgcctgcgtgagcagcggcaacagcaacgccaacagccggggccccagcttctctagcggcctggtgccactgtccctgagagggagccacatgggccccatggagatctacaaaaccgtgagcgcctggaagcggcagcctgtgcgcgtgctgagcctgtttcggaatatcgataaagtcctgaaaagcctgggattcctggagagcggctctggctccggcggtggcaccctgaagtacgtggaggatgtgacaaacgtggtcagacgggatgtggagaagtggggccccttcgatctggtgtacggcagcacccaacccctgggcagctcttgtgaccggtgccctggctggtacatgtttcagttccaccggatcctgcagtacgccctgccgagacaggagtcccagcggccattcttttggattttcatggacaacttgctgctgaccgaggatgaccaggaaactaccactcggttcctgcagaccgaagccgtgaccctgcaggacgtgagaggccgggactaccagaacgccatgcgggtgtggtccaacatccctggactgaaaagcaagcacgcacctctgacccctaaagaagaggagtacctgcaggcccaggtgcggagcagaagcaagctggacgcccctaaggtggatctgctggtgaagaattgcctcctgcccctgagagagtacttcaagtatttcagccagaatagtctgcccctgggaggcagcggcggcggcgcccacatgagcctgagcttcagggacgtggccatcgacctgagccaggaggagtgggagtgcctggaccccgtgcagagggccctgtacagggacgtgatgctggagaactacagcaacctggtgagcctgggctgcagcagccccaagcccgacgtgatcaccctgctggagcaggagagggagccctggaccgtgatgagggagggcaccaggagctggtacaccgacctggagagcaagggcggcccaagcagcggcgcccctcctcccagcggcggcaggcggcccaagcagcggcgcccctcctcccagcggcggcagcccagccggctccccaacctctaccgaggagggcacctctgagtccgccacccccgagagcggccctggcacctccaccgagcccagcgagggcagcgcacccggcagccctgccggcagccccacctccacagaggagggaaccagcaccgagcccagcgaaggcagcgccccaggcaccagcaccgagcctagtgagcaggagattaaacggatcaacaagatcagaagaagacttgtgaaagacagcaacaccaagaaggccggcaagacaggccccatgaaaaccctgctggttagagtgatgacacccgatctgagagagcggctggaaaacctgagaaagaagcctgaaaatatcccccagcccatcagcaatacatctagagccaacctgaataagctgctgaccgattacaccgaaatgaagaaggcgatcctgcatgtgtactgggaagagttccagaaggaccctgtgggcctgatgagccgggtggcccagcctgccagcaagaagatcgatcagaacaagctgaaacctgagatggacgagaagggcaacctgaccaccgccggctttgcctgctctcagtgtggccagcccctgttcgtgtacaagctggagcaggtgtctgagaagggcaaggcttacaccaactacttcggacggtgcaatgtggccgagcacgaaaagctgatcctgctggcccagctgaagcccgagaaggatagcgacgaagccgtgacatatagcctgggaaagtttgggcagagggccctggatttctacagcattcatgtgaccaaggagtccacccaccccgtgaagcccctggcccagatcgccggaaacagatacgcctccggacctgtgggaaaggccctgagcgacgcatgtatgggcacaatcgcctccttcctgtctaagtaccaggacatcatcatcgaacaccagaaggtggtgaagggcaaccagaagagactggagagcctgcgggagctggccggcaaggaaaacctggaataccctagcgtgaccctgccacctcagcctcacaccaaggagggcgttgatgcctacaacgaagtgatcgcccgggtgcgaatgtgggtgaacctgaacctgtggcagaagctgaagctaagcagagatgatgccaagcctctgctgagactgaagggattcccttcctttcctctggtcgagagacaggccaacgaagtggactggtgggacatggtgtgtaacgtgaagaagctgatcaacgagaaaaaggaggatggcaaggtgttttggcagaatctggctggctacaagagacaggaagccctgagaccatacctgagcagcgaggaagatcggaagaagggaaagaaattcgctcggtaccagctgggcgacctgctgctgcacctggaaaagaagcacggcgaggactggggaaaggtgtacgacgaggcctgggagcggattgacaagaaagtggaaggcctgagcaagcacatcaagctggaagaggaacggagaagcgaggacgcccagagcaaggccgccctgaccgactggctgcgggctaaggccagcttcgtgatcgagggcctgaaggaggccgacaaggacgagttctgcagatgcgagctgaagctgcagaagtggtacggggacctgcggggaaagcccttcgccatcgaagccgagaacagcatcctggacatcagcggcttcagcaagcagtacaactgtgccttcatctggcagaaggacggcgtgaagaagctgaacctgtacctgatcatcaactacttcaagggcggcaagctgcggttcaagaagatcaaacctgaagccttcgaagccaacagattctacaccgtgatcaacaaaaagagcggcgagatcgtgcccatggaggtgaacttcaacttcgacgaccccaacctgatcatcctgcctctggcctttggcaagagacagggcagagaattcatctggaacgacctgctgtccctggaaaccggcagcctgaagctggccaacggaagagtgatcgagaagacactgtacaacagaagaacccggcaggatgagcctgccctgttcgtggccctgaccttcgagcggcgggaggtcctggactcctccaatatcaaaccaatgaacctgatcggcgtggcaagaggcgaaaacatccccgccgtgatcgccctgaccgaccccgagggctgcccactgagccggtttaaggatagcctgggaaacccaacccacatcctgagaatcggcgagagctataaggagaagcagcggaccatccaggccaagaaggaggtggagcagcggagagccggcggctacagccggaagtacgccagcaaagccaagaatctggcagacgatatggtgagaaacaccgctagagatctgctgtactacgccgtgacccaggatgccatgctgatcttcgccaacctgagccggggcttcggccggcagggcaagcggaccttcatggccgagagacagtacacacggatggaggactggctgaccgccaagctggcctacgagggcctgagcaagacctacctgtccaagacactggcccagtacacctccaagacatgcagcaactgtgggtttaccatcaccagcgccgactacgacagggtgctggagaagctgaagaagacagcaacaggctggatgaccacaattaacggcaaggagctgaaggtggagggccagattacctactacaacagatacaagagacagaacgtagtcaaggacctgtccgtcgagctggatagactgagcgaagaatctgtgaacaacgacatctcctcctggacaaagggcagaagcggagaagctctgagcctcctgaagaaaagattctcccatagacccgtgcaggagaagttcgtgtgcctgaactgcggcttcgagacacacgcagccgagcaagccgccctgaacatcgccagatcctggctgttcctgcggagccaggagtacaagaaataccagacaaacaagacaaccggcaacaccgataagagagccttcgtcgagacctggcagtccttttaccggaagaagcttaaggaggtgtggaaacctgccgtgcggtctggcggatctggcggaggctccaccagccccaagaaaaagagaaaagtctaagctgccttctgcggggcttgccttctggccatgcccttcttctctcccttgcacctgtacctcttggtctttgaataaagcctgagtaggaaggctagcaaaaaaaaaaaaaaaaaaaaaaaaaaaaaaaaaaaaaaaaaaaaaaaaaaaaaaaaaaaaaaaaaaaaaaaaaaaaaaaagcccagccggctccccaacctctaccgaggagggcacctctgagtccgccacccccgagagcggccctggcacctccaccgagcccagcgagggcagcgcacccggcagccctgccggcagccccacctccacagaggagggaaccagcaccgagcccagcgaaggcagcgccccaggcaccagcaccgagcctagtgagcaggagattaaacggatcaacaagatcagaagaagacttgtgaaagacagcaacaccaagaaggccggcaagacaggccccatgaaaaccctgctggttagagtgatgacacccgatctgagagagcggctggaaaacctgagaaagaagcctgaaaatatcccccagcccatcagcaatacatctagagccaacctgaataagctgctgaccgattacaccgaaatgaagaaggcgatcctgcatgtgtactgggaagagttccagaaggaccctgtgggcctgatgagccgggtggcccagcctgccagcaagaagatcgatcagaacaagctgaaacctgagatggacgagaagggcaacctgaccaccgccggctttgcctgctctcagtgtggccagcccctgttcgtgtacaagctggagcaggtgtctgagaagggcaaggcttacaccaactacttcggacggtgcaatgtggccgagcacgaaaagctgatcctgctggcccagctgaagcccgagaaggatagcgacgaagccgtgacatatagcctgggaaagtttgggcagagggccctggatttctacagcattcatgtgaccaaggagtccacccaccccgtgaagcccctggcccagatcgccggaaacagatacgcctccggacctgtgggaaaggccctgagcgacgcatgtatgggcacaatcgcctccttcctgtctaagtaccaggacatcatcatcgaacaccagaaggtggtgaagggcaaccagaagagactggagagcctgcgggagctggccggcaaggaaaacctggaataccctagcgtgaccctgccacctcagcctcacaccaaggagggcgttgatgcctacaacgaagtgatcgcccgggtgcgaatgtgggtgaacctgaacctgtggcagaagctgaagctaagcagagatgatgccaagcctctgctgagactgaagggattcccttcctttcctctggtcgagagacaggccaacgaagtggactggtgggacatggtgtgtaacgtgaagaagctgatcaacgagaaaaaggaggatggcaaggtgttttggcagaatctggctggctacaagagacaggaagccctgagaccatacctgagcagcgaggaagatcggaagaagggaaagaaattcgctcggtaccagctgggcgacctgctgctgcacctggaaaagaagcacggcgaggactggggaaaggtgtacgacgaggcctgggagcggattgacaagaaagtggaaggcctgagcaagcacatcaagctggaagaggaacggagaagcgaggacgcccagagcaaggccgccctgaccgactggctgcgggctaaggccagcttcgtgatcgagggcctgaaggaggccgacaaggacgagttctgcagatgcgagctgaagctgcagaagtggtacggggacctgcggggaaagcccttcgccatcgaagccgagaacagcatcctggacatcagcggcttcagcaagcagtacaactgtgccttcatctggcagaaggacggcgtgaagaagctgaacctgtacctgatcatcaactacttcaagggcggcaagctgcggttcaagaagatcaaacctgaagccttcgaagccaacagattctacaccgtgatcaacaaaaagagcggcgagatcgtgcccatggaggtgaacttcaacttcgacgaccccaacctgatcatcctgcctctggcctttggcaagagacagggcagagaattcatctggaacgacctgctgtccctggaaaccggcagcctgaagctggccaacggaagagtgatcgagaagacactgtacaacagaagaacccggcaggatgagcctgccctgttcgtggccctgaccttcgagcggcgggaggtcctggactcctccaatatcaaaccaatgaacctgatcggcgtggcaagaggcgaaaacatccccgccgtgatcgccctgaccgaccccgagggctgcccactgagccggtttaaggatagcctgggaaacccaacccacatcctgagaatcggcgagagctataaggagaagcagcggaccatccaggccaagaaggaggtggagcagcggagagccggcggctacagccggaagtacgccagcaaagccaagaatctggcagacgatatggtgagaaacaccgctagagatctgctgtactacgccgtgacccaggatgccatgctgatcttcgccaacctgagccggggcttcggccggcagggcaagcggaccttcatggccgagagacagtacacacggatggaggactggctgaccgccaagctggcctacgagggcctgagcaagacctacctgtccaagacactggcccagtacacctccaagacatgcagcaactgtgggtttaccatcaccagcgccgactacgacagggtgctggagaagctgaagaagacagcaacaggctggatgaccacaattaacggcaaggagctgaaggtggagggccagattacctactacaacagatacaagagacagaacgtagtcaaggacctgtccgtcgagctggatagactgagcgaagaatctgtgaacaacgacatctcctcctggacaaagggcagaagcggagaagctctgagcctcctgaagaaaagattctcccatagacccgtgcaggagaagttcgtgtgcctgaactgcggcttcgagacacacgcagccgagcaagccgccctgaacatcgccagatcctggctgttcctgcggagccaggagtacaagaaataccagacaaacaagacaaccggcaacaccgataagagagccttcgtcgagacctggcagtccttttaccggaagaagcttaaggaggtgtggaaacctgccgtgcggtctggcggatctggcggaggctccaccagccccaagaaaaagagaaaagtctaagctgccttctgcggggcttgccttctggccatgcccttcttctctcccttgcacctgtacctcttggtctttgaataaagcctgagtaggaaggctagcaaaaaaaaaaaaaaaaaaaaaaaaaaaaaaaaaaaaaaaaaaaaaaaaaaaaaaaaaaaaaaaaaaaaaaaaaaaaaaaa

SEQ ID NO: 9903 - RNA, 8787 nt, synthetic construct
  source 1..8787: mol_type = other RNA
aggaaataagagagaaaagaagagtaagaagaaatataagagccaccatggcccctaagaagaagcgtaaagtgagccggatgaaccacgaccaggagttcgacccccctaaggtgtaccctcccgtccccgccgagaagagaaagcccatccgggtcctgagcctgttcgatggcatcgccaccggtctgctggtgctgaaggacctgggcatccaggtggataggtacattgcctccgaggtgtgcgaggactccatcaccgtgggaatggtgcgtcatcagggcaagatcatgtacgtgggcgacgtgcggagcgtgacacagaagcatatccaggagtggggccctttcgacctggtgatcggcggcagcccttgcaatgacctgagcatcgtgaacccagcccggaagggcctgtacgagggaaccggcagactgttcttcgagttttacagactgctgcacgacgcccggcctaaggaaggcgacgaccggcccttcttttggctgttcgagaatgtggtggccatgggagtcagcgacaagcgggatattagccggttcctggagagcaaccccgtgatgatcgatgccaaggaagtgagcgccgcccaccgggccagatacttctggggcaatctgcctggcatgaacagacccctggccagcaccgtgaacgacaagctggagctgcaggagtgcctggagcacggccggatcgccaagttcagcaaggtgagaaccatcaccacccgaagcaacagcatcaaacaaggcaaggaccagcactttcctgtgttcatgaacgagaaggaggacatcctgtggtgtaccgagatggagagagtgttcgggttcccagtccactacacagatgtcagcaacatgtctagactggccagacagagactgctgggaagaagctggtccgtccctgtgatcagacacctgttcgcccctctgaaggagtacttcgcctgcgtgagcagcggcaacagcaacgccaacagccggggccccagcttctctagcggcctggtgccactgtccctgagagggagccacatgggccccatggagatctacaaaaccgtgagcgcctggaagcggcagcctgtgcgcgtgctgagcctgtttcggaatatcgataaagtcctgaaaagcctgggattcctggagagcggctctggctccggcggtggcaccctgaagtacgtggaggatgtgacaaacgtggtcagacgggatgtggagaagtggggccccttcgatctggtgtacggcagcacccaacccctgggcagctcttgtgaccggtgccctggctggtacatgtttcagttccaccggatcctgcagtacgccctgccgagacaggagtcccagcggccattcttttggattttcatggacaacttgctgctgaccgaggatgaccaggaaactaccactcggttcctgcagaccgaagccgtgaccctgcaggacgtgagaggccgggactaccagaacgccatgcgggtgtggtccaacatccctggactgaaaagcaagcacgcacctctgacccctaaagaagaggagtacctgcaggcccaggtgcggagcagaagcaagctggacgcccctaaggtggatctgctggtgaagaattgcctcctgcccctgagagagtacttcaagtatttcagccagaatagtctgcccctgggaggcagcggcggcggccaccaggaggtggtgaccttcgaggacgtggccgtgtacttcacccagaccgagtgggccggcctgagccccgcccagagggccctgtacaggagcgtgatgctggagatctacggcaacctgaccagcctgggctaccccgtgcccaagcccgccctggtgagcctgctggagaggggcgacctgccctggggcctggagaccagggacgacccccccgcccagggcaccaaggacatctgcggcggcccaagcagcggcgcccctcctcccagcggcggcaggcggcccaagcagcggcgcccctcctcccagcggcggcagcccagccggctccccaacctctaccgaggagggcacctctgagtccgccacccccgagagcggccctggcacctccaccgagcccagcgagggcagcgcacccggcagccctgccggcagccccacctccacagaggagggaaccagcaccgagcccagcgaaggcagcgccccaggcaccagcaccgagcctagtgagcaggagattaaacggatcaacaagatcagaagaagacttgtgaaagacagcaacaccaagaaggccggcaagacaggccccatgaaaaccctgctggttagagtgatgacacccgatctgagagagcggctggaaaacctgagaaagaagcctgaaaatatcccccagcccatcagcaatacatctagagccaacctgaataagctgctgaccgattacaccgaaatgaagaaggcgatcctgcatgtgtactgggaagagttccagaaggaccctgtgggcctgatgagccgggtggcccagcctgccagcaagaagatcgatcagaacaagctgaaacctgagatggacgagaagggcaacctgaccaccgccggctttgcctgctctcagtgtggccagcccctgttcgtgtacaagctggagcaggtgtctgagaagggcaaggcttacaccaactacttcggacggtgcaatgtggccgagcacgaaaagctgatcctgctggcccagctgaagcccgagaaggatagcgacgaagccgtgacatatagcctgggaaagtttgggcagagggccctggatttctacagcattcatgtgaccaaggagtccacccaccccgtgaagcccctggcccagatcgccggaaacagatacgcctccggacctgtgggaaaggccctgagcgacgcatgtatgggcacaatcgcctccttcctgtctaagtaccaggacatcatcatcgaacaccagaaggtggtgaagggcaaccagaagagactggagagcctgcgggagctggccggcaaggaaaacctggaataccctagcgtgaccctgccacctcagcctcacaccaaggagggcgttgatgcctacaacgaagtgatcgcccgggtgcgaatgtgggtgaacctgaacctgtggcagaagctgaagctaagcagagatgatgccaagcctctgctgagactgaagggattcccttcctttcctctggtcgagagacaggccaacgaagtggactggtgggacatggtgtgtaacgtgaagaagctgatcaacgagaaaaaggaggatggcaaggtgttttggcagaatctggctggctacaagagacaggaagccctgagaccatacctgagcagcgaggaagatcggaagaagggaaagaaattcgctcggtaccagctgggcgacctgctgctgcacctggaaaagaagcacggcgaggactggggaaaggtgtacgacgaggcctgggagcggattgacaagaaagtggaaggcctgagcaagcacatcaagctggaagaggaacggagaagcgaggacgcccagagcaaggccgccctgaccgactggctgcgggctaaggccagcttcgtgatcgagggcctgaaggaggccgacaaggacgagttctgcagatgcgagctgaagctgcagaagtggtacggggacctgcggggaaagcccttcgccatcgaagccgagaacagcatcctggacatcagcggcttcagcaagcagtacaactgtgccttcatctggcagaaggacggcgtgaagaagctgaacctgtacctgatcatcaactacttcaagggcggcaagctgcggttcaagaagatcaaacctgaagccttcgaagccaacagattctacaccgtgatcaacaaaaagagcggcgagatcgtgcccatggaggtgaacttcaacttcgacgaccccaacctgatcatcctgcctctggcctttggcaagagacagggcagagaattcatctggaacgacctgctgtccctggaaaccggcagcctgaagctggccaacggaagagtgatcgagaagacactgtacaacagaagaacccggcaggatgagcctgccctgttcgtggccctgaccttcgagcggcgggaggtcctggactcctccaatatcaaaccaatgaacctgatcggcgtggcaagaggcgaaaacatccccgccgtgatcgccctgaccgaccccgagggctgcccactgagccggtttaaggatagcctgggaaacccaacccacatcctgagaatcggcgagagctataaggagaagcagcggaccatccaggccaagaaggaggtggagcagcggagagccggcggctacagccggaagtacgccagcaaagccaagaatctggcagacgatatggtgagaaacaccgctagagatctgctgtactacgccgtgacccaggatgccatgctgatcttcgccaacctgagccggggcttcggccggcagggcaagcggaccttcatggccgagagacagtacacacggatggaggactggctgaccgccaagctggcctacgagggcctgagcaagacctacctgtccaagacactggcccagtacacctccaagacatgcagcaactgtgggtttaccatcaccagcgccgactacgacagggtgctggagaagctgaagaagacagcaacaggctggatgaccacaattaacggcaaggagctgaaggtggagggccagattacctactacaacagatacaagagacagaacgtagtcaaggacctgtccgtcgagctggatagactgagcgaagaatctgtgaacaacgacatctcctcctggacaaagggcagaagcggagaagctctgagcctcctgaagaaaagattctcccatagacccgtgcaggagaagttcgtgtgcctgaactgcggcttcgagacacacgcagccgagcaagccgccctgaacatcgccagatcctggctgttcctgcggagccaggagtacaagaaataccagacaaacaagacaaccggcaacaccgataagagagccttcgtcgagacctggcagtccttttaccggaagaagcttaaggaggtgtggaaacctgccgtgcggtctggcggatctggcggaggctccaccagccccaagaaaaagagaaaagtctaagctgccttctgcggggcttgccttctggccatgcccttcttctctcccttgcacctgtacctcttggtctttgaataaagcctgagtaggaaggctagcaaaaaaaaaaaaaaaaaaaaaaaaaaaaaaaaaaaaaaaaaaaaaaaaaaaaaaaaaaaaaaaaaaaaaaaaaaaaaaaagcccagccggctccccaacctctaccgaggagggcacctctgagtccgccacccccgagagcggccctggcacctccaccgagcccagcgagggcagcgcacccggcagccctgccggcagccccacctccacagaggagggaaccagcaccgagcccagcgaaggcagcgccccaggcaccagcaccgagcctagtgagcaggagattaaacggatcaacaagatcagaagaagacttgtgaaagacagcaacaccaagaaggccggcaagacaggccccatgaaaaccctgctggttagagtgatgacacccgatctgagagagcggctggaaaacctgagaaagaagcctgaaaatatcccccagcccatcagcaatacatctagagccaacctgaataagctgctgaccgattacaccgaaatgaagaaggcgatcctgcatgtgtactgggaagagttccagaaggaccctgtgggcctgatgagccgggtggcccagcctgccagcaagaagatcgatcagaacaagctgaaacctgagatggacgagaagggcaacctgaccaccgccggctttgcctgctctcagtgtggccagcccctgttcgtgtacaagctggagcaggtgtctgagaagggcaaggcttacaccaactacttcggacggtgcaatgtggccgagcacgaaaagctgatcctgctggcccagctgaagcccgagaaggatagcgacgaagccgtgacatatagcctgggaaagtttgggcagagggccctggatttctacagcattcatgtgaccaaggagtccacccaccccgtgaagcccctggcccagatcgccggaaacagatacgcctccggacctgtgggaaaggccctgagcgacgcatgtatgggcacaatcgcctccttcctgtctaagtaccaggacatcatcatcgaacaccagaaggtggtgaagggcaaccagaagagactggagagcctgcgggagctggccggcaaggaaaacctggaataccctagcgtgaccctgccacctcagcctcacaccaaggagggcgttgatgcctacaacgaagtgatcgcccgggtgcgaatgtgggtgaacctgaacctgtggcagaagctgaagctaagcagagatgatgccaagcctctgctgagactgaagggattcccttcctttcctctggtcgagagacaggccaacgaagtggactggtgggacatggtgtgtaacgtgaagaagctgatcaacgagaaaaaggaggatggcaaggtgttttggcagaatctggctggctacaagagacaggaagccctgagaccatacctgagcagcgaggaagatcggaagaagggaaagaaattcgctcggtaccagctgggcgacctgctgctgcacctggaaaagaagcacggcgaggactggggaaaggtgtacgacgaggcctgggagcggattgacaagaaagtggaaggcctgagcaagcacatcaagctggaagaggaacggagaagcgaggacgcccagagcaaggccgccctgaccgactggctgcgggctaaggccagcttcgtgatcgagggcctgaaggaggccgacaaggacgagttctgcagatgcgagctgaagctgcagaagtggtacggggacctgcggggaaagcccttcgccatcgaagccgagaacagcatcctggacatcagcggcttcagcaagcagtacaactgtgccttcatctggcagaaggacggcgtgaagaagctgaacctgtacctgatcatcaactacttcaagggcggcaagctgcggttcaagaagatcaaacctgaagccttcgaagccaacagattctacaccgtgatcaacaaaaagagcggcgagatcgtgcccatggaggtgaacttcaacttcgacgaccccaacctgatcatcctgcctctggcctttggcaagagacagggcagagaattcatctggaacgacctgctgtccctggaaaccggcagcctgaagctggccaacggaagagtgatcgagaagacactgtacaacagaagaacccggcaggatgagcctgccctgttcgtggccctgaccttcgagcggcgggaggtcctggactcctccaatatcaaaccaatgaacctgatcggcgtggcaagaggcgaaaacatccccgccgtgatcgccctgaccgaccccgagggctgcccactgagccggtttaaggatagcctgggaaacccaacccacatcctgagaatcggcgagagctataaggagaagcagcggaccatccaggccaagaaggaggtggagcagcggagagccggcggctacagccggaagtacgccagcaaagccaagaatctggcagacgatatggtgagaaacaccgctagagatctgctgtactacgccgtgacccaggatgccatgctgatcttcgccaacctgagccggggcttcggccggcagggcaagcggaccttcatggccgagagacagtacacacggatggaggactggctgaccgccaagctggcctacgagggcctgagcaagacctacctgtccaagacactggcccagtacacctccaagacatgcagcaactgtgggtttaccatcaccagcgccgactacgacagggtgctggagaagctgaagaagacagcaacaggctggatgaccacaattaacggcaaggagctgaaggtggagggccagattacctactacaacagatacaagagacagaacgtagtcaaggacctgtccgtcgagctggatagactgagcgaagaatctgtgaacaacgacatctcctcctggacaaagggcagaagcggagaagctctgagcctcctgaagaaaagattctcccatagacccgtgcaggagaagttcgtgtgcctgaactgcggcttcgagacacacgcagccgagcaagccgccctgaacatcgccagatcctggctgttcctgcggagccaggagtacaagaaataccagacaaacaagacaaccggcaacaccgataagagagccttcgtcgagacctggcagtccttttaccggaagaagcttaaggaggtgtggaaacctgccgtgcggtctggcggatctggcggaggctccaccagccccaagaaaaagagaaaagtctaagctgccttctgcggggcttgccttctggccatgcccttcttctctcccttgcacctgtacctcttggtctttgaataaagcctgagtaggaaggctagcaaaaaaaaaaaaaaaaaaaaaaaaaaaaaaaaaaaaaaaaaaaaaaaaaaaaaaaaaaaaaaaaaaaaaaaaaaaaaaaa

SEQ ID NO: 9904 - RNA, 8787 nt, synthetic construct
  source 1..8787: mol_type = other RNA
aggaaataagagagaaaagaagagtaagaagaaatataagagccaccatggcccctaagaagaagcgtaaagtgagccggatgaaccacgaccaggagttcgacccccctaaggtgtaccctcccgtccccgccgagaagagaaagcccatccgggtcctgagcctgttcgatggcatcgccaccggtctgctggtgctgaaggacctgggcatccaggtggataggtacattgcctccgaggtgtgcgaggactccatcaccgtgggaatggtgcgtcatcagggcaagatcatgtacgtgggcgacgtgcggagcgtgacacagaagcatatccaggagtggggccctttcgacctggtgatcggcggcagcccttgcaatgacctgagcatcgtgaacccagcccggaagggcctgtacgagggaaccggcagactgttcttcgagttttacagactgctgcacgacgcccggcctaaggaaggcgacgaccggcccttcttttggctgttcgagaatgtggtggccatgggagtcagcgacaagcgggatattagccggttcctggagagcaaccccgtgatgatcgatgccaaggaagtgagcgccgcccaccgggccagatacttctggggcaatctgcctggcatgaacagacccctggccagcaccgtgaacgacaagctggagctgcaggagtgcctggagcacggccggatcgccaagttcagcaaggtgagaaccatcaccacccgaagcaacagcatcaaacaaggcaaggaccagcactttcctgtgttcatgaacgagaaggaggacatcctgtggtgtaccgagatggagagagtgttcgggttcccagtccactacacagatgtcagcaacatgtctagactggccagacagagactgctgggaagaagctggtccgtccctgtgatcagacacctgttcgcccctctgaaggagtacttcgcctgcgtgagcagcggcaacagcaacgccaacagccggggccccagcttctctagcggcctggtgccactgtccctgagagggagccacatgggccccatggagatctacaaaaccgtgagcgcctggaagcggcagcctgtgcgcgtgctgagcctgtttcggaatatcgataaagtcctgaaaagcctgggattcctggagagcggctctggctccggcggtggcaccctgaagtacgtggaggatgtgacaaacgtggtcagacgggatgtggagaagtggggccccttcgatctggtgtacggcagcacccaacccctgggcagctcttgtgaccggtgccctggctggtacatgtttcagttccaccggatcctgcagtacgccctgccgagacaggagtcccagcggccattcttttggattttcatggacaacttgctgctgaccgaggatgaccaggaaactaccactcggttcctgcagaccgaagccgtgaccctgcaggacgtgagaggccgggactaccagaacgccatgcgggtgtggtccaacatccctggactgaaaagcaagcacgcacctctgacccctaaagaagaggagtacctgcaggcccaggtgcggagcagaagcaagctggacgcccctaaggtggatctgctggtgaagaattgcctcctgcccctgagagagtacttcaagtatttcagccagaatagtctgcccctgggaggcagcggcggcggcgagcccggcgccgtgagcttcggcgacgtggccgtgtacttcagcagggaggagtggggctgcctgaggcccgcccagagggccctgtacagggacgtgatgagggagacctacagccacctgggcgccctgggcgtgggcggcagcaagcccgccctgatcagctggatggaggaggaggccgagctgtgggtgcccgccgcccaggaccccgaggtggccaagtgccccaccgaggccgacggcggcccaagcagcggcgcccctcctcccagcggcggcaggcggcccaagcagcggcgcccctcctcccagcggcggcagcccagccggctccccaacctctaccgaggagggcacctctgagtccgccacccccgagagcggccctggcacctccaccgagcccagcgagggcagcgcacccggcagccctgccggcagccccacctccacagaggagggaaccagcaccgagcccagcgaaggcagcgccccaggcaccagcaccgagcctagtgagcaggagattaaacggatcaacaagatcagaagaagacttgtgaaagacagcaacaccaagaaggccggcaagacaggccccatgaaaaccctgctggttagagtgatgacacccgatctgagagagcggctggaaaacctgagaaagaagcctgaaaatatcccccagcccatcagcaatacatctagagccaacctgaataagctgctgaccgattacaccgaaatgaagaaggcgatcctgcatgtgtactgggaagagttccagaaggaccctgtgggcctgatgagccgggtggcccagcctgccagcaagaagatcgatcagaacaagctgaaacctgagatggacgagaagggcaacctgaccaccgccggctttgcctgctctcagtgtggccagcccctgttcgtgtacaagctggagcaggtgtctgagaagggcaaggcttacaccaactacttcggacggtgcaatgtggccgagcacgaaaagctgatcctgctggcccagctgaagcccgagaaggatagcgacgaagccgtgacatatagcctgggaaagtttgggcagagggccctggatttctacagcattcatgtgaccaaggagtccacccaccccgtgaagcccctggcccagatcgccggaaacagatacgcctccggacctgtgggaaaggccctgagcgacgcatgtatgggcacaatcgcctccttcctgtctaagtaccaggacatcatcatcgaacaccagaaggtggtgaagggcaaccagaagagactggagagcctgcgggagctggccggcaaggaaaacctggaataccctagcgtgaccctgccacctcagcctcacaccaaggagggcgttgatgcctacaacgaagtgatcgcccgggtgcgaatgtgggtgaacctgaacctgtggcagaagctgaagctaagcagagatgatgccaagcctctgctgagactgaagggattcccttcctttcctctggtcgagagacaggccaacgaagtggactggtgggacatggtgtgtaacgtgaagaagctgatcaacgagaaaaaggaggatggcaaggtgttttggcagaatctggctggctacaagagacaggaagccctgagaccatacctgagcagcgaggaagatcggaagaagggaaagaaattcgctcggtaccagctgggcgacctgctgctgcacctggaaaagaagcacggcgaggactggggaaaggtgtacgacgaggcctgggagcggattgacaagaaagtggaaggcctgagcaagcacatcaagctggaagaggaacggagaagcgaggacgcccagagcaaggccgccctgaccgactggctgcgggctaaggccagcttcgtgatcgagggcctgaaggaggccgacaaggacgagttctgcagatgcgagctgaagctgcagaagtggtacggggacctgcggggaaagcccttcgccatcgaagccgagaacagcatcctggacatcagcggcttcagcaagcagtacaactgtgccttcatctggcagaaggacggcgtgaagaagctgaacctgtacctgatcatcaactacttcaagggcggcaagctgcggttcaagaagatcaaacctgaagccttcgaagccaacagattctacaccgtgatcaacaaaaagagcggcgagatcgtgcccatggaggtgaacttcaacttcgacgaccccaacctgatcatcctgcctctggcctttggcaagagacagggcagagaattcatctggaacgacctgctgtccctggaaaccggcagcctgaagctggccaacggaagagtgatcgagaagacactgtacaacagaagaacccggcaggatgagcctgccctgttcgtggccctgaccttcgagcggcgggaggtcctggactcctccaatatcaaaccaatgaacctgatcggcgtggcaagaggcgaaaacatccccgccgtgatcgccctgaccgaccccgagggctgcccactgagccggtttaaggatagcctgggaaacccaacccacatcctgagaatcggcgagagctataaggagaagcagcggaccatccaggccaagaaggaggtggagcagcggagagccggcggctacagccggaagtacgccagcaaagccaagaatctggcagacgatatggtgagaaacaccgctagagatctgctgtactacgccgtgacccaggatgccatgctgatcttcgccaacctgagccggggcttcggccggcagggcaagcggaccttcatggccgagagacagtacacacggatggaggactggctgaccgccaagctggcctacgagggcctgagcaagacctacctgtccaagacactggcccagtacacctccaagacatgcagcaactgtgggtttaccatcaccagcgccgactacgacagggtgctggagaagctgaagaagacagcaacaggctggatgaccacaattaacggcaaggagctgaaggtggagggccagattacctactacaacagatacaagagacagaacgtagtcaaggacctgtccgtcgagctggatagactgagcgaagaatctgtgaacaacgacatctcctcctggacaaagggcagaagcggagaagctctgagcctcctgaagaaaagattctcccatagacccgtgcaggagaagttcgtgtgcctgaactgcggcttcgagacacacgcagccgagcaagccgccctgaacatcgccagatcctggctgttcctgcggagccaggagtacaagaaataccagacaaacaagacaaccggcaacaccgataagagagccttcgtcgagacctggcagtccttttaccggaagaagcttaaggaggtgtggaaacctgccgtgcggtctggcggatctggcggaggctccaccagccccaagaaaaagagaaaagtctaagctgccttctgcggggcttgccttctggccatgcccttcttctctcccttgcacctgtacctcttggtctttgaataaagcctgagtaggaaggctagcaaaaaaaaaaaaaaaaaaaaaaaaaaaaaaaaaaaaaaaaaaaaaaaaaaaaaaaaaaaaaaaaaaaaaaaaaaaaaaaagcccagccggctccccaacctctaccgaggagggcacctctgagtccgccacccccgagagcggccctggcacctccaccgagcccagcgagggcagcgcacccggcagccctgccggcagccccacctccacagaggagggaaccagcaccgagcccagcgaaggcagcgccccaggcaccagcaccgagcctagtgagcaggagattaaacggatcaacaagatcagaagaagacttgtgaaagacagcaacaccaagaaggccggcaagacaggccccatgaaaaccctgctggttagagtgatgacacccgatctgagagagcggctggaaaacctgagaaagaagcctgaaaatatcccccagcccatcagcaatacatctagagccaacctgaataagctgctgaccgattacaccgaaatgaagaaggcgatcctgcatgtgtactgggaagagttccagaaggaccctgtgggcctgatgagccgggtggcccagcctgccagcaagaagatcgatcagaacaagctgaaacctgagatggacgagaagggcaacctgaccaccgccggctttgcctgctctcagtgtggccagcccctgttcgtgtacaagctggagcaggtgtctgagaagggcaaggcttacaccaactacttcggacggtgcaatgtggccgagcacgaaaagctgatcctgctggcccagctgaagcccgagaaggatagcgacgaagccgtgacatatagcctgggaaagtttgggcagagggccctggatttctacagcattcatgtgaccaaggagtccacccaccccgtgaagcccctggcccagatcgccggaaacagatacgcctccggacctgtgggaaaggccctgagcgacgcatgtatgggcacaatcgcctccttcctgtctaagtaccaggacatcatcatcgaacaccagaaggtggtgaagggcaaccagaagagactggagagcctgcgggagctggccggcaaggaaaacctggaataccctagcgtgaccctgccacctcagcctcacaccaaggagggcgttgatgcctacaacgaagtgatcgcccgggtgcgaatgtgggtgaacctgaacctgtggcagaagctgaagctaagcagagatgatgccaagcctctgctgagactgaagggattcccttcctttcctctggtcgagagacaggccaacgaagtggactggtgggacatggtgtgtaacgtgaagaagctgatcaacgagaaaaaggaggatggcaaggtgttttggcagaatctggctggctacaagagacaggaagccctgagaccatacctgagcagcgaggaagatcggaagaagggaaagaaattcgctcggtaccagctgggcgacctgctgctgcacctggaaaagaagcacggcgaggactggggaaaggtgtacgacgaggcctgggagcggattgacaagaaagtggaaggcctgagcaagcacatcaagctggaagaggaacggagaagcgaggacgcccagagcaaggccgccctgaccgactggctgcgggctaaggccagcttcgtgatcgagggcctgaaggaggccgacaaggacgagttctgcagatgcgagctgaagctgcagaagtggtacggggacctgcggggaaagcccttcgccatcgaagccgagaacagcatcctggacatcagcggcttcagcaagcagtacaactgtgccttcatctggcagaaggacggcgtgaagaagctgaacctgtacctgatcatcaactacttcaagggcggcaagctgcggttcaagaagatcaaacctgaagccttcgaagccaacagattctacaccgtgatcaacaaaaagagcggcgagatcgtgcccatggaggtgaacttcaacttcgacgaccccaacctgatcatcctgcctctggcctttggcaagagacagggcagagaattcatctggaacgacctgctgtccctggaaaccggcagcctgaagctggccaacggaagagtgatcgagaagacactgtacaacagaagaacccggcaggatgagcctgccctgttcgtggccctgaccttcgagcggcgggaggtcctggactcctccaatatcaaaccaatgaacctgatcggcgtggcaagaggcgaaaacatccccgccgtgatcgccctgaccgaccccgagggctgcccactgagccggtttaaggatagcctgggaaacccaacccacatcctgagaatcggcgagagctataaggagaagcagcggaccatccaggccaagaaggaggtggagcagcggagagccggcggctacagccggaagtacgccagcaaagccaagaatctggcagacgatatggtgagaaacaccgctagagatctgctgtactacgccgtgacccaggatgccatgctgatcttcgccaacctgagccggggcttcggccggcagggcaagcggaccttcatggccgagagacagtacacacggatggaggactggctgaccgccaagctggcctacgagggcctgagcaagacctacctgtccaagacactggcccagtacacctccaagacatgcagcaactgtgggtttaccatcaccagcgccgactacgacagggtgctggagaagctgaagaagacagcaacaggctggatgaccacaattaacggcaaggagctgaaggtggagggccagattacctactacaacagatacaagagacagaacgtagtcaaggacctgtccgtcgagctggatagactgagcgaagaatctgtgaacaacgacatctcctcctggacaaagggcagaagcggagaagctctgagcctcctgaagaaaagattctcccatagacccgtgcaggagaagttcgtgtgcctgaactgcggcttcgagacacacgcagccgagcaagccgccctgaacatcgccagatcctggctgttcctgcggagccaggagtacaagaaataccagacaaacaagacaaccggcaacaccgataagagagccttcgtcgagacctggcagtccttttaccggaagaagcttaaggaggtgtggaaacctgccgtgcggtctggcggatctggcggaggctccaccagccccaagaaaaagagaaaagtctaagctgccttctgcggggcttgccttctggccatgcccttcttctctcccttgcacctgtacctcttggtctttgaataaagcctgagtaggaaggctagcaaaaaaaaaaaaaaaaaaaaaaaaaaaaaaaaaaaaaaaaaaaaaaaaaaaaaaaaaaaaaaaaaaaaaaaaaaaaaaaa

SEQ ID NO: 9905 - RNA, 8787 nt, synthetic construct
  source 1..8787: mol_type = other RNA
aggaaataagagagaaaagaagagtaagaagaaatataagagccaccatggcccctaagaagaagcgtaaagtgagccggatgaaccacgaccaggagttcgacccccctaaggtgtaccctcccgtccccgccgagaagagaaagcccatccgggtcctgagcctgttcgatggcatcgccaccggtctgctggtgctgaaggacctgggcatccaggtggataggtacattgcctccgaggtgtgcgaggactccatcaccgtgggaatggtgcgtcatcagggcaagatcatgtacgtgggcgacgtgcggagcgtgacacagaagcatatccaggagtggggccctttcgacctggtgatcggcggcagcccttgcaatgacctgagcatcgtgaacccagcccggaagggcctgtacgagggaaccggcagactgttcttcgagttttacagactgctgcacgacgcccggcctaaggaaggcgacgaccggcccttcttttggctgttcgagaatgtggtggccatgggagtcagcgacaagcgggatattagccggttcctggagagcaaccccgtgatgatcgatgccaaggaagtgagcgccgcccaccgggccagatacttctggggcaatctgcctggcatgaacagacccctggccagcaccgtgaacgacaagctggagctgcaggagtgcctggagcacggccggatcgccaagttcagcaaggtgagaaccatcaccacccgaagcaacagcatcaaacaaggcaaggaccagcactttcctgtgttcatgaacgagaaggaggacatcctgtggtgtaccgagatggagagagtgttcgggttcccagtccactacacagatgtcagcaacatgtctagactggccagacagagactgctgggaagaagctggtccgtccctgtgatcagacacctgttcgcccctctgaaggagtacttcgcctgcgtgagcagcggcaacagcaacgccaacagccggggccccagcttctctagcggcctggtgccactgtccctgagagggagccacatgggccccatggagatctacaaaaccgtgagcgcctggaagcggcagcctgtgcgcgtgctgagcctgtttcggaatatcgataaagtcctgaaaagcctgggattcctggagagcggctctggctccggcggtggcaccctgaagtacgtggaggatgtgacaaacgtggtcagacgggatgtggagaagtggggccccttcgatctggtgtacggcagcacccaacccctgggcagctcttgtgaccggtgccctggctggtacatgtttcagttccaccggatcctgcagtacgccctgccgagacaggagtcccagcggccattcttttggattttcatggacaacttgctgctgaccgaggatgaccaggaaactaccactcggttcctgcagaccgaagccgtgaccctgcaggacgtgagaggccgggactaccagaacgccatgcgggtgtggtccaacatccctggactgaaaagcaagcacgcacctctgacccctaaagaagaggagtacctgcaggcccaggtgcggagcagaagcaagctggacgcccctaaggtggatctgctggtgaagaattgcctcctgcccctgagagagtacttcaagtatttcagccagaatagtctgcccctgggaggcagcggcggcggcgcccagggccccgtgaccttcgaggaggtggccgtgtacttcaccagggaggagggcgccctgctggaccccacccagagggccctgtacagggacgtgatgcaggagaactacgagaccgtggtgctgctgggcttccccgtgagcaagcccgacgtgatcagccagctggagcagggcgaggagccctggatccccgacctgcagggcagcgagaaggaggtgctgcccagggccgcctgcggcggcccaagcagcggcgcccctcctcccagcggcggcaggcggcccaagcagcggcgcccctcctcccagcggcggcagcccagccggctccccaacctctaccgaggagggcacctctgagtccgccacccccgagagcggccctggcacctccaccgagcccagcgagggcagcgcacccggcagccctgccggcagccccacctccacagaggagggaaccagcaccgagcccagcgaaggcagcgccccaggcaccagcaccgagcctagtgagcaggagattaaacggatcaacaagatcagaagaagacttgtgaaagacagcaacaccaagaaggccggcaagacaggccccatgaaaaccctgctggttagagtgatgacacccgatctgagagagcggctggaaaacctgagaaagaagcctgaaaatatcccccagcccatcagcaatacatctagagccaacctgaataagctgctgaccgattacaccgaaatgaagaaggcgatcctgcatgtgtactgggaagagttccagaaggaccctgtgggcctgatgagccgggtggcccagcctgccagcaagaagatcgatcagaacaagctgaaacctgagatggacgagaagggcaacctgaccaccgccggctttgcctgctctcagtgtggccagcccctgttcgtgtacaagctggagcaggtgtctgagaagggcaaggcttacaccaactacttcggacggtgcaatgtggccgagcacgaaaagctgatcctgctggcccagctgaagcccgagaaggatagcgacgaagccgtgacatatagcctgggaaagtttgggcagagggccctggatttctacagcattcatgtgaccaaggagtccacccaccccgtgaagcccctggcccagatcgccggaaacagatacgcctccggacctgtgggaaaggccctgagcgacgcatgtatgggcacaatcgcctccttcctgtctaagtaccaggacatcatcatcgaacaccagaaggtggtgaagggcaaccagaagagactggagagcctgcgggagctggccggcaaggaaaacctggaataccctagcgtgaccctgccacctcagcctcacaccaaggagggcgttgatgcctacaacgaagtgatcgcccgggtgcgaatgtgggtgaacctgaacctgtggcagaagctgaagctaagcagagatgatgccaagcctctgctgagactgaagggattcccttcctttcctctggtcgagagacaggccaacgaagtggactggtgggacatggtgtgtaacgtgaagaagctgatcaacgagaaaaaggaggatggcaaggtgttttggcagaatctggctggctacaagagacaggaagccctgagaccatacctgagcagcgaggaagatcggaagaagggaaagaaattcgctcggtaccagctgggcgacctgctgctgcacctggaaaagaagcacggcgaggactggggaaaggtgtacgacgaggcctgggagcggattgacaagaaagtggaaggcctgagcaagcacatcaagctggaagaggaacggagaagcgaggacgcccagagcaaggccgccctgaccgactggctgcgggctaaggccagcttcgtgatcgagggcctgaaggaggccgacaaggacgagttctgcagatgcgagctgaagctgcagaagtggtacggggacctgcggggaaagcccttcgccatcgaagccgagaacagcatcctggacatcagcggcttcagcaagcagtacaactgtgccttcatctggcagaaggacggcgtgaagaagctgaacctgtacctgatcatcaactacttcaagggcggcaagctgcggttcaagaagatcaaacctgaagccttcgaagccaacagattctacaccgtgatcaacaaaaagagcggcgagatcgtgcccatggaggtgaacttcaacttcgacgaccccaacctgatcatcctgcctctggcctttggcaagagacagggcagagaattcatctggaacgacctgctgtccctggaaaccggcagcctgaagctggccaacggaagagtgatcgagaagacactgtacaacagaagaacccggcaggatgagcctgccctgttcgtggccctgaccttcgagcggcgggaggtcctggactcctccaatatcaaaccaatgaacctgatcggcgtggcaagaggcgaaaacatccccgccgtgatcgccctgaccgaccccgagggctgcccactgagccggtttaaggatagcctgggaaacccaacccacatcctgagaatcggcgagagctataaggagaagcagcggaccatccaggccaagaaggaggtggagcagcggagagccggcggctacagccggaagtacgccagcaaagccaagaatctggcagacgatatggtgagaaacaccgctagagatctgctgtactacgccgtgacccaggatgccatgctgatcttcgccaacctgagccggggcttcggccggcagggcaagcggaccttcatggccgagagacagtacacacggatggaggactggctgaccgccaagctggcctacgagggcctgagcaagacctacctgtccaagacactggcccagtacacctccaagacatgcagcaactgtgggtttaccatcaccagcgccgactacgacagggtgctggagaagctgaagaagacagcaacaggctggatgaccacaattaacggcaaggagctgaaggtggagggccagattacctactacaacagatacaagagacagaacgtagtcaaggacctgtccgtcgagctggatagactgagcgaagaatctgtgaacaacgacatctcctcctggacaaagggcagaagcggagaagctctgagcctcctgaagaaaagattctcccatagacccgtgcaggagaagttcgtgtgcctgaactgcggcttcgagacacacgcagccgagcaagccgccctgaacatcgccagatcctggctgttcctgcggagccaggagtacaagaaataccagacaaacaagacaaccggcaacaccgataagagagccttcgtcgagacctggcagtccttttaccggaagaagcttaaggaggtgtggaaacctgccgtgcggtctggcggatctggcggaggctccaccagccccaagaaaaagagaaaagtctaagctgccttctgcggggcttgccttctggccatgcccttcttctctcccttgcacctgtacctcttggtctttgaataaagcctgagtaggaaggctagcaaaaaaaaaaaaaaaaaaaaaaaaaaaaaaaaaaaaaaaaaaaaaaaaaaaaaaaaaaaaaaaaaaaaaaaaaaaaaaaagcccagccggctccccaacctctaccgaggagggcacctctgagtccgccacccccgagagcggccctggcacctccaccgagcccagcgagggcagcgcacccggcagccctgccggcagccccacctccacagaggagggaaccagcaccgagcccagcgaaggcagcgccccaggcaccagcaccgagcctagtgagcaggagattaaacggatcaacaagatcagaagaagacttgtgaaagacagcaacaccaagaaggccggcaagacaggccccatgaaaaccctgctggttagagtgatgacacccgatctgagagagcggctggaaaacctgagaaagaagcctgaaaatatcccccagcccatcagcaatacatctagagccaacctgaataagctgctgaccgattacaccgaaatgaagaaggcgatcctgcatgtgtactgggaagagttccagaaggaccctgtgggcctgatgagccgggtggcccagcctgccagcaagaagatcgatcagaacaagctgaaacctgagatggacgagaagggcaacctgaccaccgccggctttgcctgctctcagtgtggccagcccctgttcgtgtacaagctggagcaggtgtctgagaagggcaaggcttacaccaactacttcggacggtgcaatgtggccgagcacgaaaagctgatcctgctggcccagctgaagcccgagaaggatagcgacgaagccgtgacatatagcctgggaaagtttgggcagagggccctggatttctacagcattcatgtgaccaaggagtccacccaccccgtgaagcccctggcccagatcgccggaaacagatacgcctccggacctgtgggaaaggccctgagcgacgcatgtatgggcacaatcgcctccttcctgtctaagtaccaggacatcatcatcgaacaccagaaggtggtgaagggcaaccagaagagactggagagcctgcgggagctggccggcaaggaaaacctggaataccctagcgtgaccctgccacctcagcctcacaccaaggagggcgttgatgcctacaacgaagtgatcgcccgggtgcgaatgtgggtgaacctgaacctgtggcagaagctgaagctaagcagagatgatgccaagcctctgctgagactgaagggattcccttcctttcctctggtcgagagacaggccaacgaagtggactggtgggacatggtgtgtaacgtgaagaagctgatcaacgagaaaaaggaggatggcaaggtgttttggcagaatctggctggctacaagagacaggaagccctgagaccatacctgagcagcgaggaagatcggaagaagggaaagaaattcgctcggtaccagctgggcgacctgctgctgcacctggaaaagaagcacggcgaggactggggaaaggtgtacgacgaggcctgggagcggattgacaagaaagtggaaggcctgagcaagcacatcaagctggaagaggaacggagaagcgaggacgcccagagcaaggccgccctgaccgactggctgcgggctaaggccagcttcgtgatcgagggcctgaaggaggccgacaaggacgagttctgcagatgcgagctgaagctgcagaagtggtacggggacctgcggggaaagcccttcgccatcgaagccgagaacagcatcctggacatcagcggcttcagcaagcagtacaactgtgccttcatctggcagaaggacggcgtgaagaagctgaacctgtacctgatcatcaactacttcaagggcggcaagctgcggttcaagaagatcaaacctgaagccttcgaagccaacagattctacaccgtgatcaacaaaaagagcggcgagatcgtgcccatggaggtgaacttcaacttcgacgaccccaacctgatcatcctgcctctggcctttggcaagagacagggcagagaattcatctggaacgacctgctgtccctggaaaccggcagcctgaagctggccaacggaagagtgatcgagaagacactgtacaacagaagaacccggcaggatgagcctgccctgttcgtggccctgaccttcgagcggcgggaggtcctggactcctccaatatcaaaccaatgaacctgatcggcgtggcaagaggcgaaaacatccccgccgtgatcgccctgaccgaccccgagggctgcccactgagccggtttaaggatagcctgggaaacccaacccacatcctgagaatcggcgagagctataaggagaagcagcggaccatccaggccaagaaggaggtggagcagcggagagccggcggctacagccggaagtacgccagcaaagccaagaatctggcagacgatatggtgagaaacaccgctagagatctgctgtactacgccgtgacccaggatgccatgctgatcttcgccaacctgagccggggcttcggccggcagggcaagcggaccttcatggccgagagacagtacacacggatggaggactggctgaccgccaagctggcctacgagggcctgagcaagacctacctgtccaagacactggcccagtacacctccaagacatgcagcaactgtgggtttaccatcaccagcgccgactacgacagggtgctggagaagctgaagaagacagcaacaggctggatgaccacaattaacggcaaggagctgaaggtggagggccagattacctactacaacagatacaagagacagaacgtagtcaaggacctgtccgtcgagctggatagactgagcgaagaatctgtgaacaacgacatctcctcctggacaaagggcagaagcggagaagctctgagcctcctgaagaaaagattctcccatagacccgtgcaggagaagttcgtgtgcctgaactgcggcttcgagacacacgcagccgagcaagccgccctgaacatcgccagatcctggctgttcctgcggagccaggagtacaagaaataccagacaaacaagacaaccggcaacaccgataagagagccttcgtcgagacctggcagtccttttaccggaagaagcttaaggaggtgtggaaacctgccgtgcggtctggcggatctggcggaggctccaccagccccaagaaaaagagaaaagtctaagctgccttctgcggggcttgccttctggccatgcccttcttctctcccttgcacctgtacctcttggtctttgaataaagcctgagtaggaaggctagcaaaaaaaaaaaaaaaaaaaaaaaaaaaaaaaaaaaaaaaaaaaaaaaaaaaaaaaaaaaaaaaaaaaaaaaaaaaaaaaa

SEQ ID NO: 9906 - RNA, 8787 nt, synthetic construct
  source 1..8787: mol_type = other RNA
aggaaataagagagaaaagaagagtaagaagaaatataagagccaccatggcccctaagaagaagcgtaaagtgagccggatgaaccacgaccaggagttcgacccccctaaggtgtaccctcccgtccccgccgagaagagaaagcccatccgggtcctgagcctgttcgatggcatcgccaccggtctgctggtgctgaaggacctgggcatccaggtggataggtacattgcctccgaggtgtgcgaggactccatcaccgtgggaatggtgcgtcatcagggcaagatcatgtacgtgggcgacgtgcggagcgtgacacagaagcatatccaggagtggggccctttcgacctggtgatcggcggcagcccttgcaatgacctgagcatcgtgaacccagcccggaagggcctgtacgagggaaccggcagactgttcttcgagttttacagactgctgcacgacgcccggcctaaggaaggcgacgaccggcccttcttttggctgttcgagaatgtggtggccatgggagtcagcgacaagcgggatattagccggttcctggagagcaaccccgtgatgatcgatgccaaggaagtgagcgccgcccaccgggccagatacttctggggcaatctgcctggcatgaacagacccctggccagcaccgtgaacgacaagctggagctgcaggagtgcctggagcacggccggatcgccaagttcagcaaggtgagaaccatcaccacccgaagcaacagcatcaaacaaggcaaggaccagcactttcctgtgttcatgaacgagaaggaggacatcctgtggtgtaccgagatggagagagtgttcgggttcccagtccactacacagatgtcagcaacatgtctagactggccagacagagactgctgggaagaagctggtccgtccctgtgatcagacacctgttcgcccctctgaaggagtacttcgcctgcgtgagcagcggcaacagcaacgccaacagccggggccccagcttctctagcggcctggtgccactgtccctgagagggagccacatgggccccatggagatctacaaaaccgtgagcgcctggaagcggcagcctgtgcgcgtgctgagcctgtttcggaatatcgataaagtcctgaaaagcctgggattcctggagagcggctctggctccggcggtggcaccctgaagtacgtggaggatgtgacaaacgtggtcagacgggatgtggagaagtggggccccttcgatctggtgtacggcagcacccaacccctgggcagctcttgtgaccggtgccctggctggtacatgtttcagttccaccggatcctgcagtacgccctgccgagacaggagtcccagcggccattcttttggattttcatggacaacttgctgctgaccgaggatgaccaggaaactaccactcggttcctgcagaccgaagccgtgaccctgcaggacgtgagaggccgggactaccagaacgccatgcgggtgtggtccaacatccctggactgaaaagcaagcacgcacctctgacccctaaagaagaggagtacctgcaggcccaggtgcggagcagaagcaagctggacgcccctaaggtggatctgctggtgaagaattgcctcctgcccctgagagagtacttcaagtatttcagccagaatagtctgcccctgggaggcagcggcggcggcatggccgagggcctgaagttcaaggacgtggccatctacttcagccagaacgagtgggagtgcctgcacagcgcccagaaggacctgtacagggacatcatgctggagaactacaacaacctgatcagcctgggcctgagcgagagcaagcccgacgtgatcagcctgctggagcagaggaaggagccctggatggtggagaggaaggagaccaaggagtggttccccgactgggagagcaggggcggcccaagcagcggcgcccctcctcccagcggcggcaggcggcccaagcagcggcgcccctcctcccagcggcggcagcccagccggctccccaacctctaccgaggagggcacctctgagtccgccacccccgagagcggccctggcacctccaccgagcccagcgagggcagcgcacccggcagccctgccggcagccccacctccacagaggagggaaccagcaccgagcccagcgaaggcagcgccccaggcaccagcaccgagcctagtgagcaggagattaaacggatcaacaagatcagaagaagacttgtgaaagacagcaacaccaagaaggccggcaagacaggccccatgaaaaccctgctggttagagtgatgacacccgatctgagagagcggctggaaaacctgagaaagaagcctgaaaatatcccccagcccatcagcaatacatctagagccaacctgaataagctgctgaccgattacaccgaaatgaagaaggcgatcctgcatgtgtactgggaagagttccagaaggaccctgtgggcctgatgagccgggtggcccagcctgccagcaagaagatcgatcagaacaagctgaaacctgagatggacgagaagggcaacctgaccaccgccggctttgcctgctctcagtgtggccagcccctgttcgtgtacaagctggagcaggtgtctgagaagggcaaggcttacaccaactacttcggacggtgcaatgtggccgagcacgaaaagctgatcctgctggcccagctgaagcccgagaaggatagcgacgaagccgtgacatatagcctgggaaagtttgggcagagggccctggatttctacagcattcatgtgaccaaggagtccacccaccccgtgaagcccctggcccagatcgccggaaacagatacgcctccggacctgtgggaaaggccctgagcgacgcatgtatgggcacaatcgcctccttcctgtctaagtaccaggacatcatcatcgaacaccagaaggtggtgaagggcaaccagaagagactggagagcctgcgggagctggccggcaaggaaaacctggaataccctagcgtgaccctgccacctcagcctcacaccaaggagggcgttgatgcctacaacgaagtgatcgcccgggtgcgaatgtgggtgaacctgaacctgtggcagaagctgaagctaagcagagatgatgccaagcctctgctgagactgaagggattcccttcctttcctctggtcgagagacaggccaacgaagtggactggtgggacatggtgtgtaacgtgaagaagctgatcaacgagaaaaaggaggatggcaaggtgttttggcagaatctggctggctacaagagacaggaagccctgagaccatacctgagcagcgaggaagatcggaagaagggaaagaaattcgctcggtaccagctgggcgacctgctgctgcacctggaaaagaagcacggcgaggactggggaaaggtgtacgacgaggcctgggagcggattgacaagaaagtggaaggcctgagcaagcacatcaagctggaagaggaacggagaagcgaggacgcccagagcaaggccgccctgaccgactggctgcgggctaaggccagcttcgtgatcgagggcctgaaggaggccgacaaggacgagttctgcagatgcgagctgaagctgcagaagtggtacggggacctgcggggaaagcccttcgccatcgaagccgagaacagcatcctggacatcagcggcttcagcaagcagtacaactgtgccttcatctggcagaaggacggcgtgaagaagctgaacctgtacctgatcatcaactacttcaagggcggcaagctgcggttcaagaagatcaaacctgaagccttcgaagccaacagattctacaccgtgatcaacaaaaagagcggcgagatcgtgcccatggaggtgaacttcaacttcgacgaccccaacctgatcatcctgcctctggcctttggcaagagacagggcagagaattcatctggaacgacctgctgtccctggaaaccggcagcctgaagctggccaacggaagagtgatcgagaagacactgtacaacagaagaacccggcaggatgagcctgccctgttcgtggccctgaccttcgagcggcgggaggtcctggactcctccaatatcaaaccaatgaacctgatcggcgtggcaagaggcgaaaacatccccgccgtgatcgccctgaccgaccccgagggctgcccactgagccggtttaaggatagcctgggaaacccaacccacatcctgagaatcggcgagagctataaggagaagcagcggaccatccaggccaagaaggaggtggagcagcggagagccggcggctacagccggaagtacgccagcaaagccaagaatctggcagacgatatggtgagaaacaccgctagagatctgctgtactacgccgtgacccaggatgccatgctgatcttcgccaacctgagccggggcttcggccggcagggcaagcggaccttcatggccgagagacagtacacacggatggaggactggctgaccgccaagctggcctacgagggcctgagcaagacctacctgtccaagacactggcccagtacacctccaagacatgcagcaactgtgggtttaccatcaccagcgccgactacgacagggtgctggagaagctgaagaagacagcaacaggctggatgaccacaattaacggcaaggagctgaaggtggagggccagattacctactacaacagatacaagagacagaacgtagtcaaggacctgtccgtcgagctggatagactgagcgaagaatctgtgaacaacgacatctcctcctggacaaagggcagaagcggagaagctctgagcctcctgaagaaaagattctcccatagacccgtgcaggagaagttcgtgtgcctgaactgcggcttcgagacacacgcagccgagcaagccgccctgaacatcgccagatcctggctgttcctgcggagccaggagtacaagaaataccagacaaacaagacaaccggcaacaccgataagagagccttcgtcgagacctggcagtccttttaccggaagaagcttaaggaggtgtggaaacctgccgtgcggtctggcggatctggcggaggctccaccagccccaagaaaaagagaaaagtctaagctgccttctgcggggcttgccttctggccatgcccttcttctctcccttgcacctgtacctcttggtctttgaataaagcctgagtaggaaggctagcaaaaaaaaaaaaaaaaaaaaaaaaaaaaaaaaaaaaaaaaaaaaaaaaaaaaaaaaaaaaaaaaaaaaaaaaaaaaaaaagcccagccggctccccaacctctaccgaggagggcacctctgagtccgccacccccgagagcggccctggcacctccaccgagcccagcgagggcagcgcacccggcagccctgccggcagccccacctccacagaggagggaaccagcaccgagcccagcgaaggcagcgccccaggcaccagcaccgagcctagtgagcaggagattaaacggatcaacaagatcagaagaagacttgtgaaagacagcaacaccaagaaggccggcaagacaggccccatgaaaaccctgctggttagagtgatgacacccgatctgagagagcggctggaaaacctgagaaagaagcctgaaaatatcccccagcccatcagcaatacatctagagccaacctgaataagctgctgaccgattacaccgaaatgaagaaggcgatcctgcatgtgtactgggaagagttccagaaggaccctgtgggcctgatgagccgggtggcccagcctgccagcaagaagatcgatcagaacaagctgaaacctgagatggacgagaagggcaacctgaccaccgccggctttgcctgctctcagtgtggccagcccctgttcgtgtacaagctggagcaggtgtctgagaagggcaaggcttacaccaactacttcggacggtgcaatgtggccgagcacgaaaagctgatcctgctggcccagctgaagcccgagaaggatagcgacgaagccgtgacatatagcctgggaaagtttgggcagagggccctggatttctacagcattcatgtgaccaaggagtccacccaccccgtgaagcccctggcccagatcgccggaaacagatacgcctccggacctgtgggaaaggccctgagcgacgcatgtatgggcacaatcgcctccttcctgtctaagtaccaggacatcatcatcgaacaccagaaggtggtgaagggcaaccagaagagactggagagcctgcgggagctggccggcaaggaaaacctggaataccctagcgtgaccctgccacctcagcctcacaccaaggagggcgttgatgcctacaacgaagtgatcgcccgggtgcgaatgtgggtgaacctgaacctgtggcagaagctgaagctaagcagagatgatgccaagcctctgctgagactgaagggattcccttcctttcctctggtcgagagacaggccaacgaagtggactggtgggacatggtgtgtaacgtgaagaagctgatcaacgagaaaaaggaggatggcaaggtgttttggcagaatctggctggctacaagagacaggaagccctgagaccatacctgagcagcgaggaagatcggaagaagggaaagaaattcgctcggtaccagctgggcgacctgctgctgcacctggaaaagaagcacggcgaggactggggaaaggtgtacgacgaggcctgggagcggattgacaagaaagtggaaggcctgagcaagcacatcaagctggaagaggaacggagaagcgaggacgcccagagcaaggccgccctgaccgactggctgcgggctaaggccagcttcgtgatcgagggcctgaaggaggccgacaaggacgagttctgcagatgcgagctgaagctgcagaagtggtacggggacctgcggggaaagcccttcgccatcgaagccgagaacagcatcctggacatcagcggcttcagcaagcagtacaactgtgccttcatctggcagaaggacggcgtgaagaagctgaacctgtacctgatcatcaactacttcaagggcggcaagctgcggttcaagaagatcaaacctgaagccttcgaagccaacagattctacaccgtgatcaacaaaaagagcggcgagatcgtgcccatggaggtgaacttcaacttcgacgaccccaacctgatcatcctgcctctggcctttggcaagagacagggcagagaattcatctggaacgacctgctgtccctggaaaccggcagcctgaagctggccaacggaagagtgatcgagaagacactgtacaacagaagaacccggcaggatgagcctgccctgttcgtggccctgaccttcgagcggcgggaggtcctggactcctccaatatcaaaccaatgaacctgatcggcgtggcaagaggcgaaaacatccccgccgtgatcgccctgaccgaccccgagggctgcccactgagccggtttaaggatagcctgggaaacccaacccacatcctgagaatcggcgagagctataaggagaagcagcggaccatccaggccaagaaggaggtggagcagcggagagccggcggctacagccggaagtacgccagcaaagccaagaatctggcagacgatatggtgagaaacaccgctagagatctgctgtactacgccgtgacccaggatgccatgctgatcttcgccaacctgagccggggcttcggccggcagggcaagcggaccttcatggccgagagacagtacacacggatggaggactggctgaccgccaagctggcctacgagggcctgagcaagacctacctgtccaagacactggcccagtacacctccaagacatgcagcaactgtgggtttaccatcaccagcgccgactacgacagggtgctggagaagctgaagaagacagcaacaggctggatgaccacaattaacggcaaggagctgaaggtggagggccagattacctactacaacagatacaagagacagaacgtagtcaaggacctgtccgtcgagctggatagactgagcgaagaatctgtgaacaacgacatctcctcctggacaaagggcagaagcggagaagctctgagcctcctgaagaaaagattctcccatagacccgtgcaggagaagttcgtgtgcctgaactgcggcttcgagacacacgcagccgagcaagccgccctgaacatcgccagatcctggctgttcctgcggagccaggagtacaagaaataccagacaaacaagacaaccggcaacaccgataagagagccttcgtcgagacctggcagtccttttaccggaagaagcttaaggaggtgtggaaacctgccgtgcggtctggcggatctggcggaggctccaccagccccaagaaaaagagaaaagtctaagctgccttctgcggggcttgccttctggccatgcccttcttctctcccttgcacctgtacctcttggtctttgaataaagcctgagtaggaaggctagcaaaaaaaaaaaaaaaaaaaaaaaaaaaaaaaaaaaaaaaaaaaaaaaaaaaaaaaaaaaaaaaaaaaaaaaaaaaaaaaa

SEQ ID NO: 9907 - RNA, 8787 nt, synthetic construct
  source 1..8787: mol_type = other RNA
aggaaataagagagaaaagaagagtaagaagaaatataagagccaccatggcccctaagaagaagcgtaaagtgagccggatgaaccacgaccaggagttcgacccccctaaggtgtaccctcccgtccccgccgagaagagaaagcccatccgggtcctgagcctgttcgatggcatcgccaccggtctgctggtgctgaaggacctgggcatccaggtggataggtacattgcctccgaggtgtgcgaggactccatcaccgtgggaatggtgcgtcatcagggcaagatcatgtacgtgggcgacgtgcggagcgtgacacagaagcatatccaggagtggggccctttcgacctggtgatcggcggcagcccttgcaatgacctgagcatcgtgaacccagcccggaagggcctgtacgagggaaccggcagactgttcttcgagttttacagactgctgcacgacgcccggcctaaggaaggcgacgaccggcccttcttttggctgttcgagaatgtggtggccatgggagtcagcgacaagcgggatattagccggttcctggagagcaaccccgtgatgatcgatgccaaggaagtgagcgccgcccaccgggccagatacttctggggcaatctgcctggcatgaacagacccctggccagcaccgtgaacgacaagctggagctgcaggagtgcctggagcacggccggatcgccaagttcagcaaggtgagaaccatcaccacccgaagcaacagcatcaaacaaggcaaggaccagcactttcctgtgttcatgaacgagaaggaggacatcctgtggtgtaccgagatggagagagtgttcgggttcccagtccactacacagatgtcagcaacatgtctagactggccagacagagactgctgggaagaagctggtccgtccctgtgatcagacacctgttcgcccctctgaaggagtacttcgcctgcgtgagcagcggcaacagcaacgccaacagccggggccccagcttctctagcggcctggtgccactgtccctgagagggagccacatgggccccatggagatctacaaaaccgtgagcgcctggaagcggcagcctgtgcgcgtgctgagcctgtttcggaatatcgataaagtcctgaaaagcctgggattcctggagagcggctctggctccggcggtggcaccctgaagtacgtggaggatgtgacaaacgtggtcagacgggatgtggagaagtggggccccttcgatctggtgtacggcagcacccaacccctgggcagctcttgtgaccggtgccctggctggtacatgtttcagttccaccggatcctgcagtacgccctgccgagacaggagtcccagcggccattcttttggattttcatggacaacttgctgctgaccgaggatgaccaggaaactaccactcggttcctgcagaccgaagccgtgaccctgcaggacgtgagaggccgggactaccagaacgccatgcgggtgtggtccaacatccctggactgaaaagcaagcacgcacctctgacccctaaagaagaggagtacctgcaggcccaggtgcggagcagaagcaagctggacgcccctaaggtggatctgctggtgaagaattgcctcctgcccctgagagagtacttcaagtatttcagccagaatagtctgcccctgggaggcagcggcggcggcaagcccggcaccgtgagcttcgccgacgtggccgtgtacttcagcagggaggagtggggctgcctgaggcccgcccagagggccctgtacagggacgtgatgagggagacctacggccacctgggcgccctgggcgtgggcggcagcaagcccgccctgatcagctgggtggaggaggccgccgagctgtgggaccccgccgccagggaccccgaggtgaccaagtgccccaccgagaccgacggcggcccaagcagcggcgcccctcctcccagcggcggcaggcggcccaagcagcggcgcccctcctcccagcggcggcagcccagccggctccccaacctctaccgaggagggcacctctgagtccgccacccccgagagcggccctggcacctccaccgagcccagcgagggcagcgcacccggcagccctgccggcagccccacctccacagaggagggaaccagcaccgagcccagcgaaggcagcgccccaggcaccagcaccgagcctagtgagcaggagattaaacggatcaacaagatcagaagaagacttgtgaaagacagcaacaccaagaaggccggcaagacaggccccatgaaaaccctgctggttagagtgatgacacccgatctgagagagcggctggaaaacctgagaaagaagcctgaaaatatcccccagcccatcagcaatacatctagagccaacctgaataagctgctgaccgattacaccgaaatgaagaaggcgatcctgcatgtgtactgggaagagttccagaaggaccctgtgggcctgatgagccgggtggcccagcctgccagcaagaagatcgatcagaacaagctgaaacctgagatggacgagaagggcaacctgaccaccgccggctttgcctgctctcagtgtggccagcccctgttcgtgtacaagctggagcaggtgtctgagaagggcaaggcttacaccaactacttcggacggtgcaatgtggccgagcacgaaaagctgatcctgctggcccagctgaagcccgagaaggatagcgacgaagccgtgacatatagcctgggaaagtttgggcagagggccctggatttctacagcattcatgtgaccaaggagtccacccaccccgtgaagcccctggcccagatcgccggaaacagatacgcctccggacctgtgggaaaggccctgagcgacgcatgtatgggcacaatcgcctccttcctgtctaagtaccaggacatcatcatcgaacaccagaaggtggtgaagggcaaccagaagagactggagagcctgcgggagctggccggcaaggaaaacctggaataccctagcgtgaccctgccacctcagcctcacaccaaggagggcgttgatgcctacaacgaagtgatcgcccgggtgcgaatgtgggtgaacctgaacctgtggcagaagctgaagctaagcagagatgatgccaagcctctgctgagactgaagggattcccttcctttcctctggtcgagagacaggccaacgaagtggactggtgggacatggtgtgtaacgtgaagaagctgatcaacgagaaaaaggaggatggcaaggtgttttggcagaatctggctggctacaagagacaggaagccctgagaccatacctgagcagcgaggaagatcggaagaagggaaagaaattcgctcggtaccagctgggcgacctgctgctgcacctggaaaagaagcacggcgaggactggggaaaggtgtacgacgaggcctgggagcggattgacaagaaagtggaaggcctgagcaagcacatcaagctggaagaggaacggagaagcgaggacgcccagagcaaggccgccctgaccgactggctgcgggctaaggccagcttcgtgatcgagggcctgaaggaggccgacaaggacgagttctgcagatgcgagctgaagctgcagaagtggtacggggacctgcggggaaagcccttcgccatcgaagccgagaacagcatcctggacatcagcggcttcagcaagcagtacaactgtgccttcatctggcagaaggacggcgtgaagaagctgaacctgtacctgatcatcaactacttcaagggcggcaagctgcggttcaagaagatcaaacctgaagccttcgaagccaacagattctacaccgtgatcaacaaaaagagcggcgagatcgtgcccatggaggtgaacttcaacttcgacgaccccaacctgatcatcctgcctctggcctttggcaagagacagggcagagaattcatctggaacgacctgctgtccctggaaaccggcagcctgaagctggccaacggaagagtgatcgagaagacactgtacaacagaagaacccggcaggatgagcctgccctgttcgtggccctgaccttcgagcggcgggaggtcctggactcctccaatatcaaaccaatgaacctgatcggcgtggcaagaggcgaaaacatccccgccgtgatcgccctgaccgaccccgagggctgcccactgagccggtttaaggatagcctgggaaacccaacccacatcctgagaatcggcgagagctataaggagaagcagcggaccatccaggccaagaaggaggtggagcagcggagagccggcggctacagccggaagtacgccagcaaagccaagaatctggcagacgatatggtgagaaacaccgctagagatctgctgtactacgccgtgacccaggatgccatgctgatcttcgccaacctgagccggggcttcggccggcagggcaagcggaccttcatggccgagagacagtacacacggatggaggactggctgaccgccaagctggcctacgagggcctgagcaagacctacctgtccaagacactggcccagtacacctccaagacatgcagcaactgtgggtttaccatcaccagcgccgactacgacagggtgctggagaagctgaagaagacagcaacaggctggatgaccacaattaacggcaaggagctgaaggtggagggccagattacctactacaacagatacaagagacagaacgtagtcaaggacctgtccgtcgagctggatagactgagcgaagaatctgtgaacaacgacatctcctcctggacaaagggcagaagcggagaagctctgagcctcctgaagaaaagattctcccatagacccgtgcaggagaagttcgtgtgcctgaactgcggcttcgagacacacgcagccgagcaagccgccctgaacatcgccagatcctggctgttcctgcggagccaggagtacaagaaataccagacaaacaagacaaccggcaacaccgataagagagccttcgtcgagacctggcagtccttttaccggaagaagcttaaggaggtgtggaaacctgccgtgcggtctggcggatctggcggaggctccaccagccccaagaaaaagagaaaagtctaagctgccttctgcggggcttgccttctggccatgcccttcttctctcccttgcacctgtacctcttggtctttgaataaagcctgagtaggaaggctagcaaaaaaaaaaaaaaaaaaaaaaaaaaaaaaaaaaaaaaaaaaaaaaaaaaaaaaaaaaaaaaaaaaaaaaaaaaaaaaaagcccagccggctccccaacctctaccgaggagggcacctctgagtccgccacccccgagagcggccctggcacctccaccgagcccagcgagggcagcgcacccggcagccctgccggcagccccacctccacagaggagggaaccagcaccgagcccagcgaaggcagcgccccaggcaccagcaccgagcctagtgagcaggagattaaacggatcaacaagatcagaagaagacttgtgaaagacagcaacaccaagaaggccggcaagacaggccccatgaaaaccctgctggttagagtgatgacacccgatctgagagagcggctggaaaacctgagaaagaagcctgaaaatatcccccagcccatcagcaatacatctagagccaacctgaataagctgctgaccgattacaccgaaatgaagaaggcgatcctgcatgtgtactgggaagagttccagaaggaccctgtgggcctgatgagccgggtggcccagcctgccagcaagaagatcgatcagaacaagctgaaacctgagatggacgagaagggcaacctgaccaccgccggctttgcctgctctcagtgtggccagcccctgttcgtgtacaagctggagcaggtgtctgagaagggcaaggcttacaccaactacttcggacggtgcaatgtggccgagcacgaaaagctgatcctgctggcccagctgaagcccgagaaggatagcgacgaagccgtgacatatagcctgggaaagtttgggcagagggccctggatttctacagcattcatgtgaccaaggagtccacccaccccgtgaagcccctggcccagatcgccggaaacagatacgcctccggacctgtgggaaaggccctgagcgacgcatgtatgggcacaatcgcctccttcctgtctaagtaccaggacatcatcatcgaacaccagaaggtggtgaagggcaaccagaagagactggagagcctgcgggagctggccggcaaggaaaacctggaataccctagcgtgaccctgccacctcagcctcacaccaaggagggcgttgatgcctacaacgaagtgatcgcccgggtgcgaatgtgggtgaacctgaacctgtggcagaagctgaagctaagcagagatgatgccaagcctctgctgagactgaagggattcccttcctttcctctggtcgagagacaggccaacgaagtggactggtgggacatggtgtgtaacgtgaagaagctgatcaacgagaaaaaggaggatggcaaggtgttttggcagaatctggctggctacaagagacaggaagccctgagaccatacctgagcagcgaggaagatcggaagaagggaaagaaattcgctcggtaccagctgggcgacctgctgctgcacctggaaaagaagcacggcgaggactggggaaaggtgtacgacgaggcctgggagcggattgacaagaaagtggaaggcctgagcaagcacatcaagctggaagaggaacggagaagcgaggacgcccagagcaaggccgccctgaccgactggctgcgggctaaggccagcttcgtgatcgagggcctgaaggaggccgacaaggacgagttctgcagatgcgagctgaagctgcagaagtggtacggggacctgcggggaaagcccttcgccatcgaagccgagaacagcatcctggacatcagcggcttcagcaagcagtacaactgtgccttcatctggcagaaggacggcgtgaagaagctgaacctgtacctgatcatcaactacttcaagggcggcaagctgcggttcaagaagatcaaacctgaagccttcgaagccaacagattctacaccgtgatcaacaaaaagagcggcgagatcgtgcccatggaggtgaacttcaacttcgacgaccccaacctgatcatcctgcctctggcctttggcaagagacagggcagagaattcatctggaacgacctgctgtccctggaaaccggcagcctgaagctggccaacggaagagtgatcgagaagacactgtacaacagaagaacccggcaggatgagcctgccctgttcgtggccctgaccttcgagcggcgggaggtcctggactcctccaatatcaaaccaatgaacctgatcggcgtggcaagaggcgaaaacatccccgccgtgatcgccctgaccgaccccgagggctgcccactgagccggtttaaggatagcctgggaaacccaacccacatcctgagaatcggcgagagctataaggagaagcagcggaccatccaggccaagaaggaggtggagcagcggagagccggcggctacagccggaagtacgccagcaaagccaagaatctggcagacgatatggtgagaaacaccgctagagatctgctgtactacgccgtgacccaggatgccatgctgatcttcgccaacctgagccggggcttcggccggcagggcaagcggaccttcatggccgagagacagtacacacggatggaggactggctgaccgccaagctggcctacgagggcctgagcaagacctacctgtccaagacactggcccagtacacctccaagacatgcagcaactgtgggtttaccatcaccagcgccgactacgacagggtgctggagaagctgaagaagacagcaacaggctggatgaccacaattaacggcaaggagctgaaggtggagggccagattacctactacaacagatacaagagacagaacgtagtcaaggacctgtccgtcgagctggatagactgagcgaagaatctgtgaacaacgacatctcctcctggacaaagggcagaagcggagaagctctgagcctcctgaagaaaagattctcccatagacccgtgcaggagaagttcgtgtgcctgaactgcggcttcgagacacacgcagccgagcaagccgccctgaacatcgccagatcctggctgttcctgcggagccaggagtacaagaaataccagacaaacaagacaaccggcaacaccgataagagagccttcgtcgagacctggcagtccttttaccggaagaagcttaaggaggtgtggaaacctgccgtgcggtctggcggatctggcggaggctccaccagccccaagaaaaagagaaaagtctaagctgccttctgcggggcttgccttctggccatgcccttcttctctcccttgcacctgtacctcttggtctttgaataaagcctgagtaggaaggctagcaaaaaaaaaaaaaaaaaaaaaaaaaaaaaaaaaaaaaaaaaaaaaaaaaaaaaaaaaaaaaaaaaaaaaaaaaaaaaaaa

SEQ ID NO: 9908 - RNA, 8787 nt, synthetic construct
  source 1..8787: mol_type = other RNA
aggaaataagagagaaaagaagagtaagaagaaatataagagccaccatggcccctaagaagaagcgtaaagtgagccggatgaaccacgaccaggagttcgacccccctaaggtgtaccctcccgtccccgccgagaagagaaagcccatccgggtcctgagcctgttcgatggcatcgccaccggtctgctggtgctgaaggacctgggcatccaggtggataggtacattgcctccgaggtgtgcgaggactccatcaccgtgggaatggtgcgtcatcagggcaagatcatgtacgtgggcgacgtgcggagcgtgacacagaagcatatccaggagtggggccctttcgacctggtgatcggcggcagcccttgcaatgacctgagcatcgtgaacccagcccggaagggcctgtacgagggaaccggcagactgttcttcgagttttacagactgctgcacgacgcccggcctaaggaaggcgacgaccggcccttcttttggctgttcgagaatgtggtggccatgggagtcagcgacaagcgggatattagccggttcctggagagcaaccccgtgatgatcgatgccaaggaagtgagcgccgcccaccgggccagatacttctggggcaatctgcctggcatgaacagacccctggccagcaccgtgaacgacaagctggagctgcaggagtgcctggagcacggccggatcgccaagttcagcaaggtgagaaccatcaccacccgaagcaacagcatcaaacaaggcaaggaccagcactttcctgtgttcatgaacgagaaggaggacatcctgtggtgtaccgagatggagagagtgttcgggttcccagtccactacacagatgtcagcaacatgtctagactggccagacagagactgctgggaagaagctggtccgtccctgtgatcagacacctgttcgcccctctgaaggagtacttcgcctgcgtgagcagcggcaacagcaacgccaacagccggggccccagcttctctagcggcctggtgccactgtccctgagagggagccacatgggccccatggagatctacaaaaccgtgagcgcctggaagcggcagcctgtgcgcgtgctgagcctgtttcggaatatcgataaagtcctgaaaagcctgggattcctggagagcggctctggctccggcggtggcaccctgaagtacgtggaggatgtgacaaacgtggtcagacgggatgtggagaagtggggccccttcgatctggtgtacggcagcacccaacccctgggcagctcttgtgaccggtgccctggctggtacatgtttcagttccaccggatcctgcagtacgccctgccgagacaggagtcccagcggccattcttttggattttcatggacaacttgctgctgaccgaggatgaccaggaaactaccactcggttcctgcagaccgaagccgtgaccctgcaggacgtgagaggccgggactaccagaacgccatgcgggtgtggtccaacatccctggactgaaaagcaagcacgcacctctgacccctaaagaagaggagtacctgcaggcccaggtgcggagcagaagcaagctggacgcccctaaggtggatctgctggtgaagaattgcctcctgcccctgagagagtacttcaagtatttcagccagaatagtctgcccctgggaggcagcggcggcggcttccaggagctggtggtgttcagggacgtggccgtggagttctgcaaggacgagtgggagtgcctgggccccgaccagaggagcctgtacagggacgtgatgctggagacctacagcaacttcgtgagcctgggcctggccgtgagcaagcccagcgtgatcagcctgctggagcagggcaaggagccctggatggtggagcaggccggctggtaccccgacctgctgagcgtgaacgagaccggcggcccaagcagcggcgcccctcctcccagcggcggcaggcggcccaagcagcggcgcccctcctcccagcggcggcagcccagccggctccccaacctctaccgaggagggcacctctgagtccgccacccccgagagcggccctggcacctccaccgagcccagcgagggcagcgcacccggcagccctgccggcagccccacctccacagaggagggaaccagcaccgagcccagcgaaggcagcgccccaggcaccagcaccgagcctagtgagcaggagattaaacggatcaacaagatcagaagaagacttgtgaaagacagcaacaccaagaaggccggcaagacaggccccatgaaaaccctgctggttagagtgatgacacccgatctgagagagcggctggaaaacctgagaaagaagcctgaaaatatcccccagcccatcagcaatacatctagagccaacctgaataagctgctgaccgattacaccgaaatgaagaaggcgatcctgcatgtgtactgggaagagttccagaaggaccctgtgggcctgatgagccgggtggcccagcctgccagcaagaagatcgatcagaacaagctgaaacctgagatggacgagaagggcaacctgaccaccgccggctttgcctgctctcagtgtggccagcccctgttcgtgtacaagctggagcaggtgtctgagaagggcaaggcttacaccaactacttcggacggtgcaatgtggccgagcacgaaaagctgatcctgctggcccagctgaagcccgagaaggatagcgacgaagccgtgacatatagcctgggaaagtttgggcagagggccctggatttctacagcattcatgtgaccaaggagtccacccaccccgtgaagcccctggcccagatcgccggaaacagatacgcctccggacctgtgggaaaggccctgagcgacgcatgtatgggcacaatcgcctccttcctgtctaagtaccaggacatcatcatcgaacaccagaaggtggtgaagggcaaccagaagagactggagagcctgcgggagctggccggcaaggaaaacctggaataccctagcgtgaccctgccacctcagcctcacaccaaggagggcgttgatgcctacaacgaagtgatcgcccgggtgcgaatgtgggtgaacctgaacctgtggcagaagctgaagctaagcagagatgatgccaagcctctgctgagactgaagggattcccttcctttcctctggtcgagagacaggccaacgaagtggactggtgggacatggtgtgtaacgtgaagaagctgatcaacgagaaaaaggaggatggcaaggtgttttggcagaatctggctggctacaagagacaggaagccctgagaccatacctgagcagcgaggaagatcggaagaagggaaagaaattcgctcggtaccagctgggcgacctgctgctgcacctggaaaagaagcacggcgaggactggggaaaggtgtacgacgaggcctgggagcggattgacaagaaagtggaaggcctgagcaagcacatcaagctggaagaggaacggagaagcgaggacgcccagagcaaggccgccctgaccgactggctgcgggctaaggccagcttcgtgatcgagggcctgaaggaggccgacaaggacgagttctgcagatgcgagctgaagctgcagaagtggtacggggacctgcggggaaagcccttcgccatcgaagccgagaacagcatcctggacatcagcggcttcagcaagcagtacaactgtgccttcatctggcagaaggacggcgtgaagaagctgaacctgtacctgatcatcaactacttcaagggcggcaagctgcggttcaagaagatcaaacctgaagccttcgaagccaacagattctacaccgtgatcaacaaaaagagcggcgagatcgtgcccatggaggtgaacttcaacttcgacgaccccaacctgatcatcctgcctctggcctttggcaagagacagggcagagaattcatctggaacgacctgctgtccctggaaaccggcagcctgaagctggccaacggaagagtgatcgagaagacactgtacaacagaagaacccggcaggatgagcctgccctgttcgtggccctgaccttcgagcggcgggaggtcctggactcctccaatatcaaaccaatgaacctgatcggcgtggcaagaggcgaaaacatccccgccgtgatcgccctgaccgaccccgagggctgcccactgagccggtttaaggatagcctgggaaacccaacccacatcctgagaatcggcgagagctataaggagaagcagcggaccatccaggccaagaaggaggtggagcagcggagagccggcggctacagccggaagtacgccagcaaagccaagaatctggcagacgatatggtgagaaacaccgctagagatctgctgtactacgccgtgacccaggatgccatgctgatcttcgccaacctgagccggggcttcggccggcagggcaagcggaccttcatggccgagagacagtacacacggatggaggactggctgaccgccaagctggcctacgagggcctgagcaagacctacctgtccaagacactggcccagtacacctccaagacatgcagcaactgtgggtttaccatcaccagcgccgactacgacagggtgctggagaagctgaagaagacagcaacaggctggatgaccacaattaacggcaaggagctgaaggtggagggccagattacctactacaacagatacaagagacagaacgtagtcaaggacctgtccgtcgagctggatagactgagcgaagaatctgtgaacaacgacatctcctcctggacaaagggcagaagcggagaagctctgagcctcctgaagaaaagattctcccatagacccgtgcaggagaagttcgtgtgcctgaactgcggcttcgagacacacgcagccgagcaagccgccctgaacatcgccagatcctggctgttcctgcggagccaggagtacaagaaataccagacaaacaagacaaccggcaacaccgataagagagccttcgtcgagacctggcagtccttttaccggaagaagcttaaggaggtgtggaaacctgccgtgcggtctggcggatctggcggaggctccaccagccccaagaaaaagagaaaagtctaagctgccttctgcggggcttgccttctggccatgcccttcttctctcccttgcacctgtacctcttggtctttgaataaagcctgagtaggaaggctagcaaaaaaaaaaaaaaaaaaaaaaaaaaaaaaaaaaaaaaaaaaaaaaaaaaaaaaaaaaaaaaaaaaaaaaaaaaaaaaaagcccagccggctccccaacctctaccgaggagggcacctctgagtccgccacccccgagagcggccctggcacctccaccgagcccagcgagggcagcgcacccggcagccctgccggcagccccacctccacagaggagggaaccagcaccgagcccagcgaaggcagcgccccaggcaccagcaccgagcctagtgagcaggagattaaacggatcaacaagatcagaagaagacttgtgaaagacagcaacaccaagaaggccggcaagacaggccccatgaaaaccctgctggttagagtgatgacacccgatctgagagagcggctggaaaacctgagaaagaagcctgaaaatatcccccagcccatcagcaatacatctagagccaacctgaataagctgctgaccgattacaccgaaatgaagaaggcgatcctgcatgtgtactgggaagagttccagaaggaccctgtgggcctgatgagccgggtggcccagcctgccagcaagaagatcgatcagaacaagctgaaacctgagatggacgagaagggcaacctgaccaccgccggctttgcctgctctcagtgtggccagcccctgttcgtgtacaagctggagcaggtgtctgagaagggcaaggcttacaccaactacttcggacggtgcaatgtggccgagcacgaaaagctgatcctgctggcccagctgaagcccgagaaggatagcgacgaagccgtgacatatagcctgggaaagtttgggcagagggccctggatttctacagcattcatgtgaccaaggagtccacccaccccgtgaagcccctggcccagatcgccggaaacagatacgcctccggacctgtgggaaaggccctgagcgacgcatgtatgggcacaatcgcctccttcctgtctaagtaccaggacatcatcatcgaacaccagaaggtggtgaagggcaaccagaagagactggagagcctgcgggagctggccggcaaggaaaacctggaataccctagcgtgaccctgccacctcagcctcacaccaaggagggcgttgatgcctacaacgaagtgatcgcccgggtgcgaatgtgggtgaacctgaacctgtggcagaagctgaagctaagcagagatgatgccaagcctctgctgagactgaagggattcccttcctttcctctggtcgagagacaggccaacgaagtggactggtgggacatggtgtgtaacgtgaagaagctgatcaacgagaaaaaggaggatggcaaggtgttttggcagaatctggctggctacaagagacaggaagccctgagaccatacctgagcagcgaggaagatcggaagaagggaaagaaattcgctcggtaccagctgggcgacctgctgctgcacctggaaaagaagcacggcgaggactggggaaaggtgtacgacgaggcctgggagcggattgacaagaaagtggaaggcctgagcaagcacatcaagctggaagaggaacggagaagcgaggacgcccagagcaaggccgccctgaccgactggctgcgggctaaggccagcttcgtgatcgagggcctgaaggaggccgacaaggacgagttctgcagatgcgagctgaagctgcagaagtggtacggggacctgcggggaaagcccttcgccatcgaagccgagaacagcatcctggacatcagcggcttcagcaagcagtacaactgtgccttcatctggcagaaggacggcgtgaagaagctgaacctgtacctgatcatcaactacttcaagggcggcaagctgcggttcaagaagatcaaacctgaagccttcgaagccaacagattctacaccgtgatcaacaaaaagagcggcgagatcgtgcccatggaggtgaacttcaacttcgacgaccccaacctgatcatcctgcctctggcctttggcaagagacagggcagagaattcatctggaacgacctgctgtccctggaaaccggcagcctgaagctggccaacggaagagtgatcgagaagacactgtacaacagaagaacccggcaggatgagcctgccctgttcgtggccctgaccttcgagcggcgggaggtcctggactcctccaatatcaaaccaatgaacctgatcggcgtggcaagaggcgaaaacatccccgccgtgatcgccctgaccgaccccgagggctgcccactgagccggtttaaggatagcctgggaaacccaacccacatcctgagaatcggcgagagctataaggagaagcagcggaccatccaggccaagaaggaggtggagcagcggagagccggcggctacagccggaagtacgccagcaaagccaagaatctggcagacgatatggtgagaaacaccgctagagatctgctgtactacgccgtgacccaggatgccatgctgatcttcgccaacctgagccggggcttcggccggcagggcaagcggaccttcatggccgagagacagtacacacggatggaggactggctgaccgccaagctggcctacgagggcctgagcaagacctacctgtccaagacactggcccagtacacctccaagacatgcagcaactgtgggtttaccatcaccagcgccgactacgacagggtgctggagaagctgaagaagacagcaacaggctggatgaccacaattaacggcaaggagctgaaggtggagggccagattacctactacaacagatacaagagacagaacgtagtcaaggacctgtccgtcgagctggatagactgagcgaagaatctgtgaacaacgacatctcctcctggacaaagggcagaagcggagaagctctgagcctcctgaagaaaagattctcccatagacccgtgcaggagaagttcgtgtgcctgaactgcggcttcgagacacacgcagccgagcaagccgccctgaacatcgccagatcctggctgttcctgcggagccaggagtacaagaaataccagacaaacaagacaaccggcaacaccgataagagagccttcgtcgagacctggcagtccttttaccggaagaagcttaaggaggtgtggaaacctgccgtgcggtctggcggatctggcggaggctccaccagccccaagaaaaagagaaaagtctaagctgccttctgcggggcttgccttctggccatgcccttcttctctcccttgcacctgtacctcttggtctttgaataaagcctgagtaggaaggctagcaaaaaaaaaaaaaaaaaaaaaaaaaaaaaaaaaaaaaaaaaaaaaaaaaaaaaaaaaaaaaaaaaaaaaaaaaaaaaaaa

SEQ ID NO: 9909 - RNA, 8787 nt, synthetic construct
  source 1..8787: mol_type = other RNA
aggaaataagagagaaaagaagagtaagaagaaatataagagccaccatggcccctaagaagaagcgtaaagtgagccggatgaaccacgaccaggagttcgacccccctaaggtgtaccctcccgtccccgccgagaagagaaagcccatccgggtcctgagcctgttcgatggcatcgccaccggtctgctggtgctgaaggacctgggcatccaggtggataggtacattgcctccgaggtgtgcgaggactccatcaccgtgggaatggtgcgtcatcagggcaagatcatgtacgtgggcgacgtgcggagcgtgacacagaagcatatccaggagtggggccctttcgacctggtgatcggcggcagcccttgcaatgacctgagcatcgtgaacccagcccggaagggcctgtacgagggaaccggcagactgttcttcgagttttacagactgctgcacgacgcccggcctaaggaaggcgacgaccggcccttcttttggctgttcgagaatgtggtggccatgggagtcagcgacaagcgggatattagccggttcctggagagcaaccccgtgatgatcgatgccaaggaagtgagcgccgcccaccgggccagatacttctggggcaatctgcctggcatgaacagacccctggccagcaccgtgaacgacaagctggagctgcaggagtgcctggagcacggccggatcgccaagttcagcaaggtgagaaccatcaccacccgaagcaacagcatcaaacaaggcaaggaccagcactttcctgtgttcatgaacgagaaggaggacatcctgtggtgtaccgagatggagagagtgttcgggttcccagtccactacacagatgtcagcaacatgtctagactggccagacagagactgctgggaagaagctggtccgtccctgtgatcagacacctgttcgcccctctgaaggagtacttcgcctgcgtgagcagcggcaacagcaacgccaacagccggggccccagcttctctagcggcctggtgccactgtccctgagagggagccacatgggccccatggagatctacaaaaccgtgagcgcctggaagcggcagcctgtgcgcgtgctgagcctgtttcggaatatcgataaagtcctgaaaagcctgggattcctggagagcggctctggctccggcggtggcaccctgaagtacgtggaggatgtgacaaacgtggtcagacgggatgtggagaagtggggccccttcgatctggtgtacggcagcacccaacccctgggcagctcttgtgaccggtgccctggctggtacatgtttcagttccaccggatcctgcagtacgccctgccgagacaggagtcccagcggccattcttttggattttcatggacaacttgctgctgaccgaggatgaccaggaaactaccactcggttcctgcagaccgaagccgtgaccctgcaggacgtgagaggccgggactaccagaacgccatgcgggtgtggtccaacatccctggactgaaaagcaagcacgcacctctgacccctaaagaagaggagtacctgcaggcccaggtgcggagcagaagcaagctggacgcccctaaggtggatctgctggtgaagaattgcctcctgcccctgagagagtacttcaagtatttcagccagaatagtctgcccctgggaggcagcggcggcggcttccaggagcccgtgaccttcgaggacgtggtggtgtacttcacccagaacgagtggaccagcctgcagcccagccagagggccctgtacagggaggtgatgctggagaactacgccaccgtgaccagcctgagcgccttccccttcagcaagcccgacctgatcttcaggctggagcagggcgaggccgcctggggcagcgacccctggaccctggccggcgaggaggcccccaggggcctgggcggcccaagcagcggcgcccctcctcccagcggcggcaggcggcccaagcagcggcgcccctcctcccagcggcggcagcccagccggctccccaacctctaccgaggagggcacctctgagtccgccacccccgagagcggccctggcacctccaccgagcccagcgagggcagcgcacccggcagccctgccggcagccccacctccacagaggagggaaccagcaccgagcccagcgaaggcagcgccccaggcaccagcaccgagcctagtgagcaggagattaaacggatcaacaagatcagaagaagacttgtgaaagacagcaacaccaagaaggccggcaagacaggccccatgaaaaccctgctggttagagtgatgacacccgatctgagagagcggctggaaaacctgagaaagaagcctgaaaatatcccccagcccatcagcaatacatctagagccaacctgaataagctgctgaccgattacaccgaaatgaagaaggcgatcctgcatgtgtactgggaagagttccagaaggaccctgtgggcctgatgagccgggtggcccagcctgccagcaagaagatcgatcagaacaagctgaaacctgagatggacgagaagggcaacctgaccaccgccggctttgcctgctctcagtgtggccagcccctgttcgtgtacaagctggagcaggtgtctgagaagggcaaggcttacaccaactacttcggacggtgcaatgtggccgagcacgaaaagctgatcctgctggcccagctgaagcccgagaaggatagcgacgaagccgtgacatatagcctgggaaagtttgggcagagggccctggatttctacagcattcatgtgaccaaggagtccacccaccccgtgaagcccctggcccagatcgccggaaacagatacgcctccggacctgtgggaaaggccctgagcgacgcatgtatgggcacaatcgcctccttcctgtctaagtaccaggacatcatcatcgaacaccagaaggtggtgaagggcaaccagaagagactggagagcctgcgggagctggccggcaaggaaaacctggaataccctagcgtgaccctgccacctcagcctcacaccaaggagggcgttgatgcctacaacgaagtgatcgcccgggtgcgaatgtgggtgaacctgaacctgtggcagaagctgaagctaagcagagatgatgccaagcctctgctgagactgaagggattcccttcctttcctctggtcgagagacaggccaacgaagtggactggtgggacatggtgtgtaacgtgaagaagctgatcaacgagaaaaaggaggatggcaaggtgttttggcagaatctggctggctacaagagacaggaagccctgagaccatacctgagcagcgaggaagatcggaagaagggaaagaaattcgctcggtaccagctgggcgacctgctgctgcacctggaaaagaagcacggcgaggactggggaaaggtgtacgacgaggcctgggagcggattgacaagaaagtggaaggcctgagcaagcacatcaagctggaagaggaacggagaagcgaggacgcccagagcaaggccgccctgaccgactggctgcgggctaaggccagcttcgtgatcgagggcctgaaggaggccgacaaggacgagttctgcagatgcgagctgaagctgcagaagtggtacggggacctgcggggaaagcccttcgccatcgaagccgagaacagcatcctggacatcagcggcttcagcaagcagtacaactgtgccttcatctggcagaaggacggcgtgaagaagctgaacctgtacctgatcatcaactacttcaagggcggcaagctgcggttcaagaagatcaaacctgaagccttcgaagccaacagattctacaccgtgatcaacaaaaagagcggcgagatcgtgcccatggaggtgaacttcaacttcgacgaccccaacctgatcatcctgcctctggcctttggcaagagacagggcagagaattcatctggaacgacctgctgtccctggaaaccggcagcctgaagctggccaacggaagagtgatcgagaagacactgtacaacagaagaacccggcaggatgagcctgccctgttcgtggccctgaccttcgagcggcgggaggtcctggactcctccaatatcaaaccaatgaacctgatcggcgtggcaagaggcgaaaacatccccgccgtgatcgccctgaccgaccccgagggctgcccactgagccggtttaaggatagcctgggaaacccaacccacatcctgagaatcggcgagagctataaggagaagcagcggaccatccaggccaagaaggaggtggagcagcggagagccggcggctacagccggaagtacgccagcaaagccaagaatctggcagacgatatggtgagaaacaccgctagagatctgctgtactacgccgtgacccaggatgccatgctgatcttcgccaacctgagccggggcttcggccggcagggcaagcggaccttcatggccgagagacagtacacacggatggaggactggctgaccgccaagctggcctacgagggcctgagcaagacctacctgtccaagacactggcccagtacacctccaagacatgcagcaactgtgggtttaccatcaccagcgccgactacgacagggtgctggagaagctgaagaagacagcaacaggctggatgaccacaattaacggcaaggagctgaaggtggagggccagattacctactacaacagatacaagagacagaacgtagtcaaggacctgtccgtcgagctggatagactgagcgaagaatctgtgaacaacgacatctcctcctggacaaagggcagaagcggagaagctctgagcctcctgaagaaaagattctcccatagacccgtgcaggagaagttcgtgtgcctgaactgcggcttcgagacacacgcagccgagcaagccgccctgaacatcgccagatcctggctgttcctgcggagccaggagtacaagaaataccagacaaacaagacaaccggcaacaccgataagagagccttcgtcgagacctggcagtccttttaccggaagaagcttaaggaggtgtggaaacctgccgtgcggtctggcggatctggcggaggctccaccagccccaagaaaaagagaaaagtctaagctgccttctgcggggcttgccttctggccatgcccttcttctctcccttgcacctgtacctcttggtctttgaataaagcctgagtaggaaggctagcaaaaaaaaaaaaaaaaaaaaaaaaaaaaaaaaaaaaaaaaaaaaaaaaaaaaaaaaaaaaaaaaaaaaaaaaaaaaaaaagcccagccggctccccaacctctaccgaggagggcacctctgagtccgccacccccgagagcggccctggcacctccaccgagcccagcgagggcagcgcacccggcagccctgccggcagccccacctccacagaggagggaaccagcaccgagcccagcgaaggcagcgccccaggcaccagcaccgagcctagtgagcaggagattaaacggatcaacaagatcagaagaagacttgtgaaagacagcaacaccaagaaggccggcaagacaggccccatgaaaaccctgctggttagagtgatgacacccgatctgagagagcggctggaaaacctgagaaagaagcctgaaaatatcccccagcccatcagcaatacatctagagccaacctgaataagctgctgaccgattacaccgaaatgaagaaggcgatcctgcatgtgtactgggaagagttccagaaggaccctgtgggcctgatgagccgggtggcccagcctgccagcaagaagatcgatcagaacaagctgaaacctgagatggacgagaagggcaacctgaccaccgccggctttgcctgctctcagtgtggccagcccctgttcgtgtacaagctggagcaggtgtctgagaagggcaaggcttacaccaactacttcggacggtgcaatgtggccgagcacgaaaagctgatcctgctggcccagctgaagcccgagaaggatagcgacgaagccgtgacatatagcctgggaaagtttgggcagagggccctggatttctacagcattcatgtgaccaaggagtccacccaccccgtgaagcccctggcccagatcgccggaaacagatacgcctccggacctgtgggaaaggccctgagcgacgcatgtatgggcacaatcgcctccttcctgtctaagtaccaggacatcatcatcgaacaccagaaggtggtgaagggcaaccagaagagactggagagcctgcgggagctggccggcaaggaaaacctggaataccctagcgtgaccctgccacctcagcctcacaccaaggagggcgttgatgcctacaacgaagtgatcgcccgggtgcgaatgtgggtgaacctgaacctgtggcagaagctgaagctaagcagagatgatgccaagcctctgctgagactgaagggattcccttcctttcctctggtcgagagacaggccaacgaagtggactggtgggacatggtgtgtaacgtgaagaagctgatcaacgagaaaaaggaggatggcaaggtgttttggcagaatctggctggctacaagagacaggaagccctgagaccatacctgagcagcgaggaagatcggaagaagggaaagaaattcgctcggtaccagctgggcgacctgctgctgcacctggaaaagaagcacggcgaggactggggaaaggtgtacgacgaggcctgggagcggattgacaagaaagtggaaggcctgagcaagcacatcaagctggaagaggaacggagaagcgaggacgcccagagcaaggccgccctgaccgactggctgcgggctaaggccagcttcgtgatcgagggcctgaaggaggccgacaaggacgagttctgcagatgcgagctgaagctgcagaagtggtacggggacctgcggggaaagcccttcgccatcgaagccgagaacagcatcctggacatcagcggcttcagcaagcagtacaactgtgccttcatctggcagaaggacggcgtgaagaagctgaacctgtacctgatcatcaactacttcaagggcggcaagctgcggttcaagaagatcaaacctgaagccttcgaagccaacagattctacaccgtgatcaacaaaaagagcggcgagatcgtgcccatggaggtgaacttcaacttcgacgaccccaacctgatcatcctgcctctggcctttggcaagagacagggcagagaattcatctggaacgacctgctgtccctggaaaccggcagcctgaagctggccaacggaagagtgatcgagaagacactgtacaacagaagaacccggcaggatgagcctgccctgttcgtggccctgaccttcgagcggcgggaggtcctggactcctccaatatcaaaccaatgaacctgatcggcgtggcaagaggcgaaaacatccccgccgtgatcgccctgaccgaccccgagggctgcccactgagccggtttaaggatagcctgggaaacccaacccacatcctgagaatcggcgagagctataaggagaagcagcggaccatccaggccaagaaggaggtggagcagcggagagccggcggctacagccggaagtacgccagcaaagccaagaatctggcagacgatatggtgagaaacaccgctagagatctgctgtactacgccgtgacccaggatgccatgctgatcttcgccaacctgagccggggcttcggccggcagggcaagcggaccttcatggccgagagacagtacacacggatggaggactggctgaccgccaagctggcctacgagggcctgagcaagacctacctgtccaagacactggcccagtacacctccaagacatgcagcaactgtgggtttaccatcaccagcgccgactacgacagggtgctggagaagctgaagaagacagcaacaggctggatgaccacaattaacggcaaggagctgaaggtggagggccagattacctactacaacagatacaagagacagaacgtagtcaaggacctgtccgtcgagctggatagactgagcgaagaatctgtgaacaacgacatctcctcctggacaaagggcagaagcggagaagctctgagcctcctgaagaaaagattctcccatagacccgtgcaggagaagttcgtgtgcctgaactgcggcttcgagacacacgcagccgagcaagccgccctgaacatcgccagatcctggctgttcctgcggagccaggagtacaagaaataccagacaaacaagacaaccggcaacaccgataagagagccttcgtcgagacctggcagtccttttaccggaagaagcttaaggaggtgtggaaacctgccgtgcggtctggcggatctggcggaggctccaccagccccaagaaaaagagaaaagtctaagctgccttctgcggggcttgccttctggccatgcccttcttctctcccttgcacctgtacctcttggtctttgaataaagcctgagtaggaaggctagcaaaaaaaaaaaaaaaaaaaaaaaaaaaaaaaaaaaaaaaaaaaaaaaaaaaaaaaaaaaaaaaaaaaaaaaaaaaaaaaa

SEQ ID NO: 9910 - RNA, 8787 nt, synthetic construct
  source 1..8787: mol_type = other RNA
aggaaataagagagaaaagaagagtaagaagaaatataagagccaccatggcccctaagaagaagcgtaaagtgagccggatgaaccacgaccaggagttcgacccccctaaggtgtaccctcccgtccccgccgagaagagaaagcccatccgggtcctgagcctgttcgatggcatcgccaccggtctgctggtgctgaaggacctgggcatccaggtggataggtacattgcctccgaggtgtgcgaggactccatcaccgtgggaatggtgcgtcatcagggcaagatcatgtacgtgggcgacgtgcggagcgtgacacagaagcatatccaggagtggggccctttcgacctggtgatcggcggcagcccttgcaatgacctgagcatcgtgaacccagcccggaagggcctgtacgagggaaccggcagactgttcttcgagttttacagactgctgcacgacgcccggcctaaggaaggcgacgaccggcccttcttttggctgttcgagaatgtggtggccatgggagtcagcgacaagcgggatattagccggttcctggagagcaaccccgtgatgatcgatgccaaggaagtgagcgccgcccaccgggccagatacttctggggcaatctgcctggcatgaacagacccctggccagcaccgtgaacgacaagctggagctgcaggagtgcctggagcacggccggatcgccaagttcagcaaggtgagaaccatcaccacccgaagcaacagcatcaaacaaggcaaggaccagcactttcctgtgttcatgaacgagaaggaggacatcctgtggtgtaccgagatggagagagtgttcgggttcccagtccactacacagatgtcagcaacatgtctagactggccagacagagactgctgggaagaagctggtccgtccctgtgatcagacacctgttcgcccctctgaaggagtacttcgcctgcgtgagcagcggcaacagcaacgccaacagccggggccccagcttctctagcggcctggtgccactgtccctgagagggagccacatgggccccatggagatctacaaaaccgtgagcgcctggaagcggcagcctgtgcgcgtgctgagcctgtttcggaatatcgataaagtcctgaaaagcctgggattcctggagagcggctctggctccggcggtggcaccctgaagtacgtggaggatgtgacaaacgtggtcagacgggatgtggagaagtggggccccttcgatctggtgtacggcagcacccaacccctgggcagctcttgtgaccggtgccctggctggtacatgtttcagttccaccggatcctgcagtacgccctgccgagacaggagtcccagcggccattcttttggattttcatggacaacttgctgctgaccgaggatgaccaggaaactaccactcggttcctgcagaccgaagccgtgaccctgcaggacgtgagaggccgggactaccagaacgccatgcgggtgtggtccaacatccctggactgaaaagcaagcacgcacctctgacccctaaagaagaggagtacctgcaggcccaggtgcggagcagaagcaagctggacgcccctaaggtggatctgctggtgaagaattgcctcctgcccctgagagagtacttcaagtatttcagccagaatagtctgcccctgggaggcagcggcggcggcatggccgccatccccctgaaggcccagtgccaggagaccgtgaccttcgaggacgtggccgtgcacttcaccaagaccgagtggaccggcctgagccccgcccagagggccctgtacaggagcgtgatgctggagaactacggcaacctgaccgccatgggctacctggtgcccaagcccgccctgatcagcctgctggagggcggcgacatggcctggggcctggaggcccaggacgaccccggcggcccaagcagcggcgcccctcctcccagcggcggcaggcggcccaagcagcggcgcccctcctcccagcggcggcagcccagccggctccccaacctctaccgaggagggcacctctgagtccgccacccccgagagcggccctggcacctccaccgagcccagcgagggcagcgcacccggcagccctgccggcagccccacctccacagaggagggaaccagcaccgagcccagcgaaggcagcgccccaggcaccagcaccgagcctagtgagcaggagattaaacggatcaacaagatcagaagaagacttgtgaaagacagcaacaccaagaaggccggcaagacaggccccatgaaaaccctgctggttagagtgatgacacccgatctgagagagcggctggaaaacctgagaaagaagcctgaaaatatcccccagcccatcagcaatacatctagagccaacctgaataagctgctgaccgattacaccgaaatgaagaaggcgatcctgcatgtgtactgggaagagttccagaaggaccctgtgggcctgatgagccgggtggcccagcctgccagcaagaagatcgatcagaacaagctgaaacctgagatggacgagaagggcaacctgaccaccgccggctttgcctgctctcagtgtggccagcccctgttcgtgtacaagctggagcaggtgtctgagaagggcaaggcttacaccaactacttcggacggtgcaatgtggccgagcacgaaaagctgatcctgctggcccagctgaagcccgagaaggatagcgacgaagccgtgacatatagcctgggaaagtttgggcagagggccctggatttctacagcattcatgtgaccaaggagtccacccaccccgtgaagcccctggcccagatcgccggaaacagatacgcctccggacctgtgggaaaggccctgagcgacgcatgtatgggcacaatcgcctccttcctgtctaagtaccaggacatcatcatcgaacaccagaaggtggtgaagggcaaccagaagagactggagagcctgcgggagctggccggcaaggaaaacctggaataccctagcgtgaccctgccacctcagcctcacaccaaggagggcgttgatgcctacaacgaagtgatcgcccgggtgcgaatgtgggtgaacctgaacctgtggcagaagctgaagctaagcagagatgatgccaagcctctgctgagactgaagggattcccttcctttcctctggtcgagagacaggccaacgaagtggactggtgggacatggtgtgtaacgtgaagaagctgatcaacgagaaaaaggaggatggcaaggtgttttggcagaatctggctggctacaagagacaggaagccctgagaccatacctgagcagcgaggaagatcggaagaagggaaagaaattcgctcggtaccagctgggcgacctgctgctgcacctggaaaagaagcacggcgaggactggggaaaggtgtacgacgaggcctgggagcggattgacaagaaagtggaaggcctgagcaagcacatcaagctggaagaggaacggagaagcgaggacgcccagagcaaggccgccctgaccgactggctgcgggctaaggccagcttcgtgatcgagggcctgaaggaggccgacaaggacgagttctgcagatgcgagctgaagctgcagaagtggtacggggacctgcggggaaagcccttcgccatcgaagccgagaacagcatcctggacatcagcggcttcagcaagcagtacaactgtgccttcatctggcagaaggacggcgtgaagaagctgaacctgtacctgatcatcaactacttcaagggcggcaagctgcggttcaagaagatcaaacctgaagccttcgaagccaacagattctacaccgtgatcaacaaaaagagcggcgagatcgtgcccatggaggtgaacttcaacttcgacgaccccaacctgatcatcctgcctctggcctttggcaagagacagggcagagaattcatctggaacgacctgctgtccctggaaaccggcagcctgaagctggccaacggaagagtgatcgagaagacactgtacaacagaagaacccggcaggatgagcctgccctgttcgtggccctgaccttcgagcggcgggaggtcctggactcctccaatatcaaaccaatgaacctgatcggcgtggcaagaggcgaaaacatccccgccgtgatcgccctgaccgaccccgagggctgcccactgagccggtttaaggatagcctgggaaacccaacccacatcctgagaatcggcgagagctataaggagaagcagcggaccatccaggccaagaaggaggtggagcagcggagagccggcggctacagccggaagtacgccagcaaagccaagaatctggcagacgatatggtgagaaacaccgctagagatctgctgtactacgccgtgacccaggatgccatgctgatcttcgccaacctgagccggggcttcggccggcagggcaagcggaccttcatggccgagagacagtacacacggatggaggactggctgaccgccaagctggcctacgagggcctgagcaagacctacctgtccaagacactggcccagtacacctccaagacatgcagcaactgtgggtttaccatcaccagcgccgactacgacagggtgctggagaagctgaagaagacagcaacaggctggatgaccacaattaacggcaaggagctgaaggtggagggccagattacctactacaacagatacaagagacagaacgtagtcaaggacctgtccgtcgagctggatagactgagcgaagaatctgtgaacaacgacatctcctcctggacaaagggcagaagcggagaagctctgagcctcctgaagaaaagattctcccatagacccgtgcaggagaagttcgtgtgcctgaactgcggcttcgagacacacgcagccgagcaagccgccctgaacatcgccagatcctggctgttcctgcggagccaggagtacaagaaataccagacaaacaagacaaccggcaacaccgataagagagccttcgtcgagacctggcagtccttttaccggaagaagcttaaggaggtgtggaaacctgccgtgcggtctggcggatctggcggaggctccaccagccccaagaaaaagagaaaagtctaagctgccttctgcggggcttgccttctggccatgcccttcttctctcccttgcacctgtacctcttggtctttgaataaagcctgagtaggaaggctagcaaaaaaaaaaaaaaaaaaaaaaaaaaaaaaaaaaaaaaaaaaaaaaaaaaaaaaaaaaaaaaaaaaaaaaaaaaaaaaaagcccagccggctccccaacctctaccgaggagggcacctctgagtccgccacccccgagagcggccctggcacctccaccgagcccagcgagggcagcgcacccggcagccctgccggcagccccacctccacagaggagggaaccagcaccgagcccagcgaaggcagcgccccaggcaccagcaccgagcctagtgagcaggagattaaacggatcaacaagatcagaagaagacttgtgaaagacagcaacaccaagaaggccggcaagacaggccccatgaaaaccctgctggttagagtgatgacacccgatctgagagagcggctggaaaacctgagaaagaagcctgaaaatatcccccagcccatcagcaatacatctagagccaacctgaataagctgctgaccgattacaccgaaatgaagaaggcgatcctgcatgtgtactgggaagagttccagaaggaccctgtgggcctgatgagccgggtggcccagcctgccagcaagaagatcgatcagaacaagctgaaacctgagatggacgagaagggcaacctgaccaccgccggctttgcctgctctcagtgtggccagcccctgttcgtgtacaagctggagcaggtgtctgagaagggcaaggcttacaccaactacttcggacggtgcaatgtggccgagcacgaaaagctgatcctgctggcccagctgaagcccgagaaggatagcgacgaagccgtgacatatagcctgggaaagtttgggcagagggccctggatttctacagcattcatgtgaccaaggagtccacccaccccgtgaagcccctggcccagatcgccggaaacagatacgcctccggacctgtgggaaaggccctgagcgacgcatgtatgggcacaatcgcctccttcctgtctaagtaccaggacatcatcatcgaacaccagaaggtggtgaagggcaaccagaagagactggagagcctgcgggagctggccggcaaggaaaacctggaataccctagcgtgaccctgccacctcagcctcacaccaaggagggcgttgatgcctacaacgaagtgatcgcccgggtgcgaatgtgggtgaacctgaacctgtggcagaagctgaagctaagcagagatgatgccaagcctctgctgagactgaagggattcccttcctttcctctggtcgagagacaggccaacgaagtggactggtgggacatggtgtgtaacgtgaagaagctgatcaacgagaaaaaggaggatggcaaggtgttttggcagaatctggctggctacaagagacaggaagccctgagaccatacctgagcagcgaggaagatcggaagaagggaaagaaattcgctcggtaccagctgggcgacctgctgctgcacctggaaaagaagcacggcgaggactggggaaaggtgtacgacgaggcctgggagcggattgacaagaaagtggaaggcctgagcaagcacatcaagctggaagaggaacggagaagcgaggacgcccagagcaaggccgccctgaccgactggctgcgggctaaggccagcttcgtgatcgagggcctgaaggaggccgacaaggacgagttctgcagatgcgagctgaagctgcagaagtggtacggggacctgcggggaaagcccttcgccatcgaagccgagaacagcatcctggacatcagcggcttcagcaagcagtacaactgtgccttcatctggcagaaggacggcgtgaagaagctgaacctgtacctgatcatcaactacttcaagggcggcaagctgcggttcaagaagatcaaacctgaagccttcgaagccaacagattctacaccgtgatcaacaaaaagagcggcgagatcgtgcccatggaggtgaacttcaacttcgacgaccccaacctgatcatcctgcctctggcctttggcaagagacagggcagagaattcatctggaacgacctgctgtccctggaaaccggcagcctgaagctggccaacggaagagtgatcgagaagacactgtacaacagaagaacccggcaggatgagcctgccctgttcgtggccctgaccttcgagcggcgggaggtcctggactcctccaatatcaaaccaatgaacctgatcggcgtggcaagaggcgaaaacatccccgccgtgatcgccctgaccgaccccgagggctgcccactgagccggtttaaggatagcctgggaaacccaacccacatcctgagaatcggcgagagctataaggagaagcagcggaccatccaggccaagaaggaggtggagcagcggagagccggcggctacagccggaagtacgccagcaaagccaagaatctggcagacgatatggtgagaaacaccgctagagatctgctgtactacgccgtgacccaggatgccatgctgatcttcgccaacctgagccggggcttcggccggcagggcaagcggaccttcatggccgagagacagtacacacggatggaggactggctgaccgccaagctggcctacgagggcctgagcaagacctacctgtccaagacactggcccagtacacctccaagacatgcagcaactgtgggtttaccatcaccagcgccgactacgacagggtgctggagaagctgaagaagacagcaacaggctggatgaccacaattaacggcaaggagctgaaggtggagggccagattacctactacaacagatacaagagacagaacgtagtcaaggacctgtccgtcgagctggatagactgagcgaagaatctgtgaacaacgacatctcctcctggacaaagggcagaagcggagaagctctgagcctcctgaagaaaagattctcccatagacccgtgcaggagaagttcgtgtgcctgaactgcggcttcgagacacacgcagccgagcaagccgccctgaacatcgccagatcctggctgttcctgcggagccaggagtacaagaaataccagacaaacaagacaaccggcaacaccgataagagagccttcgtcgagacctggcagtccttttaccggaagaagcttaaggaggtgtggaaacctgccgtgcggtctggcggatctggcggaggctccaccagccccaagaaaaagagaaaagtctaagctgccttctgcggggcttgccttctggccatgcccttcttctctcccttgcacctgtacctcttggtctttgaataaagcctgagtaggaaggctagcaaaaaaaaaaaaaaaaaaaaaaaaaaaaaaaaaaaaaaaaaaaaaaaaaaaaaaaaaaaaaaaaaaaaaaaaaaaaaaaa

SEQ ID NO: 9911 - RNA, 8787 nt, synthetic construct
  source 1..8787: mol_type = other RNA
aggaaataagagagaaaagaagagtaagaagaaatataagagccaccatggcccctaagaagaagcgtaaagtgagccggatgaaccacgaccaggagttcgacccccctaaggtgtaccctcccgtccccgccgagaagagaaagcccatccgggtcctgagcctgttcgatggcatcgccaccggtctgctggtgctgaaggacctgggcatccaggtggataggtacattgcctccgaggtgtgcgaggactccatcaccgtgggaatggtgcgtcatcagggcaagatcatgtacgtgggcgacgtgcggagcgtgacacagaagcatatccaggagtggggccctttcgacctggtgatcggcggcagcccttgcaatgacctgagcatcgtgaacccagcccggaagggcctgtacgagggaaccggcagactgttcttcgagttttacagactgctgcacgacgcccggcctaaggaaggcgacgaccggcccttcttttggctgttcgagaatgtggtggccatgggagtcagcgacaagcgggatattagccggttcctggagagcaaccccgtgatgatcgatgccaaggaagtgagcgccgcccaccgggccagatacttctggggcaatctgcctggcatgaacagacccctggccagcaccgtgaacgacaagctggagctgcaggagtgcctggagcacggccggatcgccaagttcagcaaggtgagaaccatcaccacccgaagcaacagcatcaaacaaggcaaggaccagcactttcctgtgttcatgaacgagaaggaggacatcctgtggtgtaccgagatggagagagtgttcgggttcccagtccactacacagatgtcagcaacatgtctagactggccagacagagactgctgggaagaagctggtccgtccctgtgatcagacacctgttcgcccctctgaaggagtacttcgcctgcgtgagcagcggcaacagcaacgccaacagccggggccccagcttctctagcggcctggtgccactgtccctgagagggagccacatgggccccatggagatctacaaaaccgtgagcgcctggaagcggcagcctgtgcgcgtgctgagcctgtttcggaatatcgataaagtcctgaaaagcctgggattcctggagagcggctctggctccggcggtggcaccctgaagtacgtggaggatgtgacaaacgtggtcagacgggatgtggagaagtggggccccttcgatctggtgtacggcagcacccaacccctgggcagctcttgtgaccggtgccctggctggtacatgtttcagttccaccggatcctgcagtacgccctgccgagacaggagtcccagcggccattcttttggattttcatggacaacttgctgctgaccgaggatgaccaggaaactaccactcggttcctgcagaccgaagccgtgaccctgcaggacgtgagaggccgggactaccagaacgccatgcgggtgtggtccaacatccctggactgaaaagcaagcacgcacctctgacccctaaagaagaggagtacctgcaggcccaggtgcggagcagaagcaagctggacgcccctaaggtggatctgctggtgaagaattgcctcctgcccctgagagagtacttcaagtatttcagccagaatagtctgcccctgggaggcagcggcggcggcgtgcagggcagcgtgagcttcgaggacgtggccgtgggcttcagccaggaggagtggcagatcctgggccccagccagaaggccctgtactgggacgtgatgctggagaactactgcaacctggtgagcgtgggctaccaggcccccacccccaacagcctgttccagctggagcagggcggccccccctggaccgtggagggcgccgccctgagcagcacctgcagcggctaccaggccaccggcggcccaagcagcggcgcccctcctcccagcggcggcaggcggcccaagcagcggcgcccctcctcccagcggcggcagcccagccggctccccaacctctaccgaggagggcacctctgagtccgccacccccgagagcggccctggcacctccaccgagcccagcgagggcagcgcacccggcagccctgccggcagccccacctccacagaggagggaaccagcaccgagcccagcgaaggcagcgccccaggcaccagcaccgagcctagtgagcaggagattaaacggatcaacaagatcagaagaagacttgtgaaagacagcaacaccaagaaggccggcaagacaggccccatgaaaaccctgctggttagagtgatgacacccgatctgagagagcggctggaaaacctgagaaagaagcctgaaaatatcccccagcccatcagcaatacatctagagccaacctgaataagctgctgaccgattacaccgaaatgaagaaggcgatcctgcatgtgtactgggaagagttccagaaggaccctgtgggcctgatgagccgggtggcccagcctgccagcaagaagatcgatcagaacaagctgaaacctgagatggacgagaagggcaacctgaccaccgccggctttgcctgctctcagtgtggccagcccctgttcgtgtacaagctggagcaggtgtctgagaagggcaaggcttacaccaactacttcggacggtgcaatgtggccgagcacgaaaagctgatcctgctggcccagctgaagcccgagaaggatagcgacgaagccgtgacatatagcctgggaaagtttgggcagagggccctggatttctacagcattcatgtgaccaaggagtccacccaccccgtgaagcccctggcccagatcgccggaaacagatacgcctccggacctgtgggaaaggccctgagcgacgcatgtatgggcacaatcgcctccttcctgtctaagtaccaggacatcatcatcgaacaccagaaggtggtgaagggcaaccagaagagactggagagcctgcgggagctggccggcaaggaaaacctggaataccctagcgtgaccctgccacctcagcctcacaccaaggagggcgttgatgcctacaacgaagtgatcgcccgggtgcgaatgtgggtgaacctgaacctgtggcagaagctgaagctaagcagagatgatgccaagcctctgctgagactgaagggattcccttcctttcctctggtcgagagacaggccaacgaagtggactggtgggacatggtgtgtaacgtgaagaagctgatcaacgagaaaaaggaggatggcaaggtgttttggcagaatctggctggctacaagagacaggaagccctgagaccatacctgagcagcgaggaagatcggaagaagggaaagaaattcgctcggtaccagctgggcgacctgctgctgcacctggaaaagaagcacggcgaggactggggaaaggtgtacgacgaggcctgggagcggattgacaagaaagtggaaggcctgagcaagcacatcaagctggaagaggaacggagaagcgaggacgcccagagcaaggccgccctgaccgactggctgcgggctaaggccagcttcgtgatcgagggcctgaaggaggccgacaaggacgagttctgcagatgcgagctgaagctgcagaagtggtacggggacctgcggggaaagcccttcgccatcgaagccgagaacagcatcctggacatcagcggcttcagcaagcagtacaactgtgccttcatctggcagaaggacggcgtgaagaagctgaacctgtacctgatcatcaactacttcaagggcggcaagctgcggttcaagaagatcaaacctgaagccttcgaagccaacagattctacaccgtgatcaacaaaaagagcggcgagatcgtgcccatggaggtgaacttcaacttcgacgaccccaacctgatcatcctgcctctggcctttggcaagagacagggcagagaattcatctggaacgacctgctgtccctggaaaccggcagcctgaagctggccaacggaagagtgatcgagaagacactgtacaacagaagaacccggcaggatgagcctgccctgttcgtggccctgaccttcgagcggcgggaggtcctggactcctccaatatcaaaccaatgaacctgatcggcgtggcaagaggcgaaaacatccccgccgtgatcgccctgaccgaccccgagggctgcccactgagccggtttaaggatagcctgggaaacccaacccacatcctgagaatcggcgagagctataaggagaagcagcggaccatccaggccaagaaggaggtggagcagcggagagccggcggctacagccggaagtacgccagcaaagccaagaatctggcagacgatatggtgagaaacaccgctagagatctgctgtactacgccgtgacccaggatgccatgctgatcttcgccaacctgagccggggcttcggccggcagggcaagcggaccttcatggccgagagacagtacacacggatggaggactggctgaccgccaagctggcctacgagggcctgagcaagacctacctgtccaagacactggcccagtacacctccaagacatgcagcaactgtgggtttaccatcaccagcgccgactacgacagggtgctggagaagctgaagaagacagcaacaggctggatgaccacaattaacggcaaggagctgaaggtggagggccagattacctactacaacagatacaagagacagaacgtagtcaaggacctgtccgtcgagctggatagactgagcgaagaatctgtgaacaacgacatctcctcctggacaaagggcagaagcggagaagctctgagcctcctgaagaaaagattctcccatagacccgtgcaggagaagttcgtgtgcctgaactgcggcttcgagacacacgcagccgagcaagccgccctgaacatcgccagatcctggctgttcctgcggagccaggagtacaagaaataccagacaaacaagacaaccggcaacaccgataagagagccttcgtcgagacctggcagtccttttaccggaagaagcttaaggaggtgtggaaacctgccgtgcggtctggcggatctggcggaggctccaccagccccaagaaaaagagaaaagtctaagctgccttctgcggggcttgccttctggccatgcccttcttctctcccttgcacctgtacctcttggtctttgaataaagcctgagtaggaaggctagcaaaaaaaaaaaaaaaaaaaaaaaaaaaaaaaaaaaaaaaaaaaaaaaaaaaaaaaaaaaaaaaaaaaaaaaaaaaaaaaagcccagccggctccccaacctctaccgaggagggcacctctgagtccgccacccccgagagcggccctggcacctccaccgagcccagcgagggcagcgcacccggcagccctgccggcagccccacctccacagaggagggaaccagcaccgagcccagcgaaggcagcgccccaggcaccagcaccgagcctagtgagcaggagattaaacggatcaacaagatcagaagaagacttgtgaaagacagcaacaccaagaaggccggcaagacaggccccatgaaaaccctgctggttagagtgatgacacccgatctgagagagcggctggaaaacctgagaaagaagcctgaaaatatcccccagcccatcagcaatacatctagagccaacctgaataagctgctgaccgattacaccgaaatgaagaaggcgatcctgcatgtgtactgggaagagttccagaaggaccctgtgggcctgatgagccgggtggcccagcctgccagcaagaagatcgatcagaacaagctgaaacctgagatggacgagaagggcaacctgaccaccgccggctttgcctgctctcagtgtggccagcccctgttcgtgtacaagctggagcaggtgtctgagaagggcaaggcttacaccaactacttcggacggtgcaatgtggccgagcacgaaaagctgatcctgctggcccagctgaagcccgagaaggatagcgacgaagccgtgacatatagcctgggaaagtttgggcagagggccctggatttctacagcattcatgtgaccaaggagtccacccaccccgtgaagcccctggcccagatcgccggaaacagatacgcctccggacctgtgggaaaggccctgagcgacgcatgtatgggcacaatcgcctccttcctgtctaagtaccaggacatcatcatcgaacaccagaaggtggtgaagggcaaccagaagagactggagagcctgcgggagctggccggcaaggaaaacctggaataccctagcgtgaccctgccacctcagcctcacaccaaggagggcgttgatgcctacaacgaagtgatcgcccgggtgcgaatgtgggtgaacctgaacctgtggcagaagctgaagctaagcagagatgatgccaagcctctgctgagactgaagggattcccttcctttcctctggtcgagagacaggccaacgaagtggactggtgggacatggtgtgtaacgtgaagaagctgatcaacgagaaaaaggaggatggcaaggtgttttggcagaatctggctggctacaagagacaggaagccctgagaccatacctgagcagcgaggaagatcggaagaagggaaagaaattcgctcggtaccagctgggcgacctgctgctgcacctggaaaagaagcacggcgaggactggggaaaggtgtacgacgaggcctgggagcggattgacaagaaagtggaaggcctgagcaagcacatcaagctggaagaggaacggagaagcgaggacgcccagagcaaggccgccctgaccgactggctgcgggctaaggccagcttcgtgatcgagggcctgaaggaggccgacaaggacgagttctgcagatgcgagctgaagctgcagaagtggtacggggacctgcggggaaagcccttcgccatcgaagccgagaacagcatcctggacatcagcggcttcagcaagcagtacaactgtgccttcatctggcagaaggacggcgtgaagaagctgaacctgtacctgatcatcaactacttcaagggcggcaagctgcggttcaagaagatcaaacctgaagccttcgaagccaacagattctacaccgtgatcaacaaaaagagcggcgagatcgtgcccatggaggtgaacttcaacttcgacgaccccaacctgatcatcctgcctctggcctttggcaagagacagggcagagaattcatctggaacgacctgctgtccctggaaaccggcagcctgaagctggccaacggaagagtgatcgagaagacactgtacaacagaagaacccggcaggatgagcctgccctgttcgtggccctgaccttcgagcggcgggaggtcctggactcctccaatatcaaaccaatgaacctgatcggcgtggcaagaggcgaaaacatccccgccgtgatcgccctgaccgaccccgagggctgcccactgagccggtttaaggatagcctgggaaacccaacccacatcctgagaatcggcgagagctataaggagaagcagcggaccatccaggccaagaaggaggtggagcagcggagagccggcggctacagccggaagtacgccagcaaagccaagaatctggcagacgatatggtgagaaacaccgctagagatctgctgtactacgccgtgacccaggatgccatgctgatcttcgccaacctgagccggggcttcggccggcagggcaagcggaccttcatggccgagagacagtacacacggatggaggactggctgaccgccaagctggcctacgagggcctgagcaagacctacctgtccaagacactggcccagtacacctccaagacatgcagcaactgtgggtttaccatcaccagcgccgactacgacagggtgctggagaagctgaagaagacagcaacaggctggatgaccacaattaacggcaaggagctgaaggtggagggccagattacctactacaacagatacaagagacagaacgtagtcaaggacctgtccgtcgagctggatagactgagcgaagaatctgtgaacaacgacatctcctcctggacaaagggcagaagcggagaagctctgagcctcctgaagaaaagattctcccatagacccgtgcaggagaagttcgtgtgcctgaactgcggcttcgagacacacgcagccgagcaagccgccctgaacatcgccagatcctggctgttcctgcggagccaggagtacaagaaataccagacaaacaagacaaccggcaacaccgataagagagccttcgtcgagacctggcagtccttttaccggaagaagcttaaggaggtgtggaaacctgccgtgcggtctggcggatctggcggaggctccaccagccccaagaaaaagagaaaagtctaagctgccttctgcggggcttgccttctggccatgcccttcttctctcccttgcacctgtacctcttggtctttgaataaagcctgagtaggaaggctagcaaaaaaaaaaaaaaaaaaaaaaaaaaaaaaaaaaaaaaaaaaaaaaaaaaaaaaaaaaaaaaaaaaaaaaaaaaaaaaaa

SEQ ID NO: 9912 - RNA, 8787 nt, synthetic construct
  source 1..8787: mol_type = other RNA
aggaaataagagagaaaagaagagtaagaagaaatataagagccaccatggcccctaagaagaagcgtaaagtgagccggatgaaccacgaccaggagttcgacccccctaaggtgtaccctcccgtccccgccgagaagagaaagcccatccgggtcctgagcctgttcgatggcatcgccaccggtctgctggtgctgaaggacctgggcatccaggtggataggtacattgcctccgaggtgtgcgaggactccatcaccgtgggaatggtgcgtcatcagggcaagatcatgtacgtgggcgacgtgcggagcgtgacacagaagcatatccaggagtggggccctttcgacctggtgatcggcggcagcccttgcaatgacctgagcatcgtgaacccagcccggaagggcctgtacgagggaaccggcagactgttcttcgagttttacagactgctgcacgacgcccggcctaaggaaggcgacgaccggcccttcttttggctgttcgagaatgtggtggccatgggagtcagcgacaagcgggatattagccggttcctggagagcaaccccgtgatgatcgatgccaaggaagtgagcgccgcccaccgggccagatacttctggggcaatctgcctggcatgaacagacccctggccagcaccgtgaacgacaagctggagctgcaggagtgcctggagcacggccggatcgccaagttcagcaaggtgagaaccatcaccacccgaagcaacagcatcaaacaaggcaaggaccagcactttcctgtgttcatgaacgagaaggaggacatcctgtggtgtaccgagatggagagagtgttcgggttcccagtccactacacagatgtcagcaacatgtctagactggccagacagagactgctgggaagaagctggtccgtccctgtgatcagacacctgttcgcccctctgaaggagtacttcgcctgcgtgagcagcggcaacagcaacgccaacagccggggccccagcttctctagcggcctggtgccactgtccctgagagggagccacatgggccccatggagatctacaaaaccgtgagcgcctggaagcggcagcctgtgcgcgtgctgagcctgtttcggaatatcgataaagtcctgaaaagcctgggattcctggagagcggctctggctccggcggtggcaccctgaagtacgtggaggatgtgacaaacgtggtcagacgggatgtggagaagtggggccccttcgatctggtgtacggcagcacccaacccctgggcagctcttgtgaccggtgccctggctggtacatgtttcagttccaccggatcctgcagtacgccctgccgagacaggagtcccagcggccattcttttggattttcatggacaacttgctgctgaccgaggatgaccaggaaactaccactcggttcctgcagaccgaagccgtgaccctgcaggacgtgagaggccgggactaccagaacgccatgcgggtgtggtccaacatccctggactgaaaagcaagcacgcacctctgacccctaaagaagaggagtacctgcaggcccaggtgcggagcagaagcaagctggacgcccctaaggtggatctgctggtgaagaattgcctcctgcccctgagagagtacttcaagtatttcagccagaatagtctgcccctgggaggcagcggcggcggcagctacggcagcctgagcttcgaggacgtgaccgtgggcttcagccaggaggagtggcagcacctggaccccgcccagaggaccctgtacagggacgtgatgctggagaactacagccacctggtggccgtgggctgctgcgtgcccaagcccgacgtgatcttcaggctggagcagggccagcagccctggatcgtggaggaggagagcctggaccagagctgccccgaggtgtgcaaggtgggcggcccaagcagcggcgcccctcctcccagcggcggcaggcggcccaagcagcggcgcccctcctcccagcggcggcagcccagccggctccccaacctctaccgaggagggcacctctgagtccgccacccccgagagcggccctggcacctccaccgagcccagcgagggcagcgcacccggcagccctgccggcagccccacctccacagaggagggaaccagcaccgagcccagcgaaggcagcgccccaggcaccagcaccgagcctagtgagcaggagattaaacggatcaacaagatcagaagaagacttgtgaaagacagcaacaccaagaaggccggcaagacaggccccatgaaaaccctgctggttagagtgatgacacccgatctgagagagcggctggaaaacctgagaaagaagcctgaaaatatcccccagcccatcagcaatacatctagagccaacctgaataagctgctgaccgattacaccgaaatgaagaaggcgatcctgcatgtgtactgggaagagttccagaaggaccctgtgggcctgatgagccgggtggcccagcctgccagcaagaagatcgatcagaacaagctgaaacctgagatggacgagaagggcaacctgaccaccgccggctttgcctgctctcagtgtggccagcccctgttcgtgtacaagctggagcaggtgtctgagaagggcaaggcttacaccaactacttcggacggtgcaatgtggccgagcacgaaaagctgatcctgctggcccagctgaagcccgagaaggatagcgacgaagccgtgacatatagcctgggaaagtttgggcagagggccctggatttctacagcattcatgtgaccaaggagtccacccaccccgtgaagcccctggcccagatcgccggaaacagatacgcctccggacctgtgggaaaggccctgagcgacgcatgtatgggcacaatcgcctccttcctgtctaagtaccaggacatcatcatcgaacaccagaaggtggtgaagggcaaccagaagagactggagagcctgcgggagctggccggcaaggaaaacctggaataccctagcgtgaccctgccacctcagcctcacaccaaggagggcgttgatgcctacaacgaagtgatcgcccgggtgcgaatgtgggtgaacctgaacctgtggcagaagctgaagctaagcagagatgatgccaagcctctgctgagactgaagggattcccttcctttcctctggtcgagagacaggccaacgaagtggactggtgggacatggtgtgtaacgtgaagaagctgatcaacgagaaaaaggaggatggcaaggtgttttggcagaatctggctggctacaagagacaggaagccctgagaccatacctgagcagcgaggaagatcggaagaagggaaagaaattcgctcggtaccagctgggcgacctgctgctgcacctggaaaagaagcacggcgaggactggggaaaggtgtacgacgaggcctgggagcggattgacaagaaagtggaaggcctgagcaagcacatcaagctggaagaggaacggagaagcgaggacgcccagagcaaggccgccctgaccgactggctgcgggctaaggccagcttcgtgatcgagggcctgaaggaggccgacaaggacgagttctgcagatgcgagctgaagctgcagaagtggtacggggacctgcggggaaagcccttcgccatcgaagccgagaacagcatcctggacatcagcggcttcagcaagcagtacaactgtgccttcatctggcagaaggacggcgtgaagaagctgaacctgtacctgatcatcaactacttcaagggcggcaagctgcggttcaagaagatcaaacctgaagccttcgaagccaacagattctacaccgtgatcaacaaaaagagcggcgagatcgtgcccatggaggtgaacttcaacttcgacgaccccaacctgatcatcctgcctctggcctttggcaagagacagggcagagaattcatctggaacgacctgctgtccctggaaaccggcagcctgaagctggccaacggaagagtgatcgagaagacactgtacaacagaagaacccggcaggatgagcctgccctgttcgtggccctgaccttcgagcggcgggaggtcctggactcctccaatatcaaaccaatgaacctgatcggcgtggcaagaggcgaaaacatccccgccgtgatcgccctgaccgaccccgagggctgcccactgagccggtttaaggatagcctgggaaacccaacccacatcctgagaatcggcgagagctataaggagaagcagcggaccatccaggccaagaaggaggtggagcagcggagagccggcggctacagccggaagtacgccagcaaagccaagaatctggcagacgatatggtgagaaacaccgctagagatctgctgtactacgccgtgacccaggatgccatgctgatcttcgccaacctgagccggggcttcggccggcagggcaagcggaccttcatggccgagagacagtacacacggatggaggactggctgaccgccaagctggcctacgagggcctgagcaagacctacctgtccaagacactggcccagtacacctccaagacatgcagcaactgtgggtttaccatcaccagcgccgactacgacagggtgctggagaagctgaagaagacagcaacaggctggatgaccacaattaacggcaaggagctgaaggtggagggccagattacctactacaacagatacaagagacagaacgtagtcaaggacctgtccgtcgagctggatagactgagcgaagaatctgtgaacaacgacatctcctcctggacaaagggcagaagcggagaagctctgagcctcctgaagaaaagattctcccatagacccgtgcaggagaagttcgtgtgcctgaactgcggcttcgagacacacgcagccgagcaagccgccctgaacatcgccagatcctggctgttcctgcggagccaggagtacaagaaataccagacaaacaagacaaccggcaacaccgataagagagccttcgtcgagacctggcagtccttttaccggaagaagcttaaggaggtgtggaaacctgccgtgcggtctggcggatctggcggaggctccaccagccccaagaaaaagagaaaagtctaagctgccttctgcggggcttgccttctggccatgcccttcttctctcccttgcacctgtacctcttggtctttgaataaagcctgagtaggaaggctagcaaaaaaaaaaaaaaaaaaaaaaaaaaaaaaaaaaaaaaaaaaaaaaaaaaaaaaaaaaaaaaaaaaaaaaaaaaaaaaaagcccagccggctccccaacctctaccgaggagggcacctctgagtccgccacccccgagagcggccctggcacctccaccgagcccagcgagggcagcgcacccggcagccctgccggcagccccacctccacagaggagggaaccagcaccgagcccagcgaaggcagcgccccaggcaccagcaccgagcctagtgagcaggagattaaacggatcaacaagatcagaagaagacttgtgaaagacagcaacaccaagaaggccggcaagacaggccccatgaaaaccctgctggttagagtgatgacacccgatctgagagagcggctggaaaacctgagaaagaagcctgaaaatatcccccagcccatcagcaatacatctagagccaacctgaataagctgctgaccgattacaccgaaatgaagaaggcgatcctgcatgtgtactgggaagagttccagaaggaccctgtgggcctgatgagccgggtggcccagcctgccagcaagaagatcgatcagaacaagctgaaacctgagatggacgagaagggcaacctgaccaccgccggctttgcctgctctcagtgtggccagcccctgttcgtgtacaagctggagcaggtgtctgagaagggcaaggcttacaccaactacttcggacggtgcaatgtggccgagcacgaaaagctgatcctgctggcccagctgaagcccgagaaggatagcgacgaagccgtgacatatagcctgggaaagtttgggcagagggccctggatttctacagcattcatgtgaccaaggagtccacccaccccgtgaagcccctggcccagatcgccggaaacagatacgcctccggacctgtgggaaaggccctgagcgacgcatgtatgggcacaatcgcctccttcctgtctaagtaccaggacatcatcatcgaacaccagaaggtggtgaagggcaaccagaagagactggagagcctgcgggagctggccggcaaggaaaacctggaataccctagcgtgaccctgccacctcagcctcacaccaaggagggcgttgatgcctacaacgaagtgatcgcccgggtgcgaatgtgggtgaacctgaacctgtggcagaagctgaagctaagcagagatgatgccaagcctctgctgagactgaagggattcccttcctttcctctggtcgagagacaggccaacgaagtggactggtgggacatggtgtgtaacgtgaagaagctgatcaacgagaaaaaggaggatggcaaggtgttttggcagaatctggctggctacaagagacaggaagccctgagaccatacctgagcagcgaggaagatcggaagaagggaaagaaattcgctcggtaccagctgggcgacctgctgctgcacctggaaaagaagcacggcgaggactggggaaaggtgtacgacgaggcctgggagcggattgacaagaaagtggaaggcctgagcaagcacatcaagctggaagaggaacggagaagcgaggacgcccagagcaaggccgccctgaccgactggctgcgggctaaggccagcttcgtgatcgagggcctgaaggaggccgacaaggacgagttctgcagatgcgagctgaagctgcagaagtggtacggggacctgcggggaaagcccttcgccatcgaagccgagaacagcatcctggacatcagcggcttcagcaagcagtacaactgtgccttcatctggcagaaggacggcgtgaagaagctgaacctgtacctgatcatcaactacttcaagggcggcaagctgcggttcaagaagatcaaacctgaagccttcgaagccaacagattctacaccgtgatcaacaaaaagagcggcgagatcgtgcccatggaggtgaacttcaacttcgacgaccccaacctgatcatcctgcctctggcctttggcaagagacagggcagagaattcatctggaacgacctgctgtccctggaaaccggcagcctgaagctggccaacggaagagtgatcgagaagacactgtacaacagaagaacccggcaggatgagcctgccctgttcgtggccctgaccttcgagcggcgggaggtcctggactcctccaatatcaaaccaatgaacctgatcggcgtggcaagaggcgaaaacatccccgccgtgatcgccctgaccgaccccgagggctgcccactgagccggtttaaggatagcctgggaaacccaacccacatcctgagaatcggcgagagctataaggagaagcagcggaccatccaggccaagaaggaggtggagcagcggagagccggcggctacagccggaagtacgccagcaaagccaagaatctggcagacgatatggtgagaaacaccgctagagatctgctgtactacgccgtgacccaggatgccatgctgatcttcgccaacctgagccggggcttcggccggcagggcaagcggaccttcatggccgagagacagtacacacggatggaggactggctgaccgccaagctggcctacgagggcctgagcaagacctacctgtccaagacactggcccagtacacctccaagacatgcagcaactgtgggtttaccatcaccagcgccgactacgacagggtgctggagaagctgaagaagacagcaacaggctggatgaccacaattaacggcaaggagctgaaggtggagggccagattacctactacaacagatacaagagacagaacgtagtcaaggacctgtccgtcgagctggatagactgagcgaagaatctgtgaacaacgacatctcctcctggacaaagggcagaagcggagaagctctgagcctcctgaagaaaagattctcccatagacccgtgcaggagaagttcgtgtgcctgaactgcggcttcgagacacacgcagccgagcaagccgccctgaacatcgccagatcctggctgttcctgcggagccaggagtacaagaaataccagacaaacaagacaaccggcaacaccgataagagagccttcgtcgagacctggcagtccttttaccggaagaagcttaaggaggtgtggaaacctgccgtgcggtctggcggatctggcggaggctccaccagccccaagaaaaagagaaaagtctaagctgccttctgcggggcttgccttctggccatgcccttcttctctcccttgcacctgtacctcttggtctttgaataaagcctgagtaggaaggctagcaaaaaaaaaaaaaaaaaaaaaaaaaaaaaaaaaaaaaaaaaaaaaaaaaaaaaaaaaaaaaaaaaaaaaaaaaaaaaaaa

SEQ ID NO: 9913 - RNA, 8787 nt, synthetic construct
  source 1..8787: mol_type = other RNA
aggaaataagagagaaaagaagagtaagaagaaatataagagccaccatggcccctaagaagaagcgtaaagtgagccggatgaaccacgaccaggagttcgacccccctaaggtgtaccctcccgtccccgccgagaagagaaagcccatccgggtcctgagcctgttcgatggcatcgccaccggtctgctggtgctgaaggacctgggcatccaggtggataggtacattgcctccgaggtgtgcgaggactccatcaccgtgggaatggtgcgtcatcagggcaagatcatgtacgtgggcgacgtgcggagcgtgacacagaagcatatccaggagtggggccctttcgacctggtgatcggcggcagcccttgcaatgacctgagcatcgtgaacccagcccggaagggcctgtacgagggaaccggcagactgttcttcgagttttacagactgctgcacgacgcccggcctaaggaaggcgacgaccggcccttcttttggctgttcgagaatgtggtggccatgggagtcagcgacaagcgggatattagccggttcctggagagcaaccccgtgatgatcgatgccaaggaagtgagcgccgcccaccgggccagatacttctggggcaatctgcctggcatgaacagacccctggccagcaccgtgaacgacaagctggagctgcaggagtgcctggagcacggccggatcgccaagttcagcaaggtgagaaccatcaccacccgaagcaacagcatcaaacaaggcaaggaccagcactttcctgtgttcatgaacgagaaggaggacatcctgtggtgtaccgagatggagagagtgttcgggttcccagtccactacacagatgtcagcaacatgtctagactggccagacagagactgctgggaagaagctggtccgtccctgtgatcagacacctgttcgcccctctgaaggagtacttcgcctgcgtgagcagcggcaacagcaacgccaacagccggggccccagcttctctagcggcctggtgccactgtccctgagagggagccacatgggccccatggagatctacaaaaccgtgagcgcctggaagcggcagcctgtgcgcgtgctgagcctgtttcggaatatcgataaagtcctgaaaagcctgggattcctggagagcggctctggctccggcggtggcaccctgaagtacgtggaggatgtgacaaacgtggtcagacgggatgtggagaagtggggccccttcgatctggtgtacggcagcacccaacccctgggcagctcttgtgaccggtgccctggctggtacatgtttcagttccaccggatcctgcagtacgccctgccgagacaggagtcccagcggccattcttttggattttcatggacaacttgctgctgaccgaggatgaccaggaaactaccactcggttcctgcagaccgaagccgtgaccctgcaggacgtgagaggccgggactaccagaacgccatgcgggtgtggtccaacatccctggactgaaaagcaagcacgcacctctgacccctaaagaagaggagtacctgcaggcccaggtgcggagcagaagcaagctggacgcccctaaggtggatctgctggtgaagaattgcctcctgcccctgagagagtacttcaagtatttcagccagaatagtctgcccctgggaggcagcggcggcggcgcccacggcagcgtgatgttcagcgacgtgagcatcgacttcagccaggaggagtgggagtacctgaacctggagcagagggacctgtacaggaacgtgatgctggagaactacagcaacctggtgagcctgggctgcttcatcagcaagcccgacgtgatcagcctgctggagcagggcaaggagccctggaaggtggtgaggaagggcaggaggccctacagcggcctggagaccaagaagggcggcccaagcagcggcgcccctcctcccagcggcggcaggcggcccaagcagcggcgcccctcctcccagcggcggcagcccagccggctccccaacctctaccgaggagggcacctctgagtccgccacccccgagagcggccctggcacctccaccgagcccagcgagggcagcgcacccggcagccctgccggcagccccacctccacagaggagggaaccagcaccgagcccagcgaaggcagcgccccaggcaccagcaccgagcctagtgagcaggagattaaacggatcaacaagatcagaagaagacttgtgaaagacagcaacaccaagaaggccggcaagacaggccccatgaaaaccctgctggttagagtgatgacacccgatctgagagagcggctggaaaacctgagaaagaagcctgaaaatatcccccagcccatcagcaatacatctagagccaacctgaataagctgctgaccgattacaccgaaatgaagaaggcgatcctgcatgtgtactgggaagagttccagaaggaccctgtgggcctgatgagccgggtggcccagcctgccagcaagaagatcgatcagaacaagctgaaacctgagatggacgagaagggcaacctgaccaccgccggctttgcctgctctcagtgtggccagcccctgttcgtgtacaagctggagcaggtgtctgagaagggcaaggcttacaccaactacttcggacggtgcaatgtggccgagcacgaaaagctgatcctgctggcccagctgaagcccgagaaggatagcgacgaagccgtgacatatagcctgggaaagtttgggcagagggccctggatttctacagcattcatgtgaccaaggagtccacccaccccgtgaagcccctggcccagatcgccggaaacagatacgcctccggacctgtgggaaaggccctgagcgacgcatgtatgggcacaatcgcctccttcctgtctaagtaccaggacatcatcatcgaacaccagaaggtggtgaagggcaaccagaagagactggagagcctgcgggagctggccggcaaggaaaacctggaataccctagcgtgaccctgccacctcagcctcacaccaaggagggcgttgatgcctacaacgaagtgatcgcccgggtgcgaatgtgggtgaacctgaacctgtggcagaagctgaagctaagcagagatgatgccaagcctctgctgagactgaagggattcccttcctttcctctggtcgagagacaggccaacgaagtggactggtgggacatggtgtgtaacgtgaagaagctgatcaacgagaaaaaggaggatggcaaggtgttttggcagaatctggctggctacaagagacaggaagccctgagaccatacctgagcagcgaggaagatcggaagaagggaaagaaattcgctcggtaccagctgggcgacctgctgctgcacctggaaaagaagcacggcgaggactggggaaaggtgtacgacgaggcctgggagcggattgacaagaaagtggaaggcctgagcaagcacatcaagctggaagaggaacggagaagcgaggacgcccagagcaaggccgccctgaccgactggctgcgggctaaggccagcttcgtgatcgagggcctgaaggaggccgacaaggacgagttctgcagatgcgagctgaagctgcagaagtggtacggggacctgcggggaaagcccttcgccatcgaagccgagaacagcatcctggacatcagcggcttcagcaagcagtacaactgtgccttcatctggcagaaggacggcgtgaagaagctgaacctgtacctgatcatcaactacttcaagggcggcaagctgcggttcaagaagatcaaacctgaagccttcgaagccaacagattctacaccgtgatcaacaaaaagagcggcgagatcgtgcccatggaggtgaacttcaacttcgacgaccccaacctgatcatcctgcctctggcctttggcaagagacagggcagagaattcatctggaacgacctgctgtccctggaaaccggcagcctgaagctggccaacggaagagtgatcgagaagacactgtacaacagaagaacccggcaggatgagcctgccctgttcgtggccctgaccttcgagcggcgggaggtcctggactcctccaatatcaaaccaatgaacctgatcggcgtggcaagaggcgaaaacatccccgccgtgatcgccctgaccgaccccgagggctgcccactgagccggtttaaggatagcctgggaaacccaacccacatcctgagaatcggcgagagctataaggagaagcagcggaccatccaggccaagaaggaggtggagcagcggagagccggcggctacagccggaagtacgccagcaaagccaagaatctggcagacgatatggtgagaaacaccgctagagatctgctgtactacgccgtgacccaggatgccatgctgatcttcgccaacctgagccggggcttcggccggcagggcaagcggaccttcatggccgagagacagtacacacggatggaggactggctgaccgccaagctggcctacgagggcctgagcaagacctacctgtccaagacactggcccagtacacctccaagacatgcagcaactgtgggtttaccatcaccagcgccgactacgacagggtgctggagaagctgaagaagacagcaacaggctggatgaccacaattaacggcaaggagctgaaggtggagggccagattacctactacaacagatacaagagacagaacgtagtcaaggacctgtccgtcgagctggatagactgagcgaagaatctgtgaacaacgacatctcctcctggacaaagggcagaagcggagaagctctgagcctcctgaagaaaagattctcccatagacccgtgcaggagaagttcgtgtgcctgaactgcggcttcgagacacacgcagccgagcaagccgccctgaacatcgccagatcctggctgttcctgcggagccaggagtacaagaaataccagacaaacaagacaaccggcaacaccgataagagagccttcgtcgagacctggcagtccttttaccggaagaagcttaaggaggtgtggaaacctgccgtgcggtctggcggatctggcggaggctccaccagccccaagaaaaagagaaaagtctaagctgccttctgcggggcttgccttctggccatgcccttcttctctcccttgcacctgtacctcttggtctttgaataaagcctgagtaggaaggctagcaaaaaaaaaaaaaaaaaaaaaaaaaaaaaaaaaaaaaaaaaaaaaaaaaaaaaaaaaaaaaaaaaaaaaaaaaaaaaaaagcccagccggctccccaacctctaccgaggagggcacctctgagtccgccacccccgagagcggccctggcacctccaccgagcccagcgagggcagcgcacccggcagccctgccggcagccccacctccacagaggagggaaccagcaccgagcccagcgaaggcagcgccccaggcaccagcaccgagcctagtgagcaggagattaaacggatcaacaagatcagaagaagacttgtgaaagacagcaacaccaagaaggccggcaagacaggccccatgaaaaccctgctggttagagtgatgacacccgatctgagagagcggctggaaaacctgagaaagaagcctgaaaatatcccccagcccatcagcaatacatctagagccaacctgaataagctgctgaccgattacaccgaaatgaagaaggcgatcctgcatgtgtactgggaagagttccagaaggaccctgtgggcctgatgagccgggtggcccagcctgccagcaagaagatcgatcagaacaagctgaaacctgagatggacgagaagggcaacctgaccaccgccggctttgcctgctctcagtgtggccagcccctgttcgtgtacaagctggagcaggtgtctgagaagggcaaggcttacaccaactacttcggacggtgcaatgtggccgagcacgaaaagctgatcctgctggcccagctgaagcccgagaaggatagcgacgaagccgtgacatatagcctgggaaagtttgggcagagggccctggatttctacagcattcatgtgaccaaggagtccacccaccccgtgaagcccctggcccagatcgccggaaacagatacgcctccggacctgtgggaaaggccctgagcgacgcatgtatgggcacaatcgcctccttcctgtctaagtaccaggacatcatcatcgaacaccagaaggtggtgaagggcaaccagaagagactggagagcctgcgggagctggccggcaaggaaaacctggaataccctagcgtgaccctgccacctcagcctcacaccaaggagggcgttgatgcctacaacgaagtgatcgcccgggtgcgaatgtgggtgaacctgaacctgtggcagaagctgaagctaagcagagatgatgccaagcctctgctgagactgaagggattcccttcctttcctctggtcgagagacaggccaacgaagtggactggtgggacatggtgtgtaacgtgaagaagctgatcaacgagaaaaaggaggatggcaaggtgttttggcagaatctggctggctacaagagacaggaagccctgagaccatacctgagcagcgaggaagatcggaagaagggaaagaaattcgctcggtaccagctgggcgacctgctgctgcacctggaaaagaagcacggcgaggactggggaaaggtgtacgacgaggcctgggagcggattgacaagaaagtggaaggcctgagcaagcacatcaagctggaagaggaacggagaagcgaggacgcccagagcaaggccgccctgaccgactggctgcgggctaaggccagcttcgtgatcgagggcctgaaggaggccgacaaggacgagttctgcagatgcgagctgaagctgcagaagtggtacggggacctgcggggaaagcccttcgccatcgaagccgagaacagcatcctggacatcagcggcttcagcaagcagtacaactgtgccttcatctggcagaaggacggcgtgaagaagctgaacctgtacctgatcatcaactacttcaagggcggcaagctgcggttcaagaagatcaaacctgaagccttcgaagccaacagattctacaccgtgatcaacaaaaagagcggcgagatcgtgcccatggaggtgaacttcaacttcgacgaccccaacctgatcatcctgcctctggcctttggcaagagacagggcagagaattcatctggaacgacctgctgtccctggaaaccggcagcctgaagctggccaacggaagagtgatcgagaagacactgtacaacagaagaacccggcaggatgagcctgccctgttcgtggccctgaccttcgagcggcgggaggtcctggactcctccaatatcaaaccaatgaacctgatcggcgtggcaagaggcgaaaacatccccgccgtgatcgccctgaccgaccccgagggctgcccactgagccggtttaaggatagcctgggaaacccaacccacatcctgagaatcggcgagagctataaggagaagcagcggaccatccaggccaagaaggaggtggagcagcggagagccggcggctacagccggaagtacgccagcaaagccaagaatctggcagacgatatggtgagaaacaccgctagagatctgctgtactacgccgtgacccaggatgccatgctgatcttcgccaacctgagccggggcttcggccggcagggcaagcggaccttcatggccgagagacagtacacacggatggaggactggctgaccgccaagctggcctacgagggcctgagcaagacctacctgtccaagacactggcccagtacacctccaagacatgcagcaactgtgggtttaccatcaccagcgccgactacgacagggtgctggagaagctgaagaagacagcaacaggctggatgaccacaattaacggcaaggagctgaaggtggagggccagattacctactacaacagatacaagagacagaacgtagtcaaggacctgtccgtcgagctggatagactgagcgaagaatctgtgaacaacgacatctcctcctggacaaagggcagaagcggagaagctctgagcctcctgaagaaaagattctcccatagacccgtgcaggagaagttcgtgtgcctgaactgcggcttcgagacacacgcagccgagcaagccgccctgaacatcgccagatcctggctgttcctgcggagccaggagtacaagaaataccagacaaacaagacaaccggcaacaccgataagagagccttcgtcgagacctggcagtccttttaccggaagaagcttaaggaggtgtggaaacctgccgtgcggtctggcggatctggcggaggctccaccagccccaagaaaaagagaaaagtctaagctgccttctgcggggcttgccttctggccatgcccttcttctctcccttgcacctgtacctcttggtctttgaataaagcctgagtaggaaggctagcaaaaaaaaaaaaaaaaaaaaaaaaaaaaaaaaaaaaaaaaaaaaaaaaaaaaaaaaaaaaaaaaaaaaaaaaaaaaaaaa

SEQ ID NO: 9914 - RNA, 8787 nt, synthetic construct
  source 1..8787: mol_type = other RNA
aggaaataagagagaaaagaagagtaagaagaaatataagagccaccatggcccctaagaagaagcgtaaagtgagccggatgaaccacgaccaggagttcgacccccctaaggtgtaccctcccgtccccgccgagaagagaaagcccatccgggtcctgagcctgttcgatggcatcgccaccggtctgctggtgctgaaggacctgggcatccaggtggataggtacattgcctccgaggtgtgcgaggactccatcaccgtgggaatggtgcgtcatcagggcaagatcatgtacgtgggcgacgtgcggagcgtgacacagaagcatatccaggagtggggccctttcgacctggtgatcggcggcagcccttgcaatgacctgagcatcgtgaacccagcccggaagggcctgtacgagggaaccggcagactgttcttcgagttttacagactgctgcacgacgcccggcctaaggaaggcgacgaccggcccttcttttggctgttcgagaatgtggtggccatgggagtcagcgacaagcgggatattagccggttcctggagagcaaccccgtgatgatcgatgccaaggaagtgagcgccgcccaccgggccagatacttctggggcaatctgcctggcatgaacagacccctggccagcaccgtgaacgacaagctggagctgcaggagtgcctggagcacggccggatcgccaagttcagcaaggtgagaaccatcaccacccgaagcaacagcatcaaacaaggcaaggaccagcactttcctgtgttcatgaacgagaaggaggacatcctgtggtgtaccgagatggagagagtgttcgggttcccagtccactacacagatgtcagcaacatgtctagactggccagacagagactgctgggaagaagctggtccgtccctgtgatcagacacctgttcgcccctctgaaggagtacttcgcctgcgtgagcagcggcaacagcaacgccaacagccggggccccagcttctctagcggcctggtgccactgtccctgagagggagccacatgggccccatggagatctacaaaaccgtgagcgcctggaagcggcagcctgtgcgcgtgctgagcctgtttcggaatatcgataaagtcctgaaaagcctgggattcctggagagcggctctggctccggcggtggcaccctgaagtacgtggaggatgtgacaaacgtggtcagacgggatgtggagaagtggggccccttcgatctggtgtacggcagcacccaacccctgggcagctcttgtgaccggtgccctggctggtacatgtttcagttccaccggatcctgcagtacgccctgccgagacaggagtcccagcggccattcttttggattttcatggacaacttgctgctgaccgaggatgaccaggaaactaccactcggttcctgcagaccgaagccgtgaccctgcaggacgtgagaggccgggactaccagaacgccatgcgggtgtggtccaacatccctggactgaaaagcaagcacgcacctctgacccctaaagaagaggagtacctgcaggcccaggtgcggagcagaagcaagctggacgcccctaaggtggatctgctggtgaagaattgcctcctgcccctgagagagtacttcaagtatttcagccagaatagtctgcccctgggaggcagcggcggcggcgaggagctgcccgtggtgttcgaggacgtggccgtgtacttcaccagggaggagtggggcatgctggacaagaggcagaaggagctgtacagggacgtgatgaggatgaactacgagctgctggccagcctgggccccgccgccgccaagcccgacctgatcagcaagctggagaggagggccgccccctggatcagggaccccaacggccccaagtggggcaagggcaggcccagcggcaacggcggcccaagcagcggcgcccctcctcccagcggcggcaggcggcccaagcagcggcgcccctcctcccagcggcggcagcccagccggctccccaacctctaccgaggagggcacctctgagtccgccacccccgagagcggccctggcacctccaccgagcccagcgagggcagcgcacccggcagccctgccggcagccccacctccacagaggagggaaccagcaccgagcccagcgaaggcagcgccccaggcaccagcaccgagcctagtgagcaggagattaaacggatcaacaagatcagaagaagacttgtgaaagacagcaacaccaagaaggccggcaagacaggccccatgaaaaccctgctggttagagtgatgacacccgatctgagagagcggctggaaaacctgagaaagaagcctgaaaatatcccccagcccatcagcaatacatctagagccaacctgaataagctgctgaccgattacaccgaaatgaagaaggcgatcctgcatgtgtactgggaagagttccagaaggaccctgtgggcctgatgagccgggtggcccagcctgccagcaagaagatcgatcagaacaagctgaaacctgagatggacgagaagggcaacctgaccaccgccggctttgcctgctctcagtgtggccagcccctgttcgtgtacaagctggagcaggtgtctgagaagggcaaggcttacaccaactacttcggacggtgcaatgtggccgagcacgaaaagctgatcctgctggcccagctgaagcccgagaaggatagcgacgaagccgtgacatatagcctgggaaagtttgggcagagggccctggatttctacagcattcatgtgaccaaggagtccacccaccccgtgaagcccctggcccagatcgccggaaacagatacgcctccggacctgtgggaaaggccctgagcgacgcatgtatgggcacaatcgcctccttcctgtctaagtaccaggacatcatcatcgaacaccagaaggtggtgaagggcaaccagaagagactggagagcctgcgggagctggccggcaaggaaaacctggaataccctagcgtgaccctgccacctcagcctcacaccaaggagggcgttgatgcctacaacgaagtgatcgcccgggtgcgaatgtgggtgaacctgaacctgtggcagaagctgaagctaagcagagatgatgccaagcctctgctgagactgaagggattcccttcctttcctctggtcgagagacaggccaacgaagtggactggtgggacatggtgtgtaacgtgaagaagctgatcaacgagaaaaaggaggatggcaaggtgttttggcagaatctggctggctacaagagacaggaagccctgagaccatacctgagcagcgaggaagatcggaagaagggaaagaaattcgctcggtaccagctgggcgacctgctgctgcacctggaaaagaagcacggcgaggactggggaaaggtgtacgacgaggcctgggagcggattgacaagaaagtggaaggcctgagcaagcacatcaagctggaagaggaacggagaagcgaggacgcccagagcaaggccgccctgaccgactggctgcgggctaaggccagcttcgtgatcgagggcctgaaggaggccgacaaggacgagttctgcagatgcgagctgaagctgcagaagtggtacggggacctgcggggaaagcccttcgccatcgaagccgagaacagcatcctggacatcagcggcttcagcaagcagtacaactgtgccttcatctggcagaaggacggcgtgaagaagctgaacctgtacctgatcatcaactacttcaagggcggcaagctgcggttcaagaagatcaaacctgaagccttcgaagccaacagattctacaccgtgatcaacaaaaagagcggcgagatcgtgcccatggaggtgaacttcaacttcgacgaccccaacctgatcatcctgcctctggcctttggcaagagacagggcagagaattcatctggaacgacctgctgtccctggaaaccggcagcctgaagctggccaacggaagagtgatcgagaagacactgtacaacagaagaacccggcaggatgagcctgccctgttcgtggccctgaccttcgagcggcgggaggtcctggactcctccaatatcaaaccaatgaacctgatcggcgtggcaagaggcgaaaacatccccgccgtgatcgccctgaccgaccccgagggctgcccactgagccggtttaaggatagcctgggaaacccaacccacatcctgagaatcggcgagagctataaggagaagcagcggaccatccaggccaagaaggaggtggagcagcggagagccggcggctacagccggaagtacgccagcaaagccaagaatctggcagacgatatggtgagaaacaccgctagagatctgctgtactacgccgtgacccaggatgccatgctgatcttcgccaacctgagccggggcttcggccggcagggcaagcggaccttcatggccgagagacagtacacacggatggaggactggctgaccgccaagctggcctacgagggcctgagcaagacctacctgtccaagacactggcccagtacacctccaagacatgcagcaactgtgggtttaccatcaccagcgccgactacgacagggtgctggagaagctgaagaagacagcaacaggctggatgaccacaattaacggcaaggagctgaaggtggagggccagattacctactacaacagatacaagagacagaacgtagtcaaggacctgtccgtcgagctggatagactgagcgaagaatctgtgaacaacgacatctcctcctggacaaagggcagaagcggagaagctctgagcctcctgaagaaaagattctcccatagacccgtgcaggagaagttcgtgtgcctgaactgcggcttcgagacacacgcagccgagcaagccgccctgaacatcgccagatcctggctgttcctgcggagccaggagtacaagaaataccagacaaacaagacaaccggcaacaccgataagagagccttcgtcgagacctggcagtccttttaccggaagaagcttaaggaggtgtggaaacctgccgtgcggtctggcggatctggcggaggctccaccagccccaagaaaaagagaaaagtctaagctgccttctgcggggcttgccttctggccatgcccttcttctctcccttgcacctgtacctcttggtctttgaataaagcctgagtaggaaggctagcaaaaaaaaaaaaaaaaaaaaaaaaaaaaaaaaaaaaaaaaaaaaaaaaaaaaaaaaaaaaaaaaaaaaaaaaaaaaaaaagcccagccggctccccaacctctaccgaggagggcacctctgagtccgccacccccgagagcggccctggcacctccaccgagcccagcgagggcagcgcacccggcagccctgccggcagccccacctccacagaggagggaaccagcaccgagcccagcgaaggcagcgccccaggcaccagcaccgagcctagtgagcaggagattaaacggatcaacaagatcagaagaagacttgtgaaagacagcaacaccaagaaggccggcaagacaggccccatgaaaaccctgctggttagagtgatgacacccgatctgagagagcggctggaaaacctgagaaagaagcctgaaaatatcccccagcccatcagcaatacatctagagccaacctgaataagctgctgaccgattacaccgaaatgaagaaggcgatcctgcatgtgtactgggaagagttccagaaggaccctgtgggcctgatgagccgggtggcccagcctgccagcaagaagatcgatcagaacaagctgaaacctgagatggacgagaagggcaacctgaccaccgccggctttgcctgctctcagtgtggccagcccctgttcgtgtacaagctggagcaggtgtctgagaagggcaaggcttacaccaactacttcggacggtgcaatgtggccgagcacgaaaagctgatcctgctggcccagctgaagcccgagaaggatagcgacgaagccgtgacatatagcctgggaaagtttgggcagagggccctggatttctacagcattcatgtgaccaaggagtccacccaccccgtgaagcccctggcccagatcgccggaaacagatacgcctccggacctgtgggaaaggccctgagcgacgcatgtatgggcacaatcgcctccttcctgtctaagtaccaggacatcatcatcgaacaccagaaggtggtgaagggcaaccagaagagactggagagcctgcgggagctggccggcaaggaaaacctggaataccctagcgtgaccctgccacctcagcctcacaccaaggagggcgttgatgcctacaacgaagtgatcgcccgggtgcgaatgtgggtgaacctgaacctgtggcagaagctgaagctaagcagagatgatgccaagcctctgctgagactgaagggattcccttcctttcctctggtcgagagacaggccaacgaagtggactggtgggacatggtgtgtaacgtgaagaagctgatcaacgagaaaaaggaggatggcaaggtgttttggcagaatctggctggctacaagagacaggaagccctgagaccatacctgagcagcgaggaagatcggaagaagggaaagaaattcgctcggtaccagctgggcgacctgctgctgcacctggaaaagaagcacggcgaggactggggaaaggtgtacgacgaggcctgggagcggattgacaagaaagtggaaggcctgagcaagcacatcaagctggaagaggaacggagaagcgaggacgcccagagcaaggccgccctgaccgactggctgcgggctaaggccagcttcgtgatcgagggcctgaaggaggccgacaaggacgagttctgcagatgcgagctgaagctgcagaagtggtacggggacctgcggggaaagcccttcgccatcgaagccgagaacagcatcctggacatcagcggcttcagcaagcagtacaactgtgccttcatctggcagaaggacggcgtgaagaagctgaacctgtacctgatcatcaactacttcaagggcggcaagctgcggttcaagaagatcaaacctgaagccttcgaagccaacagattctacaccgtgatcaacaaaaagagcggcgagatcgtgcccatggaggtgaacttcaacttcgacgaccccaacctgatcatcctgcctctggcctttggcaagagacagggcagagaattcatctggaacgacctgctgtccctggaaaccggcagcctgaagctggccaacggaagagtgatcgagaagacactgtacaacagaagaacccggcaggatgagcctgccctgttcgtggccctgaccttcgagcggcgggaggtcctggactcctccaatatcaaaccaatgaacctgatcggcgtggcaagaggcgaaaacatccccgccgtgatcgccctgaccgaccccgagggctgcccactgagccggtttaaggatagcctgggaaacccaacccacatcctgagaatcggcgagagctataaggagaagcagcggaccatccaggccaagaaggaggtggagcagcggagagccggcggctacagccggaagtacgccagcaaagccaagaatctggcagacgatatggtgagaaacaccgctagagatctgctgtactacgccgtgacccaggatgccatgctgatcttcgccaacctgagccggggcttcggccggcagggcaagcggaccttcatggccgagagacagtacacacggatggaggactggctgaccgccaagctggcctacgagggcctgagcaagacctacctgtccaagacactggcccagtacacctccaagacatgcagcaactgtgggtttaccatcaccagcgccgactacgacagggtgctggagaagctgaagaagacagcaacaggctggatgaccacaattaacggcaaggagctgaaggtggagggccagattacctactacaacagatacaagagacagaacgtagtcaaggacctgtccgtcgagctggatagactgagcgaagaatctgtgaacaacgacatctcctcctggacaaagggcagaagcggagaagctctgagcctcctgaagaaaagattctcccatagacccgtgcaggagaagttcgtgtgcctgaactgcggcttcgagacacacgcagccgagcaagccgccctgaacatcgccagatcctggctgttcctgcggagccaggagtacaagaaataccagacaaacaagacaaccggcaacaccgataagagagccttcgtcgagacctggcagtccttttaccggaagaagcttaaggaggtgtggaaacctgccgtgcggtctggcggatctggcggaggctccaccagccccaagaaaaagagaaaagtctaagctgccttctgcggggcttgccttctggccatgcccttcttctctcccttgcacctgtacctcttggtctttgaataaagcctgagtaggaaggctagcaaaaaaaaaaaaaaaaaaaaaaaaaaaaaaaaaaaaaaaaaaaaaaaaaaaaaaaaaaaaaaaaaaaaaaaaaaaaaaaa

SEQ ID NO: 9915 - RNA, 8787 nt, synthetic construct
  source 1..8787: mol_type = other RNA
aggaaataagagagaaaagaagagtaagaagaaatataagagccaccatggcccctaagaagaagcgtaaagtgagccggatgaaccacgaccaggagttcgacccccctaaggtgtaccctcccgtccccgccgagaagagaaagcccatccgggtcctgagcctgttcgatggcatcgccaccggtctgctggtgctgaaggacctgggcatccaggtggataggtacattgcctccgaggtgtgcgaggactccatcaccgtgggaatggtgcgtcatcagggcaagatcatgtacgtgggcgacgtgcggagcgtgacacagaagcatatccaggagtggggccctttcgacctggtgatcggcggcagcccttgcaatgacctgagcatcgtgaacccagcccggaagggcctgtacgagggaaccggcagactgttcttcgagttttacagactgctgcacgacgcccggcctaaggaaggcgacgaccggcccttcttttggctgttcgagaatgtggtggccatgggagtcagcgacaagcgggatattagccggttcctggagagcaaccccgtgatgatcgatgccaaggaagtgagcgccgcccaccgggccagatacttctggggcaatctgcctggcatgaacagacccctggccagcaccgtgaacgacaagctggagctgcaggagtgcctggagcacggccggatcgccaagttcagcaaggtgagaaccatcaccacccgaagcaacagcatcaaacaaggcaaggaccagcactttcctgtgttcatgaacgagaaggaggacatcctgtggtgtaccgagatggagagagtgttcgggttcccagtccactacacagatgtcagcaacatgtctagactggccagacagagactgctgggaagaagctggtccgtccctgtgatcagacacctgttcgcccctctgaaggagtacttcgcctgcgtgagcagcggcaacagcaacgccaacagccggggccccagcttctctagcggcctggtgccactgtccctgagagggagccacatgggccccatggagatctacaaaaccgtgagcgcctggaagcggcagcctgtgcgcgtgctgagcctgtttcggaatatcgataaagtcctgaaaagcctgggattcctggagagcggctctggctccggcggtggcaccctgaagtacgtggaggatgtgacaaacgtggtcagacgggatgtggagaagtggggccccttcgatctggtgtacggcagcacccaacccctgggcagctcttgtgaccggtgccctggctggtacatgtttcagttccaccggatcctgcagtacgccctgccgagacaggagtcccagcggccattcttttggattttcatggacaacttgctgctgaccgaggatgaccaggaaactaccactcggttcctgcagaccgaagccgtgaccctgcaggacgtgagaggccgggactaccagaacgccatgcgggtgtggtccaacatccctggactgaaaagcaagcacgcacctctgacccctaaagaagaggagtacctgcaggcccaggtgcggagcagaagcaagctggacgcccctaaggtggatctgctggtgaagaattgcctcctgcccctgagagagtacttcaagtatttcagccagaatagtctgcccctgggaggcagcggcggcggcaaggtgaagcagttcagcttccagagcctgctgaccttcaaggacctggccatcaacttcagcaaggaggagtgggagtacctgaacaccagccagaaggacctgtacaaggacgtgatgctggagaactacagcaacctggtgagcgtgggcctgagcgagagcaagcccgagctggtgacctgcctggagcagaacaaggagccctggatggtgcacatcgtggaggccgagggcctggagggcggcccaagcagcggcgcccctcctcccagcggcggcaggcggcccaagcagcggcgcccctcctcccagcggcggcagcccagccggctccccaacctctaccgaggagggcacctctgagtccgccacccccgagagcggccctggcacctccaccgagcccagcgagggcagcgcacccggcagccctgccggcagccccacctccacagaggagggaaccagcaccgagcccagcgaaggcagcgccccaggcaccagcaccgagcctagtgagcaggagattaaacggatcaacaagatcagaagaagacttgtgaaagacagcaacaccaagaaggccggcaagacaggccccatgaaaaccctgctggttagagtgatgacacccgatctgagagagcggctggaaaacctgagaaagaagcctgaaaatatcccccagcccatcagcaatacatctagagccaacctgaataagctgctgaccgattacaccgaaatgaagaaggcgatcctgcatgtgtactgggaagagttccagaaggaccctgtgggcctgatgagccgggtggcccagcctgccagcaagaagatcgatcagaacaagctgaaacctgagatggacgagaagggcaacctgaccaccgccggctttgcctgctctcagtgtggccagcccctgttcgtgtacaagctggagcaggtgtctgagaagggcaaggcttacaccaactacttcggacggtgcaatgtggccgagcacgaaaagctgatcctgctggcccagctgaagcccgagaaggatagcgacgaagccgtgacatatagcctgggaaagtttgggcagagggccctggatttctacagcattcatgtgaccaaggagtccacccaccccgtgaagcccctggcccagatcgccggaaacagatacgcctccggacctgtgggaaaggccctgagcgacgcatgtatgggcacaatcgcctccttcctgtctaagtaccaggacatcatcatcgaacaccagaaggtggtgaagggcaaccagaagagactggagagcctgcgggagctggccggcaaggaaaacctggaataccctagcgtgaccctgccacctcagcctcacaccaaggagggcgttgatgcctacaacgaagtgatcgcccgggtgcgaatgtgggtgaacctgaacctgtggcagaagctgaagctaagcagagatgatgccaagcctctgctgagactgaagggattcccttcctttcctctggtcgagagacaggccaacgaagtggactggtgggacatggtgtgtaacgtgaagaagctgatcaacgagaaaaaggaggatggcaaggtgttttggcagaatctggctggctacaagagacaggaagccctgagaccatacctgagcagcgaggaagatcggaagaagggaaagaaattcgctcggtaccagctgggcgacctgctgctgcacctggaaaagaagcacggcgaggactggggaaaggtgtacgacgaggcctgggagcggattgacaagaaagtggaaggcctgagcaagcacatcaagctggaagaggaacggagaagcgaggacgcccagagcaaggccgccctgaccgactggctgcgggctaaggccagcttcgtgatcgagggcctgaaggaggccgacaaggacgagttctgcagatgcgagctgaagctgcagaagtggtacggggacctgcggggaaagcccttcgccatcgaagccgagaacagcatcctggacatcagcggcttcagcaagcagtacaactgtgccttcatctggcagaaggacggcgtgaagaagctgaacctgtacctgatcatcaactacttcaagggcggcaagctgcggttcaagaagatcaaacctgaagccttcgaagccaacagattctacaccgtgatcaacaaaaagagcggcgagatcgtgcccatggaggtgaacttcaacttcgacgaccccaacctgatcatcctgcctctggcctttggcaagagacagggcagagaattcatctggaacgacctgctgtccctggaaaccggcagcctgaagctggccaacggaagagtgatcgagaagacactgtacaacagaagaacccggcaggatgagcctgccctgttcgtggccctgaccttcgagcggcgggaggtcctggactcctccaatatcaaaccaatgaacctgatcggcgtggcaagaggcgaaaacatccccgccgtgatcgccctgaccgaccccgagggctgcccactgagccggtttaaggatagcctgggaaacccaacccacatcctgagaatcggcgagagctataaggagaagcagcggaccatccaggccaagaaggaggtggagcagcggagagccggcggctacagccggaagtacgccagcaaagccaagaatctggcagacgatatggtgagaaacaccgctagagatctgctgtactacgccgtgacccaggatgccatgctgatcttcgccaacctgagccggggcttcggccggcagggcaagcggaccttcatggccgagagacagtacacacggatggaggactggctgaccgccaagctggcctacgagggcctgagcaagacctacctgtccaagacactggcccagtacacctccaagacatgcagcaactgtgggtttaccatcaccagcgccgactacgacagggtgctggagaagctgaagaagacagcaacaggctggatgaccacaattaacggcaaggagctgaaggtggagggccagattacctactacaacagatacaagagacagaacgtagtcaaggacctgtccgtcgagctggatagactgagcgaagaatctgtgaacaacgacatctcctcctggacaaagggcagaagcggagaagctctgagcctcctgaagaaaagattctcccatagacccgtgcaggagaagttcgtgtgcctgaactgcggcttcgagacacacgcagccgagcaagccgccctgaacatcgccagatcctggctgttcctgcggagccaggagtacaagaaataccagacaaacaagacaaccggcaacaccgataagagagccttcgtcgagacctggcagtccttttaccggaagaagcttaaggaggtgtggaaacctgccgtgcggtctggcggatctggcggaggctccaccagccccaagaaaaagagaaaagtctaagctgccttctgcggggcttgccttctggccatgcccttcttctctcccttgcacctgtacctcttggtctttgaataaagcctgagtaggaaggctagcaaaaaaaaaaaaaaaaaaaaaaaaaaaaaaaaaaaaaaaaaaaaaaaaaaaaaaaaaaaaaaaaaaaaaaaaaaaaaaaagcccagccggctccccaacctctaccgaggagggcacctctgagtccgccacccccgagagcggccctggcacctccaccgagcccagcgagggcagcgcacccggcagccctgccggcagccccacctccacagaggagggaaccagcaccgagcccagcgaaggcagcgccccaggcaccagcaccgagcctagtgagcaggagattaaacggatcaacaagatcagaagaagacttgtgaaagacagcaacaccaagaaggccggcaagacaggccccatgaaaaccctgctggttagagtgatgacacccgatctgagagagcggctggaaaacctgagaaagaagcctgaaaatatcccccagcccatcagcaatacatctagagccaacctgaataagctgctgaccgattacaccgaaatgaagaaggcgatcctgcatgtgtactgggaagagttccagaaggaccctgtgggcctgatgagccgggtggcccagcctgccagcaagaagatcgatcagaacaagctgaaacctgagatggacgagaagggcaacctgaccaccgccggctttgcctgctctcagtgtggccagcccctgttcgtgtacaagctggagcaggtgtctgagaagggcaaggcttacaccaactacttcggacggtgcaatgtggccgagcacgaaaagctgatcctgctggcccagctgaagcccgagaaggatagcgacgaagccgtgacatatagcctgggaaagtttgggcagagggccctggatttctacagcattcatgtgaccaaggagtccacccaccccgtgaagcccctggcccagatcgccggaaacagatacgcctccggacctgtgggaaaggccctgagcgacgcatgtatgggcacaatcgcctccttcctgtctaagtaccaggacatcatcatcgaacaccagaaggtggtgaagggcaaccagaagagactggagagcctgcgggagctggccggcaaggaaaacctggaataccctagcgtgaccctgccacctcagcctcacaccaaggagggcgttgatgcctacaacgaagtgatcgcccgggtgcgaatgtgggtgaacctgaacctgtggcagaagctgaagctaagcagagatgatgccaagcctctgctgagactgaagggattcccttcctttcctctggtcgagagacaggccaacgaagtggactggtgggacatggtgtgtaacgtgaagaagctgatcaacgagaaaaaggaggatggcaaggtgttttggcagaatctggctggctacaagagacaggaagccctgagaccatacctgagcagcgaggaagatcggaagaagggaaagaaattcgctcggtaccagctgggcgacctgctgctgcacctggaaaagaagcacggcgaggactggggaaaggtgtacgacgaggcctgggagcggattgacaagaaagtggaaggcctgagcaagcacatcaagctggaagaggaacggagaagcgaggacgcccagagcaaggccgccctgaccgactggctgcgggctaaggccagcttcgtgatcgagggcctgaaggaggccgacaaggacgagttctgcagatgcgagctgaagctgcagaagtggtacggggacctgcggggaaagcccttcgccatcgaagccgagaacagcatcctggacatcagcggcttcagcaagcagtacaactgtgccttcatctggcagaaggacggcgtgaagaagctgaacctgtacctgatcatcaactacttcaagggcggcaagctgcggttcaagaagatcaaacctgaagccttcgaagccaacagattctacaccgtgatcaacaaaaagagcggcgagatcgtgcccatggaggtgaacttcaacttcgacgaccccaacctgatcatcctgcctctggcctttggcaagagacagggcagagaattcatctggaacgacctgctgtccctggaaaccggcagcctgaagctggccaacggaagagtgatcgagaagacactgtacaacagaagaacccggcaggatgagcctgccctgttcgtggccctgaccttcgagcggcgggaggtcctggactcctccaatatcaaaccaatgaacctgatcggcgtggcaagaggcgaaaacatccccgccgtgatcgccctgaccgaccccgagggctgcccactgagccggtttaaggatagcctgggaaacccaacccacatcctgagaatcggcgagagctataaggagaagcagcggaccatccaggccaagaaggaggtggagcagcggagagccggcggctacagccggaagtacgccagcaaagccaagaatctggcagacgatatggtgagaaacaccgctagagatctgctgtactacgccgtgacccaggatgccatgctgatcttcgccaacctgagccggggcttcggccggcagggcaagcggaccttcatggccgagagacagtacacacggatggaggactggctgaccgccaagctggcctacgagggcctgagcaagacctacctgtccaagacactggcccagtacacctccaagacatgcagcaactgtgggtttaccatcaccagcgccgactacgacagggtgctggagaagctgaagaagacagcaacaggctggatgaccacaattaacggcaaggagctgaaggtggagggccagattacctactacaacagatacaagagacagaacgtagtcaaggacctgtccgtcgagctggatagactgagcgaagaatctgtgaacaacgacatctcctcctggacaaagggcagaagcggagaagctctgagcctcctgaagaaaagattctcccatagacccgtgcaggagaagttcgtgtgcctgaactgcggcttcgagacacacgcagccgagcaagccgccctgaacatcgccagatcctggctgttcctgcggagccaggagtacaagaaataccagacaaacaagacaaccggcaacaccgataagagagccttcgtcgagacctggcagtccttttaccggaagaagcttaaggaggtgtggaaacctgccgtgcggtctggcggatctggcggaggctccaccagccccaagaaaaagagaaaagtctaagctgccttctgcggggcttgccttctggccatgcccttcttctctcccttgcacctgtacctcttggtctttgaataaagcctgagtaggaaggctagcaaaaaaaaaaaaaaaaaaaaaaaaaaaaaaaaaaaaaaaaaaaaaaaaaaaaaaaaaaaaaaaaaaaaaaaaaaaaaaaa

SEQ ID NO: 9916 - RNA, 8787 nt, synthetic construct
  source 1..8787: mol_type = other RNA
aggaaataagagagaaaagaagagtaagaagaaatataagagccaccatggcccctaagaagaagcgtaaagtgagccggatgaaccacgaccaggagttcgacccccctaaggtgtaccctcccgtccccgccgagaagagaaagcccatccgggtcctgagcctgttcgatggcatcgccaccggtctgctggtgctgaaggacctgggcatccaggtggataggtacattgcctccgaggtgtgcgaggactccatcaccgtgggaatggtgcgtcatcagggcaagatcatgtacgtgggcgacgtgcggagcgtgacacagaagcatatccaggagtggggccctttcgacctggtgatcggcggcagcccttgcaatgacctgagcatcgtgaacccagcccggaagggcctgtacgagggaaccggcagactgttcttcgagttttacagactgctgcacgacgcccggcctaaggaaggcgacgaccggcccttcttttggctgttcgagaatgtggtggccatgggagtcagcgacaagcgggatattagccggttcctggagagcaaccccgtgatgatcgatgccaaggaagtgagcgccgcccaccgggccagatacttctggggcaatctgcctggcatgaacagacccctggccagcaccgtgaacgacaagctggagctgcaggagtgcctggagcacggccggatcgccaagttcagcaaggtgagaaccatcaccacccgaagcaacagcatcaaacaaggcaaggaccagcactttcctgtgttcatgaacgagaaggaggacatcctgtggtgtaccgagatggagagagtgttcgggttcccagtccactacacagatgtcagcaacatgtctagactggccagacagagactgctgggaagaagctggtccgtccctgtgatcagacacctgttcgcccctctgaaggagtacttcgcctgcgtgagcagcggcaacagcaacgccaacagccggggccccagcttctctagcggcctggtgccactgtccctgagagggagccacatgggccccatggagatctacaaaaccgtgagcgcctggaagcggcagcctgtgcgcgtgctgagcctgtttcggaatatcgataaagtcctgaaaagcctgggattcctggagagcggctctggctccggcggtggcaccctgaagtacgtggaggatgtgacaaacgtggtcagacgggatgtggagaagtggggccccttcgatctggtgtacggcagcacccaacccctgggcagctcttgtgaccggtgccctggctggtacatgtttcagttccaccggatcctgcagtacgccctgccgagacaggagtcccagcggccattcttttggattttcatggacaacttgctgctgaccgaggatgaccaggaaactaccactcggttcctgcagaccgaagccgtgaccctgcaggacgtgagaggccgggactaccagaacgccatgcgggtgtggtccaacatccctggactgaaaagcaagcacgcacctctgacccctaaagaagaggagtacctgcaggcccaggtgcggagcagaagcaagctggacgcccctaaggtggatctgctggtgaagaattgcctcctgcccctgagagagtacttcaagtatttcagccagaatagtctgcccctgggaggcagcggcggcggcttccaggacagcgtgaccttcgaggacgtggccgtgaggttcagcagcggcgagtggcagtgcctgaccagggcccagaggcacctgtacgccgacgtgatgctggagaactactggaacgtgatcagcgtgggcttcgccgtgcccaagccccccctgatcagccacctggagcagggcgccgagccctgcgtgcaggacctgcaggacggcggcttcctgagctgcagcttccccgtgagcggcggcccaagcagcggcgcccctcctcccagcggcggcaggcggcccaagcagcggcgcccctcctcccagcggcggcagcccagccggctccccaacctctaccgaggagggcacctctgagtccgccacccccgagagcggccctggcacctccaccgagcccagcgagggcagcgcacccggcagccctgccggcagccccacctccacagaggagggaaccagcaccgagcccagcgaaggcagcgccccaggcaccagcaccgagcctagtgagcaggagattaaacggatcaacaagatcagaagaagacttgtgaaagacagcaacaccaagaaggccggcaagacaggccccatgaaaaccctgctggttagagtgatgacacccgatctgagagagcggctggaaaacctgagaaagaagcctgaaaatatcccccagcccatcagcaatacatctagagccaacctgaataagctgctgaccgattacaccgaaatgaagaaggcgatcctgcatgtgtactgggaagagttccagaaggaccctgtgggcctgatgagccgggtggcccagcctgccagcaagaagatcgatcagaacaagctgaaacctgagatggacgagaagggcaacctgaccaccgccggctttgcctgctctcagtgtggccagcccctgttcgtgtacaagctggagcaggtgtctgagaagggcaaggcttacaccaactacttcggacggtgcaatgtggccgagcacgaaaagctgatcctgctggcccagctgaagcccgagaaggatagcgacgaagccgtgacatatagcctgggaaagtttgggcagagggccctggatttctacagcattcatgtgaccaaggagtccacccaccccgtgaagcccctggcccagatcgccggaaacagatacgcctccggacctgtgggaaaggccctgagcgacgcatgtatgggcacaatcgcctccttcctgtctaagtaccaggacatcatcatcgaacaccagaaggtggtgaagggcaaccagaagagactggagagcctgcgggagctggccggcaaggaaaacctggaataccctagcgtgaccctgccacctcagcctcacaccaaggagggcgttgatgcctacaacgaagtgatcgcccgggtgcgaatgtgggtgaacctgaacctgtggcagaagctgaagctaagcagagatgatgccaagcctctgctgagactgaagggattcccttcctttcctctggtcgagagacaggccaacgaagtggactggtgggacatggtgtgtaacgtgaagaagctgatcaacgagaaaaaggaggatggcaaggtgttttggcagaatctggctggctacaagagacaggaagccctgagaccatacctgagcagcgaggaagatcggaagaagggaaagaaattcgctcggtaccagctgggcgacctgctgctgcacctggaaaagaagcacggcgaggactggggaaaggtgtacgacgaggcctgggagcggattgacaagaaagtggaaggcctgagcaagcacatcaagctggaagaggaacggagaagcgaggacgcccagagcaaggccgccctgaccgactggctgcgggctaaggccagcttcgtgatcgagggcctgaaggaggccgacaaggacgagttctgcagatgcgagctgaagctgcagaagtggtacggggacctgcggggaaagcccttcgccatcgaagccgagaacagcatcctggacatcagcggcttcagcaagcagtacaactgtgccttcatctggcagaaggacggcgtgaagaagctgaacctgtacctgatcatcaactacttcaagggcggcaagctgcggttcaagaagatcaaacctgaagccttcgaagccaacagattctacaccgtgatcaacaaaaagagcggcgagatcgtgcccatggaggtgaacttcaacttcgacgaccccaacctgatcatcctgcctctggcctttggcaagagacagggcagagaattcatctggaacgacctgctgtccctggaaaccggcagcctgaagctggccaacggaagagtgatcgagaagacactgtacaacagaagaacccggcaggatgagcctgccctgttcgtggccctgaccttcgagcggcgggaggtcctggactcctccaatatcaaaccaatgaacctgatcggcgtggcaagaggcgaaaacatccccgccgtgatcgccctgaccgaccccgagggctgcccactgagccggtttaaggatagcctgggaaacccaacccacatcctgagaatcggcgagagctataaggagaagcagcggaccatccaggccaagaaggaggtggagcagcggagagccggcggctacagccggaagtacgccagcaaagccaagaatctggcagacgatatggtgagaaacaccgctagagatctgctgtactacgccgtgacccaggatgccatgctgatcttcgccaacctgagccggggcttcggccggcagggcaagcggaccttcatggccgagagacagtacacacggatggaggactggctgaccgccaagctggcctacgagggcctgagcaagacctacctgtccaagacactggcccagtacacctccaagacatgcagcaactgtgggtttaccatcaccagcgccgactacgacagggtgctggagaagctgaagaagacagcaacaggctggatgaccacaattaacggcaaggagctgaaggtggagggccagattacctactacaacagatacaagagacagaacgtagtcaaggacctgtccgtcgagctggatagactgagcgaagaatctgtgaacaacgacatctcctcctggacaaagggcagaagcggagaagctctgagcctcctgaagaaaagattctcccatagacccgtgcaggagaagttcgtgtgcctgaactgcggcttcgagacacacgcagccgagcaagccgccctgaacatcgccagatcctggctgttcctgcggagccaggagtacaagaaataccagacaaacaagacaaccggcaacaccgataagagagccttcgtcgagacctggcagtccttttaccggaagaagcttaaggaggtgtggaaacctgccgtgcggtctggcggatctggcggaggctccaccagccccaagaaaaagagaaaagtctaagctgccttctgcggggcttgccttctggccatgcccttcttctctcccttgcacctgtacctcttggtctttgaataaagcctgagtaggaaggctagcaaaaaaaaaaaaaaaaaaaaaaaaaaaaaaaaaaaaaaaaaaaaaaaaaaaaaaaaaaaaaaaaaaaaaaaaaaaaaaaagcccagccggctccccaacctctaccgaggagggcacctctgagtccgccacccccgagagcggccctggcacctccaccgagcccagcgagggcagcgcacccggcagccctgccggcagccccacctccacagaggagggaaccagcaccgagcccagcgaaggcagcgccccaggcaccagcaccgagcctagtgagcaggagattaaacggatcaacaagatcagaagaagacttgtgaaagacagcaacaccaagaaggccggcaagacaggccccatgaaaaccctgctggttagagtgatgacacccgatctgagagagcggctggaaaacctgagaaagaagcctgaaaatatcccccagcccatcagcaatacatctagagccaacctgaataagctgctgaccgattacaccgaaatgaagaaggcgatcctgcatgtgtactgggaagagttccagaaggaccctgtgggcctgatgagccgggtggcccagcctgccagcaagaagatcgatcagaacaagctgaaacctgagatggacgagaagggcaacctgaccaccgccggctttgcctgctctcagtgtggccagcccctgttcgtgtacaagctggagcaggtgtctgagaagggcaaggcttacaccaactacttcggacggtgcaatgtggccgagcacgaaaagctgatcctgctggcccagctgaagcccgagaaggatagcgacgaagccgtgacatatagcctgggaaagtttgggcagagggccctggatttctacagcattcatgtgaccaaggagtccacccaccccgtgaagcccctggcccagatcgccggaaacagatacgcctccggacctgtgggaaaggccctgagcgacgcatgtatgggcacaatcgcctccttcctgtctaagtaccaggacatcatcatcgaacaccagaaggtggtgaagggcaaccagaagagactggagagcctgcgggagctggccggcaaggaaaacctggaataccctagcgtgaccctgccacctcagcctcacaccaaggagggcgttgatgcctacaacgaagtgatcgcccgggtgcgaatgtgggtgaacctgaacctgtggcagaagctgaagctaagcagagatgatgccaagcctctgctgagactgaagggattcccttcctttcctctggtcgagagacaggccaacgaagtggactggtgggacatggtgtgtaacgtgaagaagctgatcaacgagaaaaaggaggatggcaaggtgttttggcagaatctggctggctacaagagacaggaagccctgagaccatacctgagcagcgaggaagatcggaagaagggaaagaaattcgctcggtaccagctgggcgacctgctgctgcacctggaaaagaagcacggcgaggactggggaaaggtgtacgacgaggcctgggagcggattgacaagaaagtggaaggcctgagcaagcacatcaagctggaagaggaacggagaagcgaggacgcccagagcaaggccgccctgaccgactggctgcgggctaaggccagcttcgtgatcgagggcctgaaggaggccgacaaggacgagttctgcagatgcgagctgaagctgcagaagtggtacggggacctgcggggaaagcccttcgccatcgaagccgagaacagcatcctggacatcagcggcttcagcaagcagtacaactgtgccttcatctggcagaaggacggcgtgaagaagctgaacctgtacctgatcatcaactacttcaagggcggcaagctgcggttcaagaagatcaaacctgaagccttcgaagccaacagattctacaccgtgatcaacaaaaagagcggcgagatcgtgcccatggaggtgaacttcaacttcgacgaccccaacctgatcatcctgcctctggcctttggcaagagacagggcagagaattcatctggaacgacctgctgtccctggaaaccggcagcctgaagctggccaacggaagagtgatcgagaagacactgtacaacagaagaacccggcaggatgagcctgccctgttcgtggccctgaccttcgagcggcgggaggtcctggactcctccaatatcaaaccaatgaacctgatcggcgtggcaagaggcgaaaacatccccgccgtgatcgccctgaccgaccccgagggctgcccactgagccggtttaaggatagcctgggaaacccaacccacatcctgagaatcggcgagagctataaggagaagcagcggaccatccaggccaagaaggaggtggagcagcggagagccggcggctacagccggaagtacgccagcaaagccaagaatctggcagacgatatggtgagaaacaccgctagagatctgctgtactacgccgtgacccaggatgccatgctgatcttcgccaacctgagccggggcttcggccggcagggcaagcggaccttcatggccgagagacagtacacacggatggaggactggctgaccgccaagctggcctacgagggcctgagcaagacctacctgtccaagacactggcccagtacacctccaagacatgcagcaactgtgggtttaccatcaccagcgccgactacgacagggtgctggagaagctgaagaagacagcaacaggctggatgaccacaattaacggcaaggagctgaaggtggagggccagattacctactacaacagatacaagagacagaacgtagtcaaggacctgtccgtcgagctggatagactgagcgaagaatctgtgaacaacgacatctcctcctggacaaagggcagaagcggagaagctctgagcctcctgaagaaaagattctcccatagacccgtgcaggagaagttcgtgtgcctgaactgcggcttcgagacacacgcagccgagcaagccgccctgaacatcgccagatcctggctgttcctgcggagccaggagtacaagaaataccagacaaacaagacaaccggcaacaccgataagagagccttcgtcgagacctggcagtccttttaccggaagaagcttaaggaggtgtggaaacctgccgtgcggtctggcggatctggcggaggctccaccagccccaagaaaaagagaaaagtctaagctgccttctgcggggcttgccttctggccatgcccttcttctctcccttgcacctgtacctcttggtctttgaataaagcctgagtaggaaggctagcaaaaaaaaaaaaaaaaaaaaaaaaaaaaaaaaaaaaaaaaaaaaaaaaaaaaaaaaaaaaaaaaaaaaaaaaaaaaaaaa

SEQ ID NO: 9917 - RNA, 8787 nt, synthetic construct
  source 1..8787: mol_type = other RNA
aggaaataagagagaaaagaagagtaagaagaaatataagagccaccatggcccctaagaagaagcgtaaagtgagccggatgaaccacgaccaggagttcgacccccctaaggtgtaccctcccgtccccgccgagaagagaaagcccatccgggtcctgagcctgttcgatggcatcgccaccggtctgctggtgctgaaggacctgggcatccaggtggataggtacattgcctccgaggtgtgcgaggactccatcaccgtgggaatggtgcgtcatcagggcaagatcatgtacgtgggcgacgtgcggagcgtgacacagaagcatatccaggagtggggccctttcgacctggtgatcggcggcagcccttgcaatgacctgagcatcgtgaacccagcccggaagggcctgtacgagggaaccggcagactgttcttcgagttttacagactgctgcacgacgcccggcctaaggaaggcgacgaccggcccttcttttggctgttcgagaatgtggtggccatgggagtcagcgacaagcgggatattagccggttcctggagagcaaccccgtgatgatcgatgccaaggaagtgagcgccgcccaccgggccagatacttctggggcaatctgcctggcatgaacagacccctggccagcaccgtgaacgacaagctggagctgcaggagtgcctggagcacggccggatcgccaagttcagcaaggtgagaaccatcaccacccgaagcaacagcatcaaacaaggcaaggaccagcactttcctgtgttcatgaacgagaaggaggacatcctgtggtgtaccgagatggagagagtgttcgggttcccagtccactacacagatgtcagcaacatgtctagactggccagacagagactgctgggaagaagctggtccgtccctgtgatcagacacctgttcgcccctctgaaggagtacttcgcctgcgtgagcagcggcaacagcaacgccaacagccggggccccagcttctctagcggcctggtgccactgtccctgagagggagccacatgggccccatggagatctacaaaaccgtgagcgcctggaagcggcagcctgtgcgcgtgctgagcctgtttcggaatatcgataaagtcctgaaaagcctgggattcctggagagcggctctggctccggcggtggcaccctgaagtacgtggaggatgtgacaaacgtggtcagacgggatgtggagaagtggggccccttcgatctggtgtacggcagcacccaacccctgggcagctcttgtgaccggtgccctggctggtacatgtttcagttccaccggatcctgcagtacgccctgccgagacaggagtcccagcggccattcttttggattttcatggacaacttgctgctgaccgaggatgaccaggaaactaccactcggttcctgcagaccgaagccgtgaccctgcaggacgtgagaggccgggactaccagaacgccatgcgggtgtggtccaacatccctggactgaaaagcaagcacgcacctctgacccctaaagaagaggagtacctgcaggcccaggtgcggagcagaagcaagctggacgcccctaaggtggatctgctggtgaagaattgcctcctgcccctgagagagtacttcaagtatttcagccagaatagtctgcccctgggaggcagcggcggcggcgcccaggcccccctgagcttcgaggacgtggccgtgggcttcagccccgaggagtggcagctgctggcccccgcccagaaggacctgtacagggacgtgatgctggagaactacaggaacctggtgagcctgggctaccaggccagcaagcccgacagcctgttccagctggagcacggcggccccccctgggccgtgggcggcgccgcccccaggcccccctgcgccgaggagatctgggagggcggcccaagcagcggcgcccctcctcccagcggcggcaggcggcccaagcagcggcgcccctcctcccagcggcggcagcccagccggctccccaacctctaccgaggagggcacctctgagtccgccacccccgagagcggccctggcacctccaccgagcccagcgagggcagcgcacccggcagccctgccggcagccccacctccacagaggagggaaccagcaccgagcccagcgaaggcagcgccccaggcaccagcaccgagcctagtgagcaggagattaaacggatcaacaagatcagaagaagacttgtgaaagacagcaacaccaagaaggccggcaagacaggccccatgaaaaccctgctggttagagtgatgacacccgatctgagagagcggctggaaaacctgagaaagaagcctgaaaatatcccccagcccatcagcaatacatctagagccaacctgaataagctgctgaccgattacaccgaaatgaagaaggcgatcctgcatgtgtactgggaagagttccagaaggaccctgtgggcctgatgagccgggtggcccagcctgccagcaagaagatcgatcagaacaagctgaaacctgagatggacgagaagggcaacctgaccaccgccggctttgcctgctctcagtgtggccagcccctgttcgtgtacaagctggagcaggtgtctgagaagggcaaggcttacaccaactacttcggacggtgcaatgtggccgagcacgaaaagctgatcctgctggcccagctgaagcccgagaaggatagcgacgaagccgtgacatatagcctgggaaagtttgggcagagggccctggatttctacagcattcatgtgaccaaggagtccacccaccccgtgaagcccctggcccagatcgccggaaacagatacgcctccggacctgtgggaaaggccctgagcgacgcatgtatgggcacaatcgcctccttcctgtctaagtaccaggacatcatcatcgaacaccagaaggtggtgaagggcaaccagaagagactggagagcctgcgggagctggccggcaaggaaaacctggaataccctagcgtgaccctgccacctcagcctcacaccaaggagggcgttgatgcctacaacgaagtgatcgcccgggtgcgaatgtgggtgaacctgaacctgtggcagaagctgaagctaagcagagatgatgccaagcctctgctgagactgaagggattcccttcctttcctctggtcgagagacaggccaacgaagtggactggtgggacatggtgtgtaacgtgaagaagctgatcaacgagaaaaaggaggatggcaaggtgttttggcagaatctggctggctacaagagacaggaagccctgagaccatacctgagcagcgaggaagatcggaagaagggaaagaaattcgctcggtaccagctgggcgacctgctgctgcacctggaaaagaagcacggcgaggactggggaaaggtgtacgacgaggcctgggagcggattgacaagaaagtggaaggcctgagcaagcacatcaagctggaagaggaacggagaagcgaggacgcccagagcaaggccgccctgaccgactggctgcgggctaaggccagcttcgtgatcgagggcctgaaggaggccgacaaggacgagttctgcagatgcgagctgaagctgcagaagtggtacggggacctgcggggaaagcccttcgccatcgaagccgagaacagcatcctggacatcagcggcttcagcaagcagtacaactgtgccttcatctggcagaaggacggcgtgaagaagctgaacctgtacctgatcatcaactacttcaagggcggcaagctgcggttcaagaagatcaaacctgaagccttcgaagccaacagattctacaccgtgatcaacaaaaagagcggcgagatcgtgcccatggaggtgaacttcaacttcgacgaccccaacctgatcatcctgcctctggcctttggcaagagacagggcagagaattcatctggaacgacctgctgtccctggaaaccggcagcctgaagctggccaacggaagagtgatcgagaagacactgtacaacagaagaacccggcaggatgagcctgccctgttcgtggccctgaccttcgagcggcgggaggtcctggactcctccaatatcaaaccaatgaacctgatcggcgtggcaagaggcgaaaacatccccgccgtgatcgccctgaccgaccccgagggctgcccactgagccggtttaaggatagcctgggaaacccaacccacatcctgagaatcggcgagagctataaggagaagcagcggaccatccaggccaagaaggaggtggagcagcggagagccggcggctacagccggaagtacgccagcaaagccaagaatctggcagacgatatggtgagaaacaccgctagagatctgctgtactacgccgtgacccaggatgccatgctgatcttcgccaacctgagccggggcttcggccggcagggcaagcggaccttcatggccgagagacagtacacacggatggaggactggctgaccgccaagctggcctacgagggcctgagcaagacctacctgtccaagacactggcccagtacacctccaagacatgcagcaactgtgggtttaccatcaccagcgccgactacgacagggtgctggagaagctgaagaagacagcaacaggctggatgaccacaattaacggcaaggagctgaaggtggagggccagattacctactacaacagatacaagagacagaacgtagtcaaggacctgtccgtcgagctggatagactgagcgaagaatctgtgaacaacgacatctcctcctggacaaagggcagaagcggagaagctctgagcctcctgaagaaaagattctcccatagacccgtgcaggagaagttcgtgtgcctgaactgcggcttcgagacacacgcagccgagcaagccgccctgaacatcgccagatcctggctgttcctgcggagccaggagtacaagaaataccagacaaacaagacaaccggcaacaccgataagagagccttcgtcgagacctggcagtccttttaccggaagaagcttaaggaggtgtggaaacctgccgtgcggtctggcggatctggcggaggctccaccagccccaagaaaaagagaaaagtctaagctgccttctgcggggcttgccttctggccatgcccttcttctctcccttgcacctgtacctcttggtctttgaataaagcctgagtaggaaggctagcaaaaaaaaaaaaaaaaaaaaaaaaaaaaaaaaaaaaaaaaaaaaaaaaaaaaaaaaaaaaaaaaaaaaaaaaaaaaaaaagcccagccggctccccaacctctaccgaggagggcacctctgagtccgccacccccgagagcggccctggcacctccaccgagcccagcgagggcagcgcacccggcagccctgccggcagccccacctccacagaggagggaaccagcaccgagcccagcgaaggcagcgccccaggcaccagcaccgagcctagtgagcaggagattaaacggatcaacaagatcagaagaagacttgtgaaagacagcaacaccaagaaggccggcaagacaggccccatgaaaaccctgctggttagagtgatgacacccgatctgagagagcggctggaaaacctgagaaagaagcctgaaaatatcccccagcccatcagcaatacatctagagccaacctgaataagctgctgaccgattacaccgaaatgaagaaggcgatcctgcatgtgtactgggaagagttccagaaggaccctgtgggcctgatgagccgggtggcccagcctgccagcaagaagatcgatcagaacaagctgaaacctgagatggacgagaagggcaacctgaccaccgccggctttgcctgctctcagtgtggccagcccctgttcgtgtacaagctggagcaggtgtctgagaagggcaaggcttacaccaactacttcggacggtgcaatgtggccgagcacgaaaagctgatcctgctggcccagctgaagcccgagaaggatagcgacgaagccgtgacatatagcctgggaaagtttgggcagagggccctggatttctacagcattcatgtgaccaaggagtccacccaccccgtgaagcccctggcccagatcgccggaaacagatacgcctccggacctgtgggaaaggccctgagcgacgcatgtatgggcacaatcgcctccttcctgtctaagtaccaggacatcatcatcgaacaccagaaggtggtgaagggcaaccagaagagactggagagcctgcgggagctggccggcaaggaaaacctggaataccctagcgtgaccctgccacctcagcctcacaccaaggagggcgttgatgcctacaacgaagtgatcgcccgggtgcgaatgtgggtgaacctgaacctgtggcagaagctgaagctaagcagagatgatgccaagcctctgctgagactgaagggattcccttcctttcctctggtcgagagacaggccaacgaagtggactggtgggacatggtgtgtaacgtgaagaagctgatcaacgagaaaaaggaggatggcaaggtgttttggcagaatctggctggctacaagagacaggaagccctgagaccatacctgagcagcgaggaagatcggaagaagggaaagaaattcgctcggtaccagctgggcgacctgctgctgcacctggaaaagaagcacggcgaggactggggaaaggtgtacgacgaggcctgggagcggattgacaagaaagtggaaggcctgagcaagcacatcaagctggaagaggaacggagaagcgaggacgcccagagcaaggccgccctgaccgactggctgcgggctaaggccagcttcgtgatcgagggcctgaaggaggccgacaaggacgagttctgcagatgcgagctgaagctgcagaagtggtacggggacctgcggggaaagcccttcgccatcgaagccgagaacagcatcctggacatcagcggcttcagcaagcagtacaactgtgccttcatctggcagaaggacggcgtgaagaagctgaacctgtacctgatcatcaactacttcaagggcggcaagctgcggttcaagaagatcaaacctgaagccttcgaagccaacagattctacaccgtgatcaacaaaaagagcggcgagatcgtgcccatggaggtgaacttcaacttcgacgaccccaacctgatcatcctgcctctggcctttggcaagagacagggcagagaattcatctggaacgacctgctgtccctggaaaccggcagcctgaagctggccaacggaagagtgatcgagaagacactgtacaacagaagaacccggcaggatgagcctgccctgttcgtggccctgaccttcgagcggcgggaggtcctggactcctccaatatcaaaccaatgaacctgatcggcgtggcaagaggcgaaaacatccccgccgtgatcgccctgaccgaccccgagggctgcccactgagccggtttaaggatagcctgggaaacccaacccacatcctgagaatcggcgagagctataaggagaagcagcggaccatccaggccaagaaggaggtggagcagcggagagccggcggctacagccggaagtacgccagcaaagccaagaatctggcagacgatatggtgagaaacaccgctagagatctgctgtactacgccgtgacccaggatgccatgctgatcttcgccaacctgagccggggcttcggccggcagggcaagcggaccttcatggccgagagacagtacacacggatggaggactggctgaccgccaagctggcctacgagggcctgagcaagacctacctgtccaagacactggcccagtacacctccaagacatgcagcaactgtgggtttaccatcaccagcgccgactacgacagggtgctggagaagctgaagaagacagcaacaggctggatgaccacaattaacggcaaggagctgaaggtggagggccagattacctactacaacagatacaagagacagaacgtagtcaaggacctgtccgtcgagctggatagactgagcgaagaatctgtgaacaacgacatctcctcctggacaaagggcagaagcggagaagctctgagcctcctgaagaaaagattctcccatagacccgtgcaggagaagttcgtgtgcctgaactgcggcttcgagacacacgcagccgagcaagccgccctgaacatcgccagatcctggctgttcctgcggagccaggagtacaagaaataccagacaaacaagacaaccggcaacaccgataagagagccttcgtcgagacctggcagtccttttaccggaagaagcttaaggaggtgtggaaacctgccgtgcggtctggcggatctggcggaggctccaccagccccaagaaaaagagaaaagtctaagctgccttctgcggggcttgccttctggccatgcccttcttctctcccttgcacctgtacctcttggtctttgaataaagcctgagtaggaaggctagcaaaaaaaaaaaaaaaaaaaaaaaaaaaaaaaaaaaaaaaaaaaaaaaaaaaaaaaaaaaaaaaaaaaaaaaaaaaaaaaa

SEQ ID NO: 9918 - RNA, 8787 nt, synthetic construct
  source 1..8787: mol_type = other RNA
aggaaataagagagaaaagaagagtaagaagaaatataagagccaccatggcccctaagaagaagcgtaaagtgagccggatgaaccacgaccaggagttcgacccccctaaggtgtaccctcccgtccccgccgagaagagaaagcccatccgggtcctgagcctgttcgatggcatcgccaccggtctgctggtgctgaaggacctgggcatccaggtggataggtacattgcctccgaggtgtgcgaggactccatcaccgtgggaatggtgcgtcatcagggcaagatcatgtacgtgggcgacgtgcggagcgtgacacagaagcatatccaggagtggggccctttcgacctggtgatcggcggcagcccttgcaatgacctgagcatcgtgaacccagcccggaagggcctgtacgagggaaccggcagactgttcttcgagttttacagactgctgcacgacgcccggcctaaggaaggcgacgaccggcccttcttttggctgttcgagaatgtggtggccatgggagtcagcgacaagcgggatattagccggttcctggagagcaaccccgtgatgatcgatgccaaggaagtgagcgccgcccaccgggccagatacttctggggcaatctgcctggcatgaacagacccctggccagcaccgtgaacgacaagctggagctgcaggagtgcctggagcacggccggatcgccaagttcagcaaggtgagaaccatcaccacccgaagcaacagcatcaaacaaggcaaggaccagcactttcctgtgttcatgaacgagaaggaggacatcctgtggtgtaccgagatggagagagtgttcgggttcccagtccactacacagatgtcagcaacatgtctagactggccagacagagactgctgggaagaagctggtccgtccctgtgatcagacacctgttcgcccctctgaaggagtacttcgcctgcgtgagcagcggcaacagcaacgccaacagccggggccccagcttctctagcggcctggtgccactgtccctgagagggagccacatgggccccatggagatctacaaaaccgtgagcgcctggaagcggcagcctgtgcgcgtgctgagcctgtttcggaatatcgataaagtcctgaaaagcctgggattcctggagagcggctctggctccggcggtggcaccctgaagtacgtggaggatgtgacaaacgtggtcagacgggatgtggagaagtggggccccttcgatctggtgtacggcagcacccaacccctgggcagctcttgtgaccggtgccctggctggtacatgtttcagttccaccggatcctgcagtacgccctgccgagacaggagtcccagcggccattcttttggattttcatggacaacttgctgctgaccgaggatgaccaggaaactaccactcggttcctgcagaccgaagccgtgaccctgcaggacgtgagaggccgggactaccagaacgccatgcgggtgtggtccaacatccctggactgaaaagcaagcacgcacctctgacccctaaagaagaggagtacctgcaggcccaggtgcggagcagaagcaagctggacgcccctaaggtggatctgctggtgaagaattgcctcctgcccctgagagagtacttcaagtatttcagccagaatagtctgcccctgggaggcagcggcggcggcgcccacaggagcctgatgttcagcgacgtgagcatcgtgttcagccaggaggagtgggagtacctggacctggagcagagggacctgtacagggacgtgatgctggagaactacagcaacctggtgagcctgggctgcttcatcagcaagcccgacgtgatcagcctgctggagcagggcaaggagccctggaaggtggtgagaaagggcaggaggaggtacgccgcccccatgagcatcgccggcggcccaagcagcggcgcccctcctcccagcggcggcaggcggcccaagcagcggcgcccctcctcccagcggcggcagcccagccggctccccaacctctaccgaggagggcacctctgagtccgccacccccgagagcggccctggcacctccaccgagcccagcgagggcagcgcacccggcagccctgccggcagccccacctccacagaggagggaaccagcaccgagcccagcgaaggcagcgccccaggcaccagcaccgagcctagtgagcaggagattaaacggatcaacaagatcagaagaagacttgtgaaagacagcaacaccaagaaggccggcaagacaggccccatgaaaaccctgctggttagagtgatgacacccgatctgagagagcggctggaaaacctgagaaagaagcctgaaaatatcccccagcccatcagcaatacatctagagccaacctgaataagctgctgaccgattacaccgaaatgaagaaggcgatcctgcatgtgtactgggaagagttccagaaggaccctgtgggcctgatgagccgggtggcccagcctgccagcaagaagatcgatcagaacaagctgaaacctgagatggacgagaagggcaacctgaccaccgccggctttgcctgctctcagtgtggccagcccctgttcgtgtacaagctggagcaggtgtctgagaagggcaaggcttacaccaactacttcggacggtgcaatgtggccgagcacgaaaagctgatcctgctggcccagctgaagcccgagaaggatagcgacgaagccgtgacatatagcctgggaaagtttgggcagagggccctggatttctacagcattcatgtgaccaaggagtccacccaccccgtgaagcccctggcccagatcgccggaaacagatacgcctccggacctgtgggaaaggccctgagcgacgcatgtatgggcacaatcgcctccttcctgtctaagtaccaggacatcatcatcgaacaccagaaggtggtgaagggcaaccagaagagactggagagcctgcgggagctggccggcaaggaaaacctggaataccctagcgtgaccctgccacctcagcctcacaccaaggagggcgttgatgcctacaacgaagtgatcgcccgggtgcgaatgtgggtgaacctgaacctgtggcagaagctgaagctaagcagagatgatgccaagcctctgctgagactgaagggattcccttcctttcctctggtcgagagacaggccaacgaagtggactggtgggacatggtgtgtaacgtgaagaagctgatcaacgagaaaaaggaggatggcaaggtgttttggcagaatctggctggctacaagagacaggaagccctgagaccatacctgagcagcgaggaagatcggaagaagggaaagaaattcgctcggtaccagctgggcgacctgctgctgcacctggaaaagaagcacggcgaggactggggaaaggtgtacgacgaggcctgggagcggattgacaagaaagtggaaggcctgagcaagcacatcaagctggaagaggaacggagaagcgaggacgcccagagcaaggccgccctgaccgactggctgcgggctaaggccagcttcgtgatcgagggcctgaaggaggccgacaaggacgagttctgcagatgcgagctgaagctgcagaagtggtacggggacctgcggggaaagcccttcgccatcgaagccgagaacagcatcctggacatcagcggcttcagcaagcagtacaactgtgccttcatctggcagaaggacggcgtgaagaagctgaacctgtacctgatcatcaactacttcaagggcggcaagctgcggttcaagaagatcaaacctgaagccttcgaagccaacagattctacaccgtgatcaacaaaaagagcggcgagatcgtgcccatggaggtgaacttcaacttcgacgaccccaacctgatcatcctgcctctggcctttggcaagagacagggcagagaattcatctggaacgacctgctgtccctggaaaccggcagcctgaagctggccaacggaagagtgatcgagaagacactgtacaacagaagaacccggcaggatgagcctgccctgttcgtggccctgaccttcgagcggcgggaggtcctggactcctccaatatcaaaccaatgaacctgatcggcgtggcaagaggcgaaaacatccccgccgtgatcgccctgaccgaccccgagggctgcccactgagccggtttaaggatagcctgggaaacccaacccacatcctgagaatcggcgagagctataaggagaagcagcggaccatccaggccaagaaggaggtggagcagcggagagccggcggctacagccggaagtacgccagcaaagccaagaatctggcagacgatatggtgagaaacaccgctagagatctgctgtactacgccgtgacccaggatgccatgctgatcttcgccaacctgagccggggcttcggccggcagggcaagcggaccttcatggccgagagacagtacacacggatggaggactggctgaccgccaagctggcctacgagggcctgagcaagacctacctgtccaagacactggcccagtacacctccaagacatgcagcaactgtgggtttaccatcaccagcgccgactacgacagggtgctggagaagctgaagaagacagcaacaggctggatgaccacaattaacggcaaggagctgaaggtggagggccagattacctactacaacagatacaagagacagaacgtagtcaaggacctgtccgtcgagctggatagactgagcgaagaatctgtgaacaacgacatctcctcctggacaaagggcagaagcggagaagctctgagcctcctgaagaaaagattctcccatagacccgtgcaggagaagttcgtgtgcctgaactgcggcttcgagacacacgcagccgagcaagccgccctgaacatcgccagatcctggctgttcctgcggagccaggagtacaagaaataccagacaaacaagacaaccggcaacaccgataagagagccttcgtcgagacctggcagtccttttaccggaagaagcttaaggaggtgtggaaacctgccgtgcggtctggcggatctggcggaggctccaccagccccaagaaaaagagaaaagtctaagctgccttctgcggggcttgccttctggccatgcccttcttctctcccttgcacctgtacctcttggtctttgaataaagcctgagtaggaaggctagcaaaaaaaaaaaaaaaaaaaaaaaaaaaaaaaaaaaaaaaaaaaaaaaaaaaaaaaaaaaaaaaaaaaaaaaaaaaaaaaagcccagccggctccccaacctctaccgaggagggcacctctgagtccgccacccccgagagcggccctggcacctccaccgagcccagcgagggcagcgcacccggcagccctgccggcagccccacctccacagaggagggaaccagcaccgagcccagcgaaggcagcgccccaggcaccagcaccgagcctagtgagcaggagattaaacggatcaacaagatcagaagaagacttgtgaaagacagcaacaccaagaaggccggcaagacaggccccatgaaaaccctgctggttagagtgatgacacccgatctgagagagcggctggaaaacctgagaaagaagcctgaaaatatcccccagcccatcagcaatacatctagagccaacctgaataagctgctgaccgattacaccgaaatgaagaaggcgatcctgcatgtgtactgggaagagttccagaaggaccctgtgggcctgatgagccgggtggcccagcctgccagcaagaagatcgatcagaacaagctgaaacctgagatggacgagaagggcaacctgaccaccgccggctttgcctgctctcagtgtggccagcccctgttcgtgtacaagctggagcaggtgtctgagaagggcaaggcttacaccaactacttcggacggtgcaatgtggccgagcacgaaaagctgatcctgctggcccagctgaagcccgagaaggatagcgacgaagccgtgacatatagcctgggaaagtttgggcagagggccctggatttctacagcattcatgtgaccaaggagtccacccaccccgtgaagcccctggcccagatcgccggaaacagatacgcctccggacctgtgggaaaggccctgagcgacgcatgtatgggcacaatcgcctccttcctgtctaagtaccaggacatcatcatcgaacaccagaaggtggtgaagggcaaccagaagagactggagagcctgcgggagctggccggcaaggaaaacctggaataccctagcgtgaccctgccacctcagcctcacaccaaggagggcgttgatgcctacaacgaagtgatcgcccgggtgcgaatgtgggtgaacctgaacctgtggcagaagctgaagctaagcagagatgatgccaagcctctgctgagactgaagggattcccttcctttcctctggtcgagagacaggccaacgaagtggactggtgggacatggtgtgtaacgtgaagaagctgatcaacgagaaaaaggaggatggcaaggtgttttggcagaatctggctggctacaagagacaggaagccctgagaccatacctgagcagcgaggaagatcggaagaagggaaagaaattcgctcggtaccagctgggcgacctgctgctgcacctggaaaagaagcacggcgaggactggggaaaggtgtacgacgaggcctgggagcggattgacaagaaagtggaaggcctgagcaagcacatcaagctggaagaggaacggagaagcgaggacgcccagagcaaggccgccctgaccgactggctgcgggctaaggccagcttcgtgatcgagggcctgaaggaggccgacaaggacgagttctgcagatgcgagctgaagctgcagaagtggtacggggacctgcggggaaagcccttcgccatcgaagccgagaacagcatcctggacatcagcggcttcagcaagcagtacaactgtgccttcatctggcagaaggacggcgtgaagaagctgaacctgtacctgatcatcaactacttcaagggcggcaagctgcggttcaagaagatcaaacctgaagccttcgaagccaacagattctacaccgtgatcaacaaaaagagcggcgagatcgtgcccatggaggtgaacttcaacttcgacgaccccaacctgatcatcctgcctctggcctttggcaagagacagggcagagaattcatctggaacgacctgctgtccctggaaaccggcagcctgaagctggccaacggaagagtgatcgagaagacactgtacaacagaagaacccggcaggatgagcctgccctgttcgtggccctgaccttcgagcggcgggaggtcctggactcctccaatatcaaaccaatgaacctgatcggcgtggcaagaggcgaaaacatccccgccgtgatcgccctgaccgaccccgagggctgcccactgagccggtttaaggatagcctgggaaacccaacccacatcctgagaatcggcgagagctataaggagaagcagcggaccatccaggccaagaaggaggtggagcagcggagagccggcggctacagccggaagtacgccagcaaagccaagaatctggcagacgatatggtgagaaacaccgctagagatctgctgtactacgccgtgacccaggatgccatgctgatcttcgccaacctgagccggggcttcggccggcagggcaagcggaccttcatggccgagagacagtacacacggatggaggactggctgaccgccaagctggcctacgagggcctgagcaagacctacctgtccaagacactggcccagtacacctccaagacatgcagcaactgtgggtttaccatcaccagcgccgactacgacagggtgctggagaagctgaagaagacagcaacaggctggatgaccacaattaacggcaaggagctgaaggtggagggccagattacctactacaacagatacaagagacagaacgtagtcaaggacctgtccgtcgagctggatagactgagcgaagaatctgtgaacaacgacatctcctcctggacaaagggcagaagcggagaagctctgagcctcctgaagaaaagattctcccatagacccgtgcaggagaagttcgtgtgcctgaactgcggcttcgagacacacgcagccgagcaagccgccctgaacatcgccagatcctggctgttcctgcggagccaggagtacaagaaataccagacaaacaagacaaccggcaacaccgataagagagccttcgtcgagacctggcagtccttttaccggaagaagcttaaggaggtgtggaaacctgccgtgcggtctggcggatctggcggaggctccaccagccccaagaaaaagagaaaagtctaagctgccttctgcggggcttgccttctggccatgcccttcttctctcccttgcacctgtacctcttggtctttgaataaagcctgagtaggaaggctagcaaaaaaaaaaaaaaaaaaaaaaaaaaaaaaaaaaaaaaaaaaaaaaaaaaaaaaaaaaaaaaaaaaaaaaaaaaaaaaaa

SEQ ID NO: 9919 - RNA, 8787 nt, synthetic construct
  source 1..8787: mol_type = other RNA
aggaaataagagagaaaagaagagtaagaagaaatataagagccaccatggcccctaagaagaagcgtaaagtgagccggatgaaccacgaccaggagttcgacccccctaaggtgtaccctcccgtccccgccgagaagagaaagcccatccgggtcctgagcctgttcgatggcatcgccaccggtctgctggtgctgaaggacctgggcatccaggtggataggtacattgcctccgaggtgtgcgaggactccatcaccgtgggaatggtgcgtcatcagggcaagatcatgtacgtgggcgacgtgcggagcgtgacacagaagcatatccaggagtggggccctttcgacctggtgatcggcggcagcccttgcaatgacctgagcatcgtgaacccagcccggaagggcctgtacgagggaaccggcagactgttcttcgagttttacagactgctgcacgacgcccggcctaaggaaggcgacgaccggcccttcttttggctgttcgagaatgtggtggccatgggagtcagcgacaagcgggatattagccggttcctggagagcaaccccgtgatgatcgatgccaaggaagtgagcgccgcccaccgggccagatacttctggggcaatctgcctggcatgaacagacccctggccagcaccgtgaacgacaagctggagctgcaggagtgcctggagcacggccggatcgccaagttcagcaaggtgagaaccatcaccacccgaagcaacagcatcaaacaaggcaaggaccagcactttcctgtgttcatgaacgagaaggaggacatcctgtggtgtaccgagatggagagagtgttcgggttcccagtccactacacagatgtcagcaacatgtctagactggccagacagagactgctgggaagaagctggtccgtccctgtgatcagacacctgttcgcccctctgaaggagtacttcgcctgcgtgagcagcggcaacagcaacgccaacagccggggccccagcttctctagcggcctggtgccactgtccctgagagggagccacatgggccccatggagatctacaaaaccgtgagcgcctggaagcggcagcctgtgcgcgtgctgagcctgtttcggaatatcgataaagtcctgaaaagcctgggattcctggagagcggctctggctccggcggtggcaccctgaagtacgtggaggatgtgacaaacgtggtcagacgggatgtggagaagtggggccccttcgatctggtgtacggcagcacccaacccctgggcagctcttgtgaccggtgccctggctggtacatgtttcagttccaccggatcctgcagtacgccctgccgagacaggagtcccagcggccattcttttggattttcatggacaacttgctgctgaccgaggatgaccaggaaactaccactcggttcctgcagaccgaagccgtgaccctgcaggacgtgagaggccgggactaccagaacgccatgcgggtgtggtccaacatccctggactgaaaagcaagcacgcacctctgacccctaaagaagaggagtacctgcaggcccaggtgcggagcagaagcaagctggacgcccctaaggtggatctgctggtgaagaattgcctcctgcccctgagagagtacttcaagtatttcagccagaatagtctgcccctgggaggcagcggcggcggcagcctgggccccctgagcttcaaggacgtggccgtggccttcagccaggaggagtggcagcagctggaccccgaggagaggaccacctacagggacgtgatgctggagacctacagcaacctggtgagcgtgggctacgacatcatcaagcccgacgtgatcatcaagctggagcagggcgaggagccctggatcgtggagggcgccttcagcccccagagctaccccgacgagatcaggcacggcggcccaagcagcggcgcccctcctcccagcggcggcaggcggcccaagcagcggcgcccctcctcccagcggcggcagcccagccggctccccaacctctaccgaggagggcacctctgagtccgccacccccgagagcggccctggcacctccaccgagcccagcgagggcagcgcacccggcagccctgccggcagccccacctccacagaggagggaaccagcaccgagcccagcgaaggcagcgccccaggcaccagcaccgagcctagtgagcaggagattaaacggatcaacaagatcagaagaagacttgtgaaagacagcaacaccaagaaggccggcaagacaggccccatgaaaaccctgctggttagagtgatgacacccgatctgagagagcggctggaaaacctgagaaagaagcctgaaaatatcccccagcccatcagcaatacatctagagccaacctgaataagctgctgaccgattacaccgaaatgaagaaggcgatcctgcatgtgtactgggaagagttccagaaggaccctgtgggcctgatgagccgggtggcccagcctgccagcaagaagatcgatcagaacaagctgaaacctgagatggacgagaagggcaacctgaccaccgccggctttgcctgctctcagtgtggccagcccctgttcgtgtacaagctggagcaggtgtctgagaagggcaaggcttacaccaactacttcggacggtgcaatgtggccgagcacgaaaagctgatcctgctggcccagctgaagcccgagaaggatagcgacgaagccgtgacatatagcctgggaaagtttgggcagagggccctggatttctacagcattcatgtgaccaaggagtccacccaccccgtgaagcccctggcccagatcgccggaaacagatacgcctccggacctgtgggaaaggccctgagcgacgcatgtatgggcacaatcgcctccttcctgtctaagtaccaggacatcatcatcgaacaccagaaggtggtgaagggcaaccagaagagactggagagcctgcgggagctggccggcaaggaaaacctggaataccctagcgtgaccctgccacctcagcctcacaccaaggagggcgttgatgcctacaacgaagtgatcgcccgggtgcgaatgtgggtgaacctgaacctgtggcagaagctgaagctaagcagagatgatgccaagcctctgctgagactgaagggattcccttcctttcctctggtcgagagacaggccaacgaagtggactggtgggacatggtgtgtaacgtgaagaagctgatcaacgagaaaaaggaggatggcaaggtgttttggcagaatctggctggctacaagagacaggaagccctgagaccatacctgagcagcgaggaagatcggaagaagggaaagaaattcgctcggtaccagctgggcgacctgctgctgcacctggaaaagaagcacggcgaggactggggaaaggtgtacgacgaggcctgggagcggattgacaagaaagtggaaggcctgagcaagcacatcaagctggaagaggaacggagaagcgaggacgcccagagcaaggccgccctgaccgactggctgcgggctaaggccagcttcgtgatcgagggcctgaaggaggccgacaaggacgagttctgcagatgcgagctgaagctgcagaagtggtacggggacctgcggggaaagcccttcgccatcgaagccgagaacagcatcctggacatcagcggcttcagcaagcagtacaactgtgccttcatctggcagaaggacggcgtgaagaagctgaacctgtacctgatcatcaactacttcaagggcggcaagctgcggttcaagaagatcaaacctgaagccttcgaagccaacagattctacaccgtgatcaacaaaaagagcggcgagatcgtgcccatggaggtgaacttcaacttcgacgaccccaacctgatcatcctgcctctggcctttggcaagagacagggcagagaattcatctggaacgacctgctgtccctggaaaccggcagcctgaagctggccaacggaagagtgatcgagaagacactgtacaacagaagaacccggcaggatgagcctgccctgttcgtggccctgaccttcgagcggcgggaggtcctggactcctccaatatcaaaccaatgaacctgatcggcgtggcaagaggcgaaaacatccccgccgtgatcgccctgaccgaccccgagggctgcccactgagccggtttaaggatagcctgggaaacccaacccacatcctgagaatcggcgagagctataaggagaagcagcggaccatccaggccaagaaggaggtggagcagcggagagccggcggctacagccggaagtacgccagcaaagccaagaatctggcagacgatatggtgagaaacaccgctagagatctgctgtactacgccgtgacccaggatgccatgctgatcttcgccaacctgagccggggcttcggccggcagggcaagcggaccttcatggccgagagacagtacacacggatggaggactggctgaccgccaagctggcctacgagggcctgagcaagacctacctgtccaagacactggcccagtacacctccaagacatgcagcaactgtgggtttaccatcaccagcgccgactacgacagggtgctggagaagctgaagaagacagcaacaggctggatgaccacaattaacggcaaggagctgaaggtggagggccagattacctactacaacagatacaagagacagaacgtagtcaaggacctgtccgtcgagctggatagactgagcgaagaatctgtgaacaacgacatctcctcctggacaaagggcagaagcggagaagctctgagcctcctgaagaaaagattctcccatagacccgtgcaggagaagttcgtgtgcctgaactgcggcttcgagacacacgcagccgagcaagccgccctgaacatcgccagatcctggctgttcctgcggagccaggagtacaagaaataccagacaaacaagacaaccggcaacaccgataagagagccttcgtcgagacctggcagtccttttaccggaagaagcttaaggaggtgtggaaacctgccgtgcggtctggcggatctggcggaggctccaccagccccaagaaaaagagaaaagtctaagctgccttctgcggggcttgccttctggccatgcccttcttctctcccttgcacctgtacctcttggtctttgaataaagcctgagtaggaaggctagcaaaaaaaaaaaaaaaaaaaaaaaaaaaaaaaaaaaaaaaaaaaaaaaaaaaaaaaaaaaaaaaaaaaaaaaaaaaaaaaagcccagccggctccccaacctctaccgaggagggcacctctgagtccgccacccccgagagcggccctggcacctccaccgagcccagcgagggcagcgcacccggcagccctgccggcagccccacctccacagaggagggaaccagcaccgagcccagcgaaggcagcgccccaggcaccagcaccgagcctagtgagcaggagattaaacggatcaacaagatcagaagaagacttgtgaaagacagcaacaccaagaaggccggcaagacaggccccatgaaaaccctgctggttagagtgatgacacccgatctgagagagcggctggaaaacctgagaaagaagcctgaaaatatcccccagcccatcagcaatacatctagagccaacctgaataagctgctgaccgattacaccgaaatgaagaaggcgatcctgcatgtgtactgggaagagttccagaaggaccctgtgggcctgatgagccgggtggcccagcctgccagcaagaagatcgatcagaacaagctgaaacctgagatggacgagaagggcaacctgaccaccgccggctttgcctgctctcagtgtggccagcccctgttcgtgtacaagctggagcaggtgtctgagaagggcaaggcttacaccaactacttcggacggtgcaatgtggccgagcacgaaaagctgatcctgctggcccagctgaagcccgagaaggatagcgacgaagccgtgacatatagcctgggaaagtttgggcagagggccctggatttctacagcattcatgtgaccaaggagtccacccaccccgtgaagcccctggcccagatcgccggaaacagatacgcctccggacctgtgggaaaggccctgagcgacgcatgtatgggcacaatcgcctccttcctgtctaagtaccaggacatcatcatcgaacaccagaaggtggtgaagggcaaccagaagagactggagagcctgcgggagctggccggcaaggaaaacctggaataccctagcgtgaccctgccacctcagcctcacaccaaggagggcgttgatgcctacaacgaagtgatcgcccgggtgcgaatgtgggtgaacctgaacctgtggcagaagctgaagctaagcagagatgatgccaagcctctgctgagactgaagggattcccttcctttcctctggtcgagagacaggccaacgaagtggactggtgggacatggtgtgtaacgtgaagaagctgatcaacgagaaaaaggaggatggcaaggtgttttggcagaatctggctggctacaagagacaggaagccctgagaccatacctgagcagcgaggaagatcggaagaagggaaagaaattcgctcggtaccagctgggcgacctgctgctgcacctggaaaagaagcacggcgaggactggggaaaggtgtacgacgaggcctgggagcggattgacaagaaagtggaaggcctgagcaagcacatcaagctggaagaggaacggagaagcgaggacgcccagagcaaggccgccctgaccgactggctgcgggctaaggccagcttcgtgatcgagggcctgaaggaggccgacaaggacgagttctgcagatgcgagctgaagctgcagaagtggtacggggacctgcggggaaagcccttcgccatcgaagccgagaacagcatcctggacatcagcggcttcagcaagcagtacaactgtgccttcatctggcagaaggacggcgtgaagaagctgaacctgtacctgatcatcaactacttcaagggcggcaagctgcggttcaagaagatcaaacctgaagccttcgaagccaacagattctacaccgtgatcaacaaaaagagcggcgagatcgtgcccatggaggtgaacttcaacttcgacgaccccaacctgatcatcctgcctctggcctttggcaagagacagggcagagaattcatctggaacgacctgctgtccctggaaaccggcagcctgaagctggccaacggaagagtgatcgagaagacactgtacaacagaagaacccggcaggatgagcctgccctgttcgtggccctgaccttcgagcggcgggaggtcctggactcctccaatatcaaaccaatgaacctgatcggcgtggcaagaggcgaaaacatccccgccgtgatcgccctgaccgaccccgagggctgcccactgagccggtttaaggatagcctgggaaacccaacccacatcctgagaatcggcgagagctataaggagaagcagcggaccatccaggccaagaaggaggtggagcagcggagagccggcggctacagccggaagtacgccagcaaagccaagaatctggcagacgatatggtgagaaacaccgctagagatctgctgtactacgccgtgacccaggatgccatgctgatcttcgccaacctgagccggggcttcggccggcagggcaagcggaccttcatggccgagagacagtacacacggatggaggactggctgaccgccaagctggcctacgagggcctgagcaagacctacctgtccaagacactggcccagtacacctccaagacatgcagcaactgtgggtttaccatcaccagcgccgactacgacagggtgctggagaagctgaagaagacagcaacaggctggatgaccacaattaacggcaaggagctgaaggtggagggccagattacctactacaacagatacaagagacagaacgtagtcaaggacctgtccgtcgagctggatagactgagcgaagaatctgtgaacaacgacatctcctcctggacaaagggcagaagcggagaagctctgagcctcctgaagaaaagattctcccatagacccgtgcaggagaagttcgtgtgcctgaactgcggcttcgagacacacgcagccgagcaagccgccctgaacatcgccagatcctggctgttcctgcggagccaggagtacaagaaataccagacaaacaagacaaccggcaacaccgataagagagccttcgtcgagacctggcagtccttttaccggaagaagcttaaggaggtgtggaaacctgccgtgcggtctggcggatctggcggaggctccaccagccccaagaaaaagagaaaagtctaagctgccttctgcggggcttgccttctggccatgcccttcttctctcccttgcacctgtacctcttggtctttgaataaagcctgagtaggaaggctagcaaaaaaaaaaaaaaaaaaaaaaaaaaaaaaaaaaaaaaaaaaaaaaaaaaaaaaaaaaaaaaaaaaaaaaaaaaaaaaaa

SEQ ID NO: 9920 - RNA, 8787 nt, synthetic construct
  source 1..8787: mol_type = other RNA
aggaaataagagagaaaagaagagtaagaagaaatataagagccaccatggcccctaagaagaagcgtaaagtgagccggatgaaccacgaccaggagttcgacccccctaaggtgtaccctcccgtccccgccgagaagagaaagcccatccgggtcctgagcctgttcgatggcatcgccaccggtctgctggtgctgaaggacctgggcatccaggtggataggtacattgcctccgaggtgtgcgaggactccatcaccgtgggaatggtgcgtcatcagggcaagatcatgtacgtgggcgacgtgcggagcgtgacacagaagcatatccaggagtggggccctttcgacctggtgatcggcggcagcccttgcaatgacctgagcatcgtgaacccagcccggaagggcctgtacgagggaaccggcagactgttcttcgagttttacagactgctgcacgacgcccggcctaaggaaggcgacgaccggcccttcttttggctgttcgagaatgtggtggccatgggagtcagcgacaagcgggatattagccggttcctggagagcaaccccgtgatgatcgatgccaaggaagtgagcgccgcccaccgggccagatacttctggggcaatctgcctggcatgaacagacccctggccagcaccgtgaacgacaagctggagctgcaggagtgcctggagcacggccggatcgccaagttcagcaaggtgagaaccatcaccacccgaagcaacagcatcaaacaaggcaaggaccagcactttcctgtgttcatgaacgagaaggaggacatcctgtggtgtaccgagatggagagagtgttcgggttcccagtccactacacagatgtcagcaacatgtctagactggccagacagagactgctgggaagaagctggtccgtccctgtgatcagacacctgttcgcccctctgaaggagtacttcgcctgcgtgagcagcggcaacagcaacgccaacagccggggccccagcttctctagcggcctggtgccactgtccctgagagggagccacatgggccccatggagatctacaaaaccgtgagcgcctggaagcggcagcctgtgcgcgtgctgagcctgtttcggaatatcgataaagtcctgaaaagcctgggattcctggagagcggctctggctccggcggtggcaccctgaagtacgtggaggatgtgacaaacgtggtcagacgggatgtggagaagtggggccccttcgatctggtgtacggcagcacccaacccctgggcagctcttgtgaccggtgccctggctggtacatgtttcagttccaccggatcctgcagtacgccctgccgagacaggagtcccagcggccattcttttggattttcatggacaacttgctgctgaccgaggatgaccaggaaactaccactcggttcctgcagaccgaagccgtgaccctgcaggacgtgagaggccgggactaccagaacgccatgcgggtgtggtccaacatccctggactgaaaagcaagcacgcacctctgacccctaaagaagaggagtacctgcaggcccaggtgcggagcagaagcaagctggacgcccctaaggtggatctgctggtgaagaattgcctcctgcccctgagagagtacttcaagtatttcagccagaatagtctgcccctgggaggcagcggcggcggcttccaggccagcgtggtgttcgaggacgtggccgtgaacttcacccccgaggagtgggccctgctgaacaggggccagaggaagctgtacagggacgtgatgctggagacctgcaggaacctgagcgccgtggagaagcagaagttccacagcagcggcgacctgaccaggatgcaggagggcctgctgaggagccccctggtggagagcgtgtgcgagaggatcgagggcgacccctgcggcggcggcccaagcagcggcgcccctcctcccagcggcggcaggcggcccaagcagcggcgcccctcctcccagcggcggcagcccagccggctccccaacctctaccgaggagggcacctctgagtccgccacccccgagagcggccctggcacctccaccgagcccagcgagggcagcgcacccggcagccctgccggcagccccacctccacagaggagggaaccagcaccgagcccagcgaaggcagcgccccaggcaccagcaccgagcctagtgagcaggagattaaacggatcaacaagatcagaagaagacttgtgaaagacagcaacaccaagaaggccggcaagacaggccccatgaaaaccctgctggttagagtgatgacacccgatctgagagagcggctggaaaacctgagaaagaagcctgaaaatatcccccagcccatcagcaatacatctagagccaacctgaataagctgctgaccgattacaccgaaatgaagaaggcgatcctgcatgtgtactgggaagagttccagaaggaccctgtgggcctgatgagccgggtggcccagcctgccagcaagaagatcgatcagaacaagctgaaacctgagatggacgagaagggcaacctgaccaccgccggctttgcctgctctcagtgtggccagcccctgttcgtgtacaagctggagcaggtgtctgagaagggcaaggcttacaccaactacttcggacggtgcaatgtggccgagcacgaaaagctgatcctgctggcccagctgaagcccgagaaggatagcgacgaagccgtgacatatagcctgggaaagtttgggcagagggccctggatttctacagcattcatgtgaccaaggagtccacccaccccgtgaagcccctggcccagatcgccggaaacagatacgcctccggacctgtgggaaaggccctgagcgacgcatgtatgggcacaatcgcctccttcctgtctaagtaccaggacatcatcatcgaacaccagaaggtggtgaagggcaaccagaagagactggagagcctgcgggagctggccggcaaggaaaacctggaataccctagcgtgaccctgccacctcagcctcacaccaaggagggcgttgatgcctacaacgaagtgatcgcccgggtgcgaatgtgggtgaacctgaacctgtggcagaagctgaagctaagcagagatgatgccaagcctctgctgagactgaagggattcccttcctttcctctggtcgagagacaggccaacgaagtggactggtgggacatggtgtgtaacgtgaagaagctgatcaacgagaaaaaggaggatggcaaggtgttttggcagaatctggctggctacaagagacaggaagccctgagaccatacctgagcagcgaggaagatcggaagaagggaaagaaattcgctcggtaccagctgggcgacctgctgctgcacctggaaaagaagcacggcgaggactggggaaaggtgtacgacgaggcctgggagcggattgacaagaaagtggaaggcctgagcaagcacatcaagctggaagaggaacggagaagcgaggacgcccagagcaaggccgccctgaccgactggctgcgggctaaggccagcttcgtgatcgagggcctgaaggaggccgacaaggacgagttctgcagatgcgagctgaagctgcagaagtggtacggggacctgcggggaaagcccttcgccatcgaagccgagaacagcatcctggacatcagcggcttcagcaagcagtacaactgtgccttcatctggcagaaggacggcgtgaagaagctgaacctgtacctgatcatcaactacttcaagggcggcaagctgcggttcaagaagatcaaacctgaagccttcgaagccaacagattctacaccgtgatcaacaaaaagagcggcgagatcgtgcccatggaggtgaacttcaacttcgacgaccccaacctgatcatcctgcctctggcctttggcaagagacagggcagagaattcatctggaacgacctgctgtccctggaaaccggcagcctgaagctggccaacggaagagtgatcgagaagacactgtacaacagaagaacccggcaggatgagcctgccctgttcgtggccctgaccttcgagcggcgggaggtcctggactcctccaatatcaaaccaatgaacctgatcggcgtggcaagaggcgaaaacatccccgccgtgatcgccctgaccgaccccgagggctgcccactgagccggtttaaggatagcctgggaaacccaacccacatcctgagaatcggcgagagctataaggagaagcagcggaccatccaggccaagaaggaggtggagcagcggagagccggcggctacagccggaagtacgccagcaaagccaagaatctggcagacgatatggtgagaaacaccgctagagatctgctgtactacgccgtgacccaggatgccatgctgatcttcgccaacctgagccggggcttcggccggcagggcaagcggaccttcatggccgagagacagtacacacggatggaggactggctgaccgccaagctggcctacgagggcctgagcaagacctacctgtccaagacactggcccagtacacctccaagacatgcagcaactgtgggtttaccatcaccagcgccgactacgacagggtgctggagaagctgaagaagacagcaacaggctggatgaccacaattaacggcaaggagctgaaggtggagggccagattacctactacaacagatacaagagacagaacgtagtcaaggacctgtccgtcgagctggatagactgagcgaagaatctgtgaacaacgacatctcctcctggacaaagggcagaagcggagaagctctgagcctcctgaagaaaagattctcccatagacccgtgcaggagaagttcgtgtgcctgaactgcggcttcgagacacacgcagccgagcaagccgccctgaacatcgccagatcctggctgttcctgcggagccaggagtacaagaaataccagacaaacaagacaaccggcaacaccgataagagagccttcgtcgagacctggcagtccttttaccggaagaagcttaaggaggtgtggaaacctgccgtgcggtctggcggatctggcggaggctccaccagccccaagaaaaagagaaaagtctaagctgccttctgcggggcttgccttctggccatgcccttcttctctcccttgcacctgtacctcttggtctttgaataaagcctgagtaggaaggctagcaaaaaaaaaaaaaaaaaaaaaaaaaaaaaaaaaaaaaaaaaaaaaaaaaaaaaaaaaaaaaaaaaaaaaaaaaaaaaaaagcccagccggctccccaacctctaccgaggagggcacctctgagtccgccacccccgagagcggccctggcacctccaccgagcccagcgagggcagcgcacccggcagccctgccggcagccccacctccacagaggagggaaccagcaccgagcccagcgaaggcagcgccccaggcaccagcaccgagcctagtgagcaggagattaaacggatcaacaagatcagaagaagacttgtgaaagacagcaacaccaagaaggccggcaagacaggccccatgaaaaccctgctggttagagtgatgacacccgatctgagagagcggctggaaaacctgagaaagaagcctgaaaatatcccccagcccatcagcaatacatctagagccaacctgaataagctgctgaccgattacaccgaaatgaagaaggcgatcctgcatgtgtactgggaagagttccagaaggaccctgtgggcctgatgagccgggtggcccagcctgccagcaagaagatcgatcagaacaagctgaaacctgagatggacgagaagggcaacctgaccaccgccggctttgcctgctctcagtgtggccagcccctgttcgtgtacaagctggagcaggtgtctgagaagggcaaggcttacaccaactacttcggacggtgcaatgtggccgagcacgaaaagctgatcctgctggcccagctgaagcccgagaaggatagcgacgaagccgtgacatatagcctgggaaagtttgggcagagggccctggatttctacagcattcatgtgaccaaggagtccacccaccccgtgaagcccctggcccagatcgccggaaacagatacgcctccggacctgtgggaaaggccctgagcgacgcatgtatgggcacaatcgcctccttcctgtctaagtaccaggacatcatcatcgaacaccagaaggtggtgaagggcaaccagaagagactggagagcctgcgggagctggccggcaaggaaaacctggaataccctagcgtgaccctgccacctcagcctcacaccaaggagggcgttgatgcctacaacgaagtgatcgcccgggtgcgaatgtgggtgaacctgaacctgtggcagaagctgaagctaagcagagatgatgccaagcctctgctgagactgaagggattcccttcctttcctctggtcgagagacaggccaacgaagtggactggtgggacatggtgtgtaacgtgaagaagctgatcaacgagaaaaaggaggatggcaaggtgttttggcagaatctggctggctacaagagacaggaagccctgagaccatacctgagcagcgaggaagatcggaagaagggaaagaaattcgctcggtaccagctgggcgacctgctgctgcacctggaaaagaagcacggcgaggactggggaaaggtgtacgacgaggcctgggagcggattgacaagaaagtggaaggcctgagcaagcacatcaagctggaagaggaacggagaagcgaggacgcccagagcaaggccgccctgaccgactggctgcgggctaaggccagcttcgtgatcgagggcctgaaggaggccgacaaggacgagttctgcagatgcgagctgaagctgcagaagtggtacggggacctgcggggaaagcccttcgccatcgaagccgagaacagcatcctggacatcagcggcttcagcaagcagtacaactgtgccttcatctggcagaaggacggcgtgaagaagctgaacctgtacctgatcatcaactacttcaagggcggcaagctgcggttcaagaagatcaaacctgaagccttcgaagccaacagattctacaccgtgatcaacaaaaagagcggcgagatcgtgcccatggaggtgaacttcaacttcgacgaccccaacctgatcatcctgcctctggcctttggcaagagacagggcagagaattcatctggaacgacctgctgtccctggaaaccggcagcctgaagctggccaacggaagagtgatcgagaagacactgtacaacagaagaacccggcaggatgagcctgccctgttcgtggccctgaccttcgagcggcgggaggtcctggactcctccaatatcaaaccaatgaacctgatcggcgtggcaagaggcgaaaacatccccgccgtgatcgccctgaccgaccccgagggctgcccactgagccggtttaaggatagcctgggaaacccaacccacatcctgagaatcggcgagagctataaggagaagcagcggaccatccaggccaagaaggaggtggagcagcggagagccggcggctacagccggaagtacgccagcaaagccaagaatctggcagacgatatggtgagaaacaccgctagagatctgctgtactacgccgtgacccaggatgccatgctgatcttcgccaacctgagccggggcttcggccggcagggcaagcggaccttcatggccgagagacagtacacacggatggaggactggctgaccgccaagctggcctacgagggcctgagcaagacctacctgtccaagacactggcccagtacacctccaagacatgcagcaactgtgggtttaccatcaccagcgccgactacgacagggtgctggagaagctgaagaagacagcaacaggctggatgaccacaattaacggcaaggagctgaaggtggagggccagattacctactacaacagatacaagagacagaacgtagtcaaggacctgtccgtcgagctggatagactgagcgaagaatctgtgaacaacgacatctcctcctggacaaagggcagaagcggagaagctctgagcctcctgaagaaaagattctcccatagacccgtgcaggagaagttcgtgtgcctgaactgcggcttcgagacacacgcagccgagcaagccgccctgaacatcgccagatcctggctgttcctgcggagccaggagtacaagaaataccagacaaacaagacaaccggcaacaccgataagagagccttcgtcgagacctggcagtccttttaccggaagaagcttaaggaggtgtggaaacctgccgtgcggtctggcggatctggcggaggctccaccagccccaagaaaaagagaaaagtctaagctgccttctgcggggcttgccttctggccatgcccttcttctctcccttgcacctgtacctcttggtctttgaataaagcctgagtaggaaggctagcaaaaaaaaaaaaaaaaaaaaaaaaaaaaaaaaaaaaaaaaaaaaaaaaaaaaaaaaaaaaaaaaaaaaaaaaaaaaaaaa

SEQ ID NO: 9921 - RNA, 8787 nt, synthetic construct
  source 1..8787: mol_type = other RNA
aggaaataagagagaaaagaagagtaagaagaaatataagagccaccatggcccctaagaagaagcgtaaagtgagccggatgaaccacgaccaggagttcgacccccctaaggtgtaccctcccgtccccgccgagaagagaaagcccatccgggtcctgagcctgttcgatggcatcgccaccggtctgctggtgctgaaggacctgggcatccaggtggataggtacattgcctccgaggtgtgcgaggactccatcaccgtgggaatggtgcgtcatcagggcaagatcatgtacgtgggcgacgtgcggagcgtgacacagaagcatatccaggagtggggccctttcgacctggtgatcggcggcagcccttgcaatgacctgagcatcgtgaacccagcccggaagggcctgtacgagggaaccggcagactgttcttcgagttttacagactgctgcacgacgcccggcctaaggaaggcgacgaccggcccttcttttggctgttcgagaatgtggtggccatgggagtcagcgacaagcgggatattagccggttcctggagagcaaccccgtgatgatcgatgccaaggaagtgagcgccgcccaccgggccagatacttctggggcaatctgcctggcatgaacagacccctggccagcaccgtgaacgacaagctggagctgcaggagtgcctggagcacggccggatcgccaagttcagcaaggtgagaaccatcaccacccgaagcaacagcatcaaacaaggcaaggaccagcactttcctgtgttcatgaacgagaaggaggacatcctgtggtgtaccgagatggagagagtgttcgggttcccagtccactacacagatgtcagcaacatgtctagactggccagacagagactgctgggaagaagctggtccgtccctgtgatcagacacctgttcgcccctctgaaggagtacttcgcctgcgtgagcagcggcaacagcaacgccaacagccggggccccagcttctctagcggcctggtgccactgtccctgagagggagccacatgggccccatggagatctacaaaaccgtgagcgcctggaagcggcagcctgtgcgcgtgctgagcctgtttcggaatatcgataaagtcctgaaaagcctgggattcctggagagcggctctggctccggcggtggcaccctgaagtacgtggaggatgtgacaaacgtggtcagacgggatgtggagaagtggggccccttcgatctggtgtacggcagcacccaacccctgggcagctcttgtgaccggtgccctggctggtacatgtttcagttccaccggatcctgcagtacgccctgccgagacaggagtcccagcggccattcttttggattttcatggacaacttgctgctgaccgaggatgaccaggaaactaccactcggttcctgcagaccgaagccgtgaccctgcaggacgtgagaggccgggactaccagaacgccatgcgggtgtggtccaacatccctggactgaaaagcaagcacgcacctctgacccctaaagaagaggagtacctgcaggcccaggtgcggagcagaagcaagctggacgcccctaaggtggatctgctggtgaagaattgcctcctgcccctgagagagtacttcaagtatttcagccagaatagtctgcccctgggaggcagcggcggcggccaggccgaggtgaccttcgaggacgtggccgtgctgctgagcagggaggagtggggcaggctgggccccgtgcagaagggcctgtacagggacgtgatgctggagacctacaggaacctggtgagcctgggcgccggccccgccggccccaagcccgaggtgatcacccagctggagaggggcgacgagccctgggtgcccgacgtgcagggcagggagaggcccaccatcgacggcagcgccggcggcccaagcagcggcgcccctcctcccagcggcggcaggcggcccaagcagcggcgcccctcctcccagcggcggcagcccagccggctccccaacctctaccgaggagggcacctctgagtccgccacccccgagagcggccctggcacctccaccgagcccagcgagggcagcgcacccggcagccctgccggcagccccacctccacagaggagggaaccagcaccgagcccagcgaaggcagcgccccaggcaccagcaccgagcctagtgagcaggagattaaacggatcaacaagatcagaagaagacttgtgaaagacagcaacaccaagaaggccggcaagacaggccccatgaaaaccctgctggttagagtgatgacacccgatctgagagagcggctggaaaacctgagaaagaagcctgaaaatatcccccagcccatcagcaatacatctagagccaacctgaataagctgctgaccgattacaccgaaatgaagaaggcgatcctgcatgtgtactgggaagagttccagaaggaccctgtgggcctgatgagccgggtggcccagcctgccagcaagaagatcgatcagaacaagctgaaacctgagatggacgagaagggcaacctgaccaccgccggctttgcctgctctcagtgtggccagcccctgttcgtgtacaagctggagcaggtgtctgagaagggcaaggcttacaccaactacttcggacggtgcaatgtggccgagcacgaaaagctgatcctgctggcccagctgaagcccgagaaggatagcgacgaagccgtgacatatagcctgggaaagtttgggcagagggccctggatttctacagcattcatgtgaccaaggagtccacccaccccgtgaagcccctggcccagatcgccggaaacagatacgcctccggacctgtgggaaaggccctgagcgacgcatgtatgggcacaatcgcctccttcctgtctaagtaccaggacatcatcatcgaacaccagaaggtggtgaagggcaaccagaagagactggagagcctgcgggagctggccggcaaggaaaacctggaataccctagcgtgaccctgccacctcagcctcacaccaaggagggcgttgatgcctacaacgaagtgatcgcccgggtgcgaatgtgggtgaacctgaacctgtggcagaagctgaagctaagcagagatgatgccaagcctctgctgagactgaagggattcccttcctttcctctggtcgagagacaggccaacgaagtggactggtgggacatggtgtgtaacgtgaagaagctgatcaacgagaaaaaggaggatggcaaggtgttttggcagaatctggctggctacaagagacaggaagccctgagaccatacctgagcagcgaggaagatcggaagaagggaaagaaattcgctcggtaccagctgggcgacctgctgctgcacctggaaaagaagcacggcgaggactggggaaaggtgtacgacgaggcctgggagcggattgacaagaaagtggaaggcctgagcaagcacatcaagctggaagaggaacggagaagcgaggacgcccagagcaaggccgccctgaccgactggctgcgggctaaggccagcttcgtgatcgagggcctgaaggaggccgacaaggacgagttctgcagatgcgagctgaagctgcagaagtggtacggggacctgcggggaaagcccttcgccatcgaagccgagaacagcatcctggacatcagcggcttcagcaagcagtacaactgtgccttcatctggcagaaggacggcgtgaagaagctgaacctgtacctgatcatcaactacttcaagggcggcaagctgcggttcaagaagatcaaacctgaagccttcgaagccaacagattctacaccgtgatcaacaaaaagagcggcgagatcgtgcccatggaggtgaacttcaacttcgacgaccccaacctgatcatcctgcctctggcctttggcaagagacagggcagagaattcatctggaacgacctgctgtccctggaaaccggcagcctgaagctggccaacggaagagtgatcgagaagacactgtacaacagaagaacccggcaggatgagcctgccctgttcgtggccctgaccttcgagcggcgggaggtcctggactcctccaatatcaaaccaatgaacctgatcggcgtggcaagaggcgaaaacatccccgccgtgatcgccctgaccgaccccgagggctgcccactgagccggtttaaggatagcctgggaaacccaacccacatcctgagaatcggcgagagctataaggagaagcagcggaccatccaggccaagaaggaggtggagcagcggagagccggcggctacagccggaagtacgccagcaaagccaagaatctggcagacgatatggtgagaaacaccgctagagatctgctgtactacgccgtgacccaggatgccatgctgatcttcgccaacctgagccggggcttcggccggcagggcaagcggaccttcatggccgagagacagtacacacggatggaggactggctgaccgccaagctggcctacgagggcctgagcaagacctacctgtccaagacactggcccagtacacctccaagacatgcagcaactgtgggtttaccatcaccagcgccgactacgacagggtgctggagaagctgaagaagacagcaacaggctggatgaccacaattaacggcaaggagctgaaggtggagggccagattacctactacaacagatacaagagacagaacgtagtcaaggacctgtccgtcgagctggatagactgagcgaagaatctgtgaacaacgacatctcctcctggacaaagggcagaagcggagaagctctgagcctcctgaagaaaagattctcccatagacccgtgcaggagaagttcgtgtgcctgaactgcggcttcgagacacacgcagccgagcaagccgccctgaacatcgccagatcctggctgttcctgcggagccaggagtacaagaaataccagacaaacaagacaaccggcaacaccgataagagagccttcgtcgagacctggcagtccttttaccggaagaagcttaaggaggtgtggaaacctgccgtgcggtctggcggatctggcggaggctccaccagccccaagaaaaagagaaaagtctaagctgccttctgcggggcttgccttctggccatgcccttcttctctcccttgcacctgtacctcttggtctttgaataaagcctgagtaggaaggctagcaaaaaaaaaaaaaaaaaaaaaaaaaaaaaaaaaaaaaaaaaaaaaaaaaaaaaaaaaaaaaaaaaaaaaaaaaaaaaaaagcccagccggctccccaacctctaccgaggagggcacctctgagtccgccacccccgagagcggccctggcacctccaccgagcccagcgagggcagcgcacccggcagccctgccggcagccccacctccacagaggagggaaccagcaccgagcccagcgaaggcagcgccccaggcaccagcaccgagcctagtgagcaggagattaaacggatcaacaagatcagaagaagacttgtgaaagacagcaacaccaagaaggccggcaagacaggccccatgaaaaccctgctggttagagtgatgacacccgatctgagagagcggctggaaaacctgagaaagaagcctgaaaatatcccccagcccatcagcaatacatctagagccaacctgaataagctgctgaccgattacaccgaaatgaagaaggcgatcctgcatgtgtactgggaagagttccagaaggaccctgtgggcctgatgagccgggtggcccagcctgccagcaagaagatcgatcagaacaagctgaaacctgagatggacgagaagggcaacctgaccaccgccggctttgcctgctctcagtgtggccagcccctgttcgtgtacaagctggagcaggtgtctgagaagggcaaggcttacaccaactacttcggacggtgcaatgtggccgagcacgaaaagctgatcctgctggcccagctgaagcccgagaaggatagcgacgaagccgtgacatatagcctgggaaagtttgggcagagggccctggatttctacagcattcatgtgaccaaggagtccacccaccccgtgaagcccctggcccagatcgccggaaacagatacgcctccggacctgtgggaaaggccctgagcgacgcatgtatgggcacaatcgcctccttcctgtctaagtaccaggacatcatcatcgaacaccagaaggtggtgaagggcaaccagaagagactggagagcctgcgggagctggccggcaaggaaaacctggaataccctagcgtgaccctgccacctcagcctcacaccaaggagggcgttgatgcctacaacgaagtgatcgcccgggtgcgaatgtgggtgaacctgaacctgtggcagaagctgaagctaagcagagatgatgccaagcctctgctgagactgaagggattcccttcctttcctctggtcgagagacaggccaacgaagtggactggtgggacatggtgtgtaacgtgaagaagctgatcaacgagaaaaaggaggatggcaaggtgttttggcagaatctggctggctacaagagacaggaagccctgagaccatacctgagcagcgaggaagatcggaagaagggaaagaaattcgctcggtaccagctgggcgacctgctgctgcacctggaaaagaagcacggcgaggactggggaaaggtgtacgacgaggcctgggagcggattgacaagaaagtggaaggcctgagcaagcacatcaagctggaagaggaacggagaagcgaggacgcccagagcaaggccgccctgaccgactggctgcgggctaaggccagcttcgtgatcgagggcctgaaggaggccgacaaggacgagttctgcagatgcgagctgaagctgcagaagtggtacggggacctgcggggaaagcccttcgccatcgaagccgagaacagcatcctggacatcagcggcttcagcaagcagtacaactgtgccttcatctggcagaaggacggcgtgaagaagctgaacctgtacctgatcatcaactacttcaagggcggcaagctgcggttcaagaagatcaaacctgaagccttcgaagccaacagattctacaccgtgatcaacaaaaagagcggcgagatcgtgcccatggaggtgaacttcaacttcgacgaccccaacctgatcatcctgcctctggcctttggcaagagacagggcagagaattcatctggaacgacctgctgtccctggaaaccggcagcctgaagctggccaacggaagagtgatcgagaagacactgtacaacagaagaacccggcaggatgagcctgccctgttcgtggccctgaccttcgagcggcgggaggtcctggactcctccaatatcaaaccaatgaacctgatcggcgtggcaagaggcgaaaacatccccgccgtgatcgccctgaccgaccccgagggctgcccactgagccggtttaaggatagcctgggaaacccaacccacatcctgagaatcggcgagagctataaggagaagcagcggaccatccaggccaagaaggaggtggagcagcggagagccggcggctacagccggaagtacgccagcaaagccaagaatctggcagacgatatggtgagaaacaccgctagagatctgctgtactacgccgtgacccaggatgccatgctgatcttcgccaacctgagccggggcttcggccggcagggcaagcggaccttcatggccgagagacagtacacacggatggaggactggctgaccgccaagctggcctacgagggcctgagcaagacctacctgtccaagacactggcccagtacacctccaagacatgcagcaactgtgggtttaccatcaccagcgccgactacgacagggtgctggagaagctgaagaagacagcaacaggctggatgaccacaattaacggcaaggagctgaaggtggagggccagattacctactacaacagatacaagagacagaacgtagtcaaggacctgtccgtcgagctggatagactgagcgaagaatctgtgaacaacgacatctcctcctggacaaagggcagaagcggagaagctctgagcctcctgaagaaaagattctcccatagacccgtgcaggagaagttcgtgtgcctgaactgcggcttcgagacacacgcagccgagcaagccgccctgaacatcgccagatcctggctgttcctgcggagccaggagtacaagaaataccagacaaacaagacaaccggcaacaccgataagagagccttcgtcgagacctggcagtccttttaccggaagaagcttaaggaggtgtggaaacctgccgtgcggtctggcggatctggcggaggctccaccagccccaagaaaaagagaaaagtctaagctgccttctgcggggcttgccttctggccatgcccttcttctctcccttgcacctgtacctcttggtctttgaataaagcctgagtaggaaggctagcaaaaaaaaaaaaaaaaaaaaaaaaaaaaaaaaaaaaaaaaaaaaaaaaaaaaaaaaaaaaaaaaaaaaaaaaaaaaaaaa

SEQ ID NO: 9922 - RNA, 8787 nt, synthetic construct
  source 1..8787: mol_type = other RNA
aggaaataagagagaaaagaagagtaagaagaaatataagagccaccatggcccctaagaagaagcgtaaagtgagccggatgaaccacgaccaggagttcgacccccctaaggtgtaccctcccgtccccgccgagaagagaaagcccatccgggtcctgagcctgttcgatggcatcgccaccggtctgctggtgctgaaggacctgggcatccaggtggataggtacattgcctccgaggtgtgcgaggactccatcaccgtgggaatggtgcgtcatcagggcaagatcatgtacgtgggcgacgtgcggagcgtgacacagaagcatatccaggagtggggccctttcgacctggtgatcggcggcagcccttgcaatgacctgagcatcgtgaacccagcccggaagggcctgtacgagggaaccggcagactgttcttcgagttttacagactgctgcacgacgcccggcctaaggaaggcgacgaccggcccttcttttggctgttcgagaatgtggtggccatgggagtcagcgacaagcgggatattagccggttcctggagagcaaccccgtgatgatcgatgccaaggaagtgagcgccgcccaccgggccagatacttctggggcaatctgcctggcatgaacagacccctggccagcaccgtgaacgacaagctggagctgcaggagtgcctggagcacggccggatcgccaagttcagcaaggtgagaaccatcaccacccgaagcaacagcatcaaacaaggcaaggaccagcactttcctgtgttcatgaacgagaaggaggacatcctgtggtgtaccgagatggagagagtgttcgggttcccagtccactacacagatgtcagcaacatgtctagactggccagacagagactgctgggaagaagctggtccgtccctgtgatcagacacctgttcgcccctctgaaggagtacttcgcctgcgtgagcagcggcaacagcaacgccaacagccggggccccagcttctctagcggcctggtgccactgtccctgagagggagccacatgggccccatggagatctacaaaaccgtgagcgcctggaagcggcagcctgtgcgcgtgctgagcctgtttcggaatatcgataaagtcctgaaaagcctgggattcctggagagcggctctggctccggcggtggcaccctgaagtacgtggaggatgtgacaaacgtggtcagacgggatgtggagaagtggggccccttcgatctggtgtacggcagcacccaacccctgggcagctcttgtgaccggtgccctggctggtacatgtttcagttccaccggatcctgcagtacgccctgccgagacaggagtcccagcggccattcttttggattttcatggacaacttgctgctgaccgaggatgaccaggaaactaccactcggttcctgcagaccgaagccgtgaccctgcaggacgtgagaggccgggactaccagaacgccatgcgggtgtggtccaacatccctggactgaaaagcaagcacgcacctctgacccctaaagaagaggagtacctgcaggcccaggtgcggagcagaagcaagctggacgcccctaaggtggatctgctggtgaagaattgcctcctgcccctgagagagtacttcaagtatttcagccagaatagtctgcccctgggaggcagcggcggcggcccccaggtgctggtgagcttcgaggaggtggccgtgctgctgagccaggaggagtggggcaggctgagccccgcccagaagggcctgtacagggacgtgatgatggagacctacggcaacctggtgagcctgggcctgcagggcagcaagcccgacgtgatcagcaagctggagcagggcaaggagccctgggccccccacagccccaggatcgagggcagctggatctggaggaggaggaggggcggcccaagcagcggcgcccctcctcccagcggcggcaggcggcccaagcagcggcgcccctcctcccagcggcggcagcccagccggctccccaacctctaccgaggagggcacctctgagtccgccacccccgagagcggccctggcacctccaccgagcccagcgagggcagcgcacccggcagccctgccggcagccccacctccacagaggagggaaccagcaccgagcccagcgaaggcagcgccccaggcaccagcaccgagcctagtgagcaggagattaaacggatcaacaagatcagaagaagacttgtgaaagacagcaacaccaagaaggccggcaagacaggccccatgaaaaccctgctggttagagtgatgacacccgatctgagagagcggctggaaaacctgagaaagaagcctgaaaatatcccccagcccatcagcaatacatctagagccaacctgaataagctgctgaccgattacaccgaaatgaagaaggcgatcctgcatgtgtactgggaagagttccagaaggaccctgtgggcctgatgagccgggtggcccagcctgccagcaagaagatcgatcagaacaagctgaaacctgagatggacgagaagggcaacctgaccaccgccggctttgcctgctctcagtgtggccagcccctgttcgtgtacaagctggagcaggtgtctgagaagggcaaggcttacaccaactacttcggacggtgcaatgtggccgagcacgaaaagctgatcctgctggcccagctgaagcccgagaaggatagcgacgaagccgtgacatatagcctgggaaagtttgggcagagggccctggatttctacagcattcatgtgaccaaggagtccacccaccccgtgaagcccctggcccagatcgccggaaacagatacgcctccggacctgtgggaaaggccctgagcgacgcatgtatgggcacaatcgcctccttcctgtctaagtaccaggacatcatcatcgaacaccagaaggtggtgaagggcaaccagaagagactggagagcctgcgggagctggccggcaaggaaaacctggaataccctagcgtgaccctgccacctcagcctcacaccaaggagggcgttgatgcctacaacgaagtgatcgcccgggtgcgaatgtgggtgaacctgaacctgtggcagaagctgaagctaagcagagatgatgccaagcctctgctgagactgaagggattcccttcctttcctctggtcgagagacaggccaacgaagtggactggtgggacatggtgtgtaacgtgaagaagctgatcaacgagaaaaaggaggatggcaaggtgttttggcagaatctggctggctacaagagacaggaagccctgagaccatacctgagcagcgaggaagatcggaagaagggaaagaaattcgctcggtaccagctgggcgacctgctgctgcacctggaaaagaagcacggcgaggactggggaaaggtgtacgacgaggcctgggagcggattgacaagaaagtggaaggcctgagcaagcacatcaagctggaagaggaacggagaagcgaggacgcccagagcaaggccgccctgaccgactggctgcgggctaaggccagcttcgtgatcgagggcctgaaggaggccgacaaggacgagttctgcagatgcgagctgaagctgcagaagtggtacggggacctgcggggaaagcccttcgccatcgaagccgagaacagcatcctggacatcagcggcttcagcaagcagtacaactgtgccttcatctggcagaaggacggcgtgaagaagctgaacctgtacctgatcatcaactacttcaagggcggcaagctgcggttcaagaagatcaaacctgaagccttcgaagccaacagattctacaccgtgatcaacaaaaagagcggcgagatcgtgcccatggaggtgaacttcaacttcgacgaccccaacctgatcatcctgcctctggcctttggcaagagacagggcagagaattcatctggaacgacctgctgtccctggaaaccggcagcctgaagctggccaacggaagagtgatcgagaagacactgtacaacagaagaacccggcaggatgagcctgccctgttcgtggccctgaccttcgagcggcgggaggtcctggactcctccaatatcaaaccaatgaacctgatcggcgtggcaagaggcgaaaacatccccgccgtgatcgccctgaccgaccccgagggctgcccactgagccggtttaaggatagcctgggaaacccaacccacatcctgagaatcggcgagagctataaggagaagcagcggaccatccaggccaagaaggaggtggagcagcggagagccggcggctacagccggaagtacgccagcaaagccaagaatctggcagacgatatggtgagaaacaccgctagagatctgctgtactacgccgtgacccaggatgccatgctgatcttcgccaacctgagccggggcttcggccggcagggcaagcggaccttcatggccgagagacagtacacacggatggaggactggctgaccgccaagctggcctacgagggcctgagcaagacctacctgtccaagacactggcccagtacacctccaagacatgcagcaactgtgggtttaccatcaccagcgccgactacgacagggtgctggagaagctgaagaagacagcaacaggctggatgaccacaattaacggcaaggagctgaaggtggagggccagattacctactacaacagatacaagagacagaacgtagtcaaggacctgtccgtcgagctggatagactgagcgaagaatctgtgaacaacgacatctcctcctggacaaagggcagaagcggagaagctctgagcctcctgaagaaaagattctcccatagacccgtgcaggagaagttcgtgtgcctgaactgcggcttcgagacacacgcagccgagcaagccgccctgaacatcgccagatcctggctgttcctgcggagccaggagtacaagaaataccagacaaacaagacaaccggcaacaccgataagagagccttcgtcgagacctggcagtccttttaccggaagaagcttaaggaggtgtggaaacctgccgtgcggtctggcggatctggcggaggctccaccagccccaagaaaaagagaaaagtctaagctgccttctgcggggcttgccttctggccatgcccttcttctctcccttgcacctgtacctcttggtctttgaataaagcctgagtaggaaggctagcaaaaaaaaaaaaaaaaaaaaaaaaaaaaaaaaaaaaaaaaaaaaaaaaaaaaaaaaaaaaaaaaaaaaaaaaaaaaaaaagcccagccggctccccaacctctaccgaggagggcacctctgagtccgccacccccgagagcggccctggcacctccaccgagcccagcgagggcagcgcacccggcagccctgccggcagccccacctccacagaggagggaaccagcaccgagcccagcgaaggcagcgccccaggcaccagcaccgagcctagtgagcaggagattaaacggatcaacaagatcagaagaagacttgtgaaagacagcaacaccaagaaggccggcaagacaggccccatgaaaaccctgctggttagagtgatgacacccgatctgagagagcggctggaaaacctgagaaagaagcctgaaaatatcccccagcccatcagcaatacatctagagccaacctgaataagctgctgaccgattacaccgaaatgaagaaggcgatcctgcatgtgtactgggaagagttccagaaggaccctgtgggcctgatgagccgggtggcccagcctgccagcaagaagatcgatcagaacaagctgaaacctgagatggacgagaagggcaacctgaccaccgccggctttgcctgctctcagtgtggccagcccctgttcgtgtacaagctggagcaggtgtctgagaagggcaaggcttacaccaactacttcggacggtgcaatgtggccgagcacgaaaagctgatcctgctggcccagctgaagcccgagaaggatagcgacgaagccgtgacatatagcctgggaaagtttgggcagagggccctggatttctacagcattcatgtgaccaaggagtccacccaccccgtgaagcccctggcccagatcgccggaaacagatacgcctccggacctgtgggaaaggccctgagcgacgcatgtatgggcacaatcgcctccttcctgtctaagtaccaggacatcatcatcgaacaccagaaggtggtgaagggcaaccagaagagactggagagcctgcgggagctggccggcaaggaaaacctggaataccctagcgtgaccctgccacctcagcctcacaccaaggagggcgttgatgcctacaacgaagtgatcgcccgggtgcgaatgtgggtgaacctgaacctgtggcagaagctgaagctaagcagagatgatgccaagcctctgctgagactgaagggattcccttcctttcctctggtcgagagacaggccaacgaagtggactggtgggacatggtgtgtaacgtgaagaagctgatcaacgagaaaaaggaggatggcaaggtgttttggcagaatctggctggctacaagagacaggaagccctgagaccatacctgagcagcgaggaagatcggaagaagggaaagaaattcgctcggtaccagctgggcgacctgctgctgcacctggaaaagaagcacggcgaggactggggaaaggtgtacgacgaggcctgggagcggattgacaagaaagtggaaggcctgagcaagcacatcaagctggaagaggaacggagaagcgaggacgcccagagcaaggccgccctgaccgactggctgcgggctaaggccagcttcgtgatcgagggcctgaaggaggccgacaaggacgagttctgcagatgcgagctgaagctgcagaagtggtacggggacctgcggggaaagcccttcgccatcgaagccgagaacagcatcctggacatcagcggcttcagcaagcagtacaactgtgccttcatctggcagaaggacggcgtgaagaagctgaacctgtacctgatcatcaactacttcaagggcggcaagctgcggttcaagaagatcaaacctgaagccttcgaagccaacagattctacaccgtgatcaacaaaaagagcggcgagatcgtgcccatggaggtgaacttcaacttcgacgaccccaacctgatcatcctgcctctggcctttggcaagagacagggcagagaattcatctggaacgacctgctgtccctggaaaccggcagcctgaagctggccaacggaagagtgatcgagaagacactgtacaacagaagaacccggcaggatgagcctgccctgttcgtggccctgaccttcgagcggcgggaggtcctggactcctccaatatcaaaccaatgaacctgatcggcgtggcaagaggcgaaaacatccccgccgtgatcgccctgaccgaccccgagggctgcccactgagccggtttaaggatagcctgggaaacccaacccacatcctgagaatcggcgagagctataaggagaagcagcggaccatccaggccaagaaggaggtggagcagcggagagccggcggctacagccggaagtacgccagcaaagccaagaatctggcagacgatatggtgagaaacaccgctagagatctgctgtactacgccgtgacccaggatgccatgctgatcttcgccaacctgagccggggcttcggccggcagggcaagcggaccttcatggccgagagacagtacacacggatggaggactggctgaccgccaagctggcctacgagggcctgagcaagacctacctgtccaagacactggcccagtacacctccaagacatgcagcaactgtgggtttaccatcaccagcgccgactacgacagggtgctggagaagctgaagaagacagcaacaggctggatgaccacaattaacggcaaggagctgaaggtggagggccagattacctactacaacagatacaagagacagaacgtagtcaaggacctgtccgtcgagctggatagactgagcgaagaatctgtgaacaacgacatctcctcctggacaaagggcagaagcggagaagctctgagcctcctgaagaaaagattctcccatagacccgtgcaggagaagttcgtgtgcctgaactgcggcttcgagacacacgcagccgagcaagccgccctgaacatcgccagatcctggctgttcctgcggagccaggagtacaagaaataccagacaaacaagacaaccggcaacaccgataagagagccttcgtcgagacctggcagtccttttaccggaagaagcttaaggaggtgtggaaacctgccgtgcggtctggcggatctggcggaggctccaccagccccaagaaaaagagaaaagtctaagctgccttctgcggggcttgccttctggccatgcccttcttctctcccttgcacctgtacctcttggtctttgaataaagcctgagtaggaaggctagcaaaaaaaaaaaaaaaaaaaaaaaaaaaaaaaaaaaaaaaaaaaaaaaaaaaaaaaaaaaaaaaaaaaaaaaaaaaaaaaa

SEQ ID NO: 9923 - RNA, 8787 nt, synthetic construct
  source 1..8787: mol_type = other RNA
aggaaataagagagaaaagaagagtaagaagaaatataagagccaccatggcccctaagaagaagcgtaaagtgagccggatgaaccacgaccaggagttcgacccccctaaggtgtaccctcccgtccccgccgagaagagaaagcccatccgggtcctgagcctgttcgatggcatcgccaccggtctgctggtgctgaaggacctgggcatccaggtggataggtacattgcctccgaggtgtgcgaggactccatcaccgtgggaatggtgcgtcatcagggcaagatcatgtacgtgggcgacgtgcggagcgtgacacagaagcatatccaggagtggggccctttcgacctggtgatcggcggcagcccttgcaatgacctgagcatcgtgaacccagcccggaagggcctgtacgagggaaccggcagactgttcttcgagttttacagactgctgcacgacgcccggcctaaggaaggcgacgaccggcccttcttttggctgttcgagaatgtggtggccatgggagtcagcgacaagcgggatattagccggttcctggagagcaaccccgtgatgatcgatgccaaggaagtgagcgccgcccaccgggccagatacttctggggcaatctgcctggcatgaacagacccctggccagcaccgtgaacgacaagctggagctgcaggagtgcctggagcacggccggatcgccaagttcagcaaggtgagaaccatcaccacccgaagcaacagcatcaaacaaggcaaggaccagcactttcctgtgttcatgaacgagaaggaggacatcctgtggtgtaccgagatggagagagtgttcgggttcccagtccactacacagatgtcagcaacatgtctagactggccagacagagactgctgggaagaagctggtccgtccctgtgatcagacacctgttcgcccctctgaaggagtacttcgcctgcgtgagcagcggcaacagcaacgccaacagccggggccccagcttctctagcggcctggtgccactgtccctgagagggagccacatgggccccatggagatctacaaaaccgtgagcgcctggaagcggcagcctgtgcgcgtgctgagcctgtttcggaatatcgataaagtcctgaaaagcctgggattcctggagagcggctctggctccggcggtggcaccctgaagtacgtggaggatgtgacaaacgtggtcagacgggatgtggagaagtggggccccttcgatctggtgtacggcagcacccaacccctgggcagctcttgtgaccggtgccctggctggtacatgtttcagttccaccggatcctgcagtacgccctgccgagacaggagtcccagcggccattcttttggattttcatggacaacttgctgctgaccgaggatgaccaggaaactaccactcggttcctgcagaccgaagccgtgaccctgcaggacgtgagaggccgggactaccagaacgccatgcgggtgtggtccaacatccctggactgaaaagcaagcacgcacctctgacccctaaagaagaggagtacctgcaggcccaggtgcggagcagaagcaagctggacgcccctaaggtggatctgctggtgaagaattgcctcctgcccctgagagagtacttcaagtatttcagccagaatagtctgcccctgggaggcagcggcggcggcatgatcgagtaccagatccccgtgagcttcaaggacgtggtggtgggcttcacccaggaggagtggcacaggctgagccccgcccagagggccctgtacagggacgtgatgctggagacctacagcaacctggtgagcgtgggctacgagggcaccaagcccgacgtgatcctgaggctggagcaggaggaggccccctggatcggcgaggccgcctgccccggctgccactgctggggcaagggcggcccaagcagcggcgcccctcctcccagcggcggcaggcggcccaagcagcggcgcccctcctcccagcggcggcagcccagccggctccccaacctctaccgaggagggcacctctgagtccgccacccccgagagcggccctggcacctccaccgagcccagcgagggcagcgcacccggcagccctgccggcagccccacctccacagaggagggaaccagcaccgagcccagcgaaggcagcgccccaggcaccagcaccgagcctagtgagcaggagattaaacggatcaacaagatcagaagaagacttgtgaaagacagcaacaccaagaaggccggcaagacaggccccatgaaaaccctgctggttagagtgatgacacccgatctgagagagcggctggaaaacctgagaaagaagcctgaaaatatcccccagcccatcagcaatacatctagagccaacctgaataagctgctgaccgattacaccgaaatgaagaaggcgatcctgcatgtgtactgggaagagttccagaaggaccctgtgggcctgatgagccgggtggcccagcctgccagcaagaagatcgatcagaacaagctgaaacctgagatggacgagaagggcaacctgaccaccgccggctttgcctgctctcagtgtggccagcccctgttcgtgtacaagctggagcaggtgtctgagaagggcaaggcttacaccaactacttcggacggtgcaatgtggccgagcacgaaaagctgatcctgctggcccagctgaagcccgagaaggatagcgacgaagccgtgacatatagcctgggaaagtttgggcagagggccctggatttctacagcattcatgtgaccaaggagtccacccaccccgtgaagcccctggcccagatcgccggaaacagatacgcctccggacctgtgggaaaggccctgagcgacgcatgtatgggcacaatcgcctccttcctgtctaagtaccaggacatcatcatcgaacaccagaaggtggtgaagggcaaccagaagagactggagagcctgcgggagctggccggcaaggaaaacctggaataccctagcgtgaccctgccacctcagcctcacaccaaggagggcgttgatgcctacaacgaagtgatcgcccgggtgcgaatgtgggtgaacctgaacctgtggcagaagctgaagctaagcagagatgatgccaagcctctgctgagactgaagggattcccttcctttcctctggtcgagagacaggccaacgaagtggactggtgggacatggtgtgtaacgtgaagaagctgatcaacgagaaaaaggaggatggcaaggtgttttggcagaatctggctggctacaagagacaggaagccctgagaccatacctgagcagcgaggaagatcggaagaagggaaagaaattcgctcggtaccagctgggcgacctgctgctgcacctggaaaagaagcacggcgaggactggggaaaggtgtacgacgaggcctgggagcggattgacaagaaagtggaaggcctgagcaagcacatcaagctggaagaggaacggagaagcgaggacgcccagagcaaggccgccctgaccgactggctgcgggctaaggccagcttcgtgatcgagggcctgaaggaggccgacaaggacgagttctgcagatgcgagctgaagctgcagaagtggtacggggacctgcggggaaagcccttcgccatcgaagccgagaacagcatcctggacatcagcggcttcagcaagcagtacaactgtgccttcatctggcagaaggacggcgtgaagaagctgaacctgtacctgatcatcaactacttcaagggcggcaagctgcggttcaagaagatcaaacctgaagccttcgaagccaacagattctacaccgtgatcaacaaaaagagcggcgagatcgtgcccatggaggtgaacttcaacttcgacgaccccaacctgatcatcctgcctctggcctttggcaagagacagggcagagaattcatctggaacgacctgctgtccctggaaaccggcagcctgaagctggccaacggaagagtgatcgagaagacactgtacaacagaagaacccggcaggatgagcctgccctgttcgtggccctgaccttcgagcggcgggaggtcctggactcctccaatatcaaaccaatgaacctgatcggcgtggcaagaggcgaaaacatccccgccgtgatcgccctgaccgaccccgagggctgcccactgagccggtttaaggatagcctgggaaacccaacccacatcctgagaatcggcgagagctataaggagaagcagcggaccatccaggccaagaaggaggtggagcagcggagagccggcggctacagccggaagtacgccagcaaagccaagaatctggcagacgatatggtgagaaacaccgctagagatctgctgtactacgccgtgacccaggatgccatgctgatcttcgccaacctgagccggggcttcggccggcagggcaagcggaccttcatggccgagagacagtacacacggatggaggactggctgaccgccaagctggcctacgagggcctgagcaagacctacctgtccaagacactggcccagtacacctccaagacatgcagcaactgtgggtttaccatcaccagcgccgactacgacagggtgctggagaagctgaagaagacagcaacaggctggatgaccacaattaacggcaaggagctgaaggtggagggccagattacctactacaacagatacaagagacagaacgtagtcaaggacctgtccgtcgagctggatagactgagcgaagaatctgtgaacaacgacatctcctcctggacaaagggcagaagcggagaagctctgagcctcctgaagaaaagattctcccatagacccgtgcaggagaagttcgtgtgcctgaactgcggcttcgagacacacgcagccgagcaagccgccctgaacatcgccagatcctggctgttcctgcggagccaggagtacaagaaataccagacaaacaagacaaccggcaacaccgataagagagccttcgtcgagacctggcagtccttttaccggaagaagcttaaggaggtgtggaaacctgccgtgcggtctggcggatctggcggaggctccaccagccccaagaaaaagagaaaagtctaagctgccttctgcggggcttgccttctggccatgcccttcttctctcccttgcacctgtacctcttggtctttgaataaagcctgagtaggaaggctagcaaaaaaaaaaaaaaaaaaaaaaaaaaaaaaaaaaaaaaaaaaaaaaaaaaaaaaaaaaaaaaaaaaaaaaaaaaaaaaaagcccagccggctccccaacctctaccgaggagggcacctctgagtccgccacccccgagagcggccctggcacctccaccgagcccagcgagggcagcgcacccggcagccctgccggcagccccacctccacagaggagggaaccagcaccgagcccagcgaaggcagcgccccaggcaccagcaccgagcctagtgagcaggagattaaacggatcaacaagatcagaagaagacttgtgaaagacagcaacaccaagaaggccggcaagacaggccccatgaaaaccctgctggttagagtgatgacacccgatctgagagagcggctggaaaacctgagaaagaagcctgaaaatatcccccagcccatcagcaatacatctagagccaacctgaataagctgctgaccgattacaccgaaatgaagaaggcgatcctgcatgtgtactgggaagagttccagaaggaccctgtgggcctgatgagccgggtggcccagcctgccagcaagaagatcgatcagaacaagctgaaacctgagatggacgagaagggcaacctgaccaccgccggctttgcctgctctcagtgtggccagcccctgttcgtgtacaagctggagcaggtgtctgagaagggcaaggcttacaccaactacttcggacggtgcaatgtggccgagcacgaaaagctgatcctgctggcccagctgaagcccgagaaggatagcgacgaagccgtgacatatagcctgggaaagtttgggcagagggccctggatttctacagcattcatgtgaccaaggagtccacccaccccgtgaagcccctggcccagatcgccggaaacagatacgcctccggacctgtgggaaaggccctgagcgacgcatgtatgggcacaatcgcctccttcctgtctaagtaccaggacatcatcatcgaacaccagaaggtggtgaagggcaaccagaagagactggagagcctgcgggagctggccggcaaggaaaacctggaataccctagcgtgaccctgccacctcagcctcacaccaaggagggcgttgatgcctacaacgaagtgatcgcccgggtgcgaatgtgggtgaacctgaacctgtggcagaagctgaagctaagcagagatgatgccaagcctctgctgagactgaagggattcccttcctttcctctggtcgagagacaggccaacgaagtggactggtgggacatggtgtgtaacgtgaagaagctgatcaacgagaaaaaggaggatggcaaggtgttttggcagaatctggctggctacaagagacaggaagccctgagaccatacctgagcagcgaggaagatcggaagaagggaaagaaattcgctcggtaccagctgggcgacctgctgctgcacctggaaaagaagcacggcgaggactggggaaaggtgtacgacgaggcctgggagcggattgacaagaaagtggaaggcctgagcaagcacatcaagctggaagaggaacggagaagcgaggacgcccagagcaaggccgccctgaccgactggctgcgggctaaggccagcttcgtgatcgagggcctgaaggaggccgacaaggacgagttctgcagatgcgagctgaagctgcagaagtggtacggggacctgcggggaaagcccttcgccatcgaagccgagaacagcatcctggacatcagcggcttcagcaagcagtacaactgtgccttcatctggcagaaggacggcgtgaagaagctgaacctgtacctgatcatcaactacttcaagggcggcaagctgcggttcaagaagatcaaacctgaagccttcgaagccaacagattctacaccgtgatcaacaaaaagagcggcgagatcgtgcccatggaggtgaacttcaacttcgacgaccccaacctgatcatcctgcctctggcctttggcaagagacagggcagagaattcatctggaacgacctgctgtccctggaaaccggcagcctgaagctggccaacggaagagtgatcgagaagacactgtacaacagaagaacccggcaggatgagcctgccctgttcgtggccctgaccttcgagcggcgggaggtcctggactcctccaatatcaaaccaatgaacctgatcggcgtggcaagaggcgaaaacatccccgccgtgatcgccctgaccgaccccgagggctgcccactgagccggtttaaggatagcctgggaaacccaacccacatcctgagaatcggcgagagctataaggagaagcagcggaccatccaggccaagaaggaggtggagcagcggagagccggcggctacagccggaagtacgccagcaaagccaagaatctggcagacgatatggtgagaaacaccgctagagatctgctgtactacgccgtgacccaggatgccatgctgatcttcgccaacctgagccggggcttcggccggcagggcaagcggaccttcatggccgagagacagtacacacggatggaggactggctgaccgccaagctggcctacgagggcctgagcaagacctacctgtccaagacactggcccagtacacctccaagacatgcagcaactgtgggtttaccatcaccagcgccgactacgacagggtgctggagaagctgaagaagacagcaacaggctggatgaccacaattaacggcaaggagctgaaggtggagggccagattacctactacaacagatacaagagacagaacgtagtcaaggacctgtccgtcgagctggatagactgagcgaagaatctgtgaacaacgacatctcctcctggacaaagggcagaagcggagaagctctgagcctcctgaagaaaagattctcccatagacccgtgcaggagaagttcgtgtgcctgaactgcggcttcgagacacacgcagccgagcaagccgccctgaacatcgccagatcctggctgttcctgcggagccaggagtacaagaaataccagacaaacaagacaaccggcaacaccgataagagagccttcgtcgagacctggcagtccttttaccggaagaagcttaaggaggtgtggaaacctgccgtgcggtctggcggatctggcggaggctccaccagccccaagaaaaagagaaaagtctaagctgccttctgcggggcttgccttctggccatgcccttcttctctcccttgcacctgtacctcttggtctttgaataaagcctgagtaggaaggctagcaaaaaaaaaaaaaaaaaaaaaaaaaaaaaaaaaaaaaaaaaaaaaaaaaaaaaaaaaaaaaaaaaaaaaaaaaaaaaaaa

SEQ ID NO: 9924 - RNA, 8787 nt, synthetic construct
  source 1..8787: mol_type = other RNA
aggaaataagagagaaaagaagagtaagaagaaatataagagccaccatggcccctaagaagaagcgtaaagtgagccggatgaaccacgaccaggagttcgacccccctaaggtgtaccctcccgtccccgccgagaagagaaagcccatccgggtcctgagcctgttcgatggcatcgccaccggtctgctggtgctgaaggacctgggcatccaggtggataggtacattgcctccgaggtgtgcgaggactccatcaccgtgggaatggtgcgtcatcagggcaagatcatgtacgtgggcgacgtgcggagcgtgacacagaagcatatccaggagtggggccctttcgacctggtgatcggcggcagcccttgcaatgacctgagcatcgtgaacccagcccggaagggcctgtacgagggaaccggcagactgttcttcgagttttacagactgctgcacgacgcccggcctaaggaaggcgacgaccggcccttcttttggctgttcgagaatgtggtggccatgggagtcagcgacaagcgggatattagccggttcctggagagcaaccccgtgatgatcgatgccaaggaagtgagcgccgcccaccgggccagatacttctggggcaatctgcctggcatgaacagacccctggccagcaccgtgaacgacaagctggagctgcaggagtgcctggagcacggccggatcgccaagttcagcaaggtgagaaccatcaccacccgaagcaacagcatcaaacaaggcaaggaccagcactttcctgtgttcatgaacgagaaggaggacatcctgtggtgtaccgagatggagagagtgttcgggttcccagtccactacacagatgtcagcaacatgtctagactggccagacagagactgctgggaagaagctggtccgtccctgtgatcagacacctgttcgcccctctgaaggagtacttcgcctgcgtgagcagcggcaacagcaacgccaacagccggggccccagcttctctagcggcctggtgccactgtccctgagagggagccacatgggccccatggagatctacaaaaccgtgagcgcctggaagcggcagcctgtgcgcgtgctgagcctgtttcggaatatcgataaagtcctgaaaagcctgggattcctggagagcggctctggctccggcggtggcaccctgaagtacgtggaggatgtgacaaacgtggtcagacgggatgtggagaagtggggccccttcgatctggtgtacggcagcacccaacccctgggcagctcttgtgaccggtgccctggctggtacatgtttcagttccaccggatcctgcagtacgccctgccgagacaggagtcccagcggccattcttttggattttcatggacaacttgctgctgaccgaggatgaccaggaaactaccactcggttcctgcagaccgaagccgtgaccctgcaggacgtgagaggccgggactaccagaacgccatgcgggtgtggtccaacatccctggactgaaaagcaagcacgcacctctgacccctaaagaagaggagtacctgcaggcccaggtgcggagcagaagcaagctggacgcccctaaggtggatctgctggtgaagaattgcctcctgcccctgagagagtacttcaagtatttcagccagaatagtctgcccctgggaggcagcggcggcggcctgcaggaggccgtgaccttcaacgacgtggccatcgacttcagccaggaggagtgggagtggctgaacagcgcccagaggagcctgtacaggaccgtggtgctggagaactacaggaacctggtgagcgtgggcgcctgcatcagcaagcccagcctgatcagcctgctggagcacggcaaggagccctgggaggtgaagggccaggtgaccggcagcagggtgcagggcggcgagagcgtgggcggcccaagcagcggcgcccctcctcccagcggcggcaggcggcccaagcagcggcgcccctcctcccagcggcggcagcccagccggctccccaacctctaccgaggagggcacctctgagtccgccacccccgagagcggccctggcacctccaccgagcccagcgagggcagcgcacccggcagccctgccggcagccccacctccacagaggagggaaccagcaccgagcccagcgaaggcagcgccccaggcaccagcaccgagcctagtgagcaggagattaaacggatcaacaagatcagaagaagacttgtgaaagacagcaacaccaagaaggccggcaagacaggccccatgaaaaccctgctggttagagtgatgacacccgatctgagagagcggctggaaaacctgagaaagaagcctgaaaatatcccccagcccatcagcaatacatctagagccaacctgaataagctgctgaccgattacaccgaaatgaagaaggcgatcctgcatgtgtactgggaagagttccagaaggaccctgtgggcctgatgagccgggtggcccagcctgccagcaagaagatcgatcagaacaagctgaaacctgagatggacgagaagggcaacctgaccaccgccggctttgcctgctctcagtgtggccagcccctgttcgtgtacaagctggagcaggtgtctgagaagggcaaggcttacaccaactacttcggacggtgcaatgtggccgagcacgaaaagctgatcctgctggcccagctgaagcccgagaaggatagcgacgaagccgtgacatatagcctgggaaagtttgggcagagggccctggatttctacagcattcatgtgaccaaggagtccacccaccccgtgaagcccctggcccagatcgccggaaacagatacgcctccggacctgtgggaaaggccctgagcgacgcatgtatgggcacaatcgcctccttcctgtctaagtaccaggacatcatcatcgaacaccagaaggtggtgaagggcaaccagaagagactggagagcctgcgggagctggccggcaaggaaaacctggaataccctagcgtgaccctgccacctcagcctcacaccaaggagggcgttgatgcctacaacgaagtgatcgcccgggtgcgaatgtgggtgaacctgaacctgtggcagaagctgaagctaagcagagatgatgccaagcctctgctgagactgaagggattcccttcctttcctctggtcgagagacaggccaacgaagtggactggtgggacatggtgtgtaacgtgaagaagctgatcaacgagaaaaaggaggatggcaaggtgttttggcagaatctggctggctacaagagacaggaagccctgagaccatacctgagcagcgaggaagatcggaagaagggaaagaaattcgctcggtaccagctgggcgacctgctgctgcacctggaaaagaagcacggcgaggactggggaaaggtgtacgacgaggcctgggagcggattgacaagaaagtggaaggcctgagcaagcacatcaagctggaagaggaacggagaagcgaggacgcccagagcaaggccgccctgaccgactggctgcgggctaaggccagcttcgtgatcgagggcctgaaggaggccgacaaggacgagttctgcagatgcgagctgaagctgcagaagtggtacggggacctgcggggaaagcccttcgccatcgaagccgagaacagcatcctggacatcagcggcttcagcaagcagtacaactgtgccttcatctggcagaaggacggcgtgaagaagctgaacctgtacctgatcatcaactacttcaagggcggcaagctgcggttcaagaagatcaaacctgaagccttcgaagccaacagattctacaccgtgatcaacaaaaagagcggcgagatcgtgcccatggaggtgaacttcaacttcgacgaccccaacctgatcatcctgcctctggcctttggcaagagacagggcagagaattcatctggaacgacctgctgtccctggaaaccggcagcctgaagctggccaacggaagagtgatcgagaagacactgtacaacagaagaacccggcaggatgagcctgccctgttcgtggccctgaccttcgagcggcgggaggtcctggactcctccaatatcaaaccaatgaacctgatcggcgtggcaagaggcgaaaacatccccgccgtgatcgccctgaccgaccccgagggctgcccactgagccggtttaaggatagcctgggaaacccaacccacatcctgagaatcggcgagagctataaggagaagcagcggaccatccaggccaagaaggaggtggagcagcggagagccggcggctacagccggaagtacgccagcaaagccaagaatctggcagacgatatggtgagaaacaccgctagagatctgctgtactacgccgtgacccaggatgccatgctgatcttcgccaacctgagccggggcttcggccggcagggcaagcggaccttcatggccgagagacagtacacacggatggaggactggctgaccgccaagctggcctacgagggcctgagcaagacctacctgtccaagacactggcccagtacacctccaagacatgcagcaactgtgggtttaccatcaccagcgccgactacgacagggtgctggagaagctgaagaagacagcaacaggctggatgaccacaattaacggcaaggagctgaaggtggagggccagattacctactacaacagatacaagagacagaacgtagtcaaggacctgtccgtcgagctggatagactgagcgaagaatctgtgaacaacgacatctcctcctggacaaagggcagaagcggagaagctctgagcctcctgaagaaaagattctcccatagacccgtgcaggagaagttcgtgtgcctgaactgcggcttcgagacacacgcagccgagcaagccgccctgaacatcgccagatcctggctgttcctgcggagccaggagtacaagaaataccagacaaacaagacaaccggcaacaccgataagagagccttcgtcgagacctggcagtccttttaccggaagaagcttaaggaggtgtggaaacctgccgtgcggtctggcggatctggcggaggctccaccagccccaagaaaaagagaaaagtctaagctgccttctgcggggcttgccttctggccatgcccttcttctctcccttgcacctgtacctcttggtctttgaataaagcctgagtaggaaggctagcaaaaaaaaaaaaaaaaaaaaaaaaaaaaaaaaaaaaaaaaaaaaaaaaaaaaaaaaaaaaaaaaaaaaaaaaaaaaaaaagcccagccggctccccaacctctaccgaggagggcacctctgagtccgccacccccgagagcggccctggcacctccaccgagcccagcgagggcagcgcacccggcagccctgccggcagccccacctccacagaggagggaaccagcaccgagcccagcgaaggcagcgccccaggcaccagcaccgagcctagtgagcaggagattaaacggatcaacaagatcagaagaagacttgtgaaagacagcaacaccaagaaggccggcaagacaggccccatgaaaaccctgctggttagagtgatgacacccgatctgagagagcggctggaaaacctgagaaagaagcctgaaaatatcccccagcccatcagcaatacatctagagccaacctgaataagctgctgaccgattacaccgaaatgaagaaggcgatcctgcatgtgtactgggaagagttccagaaggaccctgtgggcctgatgagccgggtggcccagcctgccagcaagaagatcgatcagaacaagctgaaacctgagatggacgagaagggcaacctgaccaccgccggctttgcctgctctcagtgtggccagcccctgttcgtgtacaagctggagcaggtgtctgagaagggcaaggcttacaccaactacttcggacggtgcaatgtggccgagcacgaaaagctgatcctgctggcccagctgaagcccgagaaggatagcgacgaagccgtgacatatagcctgggaaagtttgggcagagggccctggatttctacagcattcatgtgaccaaggagtccacccaccccgtgaagcccctggcccagatcgccggaaacagatacgcctccggacctgtgggaaaggccctgagcgacgcatgtatgggcacaatcgcctccttcctgtctaagtaccaggacatcatcatcgaacaccagaaggtggtgaagggcaaccagaagagactggagagcctgcgggagctggccggcaaggaaaacctggaataccctagcgtgaccctgccacctcagcctcacaccaaggagggcgttgatgcctacaacgaagtgatcgcccgggtgcgaatgtgggtgaacctgaacctgtggcagaagctgaagctaagcagagatgatgccaagcctctgctgagactgaagggattcccttcctttcctctggtcgagagacaggccaacgaagtggactggtgggacatggtgtgtaacgtgaagaagctgatcaacgagaaaaaggaggatggcaaggtgttttggcagaatctggctggctacaagagacaggaagccctgagaccatacctgagcagcgaggaagatcggaagaagggaaagaaattcgctcggtaccagctgggcgacctgctgctgcacctggaaaagaagcacggcgaggactggggaaaggtgtacgacgaggcctgggagcggattgacaagaaagtggaaggcctgagcaagcacatcaagctggaagaggaacggagaagcgaggacgcccagagcaaggccgccctgaccgactggctgcgggctaaggccagcttcgtgatcgagggcctgaaggaggccgacaaggacgagttctgcagatgcgagctgaagctgcagaagtggtacggggacctgcggggaaagcccttcgccatcgaagccgagaacagcatcctggacatcagcggcttcagcaagcagtacaactgtgccttcatctggcagaaggacggcgtgaagaagctgaacctgtacctgatcatcaactacttcaagggcggcaagctgcggttcaagaagatcaaacctgaagccttcgaagccaacagattctacaccgtgatcaacaaaaagagcggcgagatcgtgcccatggaggtgaacttcaacttcgacgaccccaacctgatcatcctgcctctggcctttggcaagagacagggcagagaattcatctggaacgacctgctgtccctggaaaccggcagcctgaagctggccaacggaagagtgatcgagaagacactgtacaacagaagaacccggcaggatgagcctgccctgttcgtggccctgaccttcgagcggcgggaggtcctggactcctccaatatcaaaccaatgaacctgatcggcgtggcaagaggcgaaaacatccccgccgtgatcgccctgaccgaccccgagggctgcccactgagccggtttaaggatagcctgggaaacccaacccacatcctgagaatcggcgagagctataaggagaagcagcggaccatccaggccaagaaggaggtggagcagcggagagccggcggctacagccggaagtacgccagcaaagccaagaatctggcagacgatatggtgagaaacaccgctagagatctgctgtactacgccgtgacccaggatgccatgctgatcttcgccaacctgagccggggcttcggccggcagggcaagcggaccttcatggccgagagacagtacacacggatggaggactggctgaccgccaagctggcctacgagggcctgagcaagacctacctgtccaagacactggcccagtacacctccaagacatgcagcaactgtgggtttaccatcaccagcgccgactacgacagggtgctggagaagctgaagaagacagcaacaggctggatgaccacaattaacggcaaggagctgaaggtggagggccagattacctactacaacagatacaagagacagaacgtagtcaaggacctgtccgtcgagctggatagactgagcgaagaatctgtgaacaacgacatctcctcctggacaaagggcagaagcggagaagctctgagcctcctgaagaaaagattctcccatagacccgtgcaggagaagttcgtgtgcctgaactgcggcttcgagacacacgcagccgagcaagccgccctgaacatcgccagatcctggctgttcctgcggagccaggagtacaagaaataccagacaaacaagacaaccggcaacaccgataagagagccttcgtcgagacctggcagtccttttaccggaagaagcttaaggaggtgtggaaacctgccgtgcggtctggcggatctggcggaggctccaccagccccaagaaaaagagaaaagtctaagctgccttctgcggggcttgccttctggccatgcccttcttctctcccttgcacctgtacctcttggtctttgaataaagcctgagtaggaaggctagcaaaaaaaaaaaaaaaaaaaaaaaaaaaaaaaaaaaaaaaaaaaaaaaaaaaaaaaaaaaaaaaaaaaaaaaaaaaaaaaa

SEQ ID NO: 9925 - RNA, 8787 nt, synthetic construct
  source 1..8787: mol_type = other RNA
aggaaataagagagaaaagaagagtaagaagaaatataagagccaccatggcccctaagaagaagcgtaaagtgagccggatgaaccacgaccaggagttcgacccccctaaggtgtaccctcccgtccccgccgagaagagaaagcccatccgggtcctgagcctgttcgatggcatcgccaccggtctgctggtgctgaaggacctgggcatccaggtggataggtacattgcctccgaggtgtgcgaggactccatcaccgtgggaatggtgcgtcatcagggcaagatcatgtacgtgggcgacgtgcggagcgtgacacagaagcatatccaggagtggggccctttcgacctggtgatcggcggcagcccttgcaatgacctgagcatcgtgaacccagcccggaagggcctgtacgagggaaccggcagactgttcttcgagttttacagactgctgcacgacgcccggcctaaggaaggcgacgaccggcccttcttttggctgttcgagaatgtggtggccatgggagtcagcgacaagcgggatattagccggttcctggagagcaaccccgtgatgatcgatgccaaggaagtgagcgccgcccaccgggccagatacttctggggcaatctgcctggcatgaacagacccctggccagcaccgtgaacgacaagctggagctgcaggagtgcctggagcacggccggatcgccaagttcagcaaggtgagaaccatcaccacccgaagcaacagcatcaaacaaggcaaggaccagcactttcctgtgttcatgaacgagaaggaggacatcctgtggtgtaccgagatggagagagtgttcgggttcccagtccactacacagatgtcagcaacatgtctagactggccagacagagactgctgggaagaagctggtccgtccctgtgatcagacacctgttcgcccctctgaaggagtacttcgcctgcgtgagcagcggcaacagcaacgccaacagccggggccccagcttctctagcggcctggtgccactgtccctgagagggagccacatgggccccatggagatctacaaaaccgtgagcgcctggaagcggcagcctgtgcgcgtgctgagcctgtttcggaatatcgataaagtcctgaaaagcctgggattcctggagagcggctctggctccggcggtggcaccctgaagtacgtggaggatgtgacaaacgtggtcagacgggatgtggagaagtggggccccttcgatctggtgtacggcagcacccaacccctgggcagctcttgtgaccggtgccctggctggtacatgtttcagttccaccggatcctgcagtacgccctgccgagacaggagtcccagcggccattcttttggattttcatggacaacttgctgctgaccgaggatgaccaggaaactaccactcggttcctgcagaccgaagccgtgaccctgcaggacgtgagaggccgggactaccagaacgccatgcgggtgtggtccaacatccctggactgaaaagcaagcacgcacctctgacccctaaagaagaggagtacctgcaggcccaggtgcggagcagaagcaagctggacgcccctaaggtggatctgctggtgaagaattgcctcctgcccctgagagagtacttcaagtatttcagccagaatagtctgcccctgggaggcagcggcggcggcatggccctgacccagggccaggtgaccttcagggacgtggccatcgagttcagccaggaggagtggacctgcctggaccccgcccagaggagcctgtacagggacgtgatgctggagaactacaggaacctggccagcctgggcatcagctgcttcgacctgagcatcatcagcatgctggagcagggcaagggccccttcgccctggagagccaggtgcagagggccggcaaccccgacggcggcggcccaagcagcggcgcccctcctcccagcggcggcaggcggcccaagcagcggcgcccctcctcccagcggcggcagcccagccggctccccaacctctaccgaggagggcacctctgagtccgccacccccgagagcggccctggcacctccaccgagcccagcgagggcagcgcacccggcagccctgccggcagccccacctccacagaggagggaaccagcaccgagcccagcgaaggcagcgccccaggcaccagcaccgagcctagtgagcaggagattaaacggatcaacaagatcagaagaagacttgtgaaagacagcaacaccaagaaggccggcaagacaggccccatgaaaaccctgctggttagagtgatgacacccgatctgagagagcggctggaaaacctgagaaagaagcctgaaaatatcccccagcccatcagcaatacatctagagccaacctgaataagctgctgaccgattacaccgaaatgaagaaggcgatcctgcatgtgtactgggaagagttccagaaggaccctgtgggcctgatgagccgggtggcccagcctgccagcaagaagatcgatcagaacaagctgaaacctgagatggacgagaagggcaacctgaccaccgccggctttgcctgctctcagtgtggccagcccctgttcgtgtacaagctggagcaggtgtctgagaagggcaaggcttacaccaactacttcggacggtgcaatgtggccgagcacgaaaagctgatcctgctggcccagctgaagcccgagaaggatagcgacgaagccgtgacatatagcctgggaaagtttgggcagagggccctggatttctacagcattcatgtgaccaaggagtccacccaccccgtgaagcccctggcccagatcgccggaaacagatacgcctccggacctgtgggaaaggccctgagcgacgcatgtatgggcacaatcgcctccttcctgtctaagtaccaggacatcatcatcgaacaccagaaggtggtgaagggcaaccagaagagactggagagcctgcgggagctggccggcaaggaaaacctggaataccctagcgtgaccctgccacctcagcctcacaccaaggagggcgttgatgcctacaacgaagtgatcgcccgggtgcgaatgtgggtgaacctgaacctgtggcagaagctgaagctaagcagagatgatgccaagcctctgctgagactgaagggattcccttcctttcctctggtcgagagacaggccaacgaagtggactggtgggacatggtgtgtaacgtgaagaagctgatcaacgagaaaaaggaggatggcaaggtgttttggcagaatctggctggctacaagagacaggaagccctgagaccatacctgagcagcgaggaagatcggaagaagggaaagaaattcgctcggtaccagctgggcgacctgctgctgcacctggaaaagaagcacggcgaggactggggaaaggtgtacgacgaggcctgggagcggattgacaagaaagtggaaggcctgagcaagcacatcaagctggaagaggaacggagaagcgaggacgcccagagcaaggccgccctgaccgactggctgcgggctaaggccagcttcgtgatcgagggcctgaaggaggccgacaaggacgagttctgcagatgcgagctgaagctgcagaagtggtacggggacctgcggggaaagcccttcgccatcgaagccgagaacagcatcctggacatcagcggcttcagcaagcagtacaactgtgccttcatctggcagaaggacggcgtgaagaagctgaacctgtacctgatcatcaactacttcaagggcggcaagctgcggttcaagaagatcaaacctgaagccttcgaagccaacagattctacaccgtgatcaacaaaaagagcggcgagatcgtgcccatggaggtgaacttcaacttcgacgaccccaacctgatcatcctgcctctggcctttggcaagagacagggcagagaattcatctggaacgacctgctgtccctggaaaccggcagcctgaagctggccaacggaagagtgatcgagaagacactgtacaacagaagaacccggcaggatgagcctgccctgttcgtggccctgaccttcgagcggcgggaggtcctggactcctccaatatcaaaccaatgaacctgatcggcgtggcaagaggcgaaaacatccccgccgtgatcgccctgaccgaccccgagggctgcccactgagccggtttaaggatagcctgggaaacccaacccacatcctgagaatcggcgagagctataaggagaagcagcggaccatccaggccaagaaggaggtggagcagcggagagccggcggctacagccggaagtacgccagcaaagccaagaatctggcagacgatatggtgagaaacaccgctagagatctgctgtactacgccgtgacccaggatgccatgctgatcttcgccaacctgagccggggcttcggccggcagggcaagcggaccttcatggccgagagacagtacacacggatggaggactggctgaccgccaagctggcctacgagggcctgagcaagacctacctgtccaagacactggcccagtacacctccaagacatgcagcaactgtgggtttaccatcaccagcgccgactacgacagggtgctggagaagctgaagaagacagcaacaggctggatgaccacaattaacggcaaggagctgaaggtggagggccagattacctactacaacagatacaagagacagaacgtagtcaaggacctgtccgtcgagctggatagactgagcgaagaatctgtgaacaacgacatctcctcctggacaaagggcagaagcggagaagctctgagcctcctgaagaaaagattctcccatagacccgtgcaggagaagttcgtgtgcctgaactgcggcttcgagacacacgcagccgagcaagccgccctgaacatcgccagatcctggctgttcctgcggagccaggagtacaagaaataccagacaaacaagacaaccggcaacaccgataagagagccttcgtcgagacctggcagtccttttaccggaagaagcttaaggaggtgtggaaacctgccgtgcggtctggcggatctggcggaggctccaccagccccaagaaaaagagaaaagtctaagctgccttctgcggggcttgccttctggccatgcccttcttctctcccttgcacctgtacctcttggtctttgaataaagcctgagtaggaaggctagcaaaaaaaaaaaaaaaaaaaaaaaaaaaaaaaaaaaaaaaaaaaaaaaaaaaaaaaaaaaaaaaaaaaaaaaaaaaaaaaagcccagccggctccccaacctctaccgaggagggcacctctgagtccgccacccccgagagcggccctggcacctccaccgagcccagcgagggcagcgcacccggcagccctgccggcagccccacctccacagaggagggaaccagcaccgagcccagcgaaggcagcgccccaggcaccagcaccgagcctagtgagcaggagattaaacggatcaacaagatcagaagaagacttgtgaaagacagcaacaccaagaaggccggcaagacaggccccatgaaaaccctgctggttagagtgatgacacccgatctgagagagcggctggaaaacctgagaaagaagcctgaaaatatcccccagcccatcagcaatacatctagagccaacctgaataagctgctgaccgattacaccgaaatgaagaaggcgatcctgcatgtgtactgggaagagttccagaaggaccctgtgggcctgatgagccgggtggcccagcctgccagcaagaagatcgatcagaacaagctgaaacctgagatggacgagaagggcaacctgaccaccgccggctttgcctgctctcagtgtggccagcccctgttcgtgtacaagctggagcaggtgtctgagaagggcaaggcttacaccaactacttcggacggtgcaatgtggccgagcacgaaaagctgatcctgctggcccagctgaagcccgagaaggatagcgacgaagccgtgacatatagcctgggaaagtttgggcagagggccctggatttctacagcattcatgtgaccaaggagtccacccaccccgtgaagcccctggcccagatcgccggaaacagatacgcctccggacctgtgggaaaggccctgagcgacgcatgtatgggcacaatcgcctccttcctgtctaagtaccaggacatcatcatcgaacaccagaaggtggtgaagggcaaccagaagagactggagagcctgcgggagctggccggcaaggaaaacctggaataccctagcgtgaccctgccacctcagcctcacaccaaggagggcgttgatgcctacaacgaagtgatcgcccgggtgcgaatgtgggtgaacctgaacctgtggcagaagctgaagctaagcagagatgatgccaagcctctgctgagactgaagggattcccttcctttcctctggtcgagagacaggccaacgaagtggactggtgggacatggtgtgtaacgtgaagaagctgatcaacgagaaaaaggaggatggcaaggtgttttggcagaatctggctggctacaagagacaggaagccctgagaccatacctgagcagcgaggaagatcggaagaagggaaagaaattcgctcggtaccagctgggcgacctgctgctgcacctggaaaagaagcacggcgaggactggggaaaggtgtacgacgaggcctgggagcggattgacaagaaagtggaaggcctgagcaagcacatcaagctggaagaggaacggagaagcgaggacgcccagagcaaggccgccctgaccgactggctgcgggctaaggccagcttcgtgatcgagggcctgaaggaggccgacaaggacgagttctgcagatgcgagctgaagctgcagaagtggtacggggacctgcggggaaagcccttcgccatcgaagccgagaacagcatcctggacatcagcggcttcagcaagcagtacaactgtgccttcatctggcagaaggacggcgtgaagaagctgaacctgtacctgatcatcaactacttcaagggcggcaagctgcggttcaagaagatcaaacctgaagccttcgaagccaacagattctacaccgtgatcaacaaaaagagcggcgagatcgtgcccatggaggtgaacttcaacttcgacgaccccaacctgatcatcctgcctctggcctttggcaagagacagggcagagaattcatctggaacgacctgctgtccctggaaaccggcagcctgaagctggccaacggaagagtgatcgagaagacactgtacaacagaagaacccggcaggatgagcctgccctgttcgtggccctgaccttcgagcggcgggaggtcctggactcctccaatatcaaaccaatgaacctgatcggcgtggcaagaggcgaaaacatccccgccgtgatcgccctgaccgaccccgagggctgcccactgagccggtttaaggatagcctgggaaacccaacccacatcctgagaatcggcgagagctataaggagaagcagcggaccatccaggccaagaaggaggtggagcagcggagagccggcggctacagccggaagtacgccagcaaagccaagaatctggcagacgatatggtgagaaacaccgctagagatctgctgtactacgccgtgacccaggatgccatgctgatcttcgccaacctgagccggggcttcggccggcagggcaagcggaccttcatggccgagagacagtacacacggatggaggactggctgaccgccaagctggcctacgagggcctgagcaagacctacctgtccaagacactggcccagtacacctccaagacatgcagcaactgtgggtttaccatcaccagcgccgactacgacagggtgctggagaagctgaagaagacagcaacaggctggatgaccacaattaacggcaaggagctgaaggtggagggccagattacctactacaacagatacaagagacagaacgtagtcaaggacctgtccgtcgagctggatagactgagcgaagaatctgtgaacaacgacatctcctcctggacaaagggcagaagcggagaagctctgagcctcctgaagaaaagattctcccatagacccgtgcaggagaagttcgtgtgcctgaactgcggcttcgagacacacgcagccgagcaagccgccctgaacatcgccagatcctggctgttcctgcggagccaggagtacaagaaataccagacaaacaagacaaccggcaacaccgataagagagccttcgtcgagacctggcagtccttttaccggaagaagcttaaggaggtgtggaaacctgccgtgcggtctggcggatctggcggaggctccaccagccccaagaaaaagagaaaagtctaagctgccttctgcggggcttgccttctggccatgcccttcttctctcccttgcacctgtacctcttggtctttgaataaagcctgagtaggaaggctagcaaaaaaaaaaaaaaaaaaaaaaaaaaaaaaaaaaaaaaaaaaaaaaaaaaaaaaaaaaaaaaaaaaaaaaaaaaaaaaaa

SEQ ID NO: 9926 - RNA, 8787 nt, synthetic construct
  source 1..8787: mol_type = other RNA
aggaaataagagagaaaagaagagtaagaagaaatataagagccaccatggcccctaagaagaagcgtaaagtgagccggatgaaccacgaccaggagttcgacccccctaaggtgtaccctcccgtccccgccgagaagagaaagcccatccgggtcctgagcctgttcgatggcatcgccaccggtctgctggtgctgaaggacctgggcatccaggtggataggtacattgcctccgaggtgtgcgaggactccatcaccgtgggaatggtgcgtcatcagggcaagatcatgtacgtgggcgacgtgcggagcgtgacacagaagcatatccaggagtggggccctttcgacctggtgatcggcggcagcccttgcaatgacctgagcatcgtgaacccagcccggaagggcctgtacgagggaaccggcagactgttcttcgagttttacagactgctgcacgacgcccggcctaaggaaggcgacgaccggcccttcttttggctgttcgagaatgtggtggccatgggagtcagcgacaagcgggatattagccggttcctggagagcaaccccgtgatgatcgatgccaaggaagtgagcgccgcccaccgggccagatacttctggggcaatctgcctggcatgaacagacccctggccagcaccgtgaacgacaagctggagctgcaggagtgcctggagcacggccggatcgccaagttcagcaaggtgagaaccatcaccacccgaagcaacagcatcaaacaaggcaaggaccagcactttcctgtgttcatgaacgagaaggaggacatcctgtggtgtaccgagatggagagagtgttcgggttcccagtccactacacagatgtcagcaacatgtctagactggccagacagagactgctgggaagaagctggtccgtccctgtgatcagacacctgttcgcccctctgaaggagtacttcgcctgcgtgagcagcggcaacagcaacgccaacagccggggccccagcttctctagcggcctggtgccactgtccctgagagggagccacatgggccccatggagatctacaaaaccgtgagcgcctggaagcggcagcctgtgcgcgtgctgagcctgtttcggaatatcgataaagtcctgaaaagcctgggattcctggagagcggctctggctccggcggtggcaccctgaagtacgtggaggatgtgacaaacgtggtcagacgggatgtggagaagtggggccccttcgatctggtgtacggcagcacccaacccctgggcagctcttgtgaccggtgccctggctggtacatgtttcagttccaccggatcctgcagtacgccctgccgagacaggagtcccagcggccattcttttggattttcatggacaacttgctgctgaccgaggatgaccaggaaactaccactcggttcctgcagaccgaagccgtgaccctgcaggacgtgagaggccgggactaccagaacgccatgcgggtgtggtccaacatccctggactgaaaagcaagcacgcacctctgacccctaaagaagaggagtacctgcaggcccaggtgcggagcagaagcaagctggacgcccctaaggtggatctgctggtgaagaattgcctcctgcccctgagagagtacttcaagtatttcagccagaatagtctgcccctgggaggcagcggcggcggcctggcccccgacgaccacggcagcagctacgagggcagcgtgagcttcagggacgtggccatcgacttcagcagggaggagtggaggcacctggaccccagccagaggaacctgtacagggacgtgatgctggagacctacagccacctgctgagcgtgggctaccaggtgcccgaggccgaggtggtgatgctggagcagggcaaggagccctgggccctgcagggcgagaggcccaggcacggcggcccaagcagcggcgcccctcctcccagcggcggcaggcggcccaagcagcggcgcccctcctcccagcggcggcagcccagccggctccccaacctctaccgaggagggcacctctgagtccgccacccccgagagcggccctggcacctccaccgagcccagcgagggcagcgcacccggcagccctgccggcagccccacctccacagaggagggaaccagcaccgagcccagcgaaggcagcgccccaggcaccagcaccgagcctagtgagcaggagattaaacggatcaacaagatcagaagaagacttgtgaaagacagcaacaccaagaaggccggcaagacaggccccatgaaaaccctgctggttagagtgatgacacccgatctgagagagcggctggaaaacctgagaaagaagcctgaaaatatcccccagcccatcagcaatacatctagagccaacctgaataagctgctgaccgattacaccgaaatgaagaaggcgatcctgcatgtgtactgggaagagttccagaaggaccctgtgggcctgatgagccgggtggcccagcctgccagcaagaagatcgatcagaacaagctgaaacctgagatggacgagaagggcaacctgaccaccgccggctttgcctgctctcagtgtggccagcccctgttcgtgtacaagctggagcaggtgtctgagaagggcaaggcttacaccaactacttcggacggtgcaatgtggccgagcacgaaaagctgatcctgctggcccagctgaagcccgagaaggatagcgacgaagccgtgacatatagcctgggaaagtttgggcagagggccctggatttctacagcattcatgtgaccaaggagtccacccaccccgtgaagcccctggcccagatcgccggaaacagatacgcctccggacctgtgggaaaggccctgagcgacgcatgtatgggcacaatcgcctccttcctgtctaagtaccaggacatcatcatcgaacaccagaaggtggtgaagggcaaccagaagagactggagagcctgcgggagctggccggcaaggaaaacctggaataccctagcgtgaccctgccacctcagcctcacaccaaggagggcgttgatgcctacaacgaagtgatcgcccgggtgcgaatgtgggtgaacctgaacctgtggcagaagctgaagctaagcagagatgatgccaagcctctgctgagactgaagggattcccttcctttcctctggtcgagagacaggccaacgaagtggactggtgggacatggtgtgtaacgtgaagaagctgatcaacgagaaaaaggaggatggcaaggtgttttggcagaatctggctggctacaagagacaggaagccctgagaccatacctgagcagcgaggaagatcggaagaagggaaagaaattcgctcggtaccagctgggcgacctgctgctgcacctggaaaagaagcacggcgaggactggggaaaggtgtacgacgaggcctgggagcggattgacaagaaagtggaaggcctgagcaagcacatcaagctggaagaggaacggagaagcgaggacgcccagagcaaggccgccctgaccgactggctgcgggctaaggccagcttcgtgatcgagggcctgaaggaggccgacaaggacgagttctgcagatgcgagctgaagctgcagaagtggtacggggacctgcggggaaagcccttcgccatcgaagccgagaacagcatcctggacatcagcggcttcagcaagcagtacaactgtgccttcatctggcagaaggacggcgtgaagaagctgaacctgtacctgatcatcaactacttcaagggcggcaagctgcggttcaagaagatcaaacctgaagccttcgaagccaacagattctacaccgtgatcaacaaaaagagcggcgagatcgtgcccatggaggtgaacttcaacttcgacgaccccaacctgatcatcctgcctctggcctttggcaagagacagggcagagaattcatctggaacgacctgctgtccctggaaaccggcagcctgaagctggccaacggaagagtgatcgagaagacactgtacaacagaagaacccggcaggatgagcctgccctgttcgtggccctgaccttcgagcggcgggaggtcctggactcctccaatatcaaaccaatgaacctgatcggcgtggcaagaggcgaaaacatccccgccgtgatcgccctgaccgaccccgagggctgcccactgagccggtttaaggatagcctgggaaacccaacccacatcctgagaatcggcgagagctataaggagaagcagcggaccatccaggccaagaaggaggtggagcagcggagagccggcggctacagccggaagtacgccagcaaagccaagaatctggcagacgatatggtgagaaacaccgctagagatctgctgtactacgccgtgacccaggatgccatgctgatcttcgccaacctgagccggggcttcggccggcagggcaagcggaccttcatggccgagagacagtacacacggatggaggactggctgaccgccaagctggcctacgagggcctgagcaagacctacctgtccaagacactggcccagtacacctccaagacatgcagcaactgtgggtttaccatcaccagcgccgactacgacagggtgctggagaagctgaagaagacagcaacaggctggatgaccacaattaacggcaaggagctgaaggtggagggccagattacctactacaacagatacaagagacagaacgtagtcaaggacctgtccgtcgagctggatagactgagcgaagaatctgtgaacaacgacatctcctcctggacaaagggcagaagcggagaagctctgagcctcctgaagaaaagattctcccatagacccgtgcaggagaagttcgtgtgcctgaactgcggcttcgagacacacgcagccgagcaagccgccctgaacatcgccagatcctggctgttcctgcggagccaggagtacaagaaataccagacaaacaagacaaccggcaacaccgataagagagccttcgtcgagacctggcagtccttttaccggaagaagcttaaggaggtgtggaaacctgccgtgcggtctggcggatctggcggaggctccaccagccccaagaaaaagagaaaagtctaagctgccttctgcggggcttgccttctggccatgcccttcttctctcccttgcacctgtacctcttggtctttgaataaagcctgagtaggaaggctagcaaaaaaaaaaaaaaaaaaaaaaaaaaaaaaaaaaaaaaaaaaaaaaaaaaaaaaaaaaaaaaaaaaaaaaaaaaaaaaaagcccagccggctccccaacctctaccgaggagggcacctctgagtccgccacccccgagagcggccctggcacctccaccgagcccagcgagggcagcgcacccggcagccctgccggcagccccacctccacagaggagggaaccagcaccgagcccagcgaaggcagcgccccaggcaccagcaccgagcctagtgagcaggagattaaacggatcaacaagatcagaagaagacttgtgaaagacagcaacaccaagaaggccggcaagacaggccccatgaaaaccctgctggttagagtgatgacacccgatctgagagagcggctggaaaacctgagaaagaagcctgaaaatatcccccagcccatcagcaatacatctagagccaacctgaataagctgctgaccgattacaccgaaatgaagaaggcgatcctgcatgtgtactgggaagagttccagaaggaccctgtgggcctgatgagccgggtggcccagcctgccagcaagaagatcgatcagaacaagctgaaacctgagatggacgagaagggcaacctgaccaccgccggctttgcctgctctcagtgtggccagcccctgttcgtgtacaagctggagcaggtgtctgagaagggcaaggcttacaccaactacttcggacggtgcaatgtggccgagcacgaaaagctgatcctgctggcccagctgaagcccgagaaggatagcgacgaagccgtgacatatagcctgggaaagtttgggcagagggccctggatttctacagcattcatgtgaccaaggagtccacccaccccgtgaagcccctggcccagatcgccggaaacagatacgcctccggacctgtgggaaaggccctgagcgacgcatgtatgggcacaatcgcctccttcctgtctaagtaccaggacatcatcatcgaacaccagaaggtggtgaagggcaaccagaagagactggagagcctgcgggagctggccggcaaggaaaacctggaataccctagcgtgaccctgccacctcagcctcacaccaaggagggcgttgatgcctacaacgaagtgatcgcccgggtgcgaatgtgggtgaacctgaacctgtggcagaagctgaagctaagcagagatgatgccaagcctctgctgagactgaagggattcccttcctttcctctggtcgagagacaggccaacgaagtggactggtgggacatggtgtgtaacgtgaagaagctgatcaacgagaaaaaggaggatggcaaggtgttttggcagaatctggctggctacaagagacaggaagccctgagaccatacctgagcagcgaggaagatcggaagaagggaaagaaattcgctcggtaccagctgggcgacctgctgctgcacctggaaaagaagcacggcgaggactggggaaaggtgtacgacgaggcctgggagcggattgacaagaaagtggaaggcctgagcaagcacatcaagctggaagaggaacggagaagcgaggacgcccagagcaaggccgccctgaccgactggctgcgggctaaggccagcttcgtgatcgagggcctgaaggaggccgacaaggacgagttctgcagatgcgagctgaagctgcagaagtggtacggggacctgcggggaaagcccttcgccatcgaagccgagaacagcatcctggacatcagcggcttcagcaagcagtacaactgtgccttcatctggcagaaggacggcgtgaagaagctgaacctgtacctgatcatcaactacttcaagggcggcaagctgcggttcaagaagatcaaacctgaagccttcgaagccaacagattctacaccgtgatcaacaaaaagagcggcgagatcgtgcccatggaggtgaacttcaacttcgacgaccccaacctgatcatcctgcctctggcctttggcaagagacagggcagagaattcatctggaacgacctgctgtccctggaaaccggcagcctgaagctggccaacggaagagtgatcgagaagacactgtacaacagaagaacccggcaggatgagcctgccctgttcgtggccctgaccttcgagcggcgggaggtcctggactcctccaatatcaaaccaatgaacctgatcggcgtggcaagaggcgaaaacatccccgccgtgatcgccctgaccgaccccgagggctgcccactgagccggtttaaggatagcctgggaaacccaacccacatcctgagaatcggcgagagctataaggagaagcagcggaccatccaggccaagaaggaggtggagcagcggagagccggcggctacagccggaagtacgccagcaaagccaagaatctggcagacgatatggtgagaaacaccgctagagatctgctgtactacgccgtgacccaggatgccatgctgatcttcgccaacctgagccggggcttcggccggcagggcaagcggaccttcatggccgagagacagtacacacggatggaggactggctgaccgccaagctggcctacgagggcctgagcaagacctacctgtccaagacactggcccagtacacctccaagacatgcagcaactgtgggtttaccatcaccagcgccgactacgacagggtgctggagaagctgaagaagacagcaacaggctggatgaccacaattaacggcaaggagctgaaggtggagggccagattacctactacaacagatacaagagacagaacgtagtcaaggacctgtccgtcgagctggatagactgagcgaagaatctgtgaacaacgacatctcctcctggacaaagggcagaagcggagaagctctgagcctcctgaagaaaagattctcccatagacccgtgcaggagaagttcgtgtgcctgaactgcggcttcgagacacacgcagccgagcaagccgccctgaacatcgccagatcctggctgttcctgcggagccaggagtacaagaaataccagacaaacaagacaaccggcaacaccgataagagagccttcgtcgagacctggcagtccttttaccggaagaagcttaaggaggtgtggaaacctgccgtgcggtctggcggatctggcggaggctccaccagccccaagaaaaagagaaaagtctaagctgccttctgcggggcttgccttctggccatgcccttcttctctcccttgcacctgtacctcttggtctttgaataaagcctgagtaggaaggctagcaaaaaaaaaaaaaaaaaaaaaaaaaaaaaaaaaaaaaaaaaaaaaaaaaaaaaaaaaaaaaaaaaaaaaaaaaaaaaaaa

SEQ ID NO: 9927 - RNA, 8787 nt, synthetic construct
  source 1..8787: mol_type = other RNA
aggaaataagagagaaaagaagagtaagaagaaatataagagccaccatggcccctaagaagaagcgtaaagtgagccggatgaaccacgaccaggagttcgacccccctaaggtgtaccctcccgtccccgccgagaagagaaagcccatccgggtcctgagcctgttcgatggcatcgccaccggtctgctggtgctgaaggacctgggcatccaggtggataggtacattgcctccgaggtgtgcgaggactccatcaccgtgggaatggtgcgtcatcagggcaagatcatgtacgtgggcgacgtgcggagcgtgacacagaagcatatccaggagtggggccctttcgacctggtgatcggcggcagcccttgcaatgacctgagcatcgtgaacccagcccggaagggcctgtacgagggaaccggcagactgttcttcgagttttacagactgctgcacgacgcccggcctaaggaaggcgacgaccggcccttcttttggctgttcgagaatgtggtggccatgggagtcagcgacaagcgggatattagccggttcctggagagcaaccccgtgatgatcgatgccaaggaagtgagcgccgcccaccgggccagatacttctggggcaatctgcctggcatgaacagacccctggccagcaccgtgaacgacaagctggagctgcaggagtgcctggagcacggccggatcgccaagttcagcaaggtgagaaccatcaccacccgaagcaacagcatcaaacaaggcaaggaccagcactttcctgtgttcatgaacgagaaggaggacatcctgtggtgtaccgagatggagagagtgttcgggttcccagtccactacacagatgtcagcaacatgtctagactggccagacagagactgctgggaagaagctggtccgtccctgtgatcagacacctgttcgcccctctgaaggagtacttcgcctgcgtgagcagcggcaacagcaacgccaacagccggggccccagcttctctagcggcctggtgccactgtccctgagagggagccacatgggccccatggagatctacaaaaccgtgagcgcctggaagcggcagcctgtgcgcgtgctgagcctgtttcggaatatcgataaagtcctgaaaagcctgggattcctggagagcggctctggctccggcggtggcaccctgaagtacgtggaggatgtgacaaacgtggtcagacgggatgtggagaagtggggccccttcgatctggtgtacggcagcacccaacccctgggcagctcttgtgaccggtgccctggctggtacatgtttcagttccaccggatcctgcagtacgccctgccgagacaggagtcccagcggccattcttttggattttcatggacaacttgctgctgaccgaggatgaccaggaaactaccactcggttcctgcagaccgaagccgtgaccctgcaggacgtgagaggccgggactaccagaacgccatgcgggtgtggtccaacatccctggactgaaaagcaagcacgcacctctgacccctaaagaagaggagtacctgcaggcccaggtgcggagcagaagcaagctggacgcccctaaggtggatctgctggtgaagaattgcctcctgcccctgagagagtacttcaagtatttcagccagaatagtctgcccctgggaggcagcggcggcggcatccaggagcccgtgaccttcaaggacgtggccgtggacttcacccaggaggagtggggcaggctggaccccgtgcagaggaccctgtacagggacgtgatgctggagacctacaggcacctgctgagcgtgggcaaccagatcgccaagcccgaggtgatcagcctgctggagcagggcgaggagccctggagcgtggagcaggcctacccccagagcacctgccccgccgtggacaccgagggcggcccaagcagcggcgcccctcctcccagcggcggcaggcggcccaagcagcggcgcccctcctcccagcggcggcagcccagccggctccccaacctctaccgaggagggcacctctgagtccgccacccccgagagcggccctggcacctccaccgagcccagcgagggcagcgcacccggcagccctgccggcagccccacctccacagaggagggaaccagcaccgagcccagcgaaggcagcgccccaggcaccagcaccgagcctagtgagcaggagattaaacggatcaacaagatcagaagaagacttgtgaaagacagcaacaccaagaaggccggcaagacaggccccatgaaaaccctgctggttagagtgatgacacccgatctgagagagcggctggaaaacctgagaaagaagcctgaaaatatcccccagcccatcagcaatacatctagagccaacctgaataagctgctgaccgattacaccgaaatgaagaaggcgatcctgcatgtgtactgggaagagttccagaaggaccctgtgggcctgatgagccgggtggcccagcctgccagcaagaagatcgatcagaacaagctgaaacctgagatggacgagaagggcaacctgaccaccgccggctttgcctgctctcagtgtggccagcccctgttcgtgtacaagctggagcaggtgtctgagaagggcaaggcttacaccaactacttcggacggtgcaatgtggccgagcacgaaaagctgatcctgctggcccagctgaagcccgagaaggatagcgacgaagccgtgacatatagcctgggaaagtttgggcagagggccctggatttctacagcattcatgtgaccaaggagtccacccaccccgtgaagcccctggcccagatcgccggaaacagatacgcctccggacctgtgggaaaggccctgagcgacgcatgtatgggcacaatcgcctccttcctgtctaagtaccaggacatcatcatcgaacaccagaaggtggtgaagggcaaccagaagagactggagagcctgcgggagctggccggcaaggaaaacctggaataccctagcgtgaccctgccacctcagcctcacaccaaggagggcgttgatgcctacaacgaagtgatcgcccgggtgcgaatgtgggtgaacctgaacctgtggcagaagctgaagctaagcagagatgatgccaagcctctgctgagactgaagggattcccttcctttcctctggtcgagagacaggccaacgaagtggactggtgggacatggtgtgtaacgtgaagaagctgatcaacgagaaaaaggaggatggcaaggtgttttggcagaatctggctggctacaagagacaggaagccctgagaccatacctgagcagcgaggaagatcggaagaagggaaagaaattcgctcggtaccagctgggcgacctgctgctgcacctggaaaagaagcacggcgaggactggggaaaggtgtacgacgaggcctgggagcggattgacaagaaagtggaaggcctgagcaagcacatcaagctggaagaggaacggagaagcgaggacgcccagagcaaggccgccctgaccgactggctgcgggctaaggccagcttcgtgatcgagggcctgaaggaggccgacaaggacgagttctgcagatgcgagctgaagctgcagaagtggtacggggacctgcggggaaagcccttcgccatcgaagccgagaacagcatcctggacatcagcggcttcagcaagcagtacaactgtgccttcatctggcagaaggacggcgtgaagaagctgaacctgtacctgatcatcaactacttcaagggcggcaagctgcggttcaagaagatcaaacctgaagccttcgaagccaacagattctacaccgtgatcaacaaaaagagcggcgagatcgtgcccatggaggtgaacttcaacttcgacgaccccaacctgatcatcctgcctctggcctttggcaagagacagggcagagaattcatctggaacgacctgctgtccctggaaaccggcagcctgaagctggccaacggaagagtgatcgagaagacactgtacaacagaagaacccggcaggatgagcctgccctgttcgtggccctgaccttcgagcggcgggaggtcctggactcctccaatatcaaaccaatgaacctgatcggcgtggcaagaggcgaaaacatccccgccgtgatcgccctgaccgaccccgagggctgcccactgagccggtttaaggatagcctgggaaacccaacccacatcctgagaatcggcgagagctataaggagaagcagcggaccatccaggccaagaaggaggtggagcagcggagagccggcggctacagccggaagtacgccagcaaagccaagaatctggcagacgatatggtgagaaacaccgctagagatctgctgtactacgccgtgacccaggatgccatgctgatcttcgccaacctgagccggggcttcggccggcagggcaagcggaccttcatggccgagagacagtacacacggatggaggactggctgaccgccaagctggcctacgagggcctgagcaagacctacctgtccaagacactggcccagtacacctccaagacatgcagcaactgtgggtttaccatcaccagcgccgactacgacagggtgctggagaagctgaagaagacagcaacaggctggatgaccacaattaacggcaaggagctgaaggtggagggccagattacctactacaacagatacaagagacagaacgtagtcaaggacctgtccgtcgagctggatagactgagcgaagaatctgtgaacaacgacatctcctcctggacaaagggcagaagcggagaagctctgagcctcctgaagaaaagattctcccatagacccgtgcaggagaagttcgtgtgcctgaactgcggcttcgagacacacgcagccgagcaagccgccctgaacatcgccagatcctggctgttcctgcggagccaggagtacaagaaataccagacaaacaagacaaccggcaacaccgataagagagccttcgtcgagacctggcagtccttttaccggaagaagcttaaggaggtgtggaaacctgccgtgcggtctggcggatctggcggaggctccaccagccccaagaaaaagagaaaagtctaagctgccttctgcggggcttgccttctggccatgcccttcttctctcccttgcacctgtacctcttggtctttgaataaagcctgagtaggaaggctagcaaaaaaaaaaaaaaaaaaaaaaaaaaaaaaaaaaaaaaaaaaaaaaaaaaaaaaaaaaaaaaaaaaaaaaaaaaaaaaaagcccagccggctccccaacctctaccgaggagggcacctctgagtccgccacccccgagagcggccctggcacctccaccgagcccagcgagggcagcgcacccggcagccctgccggcagccccacctccacagaggagggaaccagcaccgagcccagcgaaggcagcgccccaggcaccagcaccgagcctagtgagcaggagattaaacggatcaacaagatcagaagaagacttgtgaaagacagcaacaccaagaaggccggcaagacaggccccatgaaaaccctgctggttagagtgatgacacccgatctgagagagcggctggaaaacctgagaaagaagcctgaaaatatcccccagcccatcagcaatacatctagagccaacctgaataagctgctgaccgattacaccgaaatgaagaaggcgatcctgcatgtgtactgggaagagttccagaaggaccctgtgggcctgatgagccgggtggcccagcctgccagcaagaagatcgatcagaacaagctgaaacctgagatggacgagaagggcaacctgaccaccgccggctttgcctgctctcagtgtggccagcccctgttcgtgtacaagctggagcaggtgtctgagaagggcaaggcttacaccaactacttcggacggtgcaatgtggccgagcacgaaaagctgatcctgctggcccagctgaagcccgagaaggatagcgacgaagccgtgacatatagcctgggaaagtttgggcagagggccctggatttctacagcattcatgtgaccaaggagtccacccaccccgtgaagcccctggcccagatcgccggaaacagatacgcctccggacctgtgggaaaggccctgagcgacgcatgtatgggcacaatcgcctccttcctgtctaagtaccaggacatcatcatcgaacaccagaaggtggtgaagggcaaccagaagagactggagagcctgcgggagctggccggcaaggaaaacctggaataccctagcgtgaccctgccacctcagcctcacaccaaggagggcgttgatgcctacaacgaagtgatcgcccgggtgcgaatgtgggtgaacctgaacctgtggcagaagctgaagctaagcagagatgatgccaagcctctgctgagactgaagggattcccttcctttcctctggtcgagagacaggccaacgaagtggactggtgggacatggtgtgtaacgtgaagaagctgatcaacgagaaaaaggaggatggcaaggtgttttggcagaatctggctggctacaagagacaggaagccctgagaccatacctgagcagcgaggaagatcggaagaagggaaagaaattcgctcggtaccagctgggcgacctgctgctgcacctggaaaagaagcacggcgaggactggggaaaggtgtacgacgaggcctgggagcggattgacaagaaagtggaaggcctgagcaagcacatcaagctggaagaggaacggagaagcgaggacgcccagagcaaggccgccctgaccgactggctgcgggctaaggccagcttcgtgatcgagggcctgaaggaggccgacaaggacgagttctgcagatgcgagctgaagctgcagaagtggtacggggacctgcggggaaagcccttcgccatcgaagccgagaacagcatcctggacatcagcggcttcagcaagcagtacaactgtgccttcatctggcagaaggacggcgtgaagaagctgaacctgtacctgatcatcaactacttcaagggcggcaagctgcggttcaagaagatcaaacctgaagccttcgaagccaacagattctacaccgtgatcaacaaaaagagcggcgagatcgtgcccatggaggtgaacttcaacttcgacgaccccaacctgatcatcctgcctctggcctttggcaagagacagggcagagaattcatctggaacgacctgctgtccctggaaaccggcagcctgaagctggccaacggaagagtgatcgagaagacactgtacaacagaagaacccggcaggatgagcctgccctgttcgtggccctgaccttcgagcggcgggaggtcctggactcctccaatatcaaaccaatgaacctgatcggcgtggcaagaggcgaaaacatccccgccgtgatcgccctgaccgaccccgagggctgcccactgagccggtttaaggatagcctgggaaacccaacccacatcctgagaatcggcgagagctataaggagaagcagcggaccatccaggccaagaaggaggtggagcagcggagagccggcggctacagccggaagtacgccagcaaagccaagaatctggcagacgatatggtgagaaacaccgctagagatctgctgtactacgccgtgacccaggatgccatgctgatcttcgccaacctgagccggggcttcggccggcagggcaagcggaccttcatggccgagagacagtacacacggatggaggactggctgaccgccaagctggcctacgagggcctgagcaagacctacctgtccaagacactggcccagtacacctccaagacatgcagcaactgtgggtttaccatcaccagcgccgactacgacagggtgctggagaagctgaagaagacagcaacaggctggatgaccacaattaacggcaaggagctgaaggtggagggccagattacctactacaacagatacaagagacagaacgtagtcaaggacctgtccgtcgagctggatagactgagcgaagaatctgtgaacaacgacatctcctcctggacaaagggcagaagcggagaagctctgagcctcctgaagaaaagattctcccatagacccgtgcaggagaagttcgtgtgcctgaactgcggcttcgagacacacgcagccgagcaagccgccctgaacatcgccagatcctggctgttcctgcggagccaggagtacaagaaataccagacaaacaagacaaccggcaacaccgataagagagccttcgtcgagacctggcagtccttttaccggaagaagcttaaggaggtgtggaaacctgccgtgcggtctggcggatctggcggaggctccaccagccccaagaaaaagagaaaagtctaagctgccttctgcggggcttgccttctggccatgcccttcttctctcccttgcacctgtacctcttggtctttgaataaagcctgagtaggaaggctagcaaaaaaaaaaaaaaaaaaaaaaaaaaaaaaaaaaaaaaaaaaaaaaaaaaaaaaaaaaaaaaaaaaaaaaaaaaaaaaaa

SEQ ID NO: 9928 - RNA, 8793 nt, synthetic construct
  source 1..8793: mol_type = other RNA
aggaaataagagagaaaagaagagtaagaagaaatataagagccaccatggcccctaagaagaagcgtaaagtgagccggatgaaccacgaccaggagttcgacccccctaaggtgtaccctcccgtccccgccgagaagagaaagcccatccgggtcctgagcctgttcgatggcatcgccaccggtctgctggtgctgaaggacctgggcatccaggtggataggtacattgcctccgaggtgtgcgaggactccatcaccgtgggaatggtgcgtcatcagggcaagatcatgtacgtgggcgacgtgcggagcgtgacacagaagcatatccaggagtggggccctttcgacctggtgatcggcggcagcccttgcaatgacctgagcatcgtgaacccagcccggaagggcctgtacgagggaaccggcagactgttcttcgagttttacagactgctgcacgacgcccggcctaaggaaggcgacgaccggcccttcttttggctgttcgagaatgtggtggccatgggagtcagcgacaagcgggatattagccggttcctggagagcaaccccgtgatgatcgatgccaaggaagtgagcgccgcccaccgggccagatacttctggggcaatctgcctggcatgaacagacccctggccagcaccgtgaacgacaagctggagctgcaggagtgcctggagcacggccggatcgccaagttcagcaaggtgagaaccatcaccacccgaagcaacagcatcaaacaaggcaaggaccagcactttcctgtgttcatgaacgagaaggaggacatcctgtggtgtaccgagatggagagagtgttcgggttcccagtccactacacagatgtcagcaacatgtctagactggccagacagagactgctgggaagaagctggtccgtccctgtgatcagacacctgttcgcccctctgaaggagtacttcgcctgcgtgagcagcggcaacagcaacgccaacagccggggccccagcttctctagcggcctggtgccactgtccctgagagggagccacatgggccccatggagatctacaaaaccgtgagcgcctggaagcggcagcctgtgcgcgtgctgagcctgtttcggaatatcgataaagtcctgaaaagcctgggattcctggagagcggctctggctccggcggtggcaccctgaagtacgtggaggatgtgacaaacgtggtcagacgggatgtggagaagtggggccccttcgatctggtgtacggcagcacccaacccctgggcagctcttgtgaccggtgccctggctggtacatgtttcagttccaccggatcctgcagtacgccctgccgagacaggagtcccagcggccattcttttggattttcatggacaacttgctgctgaccgaggatgaccaggaaactaccactcggttcctgcagaccgaagccgtgaccctgcaggacgtgagaggccgggactaccagaacgccatgcgggtgtggtccaacatccctggactgaaaagcaagcacgcacctctgacccctaaagaagaggagtacctgcaggcccaggtgcggagcagaagcaagctggacgcccctaaggtggatctgctggtgaagaattgcctcctgcccctgagagagtacttcaagtatttcagccagaatagtctgcccctgggaggcagcggcggcggcgtgacctacgacgacgtgtgcatcgacttcacctgggaggagtggaccctgctggaccccagccagaagaagctgtacaaggacgtgatgctggagacctacaggaacctgaccgccatcggctacaactgggagaaccaccacgtggaggagtactaccagagcagcaggaggaacgccaggaacgagaagagccagaccgccgagaagcccagcgtgaacacccagtgcgtgaaggccttcacccacggcggcccaagcagcggcgcccctcctcccagcggcggcaggcggcccaagcagcggcgcccctcctcccagcggcggcagcccagccggctccccaacctctaccgaggagggcacctctgagtccgccacccccgagagcggccctggcacctccaccgagcccagcgagggcagcgcacccggcagccctgccggcagccccacctccacagaggagggaaccagcaccgagcccagcgaaggcagcgccccaggcaccagcaccgagcctagtgagcaggagattaaacggatcaacaagatcagaagaagacttgtgaaagacagcaacaccaagaaggccggcaagacaggccccatgaaaaccctgctggttagagtgatgacacccgatctgagagagcggctggaaaacctgagaaagaagcctgaaaatatcccccagcccatcagcaatacatctagagccaacctgaataagctgctgaccgattacaccgaaatgaagaaggcgatcctgcatgtgtactgggaagagttccagaaggaccctgtgggcctgatgagccgggtggcccagcctgccagcaagaagatcgatcagaacaagctgaaacctgagatggacgagaagggcaacctgaccaccgccggctttgcctgctctcagtgtggccagcccctgttcgtgtacaagctggagcaggtgtctgagaagggcaaggcttacaccaactacttcggacggtgcaatgtggccgagcacgaaaagctgatcctgctggcccagctgaagcccgagaaggatagcgacgaagccgtgacatatagcctgggaaagtttgggcagagggccctggatttctacagcattcatgtgaccaaggagtccacccaccccgtgaagcccctggcccagatcgccggaaacagatacgcctccggacctgtgggaaaggccctgagcgacgcatgtatgggcacaatcgcctccttcctgtctaagtaccaggacatcatcatcgaacaccagaaggtggtgaagggcaaccagaagagactggagagcctgcgggagctggccggcaaggaaaacctggaataccctagcgtgaccctgccacctcagcctcacaccaaggagggcgttgatgcctacaacgaagtgatcgcccgggtgcgaatgtgggtgaacctgaacctgtggcagaagctgaagctaagcagagatgatgccaagcctctgctgagactgaagggattcccttcctttcctctggtcgagagacaggccaacgaagtggactggtgggacatggtgtgtaacgtgaagaagctgatcaacgagaaaaaggaggatggcaaggtgttttggcagaatctggctggctacaagagacaggaagccctgagaccatacctgagcagcgaggaagatcggaagaagggaaagaaattcgctcggtaccagctgggcgacctgctgctgcacctggaaaagaagcacggcgaggactggggaaaggtgtacgacgaggcctgggagcggattgacaagaaagtggaaggcctgagcaagcacatcaagctggaagaggaacggagaagcgaggacgcccagagcaaggccgccctgaccgactggctgcgggctaaggccagcttcgtgatcgagggcctgaaggaggccgacaaggacgagttctgcagatgcgagctgaagctgcagaagtggtacggggacctgcggggaaagcccttcgccatcgaagccgagaacagcatcctggacatcagcggcttcagcaagcagtacaactgtgccttcatctggcagaaggacggcgtgaagaagctgaacctgtacctgatcatcaactacttcaagggcggcaagctgcggttcaagaagatcaaacctgaagccttcgaagccaacagattctacaccgtgatcaacaaaaagagcggcgagatcgtgcccatggaggtgaacttcaacttcgacgaccccaacctgatcatcctgcctctggcctttggcaagagacagggcagagaattcatctggaacgacctgctgtccctggaaaccggcagcctgaagctggccaacggaagagtgatcgagaagacactgtacaacagaagaacccggcaggatgagcctgccctgttcgtggccctgaccttcgagcggcgggaggtcctggactcctccaatatcaaaccaatgaacctgatcggcgtggcaagaggcgaaaacatccccgccgtgatcgccctgaccgaccccgagggctgcccactgagccggtttaaggatagcctgggaaacccaacccacatcctgagaatcggcgagagctataaggagaagcagcggaccatccaggccaagaaggaggtggagcagcggagagccggcggctacagccggaagtacgccagcaaagccaagaatctggcagacgatatggtgagaaacaccgctagagatctgctgtactacgccgtgacccaggatgccatgctgatcttcgccaacctgagccggggcttcggccggcagggcaagcggaccttcatggccgagagacagtacacacggatggaggactggctgaccgccaagctggcctacgagggcctgagcaagacctacctgtccaagacactggcccagtacacctccaagacatgcagcaactgtgggtttaccatcaccagcgccgactacgacagggtgctggagaagctgaagaagacagcaacaggctggatgaccacaattaacggcaaggagctgaaggtggagggccagattacctactacaacagatacaagagacagaacgtagtcaaggacctgtccgtcgagctggatagactgagcgaagaatctgtgaacaacgacatctcctcctggacaaagggcagaagcggagaagctctgagcctcctgaagaaaagattctcccatagacccgtgcaggagaagttcgtgtgcctgaactgcggcttcgagacacacgcagccgagcaagccgccctgaacatcgccagatcctggctgttcctgcggagccaggagtacaagaaataccagacaaacaagacaaccggcaacaccgataagagagccttcgtcgagacctggcagtccttttaccggaagaagcttaaggaggtgtggaaacctgccgtgcggtctggcggatctggcggaggctccaccagccccaagaaaaagagaaaagtctaagctgccttctgcggggcttgccttctggccatgcccttcttctctcccttgcacctgtacctcttggtctttgaataaagcctgagtaggaaggctagcaaaaaaaaaaaaaaaaaaaaaaaaaaaaaaaaaaaaaaaaaaaaaaaaaaaaaaaaaaaaaaaaaaaaaaaaaaaaaaaagcccagccggctccccaacctctaccgaggagggcacctctgagtccgccacccccgagagcggccctggcacctccaccgagcccagcgagggcagcgcacccggcagccctgccggcagccccacctccacagaggagggaaccagcaccgagcccagcgaaggcagcgccccaggcaccagcaccgagcctagtgagcaggagattaaacggatcaacaagatcagaagaagacttgtgaaagacagcaacaccaagaaggccggcaagacaggccccatgaaaaccctgctggttagagtgatgacacccgatctgagagagcggctggaaaacctgagaaagaagcctgaaaatatcccccagcccatcagcaatacatctagagccaacctgaataagctgctgaccgattacaccgaaatgaagaaggcgatcctgcatgtgtactgggaagagttccagaaggaccctgtgggcctgatgagccgggtggcccagcctgccagcaagaagatcgatcagaacaagctgaaacctgagatggacgagaagggcaacctgaccaccgccggctttgcctgctctcagtgtggccagcccctgttcgtgtacaagctggagcaggtgtctgagaagggcaaggcttacaccaactacttcggacggtgcaatgtggccgagcacgaaaagctgatcctgctggcccagctgaagcccgagaaggatagcgacgaagccgtgacatatagcctgggaaagtttgggcagagggccctggatttctacagcattcatgtgaccaaggagtccacccaccccgtgaagcccctggcccagatcgccggaaacagatacgcctccggacctgtgggaaaggccctgagcgacgcatgtatgggcacaatcgcctccttcctgtctaagtaccaggacatcatcatcgaacaccagaaggtggtgaagggcaaccagaagagactggagagcctgcgggagctggccggcaaggaaaacctggaataccctagcgtgaccctgccacctcagcctcacaccaaggagggcgttgatgcctacaacgaagtgatcgcccgggtgcgaatgtgggtgaacctgaacctgtggcagaagctgaagctaagcagagatgatgccaagcctctgctgagactgaagggattcccttcctttcctctggtcgagagacaggccaacgaagtggactggtgggacatggtgtgtaacgtgaagaagctgatcaacgagaaaaaggaggatggcaaggtgttttggcagaatctggctggctacaagagacaggaagccctgagaccatacctgagcagcgaggaagatcggaagaagggaaagaaattcgctcggtaccagctgggcgacctgctgctgcacctggaaaagaagcacggcgaggactggggaaaggtgtacgacgaggcctgggagcggattgacaagaaagtggaaggcctgagcaagcacatcaagctggaagaggaacggagaagcgaggacgcccagagcaaggccgccctgaccgactggctgcgggctaaggccagcttcgtgatcgagggcctgaaggaggccgacaaggacgagttctgcagatgcgagctgaagctgcagaagtggtacggggacctgcggggaaagcccttcgccatcgaagccgagaacagcatcctggacatcagcggcttcagcaagcagtacaactgtgccttcatctggcagaaggacggcgtgaagaagctgaacctgtacctgatcatcaactacttcaagggcggcaagctgcggttcaagaagatcaaacctgaagccttcgaagccaacagattctacaccgtgatcaacaaaaagagcggcgagatcgtgcccatggaggtgaacttcaacttcgacgaccccaacctgatcatcctgcctctggcctttggcaagagacagggcagagaattcatctggaacgacctgctgtccctggaaaccggcagcctgaagctggccaacggaagagtgatcgagaagacactgtacaacagaagaacccggcaggatgagcctgccctgttcgtggccctgaccttcgagcggcgggaggtcctggactcctccaatatcaaaccaatgaacctgatcggcgtggcaagaggcgaaaacatccccgccgtgatcgccctgaccgaccccgagggctgcccactgagccggtttaaggatagcctgggaaacccaacccacatcctgagaatcggcgagagctataaggagaagcagcggaccatccaggccaagaaggaggtggagcagcggagagccggcggctacagccggaagtacgccagcaaagccaagaatctggcagacgatatggtgagaaacaccgctagagatctgctgtactacgccgtgacccaggatgccatgctgatcttcgccaacctgagccggggcttcggccggcagggcaagcggaccttcatggccgagagacagtacacacggatggaggactggctgaccgccaagctggcctacgagggcctgagcaagacctacctgtccaagacactggcccagtacacctccaagacatgcagcaactgtgggtttaccatcaccagcgccgactacgacagggtgctggagaagctgaagaagacagcaacaggctggatgaccacaattaacggcaaggagctgaaggtggagggccagattacctactacaacagatacaagagacagaacgtagtcaaggacctgtccgtcgagctggatagactgagcgaagaatctgtgaacaacgacatctcctcctggacaaagggcagaagcggagaagctctgagcctcctgaagaaaagattctcccatagacccgtgcaggagaagttcgtgtgcctgaactgcggcttcgagacacacgcagccgagcaagccgccctgaacatcgccagatcctggctgttcctgcggagccaggagtacaagaaataccagacaaacaagacaaccggcaacaccgataagagagccttcgtcgagacctggcagtccttttaccggaagaagcttaaggaggtgtggaaacctgccgtgcggtctggcggatctggcggaggctccaccagccccaagaaaaagagaaaagtctaagctgccttctgcggggcttgccttctggccatgcccttcttctctcccttgcacctgtacctcttggtctttgaataaagcctgagtaggaaggctagcaaaaaaaaaaaaaaaaaaaaaaaaaaaaaaaaaaaaaaaaaaaaaaaaaaaaaaaaaaaaaaaaaaaaaaaaaaaaaaaa

SEQ ID NO: 9929 - RNA, 8787 nt, synthetic construct
  source 1..8787: mol_type = other RNA
aggaaataagagagaaaagaagagtaagaagaaatataagagccaccatggcccctaagaagaagcgtaaagtgagccggatgaaccacgaccaggagttcgacccccctaaggtgtaccctcccgtccccgccgagaagagaaagcccatccgggtcctgagcctgttcgatggcatcgccaccggtctgctggtgctgaaggacctgggcatccaggtggataggtacattgcctccgaggtgtgcgaggactccatcaccgtgggaatggtgcgtcatcagggcaagatcatgtacgtgggcgacgtgcggagcgtgacacagaagcatatccaggagtggggccctttcgacctggtgatcggcggcagcccttgcaatgacctgagcatcgtgaacccagcccggaagggcctgtacgagggaaccggcagactgttcttcgagttttacagactgctgcacgacgcccggcctaaggaaggcgacgaccggcccttcttttggctgttcgagaatgtggtggccatgggagtcagcgacaagcgggatattagccggttcctggagagcaaccccgtgatgatcgatgccaaggaagtgagcgccgcccaccgggccagatacttctggggcaatctgcctggcatgaacagacccctggccagcaccgtgaacgacaagctggagctgcaggagtgcctggagcacggccggatcgccaagttcagcaaggtgagaaccatcaccacccgaagcaacagcatcaaacaaggcaaggaccagcactttcctgtgttcatgaacgagaaggaggacatcctgtggtgtaccgagatggagagagtgttcgggttcccagtccactacacagatgtcagcaacatgtctagactggccagacagagactgctgggaagaagctggtccgtccctgtgatcagacacctgttcgcccctctgaaggagtacttcgcctgcgtgagcagcggcaacagcaacgccaacagccggggccccagcttctctagcggcctggtgccactgtccctgagagggagccacatgggccccatggagatctacaaaaccgtgagcgcctggaagcggcagcctgtgcgcgtgctgagcctgtttcggaatatcgataaagtcctgaaaagcctgggattcctggagagcggctctggctccggcggtggcaccctgaagtacgtggaggatgtgacaaacgtggtcagacgggatgtggagaagtggggccccttcgatctggtgtacggcagcacccaacccctgggcagctcttgtgaccggtgccctggctggtacatgtttcagttccaccggatcctgcagtacgccctgccgagacaggagtcccagcggccattcttttggattttcatggacaacttgctgctgaccgaggatgaccaggaaactaccactcggttcctgcagaccgaagccgtgaccctgcaggacgtgagaggccgggactaccagaacgccatgcgggtgtggtccaacatccctggactgaaaagcaagcacgcacctctgacccctaaagaagaggagtacctgcaggcccaggtgcggagcagaagcaagctggacgcccctaaggtggatctgctggtgaagaattgcctcctgcccctgagagagtacttcaagtatttcagccagaatagtctgcccctgggaggcagcggcggcggcatggagggcctggtgatgttcagggacgtggccgtggacttcagccaggaggagtgggcctgcctggaccccgcccagaggggcctgtacagggacgtgatgctggagaactaccaccacctggtgagcctgggcctgagcctgagcaagcccgacgtgatcagcctgctggagcagggcaaggagccctggatggtgagcaggaacatggccggcggctggtgccccgacaggctgaagaacggcggcccaagcagcggcgcccctcctcccagcggcggcaggcggcccaagcagcggcgcccctcctcccagcggcggcagcccagccggctccccaacctctaccgaggagggcacctctgagtccgccacccccgagagcggccctggcacctccaccgagcccagcgagggcagcgcacccggcagccctgccggcagccccacctccacagaggagggaaccagcaccgagcccagcgaaggcagcgccccaggcaccagcaccgagcctagtgagcaggagattaaacggatcaacaagatcagaagaagacttgtgaaagacagcaacaccaagaaggccggcaagacaggccccatgaaaaccctgctggttagagtgatgacacccgatctgagagagcggctggaaaacctgagaaagaagcctgaaaatatcccccagcccatcagcaatacatctagagccaacctgaataagctgctgaccgattacaccgaaatgaagaaggcgatcctgcatgtgtactgggaagagttccagaaggaccctgtgggcctgatgagccgggtggcccagcctgccagcaagaagatcgatcagaacaagctgaaacctgagatggacgagaagggcaacctgaccaccgccggctttgcctgctctcagtgtggccagcccctgttcgtgtacaagctggagcaggtgtctgagaagggcaaggcttacaccaactacttcggacggtgcaatgtggccgagcacgaaaagctgatcctgctggcccagctgaagcccgagaaggatagcgacgaagccgtgacatatagcctgggaaagtttgggcagagggccctggatttctacagcattcatgtgaccaaggagtccacccaccccgtgaagcccctggcccagatcgccggaaacagatacgcctccggacctgtgggaaaggccctgagcgacgcatgtatgggcacaatcgcctccttcctgtctaagtaccaggacatcatcatcgaacaccagaaggtggtgaagggcaaccagaagagactggagagcctgcgggagctggccggcaaggaaaacctggaataccctagcgtgaccctgccacctcagcctcacaccaaggagggcgttgatgcctacaacgaagtgatcgcccgggtgcgaatgtgggtgaacctgaacctgtggcagaagctgaagctaagcagagatgatgccaagcctctgctgagactgaagggattcccttcctttcctctggtcgagagacaggccaacgaagtggactggtgggacatggtgtgtaacgtgaagaagctgatcaacgagaaaaaggaggatggcaaggtgttttggcagaatctggctggctacaagagacaggaagccctgagaccatacctgagcagcgaggaagatcggaagaagggaaagaaattcgctcggtaccagctgggcgacctgctgctgcacctggaaaagaagcacggcgaggactggggaaaggtgtacgacgaggcctgggagcggattgacaagaaagtggaaggcctgagcaagcacatcaagctggaagaggaacggagaagcgaggacgcccagagcaaggccgccctgaccgactggctgcgggctaaggccagcttcgtgatcgagggcctgaaggaggccgacaaggacgagttctgcagatgcgagctgaagctgcagaagtggtacggggacctgcggggaaagcccttcgccatcgaagccgagaacagcatcctggacatcagcggcttcagcaagcagtacaactgtgccttcatctggcagaaggacggcgtgaagaagctgaacctgtacctgatcatcaactacttcaagggcggcaagctgcggttcaagaagatcaaacctgaagccttcgaagccaacagattctacaccgtgatcaacaaaaagagcggcgagatcgtgcccatggaggtgaacttcaacttcgacgaccccaacctgatcatcctgcctctggcctttggcaagagacagggcagagaattcatctggaacgacctgctgtccctggaaaccggcagcctgaagctggccaacggaagagtgatcgagaagacactgtacaacagaagaacccggcaggatgagcctgccctgttcgtggccctgaccttcgagcggcgggaggtcctggactcctccaatatcaaaccaatgaacctgatcggcgtggcaagaggcgaaaacatccccgccgtgatcgccctgaccgaccccgagggctgcccactgagccggtttaaggatagcctgggaaacccaacccacatcctgagaatcggcgagagctataaggagaagcagcggaccatccaggccaagaaggaggtggagcagcggagagccggcggctacagccggaagtacgccagcaaagccaagaatctggcagacgatatggtgagaaacaccgctagagatctgctgtactacgccgtgacccaggatgccatgctgatcttcgccaacctgagccggggcttcggccggcagggcaagcggaccttcatggccgagagacagtacacacggatggaggactggctgaccgccaagctggcctacgagggcctgagcaagacctacctgtccaagacactggcccagtacacctccaagacatgcagcaactgtgggtttaccatcaccagcgccgactacgacagggtgctggagaagctgaagaagacagcaacaggctggatgaccacaattaacggcaaggagctgaaggtggagggccagattacctactacaacagatacaagagacagaacgtagtcaaggacctgtccgtcgagctggatagactgagcgaagaatctgtgaacaacgacatctcctcctggacaaagggcagaagcggagaagctctgagcctcctgaagaaaagattctcccatagacccgtgcaggagaagttcgtgtgcctgaactgcggcttcgagacacacgcagccgagcaagccgccctgaacatcgccagatcctggctgttcctgcggagccaggagtacaagaaataccagacaaacaagacaaccggcaacaccgataagagagccttcgtcgagacctggcagtccttttaccggaagaagcttaaggaggtgtggaaacctgccgtgcggtctggcggatctggcggaggctccaccagccccaagaaaaagagaaaagtctaagctgccttctgcggggcttgccttctggccatgcccttcttctctcccttgcacctgtacctcttggtctttgaataaagcctgagtaggaaggctagcaaaaaaaaaaaaaaaaaaaaaaaaaaaaaaaaaaaaaaaaaaaaaaaaaaaaaaaaaaaaaaaaaaaaaaaaaaaaaaaagcccagccggctccccaacctctaccgaggagggcacctctgagtccgccacccccgagagcggccctggcacctccaccgagcccagcgagggcagcgcacccggcagccctgccggcagccccacctccacagaggagggaaccagcaccgagcccagcgaaggcagcgccccaggcaccagcaccgagcctagtgagcaggagattaaacggatcaacaagatcagaagaagacttgtgaaagacagcaacaccaagaaggccggcaagacaggccccatgaaaaccctgctggttagagtgatgacacccgatctgagagagcggctggaaaacctgagaaagaagcctgaaaatatcccccagcccatcagcaatacatctagagccaacctgaataagctgctgaccgattacaccgaaatgaagaaggcgatcctgcatgtgtactgggaagagttccagaaggaccctgtgggcctgatgagccgggtggcccagcctgccagcaagaagatcgatcagaacaagctgaaacctgagatggacgagaagggcaacctgaccaccgccggctttgcctgctctcagtgtggccagcccctgttcgtgtacaagctggagcaggtgtctgagaagggcaaggcttacaccaactacttcggacggtgcaatgtggccgagcacgaaaagctgatcctgctggcccagctgaagcccgagaaggatagcgacgaagccgtgacatatagcctgggaaagtttgggcagagggccctggatttctacagcattcatgtgaccaaggagtccacccaccccgtgaagcccctggcccagatcgccggaaacagatacgcctccggacctgtgggaaaggccctgagcgacgcatgtatgggcacaatcgcctccttcctgtctaagtaccaggacatcatcatcgaacaccagaaggtggtgaagggcaaccagaagagactggagagcctgcgggagctggccggcaaggaaaacctggaataccctagcgtgaccctgccacctcagcctcacaccaaggagggcgttgatgcctacaacgaagtgatcgcccgggtgcgaatgtgggtgaacctgaacctgtggcagaagctgaagctaagcagagatgatgccaagcctctgctgagactgaagggattcccttcctttcctctggtcgagagacaggccaacgaagtggactggtgggacatggtgtgtaacgtgaagaagctgatcaacgagaaaaaggaggatggcaaggtgttttggcagaatctggctggctacaagagacaggaagccctgagaccatacctgagcagcgaggaagatcggaagaagggaaagaaattcgctcggtaccagctgggcgacctgctgctgcacctggaaaagaagcacggcgaggactggggaaaggtgtacgacgaggcctgggagcggattgacaagaaagtggaaggcctgagcaagcacatcaagctggaagaggaacggagaagcgaggacgcccagagcaaggccgccctgaccgactggctgcgggctaaggccagcttcgtgatcgagggcctgaaggaggccgacaaggacgagttctgcagatgcgagctgaagctgcagaagtggtacggggacctgcggggaaagcccttcgccatcgaagccgagaacagcatcctggacatcagcggcttcagcaagcagtacaactgtgccttcatctggcagaaggacggcgtgaagaagctgaacctgtacctgatcatcaactacttcaagggcggcaagctgcggttcaagaagatcaaacctgaagccttcgaagccaacagattctacaccgtgatcaacaaaaagagcggcgagatcgtgcccatggaggtgaacttcaacttcgacgaccccaacctgatcatcctgcctctggcctttggcaagagacagggcagagaattcatctggaacgacctgctgtccctggaaaccggcagcctgaagctggccaacggaagagtgatcgagaagacactgtacaacagaagaacccggcaggatgagcctgccctgttcgtggccctgaccttcgagcggcgggaggtcctggactcctccaatatcaaaccaatgaacctgatcggcgtggcaagaggcgaaaacatccccgccgtgatcgccctgaccgaccccgagggctgcccactgagccggtttaaggatagcctgggaaacccaacccacatcctgagaatcggcgagagctataaggagaagcagcggaccatccaggccaagaaggaggtggagcagcggagagccggcggctacagccggaagtacgccagcaaagccaagaatctggcagacgatatggtgagaaacaccgctagagatctgctgtactacgccgtgacccaggatgccatgctgatcttcgccaacctgagccggggcttcggccggcagggcaagcggaccttcatggccgagagacagtacacacggatggaggactggctgaccgccaagctggcctacgagggcctgagcaagacctacctgtccaagacactggcccagtacacctccaagacatgcagcaactgtgggtttaccatcaccagcgccgactacgacagggtgctggagaagctgaagaagacagcaacaggctggatgaccacaattaacggcaaggagctgaaggtggagggccagattacctactacaacagatacaagagacagaacgtagtcaaggacctgtccgtcgagctggatagactgagcgaagaatctgtgaacaacgacatctcctcctggacaaagggcagaagcggagaagctctgagcctcctgaagaaaagattctcccatagacccgtgcaggagaagttcgtgtgcctgaactgcggcttcgagacacacgcagccgagcaagccgccctgaacatcgccagatcctggctgttcctgcggagccaggagtacaagaaataccagacaaacaagacaaccggcaacaccgataagagagccttcgtcgagacctggcagtccttttaccggaagaagcttaaggaggtgtggaaacctgccgtgcggtctggcggatctggcggaggctccaccagccccaagaaaaagagaaaagtctaagctgccttctgcggggcttgccttctggccatgcccttcttctctcccttgcacctgtacctcttggtctttgaataaagcctgagtaggaaggctagcaaaaaaaaaaaaaaaaaaaaaaaaaaaaaaaaaaaaaaaaaaaaaaaaaaaaaaaaaaaaaaaaaaaaaaaaaaaaaaaa

SEQ ID NO: 9930 - RNA, 8787 nt, synthetic construct
  source 1..8787: mol_type = other RNA
aggaaataagagagaaaagaagagtaagaagaaatataagagccaccatggcccctaagaagaagcgtaaagtgagccggatgaaccacgaccaggagttcgacccccctaaggtgtaccctcccgtccccgccgagaagagaaagcccatccgggtcctgagcctgttcgatggcatcgccaccggtctgctggtgctgaaggacctgggcatccaggtggataggtacattgcctccgaggtgtgcgaggactccatcaccgtgggaatggtgcgtcatcagggcaagatcatgtacgtgggcgacgtgcggagcgtgacacagaagcatatccaggagtggggccctttcgacctggtgatcggcggcagcccttgcaatgacctgagcatcgtgaacccagcccggaagggcctgtacgagggaaccggcagactgttcttcgagttttacagactgctgcacgacgcccggcctaaggaaggcgacgaccggcccttcttttggctgttcgagaatgtggtggccatgggagtcagcgacaagcgggatattagccggttcctggagagcaaccccgtgatgatcgatgccaaggaagtgagcgccgcccaccgggccagatacttctggggcaatctgcctggcatgaacagacccctggccagcaccgtgaacgacaagctggagctgcaggagtgcctggagcacggccggatcgccaagttcagcaaggtgagaaccatcaccacccgaagcaacagcatcaaacaaggcaaggaccagcactttcctgtgttcatgaacgagaaggaggacatcctgtggtgtaccgagatggagagagtgttcgggttcccagtccactacacagatgtcagcaacatgtctagactggccagacagagactgctgggaagaagctggtccgtccctgtgatcagacacctgttcgcccctctgaaggagtacttcgcctgcgtgagcagcggcaacagcaacgccaacagccggggccccagcttctctagcggcctggtgccactgtccctgagagggagccacatgggccccatggagatctacaaaaccgtgagcgcctggaagcggcagcctgtgcgcgtgctgagcctgtttcggaatatcgataaagtcctgaaaagcctgggattcctggagagcggctctggctccggcggtggcaccctgaagtacgtggaggatgtgacaaacgtggtcagacgggatgtggagaagtggggccccttcgatctggtgtacggcagcacccaacccctgggcagctcttgtgaccggtgccctggctggtacatgtttcagttccaccggatcctgcagtacgccctgccgagacaggagtcccagcggccattcttttggattttcatggacaacttgctgctgaccgaggatgaccaggaaactaccactcggttcctgcagaccgaagccgtgaccctgcaggacgtgagaggccgggactaccagaacgccatgcgggtgtggtccaacatccctggactgaaaagcaagcacgcacctctgacccctaaagaagaggagtacctgcaggcccaggtgcggagcagaagcaagctggacgcccctaaggtggatctgctggtgaagaattgcctcctgcccctgagagagtacttcaagtatttcagccagaatagtctgcccctgggaggcagcggcggcggcgccagggagcccgtgagcttcgtggaggtggccgtgtacttcagcagggaggagtgggccctgctggaccccgcccagagggccctgtacagggacgtgatgctggagacctacgagagcgtggccagcctgggccccttccccgcccccaagcccgtggtgatcagcctgctggagggcggcgacgacccctggatccccgacgtgcacagccccgaggccgtgagcggcgacttcagccccggcggcccaagcagcggcgcccctcctcccagcggcggcaggcggcccaagcagcggcgcccctcctcccagcggcggcagcccagccggctccccaacctctaccgaggagggcacctctgagtccgccacccccgagagcggccctggcacctccaccgagcccagcgagggcagcgcacccggcagccctgccggcagccccacctccacagaggagggaaccagcaccgagcccagcgaaggcagcgccccaggcaccagcaccgagcctagtgagcaggagattaaacggatcaacaagatcagaagaagacttgtgaaagacagcaacaccaagaaggccggcaagacaggccccatgaaaaccctgctggttagagtgatgacacccgatctgagagagcggctggaaaacctgagaaagaagcctgaaaatatcccccagcccatcagcaatacatctagagccaacctgaataagctgctgaccgattacaccgaaatgaagaaggcgatcctgcatgtgtactgggaagagttccagaaggaccctgtgggcctgatgagccgggtggcccagcctgccagcaagaagatcgatcagaacaagctgaaacctgagatggacgagaagggcaacctgaccaccgccggctttgcctgctctcagtgtggccagcccctgttcgtgtacaagctggagcaggtgtctgagaagggcaaggcttacaccaactacttcggacggtgcaatgtggccgagcacgaaaagctgatcctgctggcccagctgaagcccgagaaggatagcgacgaagccgtgacatatagcctgggaaagtttgggcagagggccctggatttctacagcattcatgtgaccaaggagtccacccaccccgtgaagcccctggcccagatcgccggaaacagatacgcctccggacctgtgggaaaggccctgagcgacgcatgtatgggcacaatcgcctccttcctgtctaagtaccaggacatcatcatcgaacaccagaaggtggtgaagggcaaccagaagagactggagagcctgcgggagctggccggcaaggaaaacctggaataccctagcgtgaccctgccacctcagcctcacaccaaggagggcgttgatgcctacaacgaagtgatcgcccgggtgcgaatgtgggtgaacctgaacctgtggcagaagctgaagctaagcagagatgatgccaagcctctgctgagactgaagggattcccttcctttcctctggtcgagagacaggccaacgaagtggactggtgggacatggtgtgtaacgtgaagaagctgatcaacgagaaaaaggaggatggcaaggtgttttggcagaatctggctggctacaagagacaggaagccctgagaccatacctgagcagcgaggaagatcggaagaagggaaagaaattcgctcggtaccagctgggcgacctgctgctgcacctggaaaagaagcacggcgaggactggggaaaggtgtacgacgaggcctgggagcggattgacaagaaagtggaaggcctgagcaagcacatcaagctggaagaggaacggagaagcgaggacgcccagagcaaggccgccctgaccgactggctgcgggctaaggccagcttcgtgatcgagggcctgaaggaggccgacaaggacgagttctgcagatgcgagctgaagctgcagaagtggtacggggacctgcggggaaagcccttcgccatcgaagccgagaacagcatcctggacatcagcggcttcagcaagcagtacaactgtgccttcatctggcagaaggacggcgtgaagaagctgaacctgtacctgatcatcaactacttcaagggcggcaagctgcggttcaagaagatcaaacctgaagccttcgaagccaacagattctacaccgtgatcaacaaaaagagcggcgagatcgtgcccatggaggtgaacttcaacttcgacgaccccaacctgatcatcctgcctctggcctttggcaagagacagggcagagaattcatctggaacgacctgctgtccctggaaaccggcagcctgaagctggccaacggaagagtgatcgagaagacactgtacaacagaagaacccggcaggatgagcctgccctgttcgtggccctgaccttcgagcggcgggaggtcctggactcctccaatatcaaaccaatgaacctgatcggcgtggcaagaggcgaaaacatccccgccgtgatcgccctgaccgaccccgagggctgcccactgagccggtttaaggatagcctgggaaacccaacccacatcctgagaatcggcgagagctataaggagaagcagcggaccatccaggccaagaaggaggtggagcagcggagagccggcggctacagccggaagtacgccagcaaagccaagaatctggcagacgatatggtgagaaacaccgctagagatctgctgtactacgccgtgacccaggatgccatgctgatcttcgccaacctgagccggggcttcggccggcagggcaagcggaccttcatggccgagagacagtacacacggatggaggactggctgaccgccaagctggcctacgagggcctgagcaagacctacctgtccaagacactggcccagtacacctccaagacatgcagcaactgtgggtttaccatcaccagcgccgactacgacagggtgctggagaagctgaagaagacagcaacaggctggatgaccacaattaacggcaaggagctgaaggtggagggccagattacctactacaacagatacaagagacagaacgtagtcaaggacctgtccgtcgagctggatagactgagcgaagaatctgtgaacaacgacatctcctcctggacaaagggcagaagcggagaagctctgagcctcctgaagaaaagattctcccatagacccgtgcaggagaagttcgtgtgcctgaactgcggcttcgagacacacgcagccgagcaagccgccctgaacatcgccagatcctggctgttcctgcggagccaggagtacaagaaataccagacaaacaagacaaccggcaacaccgataagagagccttcgtcgagacctggcagtccttttaccggaagaagcttaaggaggtgtggaaacctgccgtgcggtctggcggatctggcggaggctccaccagccccaagaaaaagagaaaagtctaagctgccttctgcggggcttgccttctggccatgcccttcttctctcccttgcacctgtacctcttggtctttgaataaagcctgagtaggaaggctagcaaaaaaaaaaaaaaaaaaaaaaaaaaaaaaaaaaaaaaaaaaaaaaaaaaaaaaaaaaaaaaaaaaaaaaaaaaaaaaaagcccagccggctccccaacctctaccgaggagggcacctctgagtccgccacccccgagagcggccctggcacctccaccgagcccagcgagggcagcgcacccggcagccctgccggcagccccacctccacagaggagggaaccagcaccgagcccagcgaaggcagcgccccaggcaccagcaccgagcctagtgagcaggagattaaacggatcaacaagatcagaagaagacttgtgaaagacagcaacaccaagaaggccggcaagacaggccccatgaaaaccctgctggttagagtgatgacacccgatctgagagagcggctggaaaacctgagaaagaagcctgaaaatatcccccagcccatcagcaatacatctagagccaacctgaataagctgctgaccgattacaccgaaatgaagaaggcgatcctgcatgtgtactgggaagagttccagaaggaccctgtgggcctgatgagccgggtggcccagcctgccagcaagaagatcgatcagaacaagctgaaacctgagatggacgagaagggcaacctgaccaccgccggctttgcctgctctcagtgtggccagcccctgttcgtgtacaagctggagcaggtgtctgagaagggcaaggcttacaccaactacttcggacggtgcaatgtggccgagcacgaaaagctgatcctgctggcccagctgaagcccgagaaggatagcgacgaagccgtgacatatagcctgggaaagtttgggcagagggccctggatttctacagcattcatgtgaccaaggagtccacccaccccgtgaagcccctggcccagatcgccggaaacagatacgcctccggacctgtgggaaaggccctgagcgacgcatgtatgggcacaatcgcctccttcctgtctaagtaccaggacatcatcatcgaacaccagaaggtggtgaagggcaaccagaagagactggagagcctgcgggagctggccggcaaggaaaacctggaataccctagcgtgaccctgccacctcagcctcacaccaaggagggcgttgatgcctacaacgaagtgatcgcccgggtgcgaatgtgggtgaacctgaacctgtggcagaagctgaagctaagcagagatgatgccaagcctctgctgagactgaagggattcccttcctttcctctggtcgagagacaggccaacgaagtggactggtgggacatggtgtgtaacgtgaagaagctgatcaacgagaaaaaggaggatggcaaggtgttttggcagaatctggctggctacaagagacaggaagccctgagaccatacctgagcagcgaggaagatcggaagaagggaaagaaattcgctcggtaccagctgggcgacctgctgctgcacctggaaaagaagcacggcgaggactggggaaaggtgtacgacgaggcctgggagcggattgacaagaaagtggaaggcctgagcaagcacatcaagctggaagaggaacggagaagcgaggacgcccagagcaaggccgccctgaccgactggctgcgggctaaggccagcttcgtgatcgagggcctgaaggaggccgacaaggacgagttctgcagatgcgagctgaagctgcagaagtggtacggggacctgcggggaaagcccttcgccatcgaagccgagaacagcatcctggacatcagcggcttcagcaagcagtacaactgtgccttcatctggcagaaggacggcgtgaagaagctgaacctgtacctgatcatcaactacttcaagggcggcaagctgcggttcaagaagatcaaacctgaagccttcgaagccaacagattctacaccgtgatcaacaaaaagagcggcgagatcgtgcccatggaggtgaacttcaacttcgacgaccccaacctgatcatcctgcctctggcctttggcaagagacagggcagagaattcatctggaacgacctgctgtccctggaaaccggcagcctgaagctggccaacggaagagtgatcgagaagacactgtacaacagaagaacccggcaggatgagcctgccctgttcgtggccctgaccttcgagcggcgggaggtcctggactcctccaatatcaaaccaatgaacctgatcggcgtggcaagaggcgaaaacatccccgccgtgatcgccctgaccgaccccgagggctgcccactgagccggtttaaggatagcctgggaaacccaacccacatcctgagaatcggcgagagctataaggagaagcagcggaccatccaggccaagaaggaggtggagcagcggagagccggcggctacagccggaagtacgccagcaaagccaagaatctggcagacgatatggtgagaaacaccgctagagatctgctgtactacgccgtgacccaggatgccatgctgatcttcgccaacctgagccggggcttcggccggcagggcaagcggaccttcatggccgagagacagtacacacggatggaggactggctgaccgccaagctggcctacgagggcctgagcaagacctacctgtccaagacactggcccagtacacctccaagacatgcagcaactgtgggtttaccatcaccagcgccgactacgacagggtgctggagaagctgaagaagacagcaacaggctggatgaccacaattaacggcaaggagctgaaggtggagggccagattacctactacaacagatacaagagacagaacgtagtcaaggacctgtccgtcgagctggatagactgagcgaagaatctgtgaacaacgacatctcctcctggacaaagggcagaagcggagaagctctgagcctcctgaagaaaagattctcccatagacccgtgcaggagaagttcgtgtgcctgaactgcggcttcgagacacacgcagccgagcaagccgccctgaacatcgccagatcctggctgttcctgcggagccaggagtacaagaaataccagacaaacaagacaaccggcaacaccgataagagagccttcgtcgagacctggcagtccttttaccggaagaagcttaaggaggtgtggaaacctgccgtgcggtctggcggatctggcggaggctccaccagccccaagaaaaagagaaaagtctaagctgccttctgcggggcttgccttctggccatgcccttcttctctcccttgcacctgtacctcttggtctttgaataaagcctgagtaggaaggctagcaaaaaaaaaaaaaaaaaaaaaaaaaaaaaaaaaaaaaaaaaaaaaaaaaaaaaaaaaaaaaaaaaaaaaaaaaaaaaaaa

SEQ ID NO: 9931 - RNA, 8787 nt, synthetic construct
  source 1..8787: mol_type = other RNA
aggaaataagagagaaaagaagagtaagaagaaatataagagccaccatggcccctaagaagaagcgtaaagtgagccggatgaaccacgaccaggagttcgacccccctaaggtgtaccctcccgtccccgccgagaagagaaagcccatccgggtcctgagcctgttcgatggcatcgccaccggtctgctggtgctgaaggacctgggcatccaggtggataggtacattgcctccgaggtgtgcgaggactccatcaccgtgggaatggtgcgtcatcagggcaagatcatgtacgtgggcgacgtgcggagcgtgacacagaagcatatccaggagtggggccctttcgacctggtgatcggcggcagcccttgcaatgacctgagcatcgtgaacccagcccggaagggcctgtacgagggaaccggcagactgttcttcgagttttacagactgctgcacgacgcccggcctaaggaaggcgacgaccggcccttcttttggctgttcgagaatgtggtggccatgggagtcagcgacaagcgggatattagccggttcctggagagcaaccccgtgatgatcgatgccaaggaagtgagcgccgcccaccgggccagatacttctggggcaatctgcctggcatgaacagacccctggccagcaccgtgaacgacaagctggagctgcaggagtgcctggagcacggccggatcgccaagttcagcaaggtgagaaccatcaccacccgaagcaacagcatcaaacaaggcaaggaccagcactttcctgtgttcatgaacgagaaggaggacatcctgtggtgtaccgagatggagagagtgttcgggttcccagtccactacacagatgtcagcaacatgtctagactggccagacagagactgctgggaagaagctggtccgtccctgtgatcagacacctgttcgcccctctgaaggagtacttcgcctgcgtgagcagcggcaacagcaacgccaacagccggggccccagcttctctagcggcctggtgccactgtccctgagagggagccacatgggccccatggagatctacaaaaccgtgagcgcctggaagcggcagcctgtgcgcgtgctgagcctgtttcggaatatcgataaagtcctgaaaagcctgggattcctggagagcggctctggctccggcggtggcaccctgaagtacgtggaggatgtgacaaacgtggtcagacgggatgtggagaagtggggccccttcgatctggtgtacggcagcacccaacccctgggcagctcttgtgaccggtgccctggctggtacatgtttcagttccaccggatcctgcagtacgccctgccgagacaggagtcccagcggccattcttttggattttcatggacaacttgctgctgaccgaggatgaccaggaaactaccactcggttcctgcagaccgaagccgtgaccctgcaggacgtgagaggccgggactaccagaacgccatgcgggtgtggtccaacatccctggactgaaaagcaagcacgcacctctgacccctaaagaagaggagtacctgcaggcccaggtgcggagcagaagcaagctggacgcccctaaggtggatctgctggtgaagaattgcctcctgcccctgagagagtacttcaagtatttcagccagaatagtctgcccctgggaggcagcggcggcggcgccagggccagcctgagcttcgaggacgtggccgtgggcttcagctgggaggagtggcagctgctggcccccagccagaaggacctgtacagggaggtgatgctggagaactacaggaacctggtgagcgtgggctaccaggccagcaagcccgacagcctgttccagctggagcagggcgagcccccctggaccgtggtgggcgccgcccagagccagacctgccaggaggagatctgggagggcggcccaagcagcggcgcccctcctcccagcggcggcaggcggcccaagcagcggcgcccctcctcccagcggcggcagcccagccggctccccaacctctaccgaggagggcacctctgagtccgccacccccgagagcggccctggcacctccaccgagcccagcgagggcagcgcacccggcagccctgccggcagccccacctccacagaggagggaaccagcaccgagcccagcgaaggcagcgccccaggcaccagcaccgagcctagtgagcaggagattaaacggatcaacaagatcagaagaagacttgtgaaagacagcaacaccaagaaggccggcaagacaggccccatgaaaaccctgctggttagagtgatgacacccgatctgagagagcggctggaaaacctgagaaagaagcctgaaaatatcccccagcccatcagcaatacatctagagccaacctgaataagctgctgaccgattacaccgaaatgaagaaggcgatcctgcatgtgtactgggaagagttccagaaggaccctgtgggcctgatgagccgggtggcccagcctgccagcaagaagatcgatcagaacaagctgaaacctgagatggacgagaagggcaacctgaccaccgccggctttgcctgctctcagtgtggccagcccctgttcgtgtacaagctggagcaggtgtctgagaagggcaaggcttacaccaactacttcggacggtgcaatgtggccgagcacgaaaagctgatcctgctggcccagctgaagcccgagaaggatagcgacgaagccgtgacatatagcctgggaaagtttgggcagagggccctggatttctacagcattcatgtgaccaaggagtccacccaccccgtgaagcccctggcccagatcgccggaaacagatacgcctccggacctgtgggaaaggccctgagcgacgcatgtatgggcacaatcgcctccttcctgtctaagtaccaggacatcatcatcgaacaccagaaggtggtgaagggcaaccagaagagactggagagcctgcgggagctggccggcaaggaaaacctggaataccctagcgtgaccctgccacctcagcctcacaccaaggagggcgttgatgcctacaacgaagtgatcgcccgggtgcgaatgtgggtgaacctgaacctgtggcagaagctgaagctaagcagagatgatgccaagcctctgctgagactgaagggattcccttcctttcctctggtcgagagacaggccaacgaagtggactggtgggacatggtgtgtaacgtgaagaagctgatcaacgagaaaaaggaggatggcaaggtgttttggcagaatctggctggctacaagagacaggaagccctgagaccatacctgagcagcgaggaagatcggaagaagggaaagaaattcgctcggtaccagctgggcgacctgctgctgcacctggaaaagaagcacggcgaggactggggaaaggtgtacgacgaggcctgggagcggattgacaagaaagtggaaggcctgagcaagcacatcaagctggaagaggaacggagaagcgaggacgcccagagcaaggccgccctgaccgactggctgcgggctaaggccagcttcgtgatcgagggcctgaaggaggccgacaaggacgagttctgcagatgcgagctgaagctgcagaagtggtacggggacctgcggggaaagcccttcgccatcgaagccgagaacagcatcctggacatcagcggcttcagcaagcagtacaactgtgccttcatctggcagaaggacggcgtgaagaagctgaacctgtacctgatcatcaactacttcaagggcggcaagctgcggttcaagaagatcaaacctgaagccttcgaagccaacagattctacaccgtgatcaacaaaaagagcggcgagatcgtgcccatggaggtgaacttcaacttcgacgaccccaacctgatcatcctgcctctggcctttggcaagagacagggcagagaattcatctggaacgacctgctgtccctggaaaccggcagcctgaagctggccaacggaagagtgatcgagaagacactgtacaacagaagaacccggcaggatgagcctgccctgttcgtggccctgaccttcgagcggcgggaggtcctggactcctccaatatcaaaccaatgaacctgatcggcgtggcaagaggcgaaaacatccccgccgtgatcgccctgaccgaccccgagggctgcccactgagccggtttaaggatagcctgggaaacccaacccacatcctgagaatcggcgagagctataaggagaagcagcggaccatccaggccaagaaggaggtggagcagcggagagccggcggctacagccggaagtacgccagcaaagccaagaatctggcagacgatatggtgagaaacaccgctagagatctgctgtactacgccgtgacccaggatgccatgctgatcttcgccaacctgagccggggcttcggccggcagggcaagcggaccttcatggccgagagacagtacacacggatggaggactggctgaccgccaagctggcctacgagggcctgagcaagacctacctgtccaagacactggcccagtacacctccaagacatgcagcaactgtgggtttaccatcaccagcgccgactacgacagggtgctggagaagctgaagaagacagcaacaggctggatgaccacaattaacggcaaggagctgaaggtggagggccagattacctactacaacagatacaagagacagaacgtagtcaaggacctgtccgtcgagctggatagactgagcgaagaatctgtgaacaacgacatctcctcctggacaaagggcagaagcggagaagctctgagcctcctgaagaaaagattctcccatagacccgtgcaggagaagttcgtgtgcctgaactgcggcttcgagacacacgcagccgagcaagccgccctgaacatcgccagatcctggctgttcctgcggagccaggagtacaagaaataccagacaaacaagacaaccggcaacaccgataagagagccttcgtcgagacctggcagtccttttaccggaagaagcttaaggaggtgtggaaacctgccgtgcggtctggcggatctggcggaggctccaccagccccaagaaaaagagaaaagtctaagctgccttctgcggggcttgccttctggccatgcccttcttctctcccttgcacctgtacctcttggtctttgaataaagcctgagtaggaaggctagcaaaaaaaaaaaaaaaaaaaaaaaaaaaaaaaaaaaaaaaaaaaaaaaaaaaaaaaaaaaaaaaaaaaaaaaaaaaaaaaagcccagccggctccccaacctctaccgaggagggcacctctgagtccgccacccccgagagcggccctggcacctccaccgagcccagcgagggcagcgcacccggcagccctgccggcagccccacctccacagaggagggaaccagcaccgagcccagcgaaggcagcgccccaggcaccagcaccgagcctagtgagcaggagattaaacggatcaacaagatcagaagaagacttgtgaaagacagcaacaccaagaaggccggcaagacaggccccatgaaaaccctgctggttagagtgatgacacccgatctgagagagcggctggaaaacctgagaaagaagcctgaaaatatcccccagcccatcagcaatacatctagagccaacctgaataagctgctgaccgattacaccgaaatgaagaaggcgatcctgcatgtgtactgggaagagttccagaaggaccctgtgggcctgatgagccgggtggcccagcctgccagcaagaagatcgatcagaacaagctgaaacctgagatggacgagaagggcaacctgaccaccgccggctttgcctgctctcagtgtggccagcccctgttcgtgtacaagctggagcaggtgtctgagaagggcaaggcttacaccaactacttcggacggtgcaatgtggccgagcacgaaaagctgatcctgctggcccagctgaagcccgagaaggatagcgacgaagccgtgacatatagcctgggaaagtttgggcagagggccctggatttctacagcattcatgtgaccaaggagtccacccaccccgtgaagcccctggcccagatcgccggaaacagatacgcctccggacctgtgggaaaggccctgagcgacgcatgtatgggcacaatcgcctccttcctgtctaagtaccaggacatcatcatcgaacaccagaaggtggtgaagggcaaccagaagagactggagagcctgcgggagctggccggcaaggaaaacctggaataccctagcgtgaccctgccacctcagcctcacaccaaggagggcgttgatgcctacaacgaagtgatcgcccgggtgcgaatgtgggtgaacctgaacctgtggcagaagctgaagctaagcagagatgatgccaagcctctgctgagactgaagggattcccttcctttcctctggtcgagagacaggccaacgaagtggactggtgggacatggtgtgtaacgtgaagaagctgatcaacgagaaaaaggaggatggcaaggtgttttggcagaatctggctggctacaagagacaggaagccctgagaccatacctgagcagcgaggaagatcggaagaagggaaagaaattcgctcggtaccagctgggcgacctgctgctgcacctggaaaagaagcacggcgaggactggggaaaggtgtacgacgaggcctgggagcggattgacaagaaagtggaaggcctgagcaagcacatcaagctggaagaggaacggagaagcgaggacgcccagagcaaggccgccctgaccgactggctgcgggctaaggccagcttcgtgatcgagggcctgaaggaggccgacaaggacgagttctgcagatgcgagctgaagctgcagaagtggtacggggacctgcggggaaagcccttcgccatcgaagccgagaacagcatcctggacatcagcggcttcagcaagcagtacaactgtgccttcatctggcagaaggacggcgtgaagaagctgaacctgtacctgatcatcaactacttcaagggcggcaagctgcggttcaagaagatcaaacctgaagccttcgaagccaacagattctacaccgtgatcaacaaaaagagcggcgagatcgtgcccatggaggtgaacttcaacttcgacgaccccaacctgatcatcctgcctctggcctttggcaagagacagggcagagaattcatctggaacgacctgctgtccctggaaaccggcagcctgaagctggccaacggaagagtgatcgagaagacactgtacaacagaagaacccggcaggatgagcctgccctgttcgtggccctgaccttcgagcggcgggaggtcctggactcctccaatatcaaaccaatgaacctgatcggcgtggcaagaggcgaaaacatccccgccgtgatcgccctgaccgaccccgagggctgcccactgagccggtttaaggatagcctgggaaacccaacccacatcctgagaatcggcgagagctataaggagaagcagcggaccatccaggccaagaaggaggtggagcagcggagagccggcggctacagccggaagtacgccagcaaagccaagaatctggcagacgatatggtgagaaacaccgctagagatctgctgtactacgccgtgacccaggatgccatgctgatcttcgccaacctgagccggggcttcggccggcagggcaagcggaccttcatggccgagagacagtacacacggatggaggactggctgaccgccaagctggcctacgagggcctgagcaagacctacctgtccaagacactggcccagtacacctccaagacatgcagcaactgtgggtttaccatcaccagcgccgactacgacagggtgctggagaagctgaagaagacagcaacaggctggatgaccacaattaacggcaaggagctgaaggtggagggccagattacctactacaacagatacaagagacagaacgtagtcaaggacctgtccgtcgagctggatagactgagcgaagaatctgtgaacaacgacatctcctcctggacaaagggcagaagcggagaagctctgagcctcctgaagaaaagattctcccatagacccgtgcaggagaagttcgtgtgcctgaactgcggcttcgagacacacgcagccgagcaagccgccctgaacatcgccagatcctggctgttcctgcggagccaggagtacaagaaataccagacaaacaagacaaccggcaacaccgataagagagccttcgtcgagacctggcagtccttttaccggaagaagcttaaggaggtgtggaaacctgccgtgcggtctggcggatctggcggaggctccaccagccccaagaaaaagagaaaagtctaagctgccttctgcggggcttgccttctggccatgcccttcttctctcccttgcacctgtacctcttggtctttgaataaagcctgagtaggaaggctagcaaaaaaaaaaaaaaaaaaaaaaaaaaaaaaaaaaaaaaaaaaaaaaaaaaaaaaaaaaaaaaaaaaaaaaaaaaaaaaaa

SEQ ID NO: 9932 - RNA, 8787 nt, synthetic construct
  source 1..8787: mol_type = other RNA
aggaaataagagagaaaagaagagtaagaagaaatataagagccaccatggcccctaagaagaagcgtaaagtgagccggatgaaccacgaccaggagttcgacccccctaaggtgtaccctcccgtccccgccgagaagagaaagcccatccgggtcctgagcctgttcgatggcatcgccaccggtctgctggtgctgaaggacctgggcatccaggtggataggtacattgcctccgaggtgtgcgaggactccatcaccgtgggaatggtgcgtcatcagggcaagatcatgtacgtgggcgacgtgcggagcgtgacacagaagcatatccaggagtggggccctttcgacctggtgatcggcggcagcccttgcaatgacctgagcatcgtgaacccagcccggaagggcctgtacgagggaaccggcagactgttcttcgagttttacagactgctgcacgacgcccggcctaaggaaggcgacgaccggcccttcttttggctgttcgagaatgtggtggccatgggagtcagcgacaagcgggatattagccggttcctggagagcaaccccgtgatgatcgatgccaaggaagtgagcgccgcccaccgggccagatacttctggggcaatctgcctggcatgaacagacccctggccagcaccgtgaacgacaagctggagctgcaggagtgcctggagcacggccggatcgccaagttcagcaaggtgagaaccatcaccacccgaagcaacagcatcaaacaaggcaaggaccagcactttcctgtgttcatgaacgagaaggaggacatcctgtggtgtaccgagatggagagagtgttcgggttcccagtccactacacagatgtcagcaacatgtctagactggccagacagagactgctgggaagaagctggtccgtccctgtgatcagacacctgttcgcccctctgaaggagtacttcgcctgcgtgagcagcggcaacagcaacgccaacagccggggccccagcttctctagcggcctggtgccactgtccctgagagggagccacatgggccccatggagatctacaaaaccgtgagcgcctggaagcggcagcctgtgcgcgtgctgagcctgtttcggaatatcgataaagtcctgaaaagcctgggattcctggagagcggctctggctccggcggtggcaccctgaagtacgtggaggatgtgacaaacgtggtcagacgggatgtggagaagtggggccccttcgatctggtgtacggcagcacccaacccctgggcagctcttgtgaccggtgccctggctggtacatgtttcagttccaccggatcctgcagtacgccctgccgagacaggagtcccagcggccattcttttggattttcatggacaacttgctgctgaccgaggatgaccaggaaactaccactcggttcctgcagaccgaagccgtgaccctgcaggacgtgagaggccgggactaccagaacgccatgcgggtgtggtccaacatccctggactgaaaagcaagcacgcacctctgacccctaaagaagaggagtacctgcaggcccaggtgcggagcagaagcaagctggacgcccctaaggtggatctgctggtgaagaattgcctcctgcccctgagagagtacttcaagtatttcagccagaatagtctgcccctgggaggcagcggcggcggcagccagggcctggtgaccttcgaggacgtggccgtgtacttcagcctggaggagtgggagaggctgaacgtggagcagagggccctgtaccaggaggtgatgcagggcaactacggcatcctggtgagcctgggctaccccatccccaagcccgacctgatcttcaggctggagcagggcgaggagccctgggtgcccgacagcccccaccccgaggagggcgacatcgtgaccggcgtgtacggcggcccaagcagcggcgcccctcctcccagcggcggcaggcggcccaagcagcggcgcccctcctcccagcggcggcagcccagccggctccccaacctctaccgaggagggcacctctgagtccgccacccccgagagcggccctggcacctccaccgagcccagcgagggcagcgcacccggcagccctgccggcagccccacctccacagaggagggaaccagcaccgagcccagcgaaggcagcgccccaggcaccagcaccgagcctagtgagcaggagattaaacggatcaacaagatcagaagaagacttgtgaaagacagcaacaccaagaaggccggcaagacaggccccatgaaaaccctgctggttagagtgatgacacccgatctgagagagcggctggaaaacctgagaaagaagcctgaaaatatcccccagcccatcagcaatacatctagagccaacctgaataagctgctgaccgattacaccgaaatgaagaaggcgatcctgcatgtgtactgggaagagttccagaaggaccctgtgggcctgatgagccgggtggcccagcctgccagcaagaagatcgatcagaacaagctgaaacctgagatggacgagaagggcaacctgaccaccgccggctttgcctgctctcagtgtggccagcccctgttcgtgtacaagctggagcaggtgtctgagaagggcaaggcttacaccaactacttcggacggtgcaatgtggccgagcacgaaaagctgatcctgctggcccagctgaagcccgagaaggatagcgacgaagccgtgacatatagcctgggaaagtttgggcagagggccctggatttctacagcattcatgtgaccaaggagtccacccaccccgtgaagcccctggcccagatcgccggaaacagatacgcctccggacctgtgggaaaggccctgagcgacgcatgtatgggcacaatcgcctccttcctgtctaagtaccaggacatcatcatcgaacaccagaaggtggtgaagggcaaccagaagagactggagagcctgcgggagctggccggcaaggaaaacctggaataccctagcgtgaccctgccacctcagcctcacaccaaggagggcgttgatgcctacaacgaagtgatcgcccgggtgcgaatgtgggtgaacctgaacctgtggcagaagctgaagctaagcagagatgatgccaagcctctgctgagactgaagggattcccttcctttcctctggtcgagagacaggccaacgaagtggactggtgggacatggtgtgtaacgtgaagaagctgatcaacgagaaaaaggaggatggcaaggtgttttggcagaatctggctggctacaagagacaggaagccctgagaccatacctgagcagcgaggaagatcggaagaagggaaagaaattcgctcggtaccagctgggcgacctgctgctgcacctggaaaagaagcacggcgaggactggggaaaggtgtacgacgaggcctgggagcggattgacaagaaagtggaaggcctgagcaagcacatcaagctggaagaggaacggagaagcgaggacgcccagagcaaggccgccctgaccgactggctgcgggctaaggccagcttcgtgatcgagggcctgaaggaggccgacaaggacgagttctgcagatgcgagctgaagctgcagaagtggtacggggacctgcggggaaagcccttcgccatcgaagccgagaacagcatcctggacatcagcggcttcagcaagcagtacaactgtgccttcatctggcagaaggacggcgtgaagaagctgaacctgtacctgatcatcaactacttcaagggcggcaagctgcggttcaagaagatcaaacctgaagccttcgaagccaacagattctacaccgtgatcaacaaaaagagcggcgagatcgtgcccatggaggtgaacttcaacttcgacgaccccaacctgatcatcctgcctctggcctttggcaagagacagggcagagaattcatctggaacgacctgctgtccctggaaaccggcagcctgaagctggccaacggaagagtgatcgagaagacactgtacaacagaagaacccggcaggatgagcctgccctgttcgtggccctgaccttcgagcggcgggaggtcctggactcctccaatatcaaaccaatgaacctgatcggcgtggcaagaggcgaaaacatccccgccgtgatcgccctgaccgaccccgagggctgcccactgagccggtttaaggatagcctgggaaacccaacccacatcctgagaatcggcgagagctataaggagaagcagcggaccatccaggccaagaaggaggtggagcagcggagagccggcggctacagccggaagtacgccagcaaagccaagaatctggcagacgatatggtgagaaacaccgctagagatctgctgtactacgccgtgacccaggatgccatgctgatcttcgccaacctgagccggggcttcggccggcagggcaagcggaccttcatggccgagagacagtacacacggatggaggactggctgaccgccaagctggcctacgagggcctgagcaagacctacctgtccaagacactggcccagtacacctccaagacatgcagcaactgtgggtttaccatcaccagcgccgactacgacagggtgctggagaagctgaagaagacagcaacaggctggatgaccacaattaacggcaaggagctgaaggtggagggccagattacctactacaacagatacaagagacagaacgtagtcaaggacctgtccgtcgagctggatagactgagcgaagaatctgtgaacaacgacatctcctcctggacaaagggcagaagcggagaagctctgagcctcctgaagaaaagattctcccatagacccgtgcaggagaagttcgtgtgcctgaactgcggcttcgagacacacgcagccgagcaagccgccctgaacatcgccagatcctggctgttcctgcggagccaggagtacaagaaataccagacaaacaagacaaccggcaacaccgataagagagccttcgtcgagacctggcagtccttttaccggaagaagcttaaggaggtgtggaaacctgccgtgcggtctggcggatctggcggaggctccaccagccccaagaaaaagagaaaagtctaagctgccttctgcggggcttgccttctggccatgcccttcttctctcccttgcacctgtacctcttggtctttgaataaagcctgagtaggaaggctagcaaaaaaaaaaaaaaaaaaaaaaaaaaaaaaaaaaaaaaaaaaaaaaaaaaaaaaaaaaaaaaaaaaaaaaaaaaaaaaaagcccagccggctccccaacctctaccgaggagggcacctctgagtccgccacccccgagagcggccctggcacctccaccgagcccagcgagggcagcgcacccggcagccctgccggcagccccacctccacagaggagggaaccagcaccgagcccagcgaaggcagcgccccaggcaccagcaccgagcctagtgagcaggagattaaacggatcaacaagatcagaagaagacttgtgaaagacagcaacaccaagaaggccggcaagacaggccccatgaaaaccctgctggttagagtgatgacacccgatctgagagagcggctggaaaacctgagaaagaagcctgaaaatatcccccagcccatcagcaatacatctagagccaacctgaataagctgctgaccgattacaccgaaatgaagaaggcgatcctgcatgtgtactgggaagagttccagaaggaccctgtgggcctgatgagccgggtggcccagcctgccagcaagaagatcgatcagaacaagctgaaacctgagatggacgagaagggcaacctgaccaccgccggctttgcctgctctcagtgtggccagcccctgttcgtgtacaagctggagcaggtgtctgagaagggcaaggcttacaccaactacttcggacggtgcaatgtggccgagcacgaaaagctgatcctgctggcccagctgaagcccgagaaggatagcgacgaagccgtgacatatagcctgggaaagtttgggcagagggccctggatttctacagcattcatgtgaccaaggagtccacccaccccgtgaagcccctggcccagatcgccggaaacagatacgcctccggacctgtgggaaaggccctgagcgacgcatgtatgggcacaatcgcctccttcctgtctaagtaccaggacatcatcatcgaacaccagaaggtggtgaagggcaaccagaagagactggagagcctgcgggagctggccggcaaggaaaacctggaataccctagcgtgaccctgccacctcagcctcacaccaaggagggcgttgatgcctacaacgaagtgatcgcccgggtgcgaatgtgggtgaacctgaacctgtggcagaagctgaagctaagcagagatgatgccaagcctctgctgagactgaagggattcccttcctttcctctggtcgagagacaggccaacgaagtggactggtgggacatggtgtgtaacgtgaagaagctgatcaacgagaaaaaggaggatggcaaggtgttttggcagaatctggctggctacaagagacaggaagccctgagaccatacctgagcagcgaggaagatcggaagaagggaaagaaattcgctcggtaccagctgggcgacctgctgctgcacctggaaaagaagcacggcgaggactggggaaaggtgtacgacgaggcctgggagcggattgacaagaaagtggaaggcctgagcaagcacatcaagctggaagaggaacggagaagcgaggacgcccagagcaaggccgccctgaccgactggctgcgggctaaggccagcttcgtgatcgagggcctgaaggaggccgacaaggacgagttctgcagatgcgagctgaagctgcagaagtggtacggggacctgcggggaaagcccttcgccatcgaagccgagaacagcatcctggacatcagcggcttcagcaagcagtacaactgtgccttcatctggcagaaggacggcgtgaagaagctgaacctgtacctgatcatcaactacttcaagggcggcaagctgcggttcaagaagatcaaacctgaagccttcgaagccaacagattctacaccgtgatcaacaaaaagagcggcgagatcgtgcccatggaggtgaacttcaacttcgacgaccccaacctgatcatcctgcctctggcctttggcaagagacagggcagagaattcatctggaacgacctgctgtccctggaaaccggcagcctgaagctggccaacggaagagtgatcgagaagacactgtacaacagaagaacccggcaggatgagcctgccctgttcgtggccctgaccttcgagcggcgggaggtcctggactcctccaatatcaaaccaatgaacctgatcggcgtggcaagaggcgaaaacatccccgccgtgatcgccctgaccgaccccgagggctgcccactgagccggtttaaggatagcctgggaaacccaacccacatcctgagaatcggcgagagctataaggagaagcagcggaccatccaggccaagaaggaggtggagcagcggagagccggcggctacagccggaagtacgccagcaaagccaagaatctggcagacgatatggtgagaaacaccgctagagatctgctgtactacgccgtgacccaggatgccatgctgatcttcgccaacctgagccggggcttcggccggcagggcaagcggaccttcatggccgagagacagtacacacggatggaggactggctgaccgccaagctggcctacgagggcctgagcaagacctacctgtccaagacactggcccagtacacctccaagacatgcagcaactgtgggtttaccatcaccagcgccgactacgacagggtgctggagaagctgaagaagacagcaacaggctggatgaccacaattaacggcaaggagctgaaggtggagggccagattacctactacaacagatacaagagacagaacgtagtcaaggacctgtccgtcgagctggatagactgagcgaagaatctgtgaacaacgacatctcctcctggacaaagggcagaagcggagaagctctgagcctcctgaagaaaagattctcccatagacccgtgcaggagaagttcgtgtgcctgaactgcggcttcgagacacacgcagccgagcaagccgccctgaacatcgccagatcctggctgttcctgcggagccaggagtacaagaaataccagacaaacaagacaaccggcaacaccgataagagagccttcgtcgagacctggcagtccttttaccggaagaagcttaaggaggtgtggaaacctgccgtgcggtctggcggatctggcggaggctccaccagccccaagaaaaagagaaaagtctaagctgccttctgcggggcttgccttctggccatgcccttcttctctcccttgcacctgtacctcttggtctttgaataaagcctgagtaggaaggctagcaaaaaaaaaaaaaaaaaaaaaaaaaaaaaaaaaaaaaaaaaaaaaaaaaaaaaaaaaaaaaaaaaaaaaaaaaaaaaaaa

SEQ ID NO: 9933 - RNA, 8787 nt, synthetic construct
  source 1..8787: mol_type = other RNA
aggaaataagagagaaaagaagagtaagaagaaatataagagccaccatggcccctaagaagaagcgtaaagtgagccggatgaaccacgaccaggagttcgacccccctaaggtgtaccctcccgtccccgccgagaagagaaagcccatccgggtcctgagcctgttcgatggcatcgccaccggtctgctggtgctgaaggacctgggcatccaggtggataggtacattgcctccgaggtgtgcgaggactccatcaccgtgggaatggtgcgtcatcagggcaagatcatgtacgtgggcgacgtgcggagcgtgacacagaagcatatccaggagtggggccctttcgacctggtgatcggcggcagcccttgcaatgacctgagcatcgtgaacccagcccggaagggcctgtacgagggaaccggcagactgttcttcgagttttacagactgctgcacgacgcccggcctaaggaaggcgacgaccggcccttcttttggctgttcgagaatgtggtggccatgggagtcagcgacaagcgggatattagccggttcctggagagcaaccccgtgatgatcgatgccaaggaagtgagcgccgcccaccgggccagatacttctggggcaatctgcctggcatgaacagacccctggccagcaccgtgaacgacaagctggagctgcaggagtgcctggagcacggccggatcgccaagttcagcaaggtgagaaccatcaccacccgaagcaacagcatcaaacaaggcaaggaccagcactttcctgtgttcatgaacgagaaggaggacatcctgtggtgtaccgagatggagagagtgttcgggttcccagtccactacacagatgtcagcaacatgtctagactggccagacagagactgctgggaagaagctggtccgtccctgtgatcagacacctgttcgcccctctgaaggagtacttcgcctgcgtgagcagcggcaacagcaacgccaacagccggggccccagcttctctagcggcctggtgccactgtccctgagagggagccacatgggccccatggagatctacaaaaccgtgagcgcctggaagcggcagcctgtgcgcgtgctgagcctgtttcggaatatcgataaagtcctgaaaagcctgggattcctggagagcggctctggctccggcggtggcaccctgaagtacgtggaggatgtgacaaacgtggtcagacgggatgtggagaagtggggccccttcgatctggtgtacggcagcacccaacccctgggcagctcttgtgaccggtgccctggctggtacatgtttcagttccaccggatcctgcagtacgccctgccgagacaggagtcccagcggccattcttttggattttcatggacaacttgctgctgaccgaggatgaccaggaaactaccactcggttcctgcagaccgaagccgtgaccctgcaggacgtgagaggccgggactaccagaacgccatgcgggtgtggtccaacatccctggactgaaaagcaagcacgcacctctgacccctaaagaagaggagtacctgcaggcccaggtgcggagcagaagcaagctggacgcccctaaggtggatctgctggtgaagaattgcctcctgcccctgagagagtacttcaagtatttcagccagaatagtctgcccctgggaggcagcggcggcggcccccagaagagcgtgaccttcgaggacgtggccgtgtacttcacccagaccgagtgggacggcctgagccccgcccagagggccctgtacagggacgtgatgctggagaactacggcaacgtggccagcctgggcttcagcctgctgaagcccgccgtgatcagccagctggagggcgccgacgagctggagggccccagccccctggtggccggcaccgagatcggcccccagggcctgtggggcggcccaagcagcggcgcccctcctcccagcggcggcaggcggcccaagcagcggcgcccctcctcccagcggcggcagcccagccggctccccaacctctaccgaggagggcacctctgagtccgccacccccgagagcggccctggcacctccaccgagcccagcgagggcagcgcacccggcagccctgccggcagccccacctccacagaggagggaaccagcaccgagcccagcgaaggcagcgccccaggcaccagcaccgagcctagtgagcaggagattaaacggatcaacaagatcagaagaagacttgtgaaagacagcaacaccaagaaggccggcaagacaggccccatgaaaaccctgctggttagagtgatgacacccgatctgagagagcggctggaaaacctgagaaagaagcctgaaaatatcccccagcccatcagcaatacatctagagccaacctgaataagctgctgaccgattacaccgaaatgaagaaggcgatcctgcatgtgtactgggaagagttccagaaggaccctgtgggcctgatgagccgggtggcccagcctgccagcaagaagatcgatcagaacaagctgaaacctgagatggacgagaagggcaacctgaccaccgccggctttgcctgctctcagtgtggccagcccctgttcgtgtacaagctggagcaggtgtctgagaagggcaaggcttacaccaactacttcggacggtgcaatgtggccgagcacgaaaagctgatcctgctggcccagctgaagcccgagaaggatagcgacgaagccgtgacatatagcctgggaaagtttgggcagagggccctggatttctacagcattcatgtgaccaaggagtccacccaccccgtgaagcccctggcccagatcgccggaaacagatacgcctccggacctgtgggaaaggccctgagcgacgcatgtatgggcacaatcgcctccttcctgtctaagtaccaggacatcatcatcgaacaccagaaggtggtgaagggcaaccagaagagactggagagcctgcgggagctggccggcaaggaaaacctggaataccctagcgtgaccctgccacctcagcctcacaccaaggagggcgttgatgcctacaacgaagtgatcgcccgggtgcgaatgtgggtgaacctgaacctgtggcagaagctgaagctaagcagagatgatgccaagcctctgctgagactgaagggattcccttcctttcctctggtcgagagacaggccaacgaagtggactggtgggacatggtgtgtaacgtgaagaagctgatcaacgagaaaaaggaggatggcaaggtgttttggcagaatctggctggctacaagagacaggaagccctgagaccatacctgagcagcgaggaagatcggaagaagggaaagaaattcgctcggtaccagctgggcgacctgctgctgcacctggaaaagaagcacggcgaggactggggaaaggtgtacgacgaggcctgggagcggattgacaagaaagtggaaggcctgagcaagcacatcaagctggaagaggaacggagaagcgaggacgcccagagcaaggccgccctgaccgactggctgcgggctaaggccagcttcgtgatcgagggcctgaaggaggccgacaaggacgagttctgcagatgcgagctgaagctgcagaagtggtacggggacctgcggggaaagcccttcgccatcgaagccgagaacagcatcctggacatcagcggcttcagcaagcagtacaactgtgccttcatctggcagaaggacggcgtgaagaagctgaacctgtacctgatcatcaactacttcaagggcggcaagctgcggttcaagaagatcaaacctgaagccttcgaagccaacagattctacaccgtgatcaacaaaaagagcggcgagatcgtgcccatggaggtgaacttcaacttcgacgaccccaacctgatcatcctgcctctggcctttggcaagagacagggcagagaattcatctggaacgacctgctgtccctggaaaccggcagcctgaagctggccaacggaagagtgatcgagaagacactgtacaacagaagaacccggcaggatgagcctgccctgttcgtggccctgaccttcgagcggcgggaggtcctggactcctccaatatcaaaccaatgaacctgatcggcgtggcaagaggcgaaaacatccccgccgtgatcgccctgaccgaccccgagggctgcccactgagccggtttaaggatagcctgggaaacccaacccacatcctgagaatcggcgagagctataaggagaagcagcggaccatccaggccaagaaggaggtggagcagcggagagccggcggctacagccggaagtacgccagcaaagccaagaatctggcagacgatatggtgagaaacaccgctagagatctgctgtactacgccgtgacccaggatgccatgctgatcttcgccaacctgagccggggcttcggccggcagggcaagcggaccttcatggccgagagacagtacacacggatggaggactggctgaccgccaagctggcctacgagggcctgagcaagacctacctgtccaagacactggcccagtacacctccaagacatgcagcaactgtgggtttaccatcaccagcgccgactacgacagggtgctggagaagctgaagaagacagcaacaggctggatgaccacaattaacggcaaggagctgaaggtggagggccagattacctactacaacagatacaagagacagaacgtagtcaaggacctgtccgtcgagctggatagactgagcgaagaatctgtgaacaacgacatctcctcctggacaaagggcagaagcggagaagctctgagcctcctgaagaaaagattctcccatagacccgtgcaggagaagttcgtgtgcctgaactgcggcttcgagacacacgcagccgagcaagccgccctgaacatcgccagatcctggctgttcctgcggagccaggagtacaagaaataccagacaaacaagacaaccggcaacaccgataagagagccttcgtcgagacctggcagtccttttaccggaagaagcttaaggaggtgtggaaacctgccgtgcggtctggcggatctggcggaggctccaccagccccaagaaaaagagaaaagtctaagctgccttctgcggggcttgccttctggccatgcccttcttctctcccttgcacctgtacctcttggtctttgaataaagcctgagtaggaaggctagcaaaaaaaaaaaaaaaaaaaaaaaaaaaaaaaaaaaaaaaaaaaaaaaaaaaaaaaaaaaaaaaaaaaaaaaaaaaaaaaagcccagccggctccccaacctctaccgaggagggcacctctgagtccgccacccccgagagcggccctggcacctccaccgagcccagcgagggcagcgcacccggcagccctgccggcagccccacctccacagaggagggaaccagcaccgagcccagcgaaggcagcgccccaggcaccagcaccgagcctagtgagcaggagattaaacggatcaacaagatcagaagaagacttgtgaaagacagcaacaccaagaaggccggcaagacaggccccatgaaaaccctgctggttagagtgatgacacccgatctgagagagcggctggaaaacctgagaaagaagcctgaaaatatcccccagcccatcagcaatacatctagagccaacctgaataagctgctgaccgattacaccgaaatgaagaaggcgatcctgcatgtgtactgggaagagttccagaaggaccctgtgggcctgatgagccgggtggcccagcctgccagcaagaagatcgatcagaacaagctgaaacctgagatggacgagaagggcaacctgaccaccgccggctttgcctgctctcagtgtggccagcccctgttcgtgtacaagctggagcaggtgtctgagaagggcaaggcttacaccaactacttcggacggtgcaatgtggccgagcacgaaaagctgatcctgctggcccagctgaagcccgagaaggatagcgacgaagccgtgacatatagcctgggaaagtttgggcagagggccctggatttctacagcattcatgtgaccaaggagtccacccaccccgtgaagcccctggcccagatcgccggaaacagatacgcctccggacctgtgggaaaggccctgagcgacgcatgtatgggcacaatcgcctccttcctgtctaagtaccaggacatcatcatcgaacaccagaaggtggtgaagggcaaccagaagagactggagagcctgcgggagctggccggcaaggaaaacctggaataccctagcgtgaccctgccacctcagcctcacaccaaggagggcgttgatgcctacaacgaagtgatcgcccgggtgcgaatgtgggtgaacctgaacctgtggcagaagctgaagctaagcagagatgatgccaagcctctgctgagactgaagggattcccttcctttcctctggtcgagagacaggccaacgaagtggactggtgggacatggtgtgtaacgtgaagaagctgatcaacgagaaaaaggaggatggcaaggtgttttggcagaatctggctggctacaagagacaggaagccctgagaccatacctgagcagcgaggaagatcggaagaagggaaagaaattcgctcggtaccagctgggcgacctgctgctgcacctggaaaagaagcacggcgaggactggggaaaggtgtacgacgaggcctgggagcggattgacaagaaagtggaaggcctgagcaagcacatcaagctggaagaggaacggagaagcgaggacgcccagagcaaggccgccctgaccgactggctgcgggctaaggccagcttcgtgatcgagggcctgaaggaggccgacaaggacgagttctgcagatgcgagctgaagctgcagaagtggtacggggacctgcggggaaagcccttcgccatcgaagccgagaacagcatcctggacatcagcggcttcagcaagcagtacaactgtgccttcatctggcagaaggacggcgtgaagaagctgaacctgtacctgatcatcaactacttcaagggcggcaagctgcggttcaagaagatcaaacctgaagccttcgaagccaacagattctacaccgtgatcaacaaaaagagcggcgagatcgtgcccatggaggtgaacttcaacttcgacgaccccaacctgatcatcctgcctctggcctttggcaagagacagggcagagaattcatctggaacgacctgctgtccctggaaaccggcagcctgaagctggccaacggaagagtgatcgagaagacactgtacaacagaagaacccggcaggatgagcctgccctgttcgtggccctgaccttcgagcggcgggaggtcctggactcctccaatatcaaaccaatgaacctgatcggcgtggcaagaggcgaaaacatccccgccgtgatcgccctgaccgaccccgagggctgcccactgagccggtttaaggatagcctgggaaacccaacccacatcctgagaatcggcgagagctataaggagaagcagcggaccatccaggccaagaaggaggtggagcagcggagagccggcggctacagccggaagtacgccagcaaagccaagaatctggcagacgatatggtgagaaacaccgctagagatctgctgtactacgccgtgacccaggatgccatgctgatcttcgccaacctgagccggggcttcggccggcagggcaagcggaccttcatggccgagagacagtacacacggatggaggactggctgaccgccaagctggcctacgagggcctgagcaagacctacctgtccaagacactggcccagtacacctccaagacatgcagcaactgtgggtttaccatcaccagcgccgactacgacagggtgctggagaagctgaagaagacagcaacaggctggatgaccacaattaacggcaaggagctgaaggtggagggccagattacctactacaacagatacaagagacagaacgtagtcaaggacctgtccgtcgagctggatagactgagcgaagaatctgtgaacaacgacatctcctcctggacaaagggcagaagcggagaagctctgagcctcctgaagaaaagattctcccatagacccgtgcaggagaagttcgtgtgcctgaactgcggcttcgagacacacgcagccgagcaagccgccctgaacatcgccagatcctggctgttcctgcggagccaggagtacaagaaataccagacaaacaagacaaccggcaacaccgataagagagccttcgtcgagacctggcagtccttttaccggaagaagcttaaggaggtgtggaaacctgccgtgcggtctggcggatctggcggaggctccaccagccccaagaaaaagagaaaagtctaagctgccttctgcggggcttgccttctggccatgcccttcttctctcccttgcacctgtacctcttggtctttgaataaagcctgagtaggaaggctagcaaaaaaaaaaaaaaaaaaaaaaaaaaaaaaaaaaaaaaaaaaaaaaaaaaaaaaaaaaaaaaaaaaaaaaaaaaaaaaaa

SEQ ID NO: 9934 - RNA, 8787 nt, synthetic construct
  source 1..8787: mol_type = other RNA
aggaaataagagagaaaagaagagtaagaagaaatataagagccaccatggcccctaagaagaagcgtaaagtgagccggatgaaccacgaccaggagttcgacccccctaaggtgtaccctcccgtccccgccgagaagagaaagcccatccgggtcctgagcctgttcgatggcatcgccaccggtctgctggtgctgaaggacctgggcatccaggtggataggtacattgcctccgaggtgtgcgaggactccatcaccgtgggaatggtgcgtcatcagggcaagatcatgtacgtgggcgacgtgcggagcgtgacacagaagcatatccaggagtggggccctttcgacctggtgatcggcggcagcccttgcaatgacctgagcatcgtgaacccagcccggaagggcctgtacgagggaaccggcagactgttcttcgagttttacagactgctgcacgacgcccggcctaaggaaggcgacgaccggcccttcttttggctgttcgagaatgtggtggccatgggagtcagcgacaagcgggatattagccggttcctggagagcaaccccgtgatgatcgatgccaaggaagtgagcgccgcccaccgggccagatacttctggggcaatctgcctggcatgaacagacccctggccagcaccgtgaacgacaagctggagctgcaggagtgcctggagcacggccggatcgccaagttcagcaaggtgagaaccatcaccacccgaagcaacagcatcaaacaaggcaaggaccagcactttcctgtgttcatgaacgagaaggaggacatcctgtggtgtaccgagatggagagagtgttcgggttcccagtccactacacagatgtcagcaacatgtctagactggccagacagagactgctgggaagaagctggtccgtccctgtgatcagacacctgttcgcccctctgaaggagtacttcgcctgcgtgagcagcggcaacagcaacgccaacagccggggccccagcttctctagcggcctggtgccactgtccctgagagggagccacatgggccccatggagatctacaaaaccgtgagcgcctggaagcggcagcctgtgcgcgtgctgagcctgtttcggaatatcgataaagtcctgaaaagcctgggattcctggagagcggctctggctccggcggtggcaccctgaagtacgtggaggatgtgacaaacgtggtcagacgggatgtggagaagtggggccccttcgatctggtgtacggcagcacccaacccctgggcagctcttgtgaccggtgccctggctggtacatgtttcagttccaccggatcctgcagtacgccctgccgagacaggagtcccagcggccattcttttggattttcatggacaacttgctgctgaccgaggatgaccaggaaactaccactcggttcctgcagaccgaagccgtgaccctgcaggacgtgagaggccgggactaccagaacgccatgcgggtgtggtccaacatccctggactgaaaagcaagcacgcacctctgacccctaaagaagaggagtacctgcaggcccaggtgcggagcagaagcaagctggacgcccctaaggtggatctgctggtgaagaattgcctcctgcccctgagagagtacttcaagtatttcagccagaatagtctgcccctgggaggcagcggcggcggcaggcccagggccgtgaagttcgccgacgtggccgtgtacttcagccccgaggagtggggctgcctgaggcccgcccagagggccctgtacagggacgtgatgagggagacctacggccacctgggcgccctgggctgcgccggccccaagcccgccctgatcagctggctggagaggaacaccgacgactgggagcccgccgccctggacccccaggagtgccccaggggcctgaccgtgcagggcggcccaagcagcggcgcccctcctcccagcggcggcaggcggcccaagcagcggcgcccctcctcccagcggcggcagcccagccggctccccaacctctaccgaggagggcacctctgagtccgccacccccgagagcggccctggcacctccaccgagcccagcgagggcagcgcacccggcagccctgccggcagccccacctccacagaggagggaaccagcaccgagcccagcgaaggcagcgccccaggcaccagcaccgagcctagtgagcaggagattaaacggatcaacaagatcagaagaagacttgtgaaagacagcaacaccaagaaggccggcaagacaggccccatgaaaaccctgctggttagagtgatgacacccgatctgagagagcggctggaaaacctgagaaagaagcctgaaaatatcccccagcccatcagcaatacatctagagccaacctgaataagctgctgaccgattacaccgaaatgaagaaggcgatcctgcatgtgtactgggaagagttccagaaggaccctgtgggcctgatgagccgggtggcccagcctgccagcaagaagatcgatcagaacaagctgaaacctgagatggacgagaagggcaacctgaccaccgccggctttgcctgctctcagtgtggccagcccctgttcgtgtacaagctggagcaggtgtctgagaagggcaaggcttacaccaactacttcggacggtgcaatgtggccgagcacgaaaagctgatcctgctggcccagctgaagcccgagaaggatagcgacgaagccgtgacatatagcctgggaaagtttgggcagagggccctggatttctacagcattcatgtgaccaaggagtccacccaccccgtgaagcccctggcccagatcgccggaaacagatacgcctccggacctgtgggaaaggccctgagcgacgcatgtatgggcacaatcgcctccttcctgtctaagtaccaggacatcatcatcgaacaccagaaggtggtgaagggcaaccagaagagactggagagcctgcgggagctggccggcaaggaaaacctggaataccctagcgtgaccctgccacctcagcctcacaccaaggagggcgttgatgcctacaacgaagtgatcgcccgggtgcgaatgtgggtgaacctgaacctgtggcagaagctgaagctaagcagagatgatgccaagcctctgctgagactgaagggattcccttcctttcctctggtcgagagacaggccaacgaagtggactggtgggacatggtgtgtaacgtgaagaagctgatcaacgagaaaaaggaggatggcaaggtgttttggcagaatctggctggctacaagagacaggaagccctgagaccatacctgagcagcgaggaagatcggaagaagggaaagaaattcgctcggtaccagctgggcgacctgctgctgcacctggaaaagaagcacggcgaggactggggaaaggtgtacgacgaggcctgggagcggattgacaagaaagtggaaggcctgagcaagcacatcaagctggaagaggaacggagaagcgaggacgcccagagcaaggccgccctgaccgactggctgcgggctaaggccagcttcgtgatcgagggcctgaaggaggccgacaaggacgagttctgcagatgcgagctgaagctgcagaagtggtacggggacctgcggggaaagcccttcgccatcgaagccgagaacagcatcctggacatcagcggcttcagcaagcagtacaactgtgccttcatctggcagaaggacggcgtgaagaagctgaacctgtacctgatcatcaactacttcaagggcggcaagctgcggttcaagaagatcaaacctgaagccttcgaagccaacagattctacaccgtgatcaacaaaaagagcggcgagatcgtgcccatggaggtgaacttcaacttcgacgaccccaacctgatcatcctgcctctggcctttggcaagagacagggcagagaattcatctggaacgacctgctgtccctggaaaccggcagcctgaagctggccaacggaagagtgatcgagaagacactgtacaacagaagaacccggcaggatgagcctgccctgttcgtggccctgaccttcgagcggcgggaggtcctggactcctccaatatcaaaccaatgaacctgatcggcgtggcaagaggcgaaaacatccccgccgtgatcgccctgaccgaccccgagggctgcccactgagccggtttaaggatagcctgggaaacccaacccacatcctgagaatcggcgagagctataaggagaagcagcggaccatccaggccaagaaggaggtggagcagcggagagccggcggctacagccggaagtacgccagcaaagccaagaatctggcagacgatatggtgagaaacaccgctagagatctgctgtactacgccgtgacccaggatgccatgctgatcttcgccaacctgagccggggcttcggccggcagggcaagcggaccttcatggccgagagacagtacacacggatggaggactggctgaccgccaagctggcctacgagggcctgagcaagacctacctgtccaagacactggcccagtacacctccaagacatgcagcaactgtgggtttaccatcaccagcgccgactacgacagggtgctggagaagctgaagaagacagcaacaggctggatgaccacaattaacggcaaggagctgaaggtggagggccagattacctactacaacagatacaagagacagaacgtagtcaaggacctgtccgtcgagctggatagactgagcgaagaatctgtgaacaacgacatctcctcctggacaaagggcagaagcggagaagctctgagcctcctgaagaaaagattctcccatagacccgtgcaggagaagttcgtgtgcctgaactgcggcttcgagacacacgcagccgagcaagccgccctgaacatcgccagatcctggctgttcctgcggagccaggagtacaagaaataccagacaaacaagacaaccggcaacaccgataagagagccttcgtcgagacctggcagtccttttaccggaagaagcttaaggaggtgtggaaacctgccgtgcggtctggcggatctggcggaggctccaccagccccaagaaaaagagaaaagtctaagctgccttctgcggggcttgccttctggccatgcccttcttctctcccttgcacctgtacctcttggtctttgaataaagcctgagtaggaaggctagcaaaaaaaaaaaaaaaaaaaaaaaaaaaaaaaaaaaaaaaaaaaaaaaaaaaaaaaaaaaaaaaaaaaaaaaaaaaaaaaagcccagccggctccccaacctctaccgaggagggcacctctgagtccgccacccccgagagcggccctggcacctccaccgagcccagcgagggcagcgcacccggcagccctgccggcagccccacctccacagaggagggaaccagcaccgagcccagcgaaggcagcgccccaggcaccagcaccgagcctagtgagcaggagattaaacggatcaacaagatcagaagaagacttgtgaaagacagcaacaccaagaaggccggcaagacaggccccatgaaaaccctgctggttagagtgatgacacccgatctgagagagcggctggaaaacctgagaaagaagcctgaaaatatcccccagcccatcagcaatacatctagagccaacctgaataagctgctgaccgattacaccgaaatgaagaaggcgatcctgcatgtgtactgggaagagttccagaaggaccctgtgggcctgatgagccgggtggcccagcctgccagcaagaagatcgatcagaacaagctgaaacctgagatggacgagaagggcaacctgaccaccgccggctttgcctgctctcagtgtggccagcccctgttcgtgtacaagctggagcaggtgtctgagaagggcaaggcttacaccaactacttcggacggtgcaatgtggccgagcacgaaaagctgatcctgctggcccagctgaagcccgagaaggatagcgacgaagccgtgacatatagcctgggaaagtttgggcagagggccctggatttctacagcattcatgtgaccaaggagtccacccaccccgtgaagcccctggcccagatcgccggaaacagatacgcctccggacctgtgggaaaggccctgagcgacgcatgtatgggcacaatcgcctccttcctgtctaagtaccaggacatcatcatcgaacaccagaaggtggtgaagggcaaccagaagagactggagagcctgcgggagctggccggcaaggaaaacctggaataccctagcgtgaccctgccacctcagcctcacaccaaggagggcgttgatgcctacaacgaagtgatcgcccgggtgcgaatgtgggtgaacctgaacctgtggcagaagctgaagctaagcagagatgatgccaagcctctgctgagactgaagggattcccttcctttcctctggtcgagagacaggccaacgaagtggactggtgggacatggtgtgtaacgtgaagaagctgatcaacgagaaaaaggaggatggcaaggtgttttggcagaatctggctggctacaagagacaggaagccctgagaccatacctgagcagcgaggaagatcggaagaagggaaagaaattcgctcggtaccagctgggcgacctgctgctgcacctggaaaagaagcacggcgaggactggggaaaggtgtacgacgaggcctgggagcggattgacaagaaagtggaaggcctgagcaagcacatcaagctggaagaggaacggagaagcgaggacgcccagagcaaggccgccctgaccgactggctgcgggctaaggccagcttcgtgatcgagggcctgaaggaggccgacaaggacgagttctgcagatgcgagctgaagctgcagaagtggtacggggacctgcggggaaagcccttcgccatcgaagccgagaacagcatcctggacatcagcggcttcagcaagcagtacaactgtgccttcatctggcagaaggacggcgtgaagaagctgaacctgtacctgatcatcaactacttcaagggcggcaagctgcggttcaagaagatcaaacctgaagccttcgaagccaacagattctacaccgtgatcaacaaaaagagcggcgagatcgtgcccatggaggtgaacttcaacttcgacgaccccaacctgatcatcctgcctctggcctttggcaagagacagggcagagaattcatctggaacgacctgctgtccctggaaaccggcagcctgaagctggccaacggaagagtgatcgagaagacactgtacaacagaagaacccggcaggatgagcctgccctgttcgtggccctgaccttcgagcggcgggaggtcctggactcctccaatatcaaaccaatgaacctgatcggcgtggcaagaggcgaaaacatccccgccgtgatcgccctgaccgaccccgagggctgcccactgagccggtttaaggatagcctgggaaacccaacccacatcctgagaatcggcgagagctataaggagaagcagcggaccatccaggccaagaaggaggtggagcagcggagagccggcggctacagccggaagtacgccagcaaagccaagaatctggcagacgatatggtgagaaacaccgctagagatctgctgtactacgccgtgacccaggatgccatgctgatcttcgccaacctgagccggggcttcggccggcagggcaagcggaccttcatggccgagagacagtacacacggatggaggactggctgaccgccaagctggcctacgagggcctgagcaagacctacctgtccaagacactggcccagtacacctccaagacatgcagcaactgtgggtttaccatcaccagcgccgactacgacagggtgctggagaagctgaagaagacagcaacaggctggatgaccacaattaacggcaaggagctgaaggtggagggccagattacctactacaacagatacaagagacagaacgtagtcaaggacctgtccgtcgagctggatagactgagcgaagaatctgtgaacaacgacatctcctcctggacaaagggcagaagcggagaagctctgagcctcctgaagaaaagattctcccatagacccgtgcaggagaagttcgtgtgcctgaactgcggcttcgagacacacgcagccgagcaagccgccctgaacatcgccagatcctggctgttcctgcggagccaggagtacaagaaataccagacaaacaagacaaccggcaacaccgataagagagccttcgtcgagacctggcagtccttttaccggaagaagcttaaggaggtgtggaaacctgccgtgcggtctggcggatctggcggaggctccaccagccccaagaaaaagagaaaagtctaagctgccttctgcggggcttgccttctggccatgcccttcttctctcccttgcacctgtacctcttggtctttgaataaagcctgagtaggaaggctagcaaaaaaaaaaaaaaaaaaaaaaaaaaaaaaaaaaaaaaaaaaaaaaaaaaaaaaaaaaaaaaaaaaaaaaaaaaaaaaaa

SEQ ID NO: 9935 - RNA, 8787 nt, synthetic construct
  source 1..8787: mol_type = other RNA
aggaaataagagagaaaagaagagtaagaagaaatataagagccaccatggcccctaagaagaagcgtaaagtgagccggatgaaccacgaccaggagttcgacccccctaaggtgtaccctcccgtccccgccgagaagagaaagcccatccgggtcctgagcctgttcgatggcatcgccaccggtctgctggtgctgaaggacctgggcatccaggtggataggtacattgcctccgaggtgtgcgaggactccatcaccgtgggaatggtgcgtcatcagggcaagatcatgtacgtgggcgacgtgcggagcgtgacacagaagcatatccaggagtggggccctttcgacctggtgatcggcggcagcccttgcaatgacctgagcatcgtgaacccagcccggaagggcctgtacgagggaaccggcagactgttcttcgagttttacagactgctgcacgacgcccggcctaaggaaggcgacgaccggcccttcttttggctgttcgagaatgtggtggccatgggagtcagcgacaagcgggatattagccggttcctggagagcaaccccgtgatgatcgatgccaaggaagtgagcgccgcccaccgggccagatacttctggggcaatctgcctggcatgaacagacccctggccagcaccgtgaacgacaagctggagctgcaggagtgcctggagcacggccggatcgccaagttcagcaaggtgagaaccatcaccacccgaagcaacagcatcaaacaaggcaaggaccagcactttcctgtgttcatgaacgagaaggaggacatcctgtggtgtaccgagatggagagagtgttcgggttcccagtccactacacagatgtcagcaacatgtctagactggccagacagagactgctgggaagaagctggtccgtccctgtgatcagacacctgttcgcccctctgaaggagtacttcgcctgcgtgagcagcggcaacagcaacgccaacagccggggccccagcttctctagcggcctggtgccactgtccctgagagggagccacatgggccccatggagatctacaaaaccgtgagcgcctggaagcggcagcctgtgcgcgtgctgagcctgtttcggaatatcgataaagtcctgaaaagcctgggattcctggagagcggctctggctccggcggtggcaccctgaagtacgtggaggatgtgacaaacgtggtcagacgggatgtggagaagtggggccccttcgatctggtgtacggcagcacccaacccctgggcagctcttgtgaccggtgccctggctggtacatgtttcagttccaccggatcctgcagtacgccctgccgagacaggagtcccagcggccattcttttggattttcatggacaacttgctgctgaccgaggatgaccaggaaactaccactcggttcctgcagaccgaagccgtgaccctgcaggacgtgagaggccgggactaccagaacgccatgcgggtgtggtccaacatccctggactgaaaagcaagcacgcacctctgacccctaaagaagaggagtacctgcaggcccaggtgcggagcagaagcaagctggacgcccctaaggtggatctgctggtgaagaattgcctcctgcccctgagagagtacttcaagtatttcagccagaatagtctgcccctgggaggcagcggcggcggccaccaggaggtggtgaccttcgaggacgtggccgtgtacttcacccagaccgagtgggccggcctgagccccgcccagagggccctgtacaggagcgtgatgctggagatctacggcaacctgaccagcctgggctaccccgtgcccaagcccgagctggtgagcctgctggagaggggcgacctgcccgtgggcctggagacccaggacaacccccccgcccagggcaccagggacatctacggcggcccaagcagcggcgcccctcctcccagcggcggcaggcggcccaagcagcggcgcccctcctcccagcggcggcagcccagccggctccccaacctctaccgaggagggcacctctgagtccgccacccccgagagcggccctggcacctccaccgagcccagcgagggcagcgcacccggcagccctgccggcagccccacctccacagaggagggaaccagcaccgagcccagcgaaggcagcgccccaggcaccagcaccgagcctagtgagcaggagattaaacggatcaacaagatcagaagaagacttgtgaaagacagcaacaccaagaaggccggcaagacaggccccatgaaaaccctgctggttagagtgatgacacccgatctgagagagcggctggaaaacctgagaaagaagcctgaaaatatcccccagcccatcagcaatacatctagagccaacctgaataagctgctgaccgattacaccgaaatgaagaaggcgatcctgcatgtgtactgggaagagttccagaaggaccctgtgggcctgatgagccgggtggcccagcctgccagcaagaagatcgatcagaacaagctgaaacctgagatggacgagaagggcaacctgaccaccgccggctttgcctgctctcagtgtggccagcccctgttcgtgtacaagctggagcaggtgtctgagaagggcaaggcttacaccaactacttcggacggtgcaatgtggccgagcacgaaaagctgatcctgctggcccagctgaagcccgagaaggatagcgacgaagccgtgacatatagcctgggaaagtttgggcagagggccctggatttctacagcattcatgtgaccaaggagtccacccaccccgtgaagcccctggcccagatcgccggaaacagatacgcctccggacctgtgggaaaggccctgagcgacgcatgtatgggcacaatcgcctccttcctgtctaagtaccaggacatcatcatcgaacaccagaaggtggtgaagggcaaccagaagagactggagagcctgcgggagctggccggcaaggaaaacctggaataccctagcgtgaccctgccacctcagcctcacaccaaggagggcgttgatgcctacaacgaagtgatcgcccgggtgcgaatgtgggtgaacctgaacctgtggcagaagctgaagctaagcagagatgatgccaagcctctgctgagactgaagggattcccttcctttcctctggtcgagagacaggccaacgaagtggactggtgggacatggtgtgtaacgtgaagaagctgatcaacgagaaaaaggaggatggcaaggtgttttggcagaatctggctggctacaagagacaggaagccctgagaccatacctgagcagcgaggaagatcggaagaagggaaagaaattcgctcggtaccagctgggcgacctgctgctgcacctggaaaagaagcacggcgaggactggggaaaggtgtacgacgaggcctgggagcggattgacaagaaagtggaaggcctgagcaagcacatcaagctggaagaggaacggagaagcgaggacgcccagagcaaggccgccctgaccgactggctgcgggctaaggccagcttcgtgatcgagggcctgaaggaggccgacaaggacgagttctgcagatgcgagctgaagctgcagaagtggtacggggacctgcggggaaagcccttcgccatcgaagccgagaacagcatcctggacatcagcggcttcagcaagcagtacaactgtgccttcatctggcagaaggacggcgtgaagaagctgaacctgtacctgatcatcaactacttcaagggcggcaagctgcggttcaagaagatcaaacctgaagccttcgaagccaacagattctacaccgtgatcaacaaaaagagcggcgagatcgtgcccatggaggtgaacttcaacttcgacgaccccaacctgatcatcctgcctctggcctttggcaagagacagggcagagaattcatctggaacgacctgctgtccctggaaaccggcagcctgaagctggccaacggaagagtgatcgagaagacactgtacaacagaagaacccggcaggatgagcctgccctgttcgtggccctgaccttcgagcggcgggaggtcctggactcctccaatatcaaaccaatgaacctgatcggcgtggcaagaggcgaaaacatccccgccgtgatcgccctgaccgaccccgagggctgcccactgagccggtttaaggatagcctgggaaacccaacccacatcctgagaatcggcgagagctataaggagaagcagcggaccatccaggccaagaaggaggtggagcagcggagagccggcggctacagccggaagtacgccagcaaagccaagaatctggcagacgatatggtgagaaacaccgctagagatctgctgtactacgccgtgacccaggatgccatgctgatcttcgccaacctgagccggggcttcggccggcagggcaagcggaccttcatggccgagagacagtacacacggatggaggactggctgaccgccaagctggcctacgagggcctgagcaagacctacctgtccaagacactggcccagtacacctccaagacatgcagcaactgtgggtttaccatcaccagcgccgactacgacagggtgctggagaagctgaagaagacagcaacaggctggatgaccacaattaacggcaaggagctgaaggtggagggccagattacctactacaacagatacaagagacagaacgtagtcaaggacctgtccgtcgagctggatagactgagcgaagaatctgtgaacaacgacatctcctcctggacaaagggcagaagcggagaagctctgagcctcctgaagaaaagattctcccatagacccgtgcaggagaagttcgtgtgcctgaactgcggcttcgagacacacgcagccgagcaagccgccctgaacatcgccagatcctggctgttcctgcggagccaggagtacaagaaataccagacaaacaagacaaccggcaacaccgataagagagccttcgtcgagacctggcagtccttttaccggaagaagcttaaggaggtgtggaaacctgccgtgcggtctggcggatctggcggaggctccaccagccccaagaaaaagagaaaagtctaagctgccttctgcggggcttgccttctggccatgcccttcttctctcccttgcacctgtacctcttggtctttgaataaagcctgagtaggaaggctagcaaaaaaaaaaaaaaaaaaaaaaaaaaaaaaaaaaaaaaaaaaaaaaaaaaaaaaaaaaaaaaaaaaaaaaaaaaaaaaaagcccagccggctccccaacctctaccgaggagggcacctctgagtccgccacccccgagagcggccctggcacctccaccgagcccagcgagggcagcgcacccggcagccctgccggcagccccacctccacagaggagggaaccagcaccgagcccagcgaaggcagcgccccaggcaccagcaccgagcctagtgagcaggagattaaacggatcaacaagatcagaagaagacttgtgaaagacagcaacaccaagaaggccggcaagacaggccccatgaaaaccctgctggttagagtgatgacacccgatctgagagagcggctggaaaacctgagaaagaagcctgaaaatatcccccagcccatcagcaatacatctagagccaacctgaataagctgctgaccgattacaccgaaatgaagaaggcgatcctgcatgtgtactgggaagagttccagaaggaccctgtgggcctgatgagccgggtggcccagcctgccagcaagaagatcgatcagaacaagctgaaacctgagatggacgagaagggcaacctgaccaccgccggctttgcctgctctcagtgtggccagcccctgttcgtgtacaagctggagcaggtgtctgagaagggcaaggcttacaccaactacttcggacggtgcaatgtggccgagcacgaaaagctgatcctgctggcccagctgaagcccgagaaggatagcgacgaagccgtgacatatagcctgggaaagtttgggcagagggccctggatttctacagcattcatgtgaccaaggagtccacccaccccgtgaagcccctggcccagatcgccggaaacagatacgcctccggacctgtgggaaaggccctgagcgacgcatgtatgggcacaatcgcctccttcctgtctaagtaccaggacatcatcatcgaacaccagaaggtggtgaagggcaaccagaagagactggagagcctgcgggagctggccggcaaggaaaacctggaataccctagcgtgaccctgccacctcagcctcacaccaaggagggcgttgatgcctacaacgaagtgatcgcccgggtgcgaatgtgggtgaacctgaacctgtggcagaagctgaagctaagcagagatgatgccaagcctctgctgagactgaagggattcccttcctttcctctggtcgagagacaggccaacgaagtggactggtgggacatggtgtgtaacgtgaagaagctgatcaacgagaaaaaggaggatggcaaggtgttttggcagaatctggctggctacaagagacaggaagccctgagaccatacctgagcagcgaggaagatcggaagaagggaaagaaattcgctcggtaccagctgggcgacctgctgctgcacctggaaaagaagcacggcgaggactggggaaaggtgtacgacgaggcctgggagcggattgacaagaaagtggaaggcctgagcaagcacatcaagctggaagaggaacggagaagcgaggacgcccagagcaaggccgccctgaccgactggctgcgggctaaggccagcttcgtgatcgagggcctgaaggaggccgacaaggacgagttctgcagatgcgagctgaagctgcagaagtggtacggggacctgcggggaaagcccttcgccatcgaagccgagaacagcatcctggacatcagcggcttcagcaagcagtacaactgtgccttcatctggcagaaggacggcgtgaagaagctgaacctgtacctgatcatcaactacttcaagggcggcaagctgcggttcaagaagatcaaacctgaagccttcgaagccaacagattctacaccgtgatcaacaaaaagagcggcgagatcgtgcccatggaggtgaacttcaacttcgacgaccccaacctgatcatcctgcctctggcctttggcaagagacagggcagagaattcatctggaacgacctgctgtccctggaaaccggcagcctgaagctggccaacggaagagtgatcgagaagacactgtacaacagaagaacccggcaggatgagcctgccctgttcgtggccctgaccttcgagcggcgggaggtcctggactcctccaatatcaaaccaatgaacctgatcggcgtggcaagaggcgaaaacatccccgccgtgatcgccctgaccgaccccgagggctgcccactgagccggtttaaggatagcctgggaaacccaacccacatcctgagaatcggcgagagctataaggagaagcagcggaccatccaggccaagaaggaggtggagcagcggagagccggcggctacagccggaagtacgccagcaaagccaagaatctggcagacgatatggtgagaaacaccgctagagatctgctgtactacgccgtgacccaggatgccatgctgatcttcgccaacctgagccggggcttcggccggcagggcaagcggaccttcatggccgagagacagtacacacggatggaggactggctgaccgccaagctggcctacgagggcctgagcaagacctacctgtccaagacactggcccagtacacctccaagacatgcagcaactgtgggtttaccatcaccagcgccgactacgacagggtgctggagaagctgaagaagacagcaacaggctggatgaccacaattaacggcaaggagctgaaggtggagggccagattacctactacaacagatacaagagacagaacgtagtcaaggacctgtccgtcgagctggatagactgagcgaagaatctgtgaacaacgacatctcctcctggacaaagggcagaagcggagaagctctgagcctcctgaagaaaagattctcccatagacccgtgcaggagaagttcgtgtgcctgaactgcggcttcgagacacacgcagccgagcaagccgccctgaacatcgccagatcctggctgttcctgcggagccaggagtacaagaaataccagacaaacaagacaaccggcaacaccgataagagagccttcgtcgagacctggcagtccttttaccggaagaagcttaaggaggtgtggaaacctgccgtgcggtctggcggatctggcggaggctccaccagccccaagaaaaagagaaaagtctaagctgccttctgcggggcttgccttctggccatgcccttcttctctcccttgcacctgtacctcttggtctttgaataaagcctgagtaggaaggctagcaaaaaaaaaaaaaaaaaaaaaaaaaaaaaaaaaaaaaaaaaaaaaaaaaaaaaaaaaaaaaaaaaaaaaaaaaaaaaaaa

SEQ ID NO: 9936 - RNA, 8787 nt, synthetic construct
  source 1..8787: mol_type = other RNA
aggaaataagagagaaaagaagagtaagaagaaatataagagccaccatggcccctaagaagaagcgtaaagtgagccggatgaaccacgaccaggagttcgacccccctaaggtgtaccctcccgtccccgccgagaagagaaagcccatccgggtcctgagcctgttcgatggcatcgccaccggtctgctggtgctgaaggacctgggcatccaggtggataggtacattgcctccgaggtgtgcgaggactccatcaccgtgggaatggtgcgtcatcagggcaagatcatgtacgtgggcgacgtgcggagcgtgacacagaagcatatccaggagtggggccctttcgacctggtgatcggcggcagcccttgcaatgacctgagcatcgtgaacccagcccggaagggcctgtacgagggaaccggcagactgttcttcgagttttacagactgctgcacgacgcccggcctaaggaaggcgacgaccggcccttcttttggctgttcgagaatgtggtggccatgggagtcagcgacaagcgggatattagccggttcctggagagcaaccccgtgatgatcgatgccaaggaagtgagcgccgcccaccgggccagatacttctggggcaatctgcctggcatgaacagacccctggccagcaccgtgaacgacaagctggagctgcaggagtgcctggagcacggccggatcgccaagttcagcaaggtgagaaccatcaccacccgaagcaacagcatcaaacaaggcaaggaccagcactttcctgtgttcatgaacgagaaggaggacatcctgtggtgtaccgagatggagagagtgttcgggttcccagtccactacacagatgtcagcaacatgtctagactggccagacagagactgctgggaagaagctggtccgtccctgtgatcagacacctgttcgcccctctgaaggagtacttcgcctgcgtgagcagcggcaacagcaacgccaacagccggggccccagcttctctagcggcctggtgccactgtccctgagagggagccacatgggccccatggagatctacaaaaccgtgagcgcctggaagcggcagcctgtgcgcgtgctgagcctgtttcggaatatcgataaagtcctgaaaagcctgggattcctggagagcggctctggctccggcggtggcaccctgaagtacgtggaggatgtgacaaacgtggtcagacgggatgtggagaagtggggccccttcgatctggtgtacggcagcacccaacccctgggcagctcttgtgaccggtgccctggctggtacatgtttcagttccaccggatcctgcagtacgccctgccgagacaggagtcccagcggccattcttttggattttcatggacaacttgctgctgaccgaggatgaccaggaaactaccactcggttcctgcagaccgaagccgtgaccctgcaggacgtgagaggccgggactaccagaacgccatgcgggtgtggtccaacatccctggactgaaaagcaagcacgcacctctgacccctaaagaagaggagtacctgcaggcccaggtgcggagcagaagcaagctggacgcccctaaggtggatctgctggtgaagaattgcctcctgcccctgagagagtacttcaagtatttcagccagaatagtctgcccctgggaggcagcggcggcggcagccacggccccctgagcttcgaggacgtggccatcgccttcaccaaggaggagtggcagcagctggaccccgcccagaggaccctgtacagggacgtgatgctggagaacttcagccacctggtgagcctgggccaccccgtgagcaagcccgacatcatcagcaggctggagcagggcgaggagccctggatcatcaagagggacatcagcgactggatctgccccgagagggagaccaggggcggcccaagcagcggcgcccctcctcccagcggcggcaggcggcccaagcagcggcgcccctcctcccagcggcggcagcccagccggctccccaacctctaccgaggagggcacctctgagtccgccacccccgagagcggccctggcacctccaccgagcccagcgagggcagcgcacccggcagccctgccggcagccccacctccacagaggagggaaccagcaccgagcccagcgaaggcagcgccccaggcaccagcaccgagcctagtgagcaggagattaaacggatcaacaagatcagaagaagacttgtgaaagacagcaacaccaagaaggccggcaagacaggccccatgaaaaccctgctggttagagtgatgacacccgatctgagagagcggctggaaaacctgagaaagaagcctgaaaatatcccccagcccatcagcaatacatctagagccaacctgaataagctgctgaccgattacaccgaaatgaagaaggcgatcctgcatgtgtactgggaagagttccagaaggaccctgtgggcctgatgagccgggtggcccagcctgccagcaagaagatcgatcagaacaagctgaaacctgagatggacgagaagggcaacctgaccaccgccggctttgcctgctctcagtgtggccagcccctgttcgtgtacaagctggagcaggtgtctgagaagggcaaggcttacaccaactacttcggacggtgcaatgtggccgagcacgaaaagctgatcctgctggcccagctgaagcccgagaaggatagcgacgaagccgtgacatatagcctgggaaagtttgggcagagggccctggatttctacagcattcatgtgaccaaggagtccacccaccccgtgaagcccctggcccagatcgccggaaacagatacgcctccggacctgtgggaaaggccctgagcgacgcatgtatgggcacaatcgcctccttcctgtctaagtaccaggacatcatcatcgaacaccagaaggtggtgaagggcaaccagaagagactggagagcctgcgggagctggccggcaaggaaaacctggaataccctagcgtgaccctgccacctcagcctcacaccaaggagggcgttgatgcctacaacgaagtgatcgcccgggtgcgaatgtgggtgaacctgaacctgtggcagaagctgaagctaagcagagatgatgccaagcctctgctgagactgaagggattcccttcctttcctctggtcgagagacaggccaacgaagtggactggtgggacatggtgtgtaacgtgaagaagctgatcaacgagaaaaaggaggatggcaaggtgttttggcagaatctggctggctacaagagacaggaagccctgagaccatacctgagcagcgaggaagatcggaagaagggaaagaaattcgctcggtaccagctgggcgacctgctgctgcacctggaaaagaagcacggcgaggactggggaaaggtgtacgacgaggcctgggagcggattgacaagaaagtggaaggcctgagcaagcacatcaagctggaagaggaacggagaagcgaggacgcccagagcaaggccgccctgaccgactggctgcgggctaaggccagcttcgtgatcgagggcctgaaggaggccgacaaggacgagttctgcagatgcgagctgaagctgcagaagtggtacggggacctgcggggaaagcccttcgccatcgaagccgagaacagcatcctggacatcagcggcttcagcaagcagtacaactgtgccttcatctggcagaaggacggcgtgaagaagctgaacctgtacctgatcatcaactacttcaagggcggcaagctgcggttcaagaagatcaaacctgaagccttcgaagccaacagattctacaccgtgatcaacaaaaagagcggcgagatcgtgcccatggaggtgaacttcaacttcgacgaccccaacctgatcatcctgcctctggcctttggcaagagacagggcagagaattcatctggaacgacctgctgtccctggaaaccggcagcctgaagctggccaacggaagagtgatcgagaagacactgtacaacagaagaacccggcaggatgagcctgccctgttcgtggccctgaccttcgagcggcgggaggtcctggactcctccaatatcaaaccaatgaacctgatcggcgtggcaagaggcgaaaacatccccgccgtgatcgccctgaccgaccccgagggctgcccactgagccggtttaaggatagcctgggaaacccaacccacatcctgagaatcggcgagagctataaggagaagcagcggaccatccaggccaagaaggaggtggagcagcggagagccggcggctacagccggaagtacgccagcaaagccaagaatctggcagacgatatggtgagaaacaccgctagagatctgctgtactacgccgtgacccaggatgccatgctgatcttcgccaacctgagccggggcttcggccggcagggcaagcggaccttcatggccgagagacagtacacacggatggaggactggctgaccgccaagctggcctacgagggcctgagcaagacctacctgtccaagacactggcccagtacacctccaagacatgcagcaactgtgggtttaccatcaccagcgccgactacgacagggtgctggagaagctgaagaagacagcaacaggctggatgaccacaattaacggcaaggagctgaaggtggagggccagattacctactacaacagatacaagagacagaacgtagtcaaggacctgtccgtcgagctggatagactgagcgaagaatctgtgaacaacgacatctcctcctggacaaagggcagaagcggagaagctctgagcctcctgaagaaaagattctcccatagacccgtgcaggagaagttcgtgtgcctgaactgcggcttcgagacacacgcagccgagcaagccgccctgaacatcgccagatcctggctgttcctgcggagccaggagtacaagaaataccagacaaacaagacaaccggcaacaccgataagagagccttcgtcgagacctggcagtccttttaccggaagaagcttaaggaggtgtggaaacctgccgtgcggtctggcggatctggcggaggctccaccagccccaagaaaaagagaaaagtctaagctgccttctgcggggcttgccttctggccatgcccttcttctctcccttgcacctgtacctcttggtctttgaataaagcctgagtaggaaggctagcaaaaaaaaaaaaaaaaaaaaaaaaaaaaaaaaaaaaaaaaaaaaaaaaaaaaaaaaaaaaaaaaaaaaaaaaaaaaaaaagcccagccggctccccaacctctaccgaggagggcacctctgagtccgccacccccgagagcggccctggcacctccaccgagcccagcgagggcagcgcacccggcagccctgccggcagccccacctccacagaggagggaaccagcaccgagcccagcgaaggcagcgccccaggcaccagcaccgagcctagtgagcaggagattaaacggatcaacaagatcagaagaagacttgtgaaagacagcaacaccaagaaggccggcaagacaggccccatgaaaaccctgctggttagagtgatgacacccgatctgagagagcggctggaaaacctgagaaagaagcctgaaaatatcccccagcccatcagcaatacatctagagccaacctgaataagctgctgaccgattacaccgaaatgaagaaggcgatcctgcatgtgtactgggaagagttccagaaggaccctgtgggcctgatgagccgggtggcccagcctgccagcaagaagatcgatcagaacaagctgaaacctgagatggacgagaagggcaacctgaccaccgccggctttgcctgctctcagtgtggccagcccctgttcgtgtacaagctggagcaggtgtctgagaagggcaaggcttacaccaactacttcggacggtgcaatgtggccgagcacgaaaagctgatcctgctggcccagctgaagcccgagaaggatagcgacgaagccgtgacatatagcctgggaaagtttgggcagagggccctggatttctacagcattcatgtgaccaaggagtccacccaccccgtgaagcccctggcccagatcgccggaaacagatacgcctccggacctgtgggaaaggccctgagcgacgcatgtatgggcacaatcgcctccttcctgtctaagtaccaggacatcatcatcgaacaccagaaggtggtgaagggcaaccagaagagactggagagcctgcgggagctggccggcaaggaaaacctggaataccctagcgtgaccctgccacctcagcctcacaccaaggagggcgttgatgcctacaacgaagtgatcgcccgggtgcgaatgtgggtgaacctgaacctgtggcagaagctgaagctaagcagagatgatgccaagcctctgctgagactgaagggattcccttcctttcctctggtcgagagacaggccaacgaagtggactggtgggacatggtgtgtaacgtgaagaagctgatcaacgagaaaaaggaggatggcaaggtgttttggcagaatctggctggctacaagagacaggaagccctgagaccatacctgagcagcgaggaagatcggaagaagggaaagaaattcgctcggtaccagctgggcgacctgctgctgcacctggaaaagaagcacggcgaggactggggaaaggtgtacgacgaggcctgggagcggattgacaagaaagtggaaggcctgagcaagcacatcaagctggaagaggaacggagaagcgaggacgcccagagcaaggccgccctgaccgactggctgcgggctaaggccagcttcgtgatcgagggcctgaaggaggccgacaaggacgagttctgcagatgcgagctgaagctgcagaagtggtacggggacctgcggggaaagcccttcgccatcgaagccgagaacagcatcctggacatcagcggcttcagcaagcagtacaactgtgccttcatctggcagaaggacggcgtgaagaagctgaacctgtacctgatcatcaactacttcaagggcggcaagctgcggttcaagaagatcaaacctgaagccttcgaagccaacagattctacaccgtgatcaacaaaaagagcggcgagatcgtgcccatggaggtgaacttcaacttcgacgaccccaacctgatcatcctgcctctggcctttggcaagagacagggcagagaattcatctggaacgacctgctgtccctggaaaccggcagcctgaagctggccaacggaagagtgatcgagaagacactgtacaacagaagaacccggcaggatgagcctgccctgttcgtggccctgaccttcgagcggcgggaggtcctggactcctccaatatcaaaccaatgaacctgatcggcgtggcaagaggcgaaaacatccccgccgtgatcgccctgaccgaccccgagggctgcccactgagccggtttaaggatagcctgggaaacccaacccacatcctgagaatcggcgagagctataaggagaagcagcggaccatccaggccaagaaggaggtggagcagcggagagccggcggctacagccggaagtacgccagcaaagccaagaatctggcagacgatatggtgagaaacaccgctagagatctgctgtactacgccgtgacccaggatgccatgctgatcttcgccaacctgagccggggcttcggccggcagggcaagcggaccttcatggccgagagacagtacacacggatggaggactggctgaccgccaagctggcctacgagggcctgagcaagacctacctgtccaagacactggcccagtacacctccaagacatgcagcaactgtgggtttaccatcaccagcgccgactacgacagggtgctggagaagctgaagaagacagcaacaggctggatgaccacaattaacggcaaggagctgaaggtggagggccagattacctactacaacagatacaagagacagaacgtagtcaaggacctgtccgtcgagctggatagactgagcgaagaatctgtgaacaacgacatctcctcctggacaaagggcagaagcggagaagctctgagcctcctgaagaaaagattctcccatagacccgtgcaggagaagttcgtgtgcctgaactgcggcttcgagacacacgcagccgagcaagccgccctgaacatcgccagatcctggctgttcctgcggagccaggagtacaagaaataccagacaaacaagacaaccggcaacaccgataagagagccttcgtcgagacctggcagtccttttaccggaagaagcttaaggaggtgtggaaacctgccgtgcggtctggcggatctggcggaggctccaccagccccaagaaaaagagaaaagtctaagctgccttctgcggggcttgccttctggccatgcccttcttctctcccttgcacctgtacctcttggtctttgaataaagcctgagtaggaaggctagcaaaaaaaaaaaaaaaaaaaaaaaaaaaaaaaaaaaaaaaaaaaaaaaaaaaaaaaaaaaaaaaaaaaaaaaaaaaaaaaa

SEQ ID NO: 9937 - RNA, 8787 nt, synthetic construct
  source 1..8787: mol_type = other RNA
aggaaataagagagaaaagaagagtaagaagaaatataagagccaccatggcccctaagaagaagcgtaaagtgagccggatgaaccacgaccaggagttcgacccccctaaggtgtaccctcccgtccccgccgagaagagaaagcccatccgggtcctgagcctgttcgatggcatcgccaccggtctgctggtgctgaaggacctgggcatccaggtggataggtacattgcctccgaggtgtgcgaggactccatcaccgtgggaatggtgcgtcatcagggcaagatcatgtacgtgggcgacgtgcggagcgtgacacagaagcatatccaggagtggggccctttcgacctggtgatcggcggcagcccttgcaatgacctgagcatcgtgaacccagcccggaagggcctgtacgagggaaccggcagactgttcttcgagttttacagactgctgcacgacgcccggcctaaggaaggcgacgaccggcccttcttttggctgttcgagaatgtggtggccatgggagtcagcgacaagcgggatattagccggttcctggagagcaaccccgtgatgatcgatgccaaggaagtgagcgccgcccaccgggccagatacttctggggcaatctgcctggcatgaacagacccctggccagcaccgtgaacgacaagctggagctgcaggagtgcctggagcacggccggatcgccaagttcagcaaggtgagaaccatcaccacccgaagcaacagcatcaaacaaggcaaggaccagcactttcctgtgttcatgaacgagaaggaggacatcctgtggtgtaccgagatggagagagtgttcgggttcccagtccactacacagatgtcagcaacatgtctagactggccagacagagactgctgggaagaagctggtccgtccctgtgatcagacacctgttcgcccctctgaaggagtacttcgcctgcgtgagcagcggcaacagcaacgccaacagccggggccccagcttctctagcggcctggtgccactgtccctgagagggagccacatgggccccatggagatctacaaaaccgtgagcgcctggaagcggcagcctgtgcgcgtgctgagcctgtttcggaatatcgataaagtcctgaaaagcctgggattcctggagagcggctctggctccggcggtggcaccctgaagtacgtggaggatgtgacaaacgtggtcagacgggatgtggagaagtggggccccttcgatctggtgtacggcagcacccaacccctgggcagctcttgtgaccggtgccctggctggtacatgtttcagttccaccggatcctgcagtacgccctgccgagacaggagtcccagcggccattcttttggattttcatggacaacttgctgctgaccgaggatgaccaggaaactaccactcggttcctgcagaccgaagccgtgaccctgcaggacgtgagaggccgggactaccagaacgccatgcgggtgtggtccaacatccctggactgaaaagcaagcacgcacctctgacccctaaagaagaggagtacctgcaggcccaggtgcggagcagaagcaagctggacgcccctaaggtggatctgctggtgaagaattgcctcctgcccctgagagagtacttcaagtatttcagccagaatagtctgcccctgggaggcagcggcggcggccccgccgacagggacgccgtgacctacgacgacgtgcacatcggcttcacccaggaggagtgggtgctgctgaaccccagccagaagagcctgtacaaggacgtgatgctggacacctacaggaacctgaccgccatcggctacaggtggcaggaccacaacatcgaggagcactgcgagaacagcaggaggcacaggaggaagttcagctgcaccaccaagccctacgagagcctgcagaacggcggcccaagcagcggcgcccctcctcccagcggcggcaggcggcccaagcagcggcgcccctcctcccagcggcggcagcccagccggctccccaacctctaccgaggagggcacctctgagtccgccacccccgagagcggccctggcacctccaccgagcccagcgagggcagcgcacccggcagccctgccggcagccccacctccacagaggagggaaccagcaccgagcccagcgaaggcagcgccccaggcaccagcaccgagcctagtgagcaggagattaaacggatcaacaagatcagaagaagacttgtgaaagacagcaacaccaagaaggccggcaagacaggccccatgaaaaccctgctggttagagtgatgacacccgatctgagagagcggctggaaaacctgagaaagaagcctgaaaatatcccccagcccatcagcaatacatctagagccaacctgaataagctgctgaccgattacaccgaaatgaagaaggcgatcctgcatgtgtactgggaagagttccagaaggaccctgtgggcctgatgagccgggtggcccagcctgccagcaagaagatcgatcagaacaagctgaaacctgagatggacgagaagggcaacctgaccaccgccggctttgcctgctctcagtgtggccagcccctgttcgtgtacaagctggagcaggtgtctgagaagggcaaggcttacaccaactacttcggacggtgcaatgtggccgagcacgaaaagctgatcctgctggcccagctgaagcccgagaaggatagcgacgaagccgtgacatatagcctgggaaagtttgggcagagggccctggatttctacagcattcatgtgaccaaggagtccacccaccccgtgaagcccctggcccagatcgccggaaacagatacgcctccggacctgtgggaaaggccctgagcgacgcatgtatgggcacaatcgcctccttcctgtctaagtaccaggacatcatcatcgaacaccagaaggtggtgaagggcaaccagaagagactggagagcctgcgggagctggccggcaaggaaaacctggaataccctagcgtgaccctgccacctcagcctcacaccaaggagggcgttgatgcctacaacgaagtgatcgcccgggtgcgaatgtgggtgaacctgaacctgtggcagaagctgaagctaagcagagatgatgccaagcctctgctgagactgaagggattcccttcctttcctctggtcgagagacaggccaacgaagtggactggtgggacatggtgtgtaacgtgaagaagctgatcaacgagaaaaaggaggatggcaaggtgttttggcagaatctggctggctacaagagacaggaagccctgagaccatacctgagcagcgaggaagatcggaagaagggaaagaaattcgctcggtaccagctgggcgacctgctgctgcacctggaaaagaagcacggcgaggactggggaaaggtgtacgacgaggcctgggagcggattgacaagaaagtggaaggcctgagcaagcacatcaagctggaagaggaacggagaagcgaggacgcccagagcaaggccgccctgaccgactggctgcgggctaaggccagcttcgtgatcgagggcctgaaggaggccgacaaggacgagttctgcagatgcgagctgaagctgcagaagtggtacggggacctgcggggaaagcccttcgccatcgaagccgagaacagcatcctggacatcagcggcttcagcaagcagtacaactgtgccttcatctggcagaaggacggcgtgaagaagctgaacctgtacctgatcatcaactacttcaagggcggcaagctgcggttcaagaagatcaaacctgaagccttcgaagccaacagattctacaccgtgatcaacaaaaagagcggcgagatcgtgcccatggaggtgaacttcaacttcgacgaccccaacctgatcatcctgcctctggcctttggcaagagacagggcagagaattcatctggaacgacctgctgtccctggaaaccggcagcctgaagctggccaacggaagagtgatcgagaagacactgtacaacagaagaacccggcaggatgagcctgccctgttcgtggccctgaccttcgagcggcgggaggtcctggactcctccaatatcaaaccaatgaacctgatcggcgtggcaagaggcgaaaacatccccgccgtgatcgccctgaccgaccccgagggctgcccactgagccggtttaaggatagcctgggaaacccaacccacatcctgagaatcggcgagagctataaggagaagcagcggaccatccaggccaagaaggaggtggagcagcggagagccggcggctacagccggaagtacgccagcaaagccaagaatctggcagacgatatggtgagaaacaccgctagagatctgctgtactacgccgtgacccaggatgccatgctgatcttcgccaacctgagccggggcttcggccggcagggcaagcggaccttcatggccgagagacagtacacacggatggaggactggctgaccgccaagctggcctacgagggcctgagcaagacctacctgtccaagacactggcccagtacacctccaagacatgcagcaactgtgggtttaccatcaccagcgccgactacgacagggtgctggagaagctgaagaagacagcaacaggctggatgaccacaattaacggcaaggagctgaaggtggagggccagattacctactacaacagatacaagagacagaacgtagtcaaggacctgtccgtcgagctggatagactgagcgaagaatctgtgaacaacgacatctcctcctggacaaagggcagaagcggagaagctctgagcctcctgaagaaaagattctcccatagacccgtgcaggagaagttcgtgtgcctgaactgcggcttcgagacacacgcagccgagcaagccgccctgaacatcgccagatcctggctgttcctgcggagccaggagtacaagaaataccagacaaacaagacaaccggcaacaccgataagagagccttcgtcgagacctggcagtccttttaccggaagaagcttaaggaggtgtggaaacctgccgtgcggtctggcggatctggcggaggctccaccagccccaagaaaaagagaaaagtctaagctgccttctgcggggcttgccttctggccatgcccttcttctctcccttgcacctgtacctcttggtctttgaataaagcctgagtaggaaggctagcaaaaaaaaaaaaaaaaaaaaaaaaaaaaaaaaaaaaaaaaaaaaaaaaaaaaaaaaaaaaaaaaaaaaaaaaaaaaaaaagcccagccggctccccaacctctaccgaggagggcacctctgagtccgccacccccgagagcggccctggcacctccaccgagcccagcgagggcagcgcacccggcagccctgccggcagccccacctccacagaggagggaaccagcaccgagcccagcgaaggcagcgccccaggcaccagcaccgagcctagtgagcaggagattaaacggatcaacaagatcagaagaagacttgtgaaagacagcaacaccaagaaggccggcaagacaggccccatgaaaaccctgctggttagagtgatgacacccgatctgagagagcggctggaaaacctgagaaagaagcctgaaaatatcccccagcccatcagcaatacatctagagccaacctgaataagctgctgaccgattacaccgaaatgaagaaggcgatcctgcatgtgtactgggaagagttccagaaggaccctgtgggcctgatgagccgggtggcccagcctgccagcaagaagatcgatcagaacaagctgaaacctgagatggacgagaagggcaacctgaccaccgccggctttgcctgctctcagtgtggccagcccctgttcgtgtacaagctggagcaggtgtctgagaagggcaaggcttacaccaactacttcggacggtgcaatgtggccgagcacgaaaagctgatcctgctggcccagctgaagcccgagaaggatagcgacgaagccgtgacatatagcctgggaaagtttgggcagagggccctggatttctacagcattcatgtgaccaaggagtccacccaccccgtgaagcccctggcccagatcgccggaaacagatacgcctccggacctgtgggaaaggccctgagcgacgcatgtatgggcacaatcgcctccttcctgtctaagtaccaggacatcatcatcgaacaccagaaggtggtgaagggcaaccagaagagactggagagcctgcgggagctggccggcaaggaaaacctggaataccctagcgtgaccctgccacctcagcctcacaccaaggagggcgttgatgcctacaacgaagtgatcgcccgggtgcgaatgtgggtgaacctgaacctgtggcagaagctgaagctaagcagagatgatgccaagcctctgctgagactgaagggattcccttcctttcctctggtcgagagacaggccaacgaagtggactggtgggacatggtgtgtaacgtgaagaagctgatcaacgagaaaaaggaggatggcaaggtgttttggcagaatctggctggctacaagagacaggaagccctgagaccatacctgagcagcgaggaagatcggaagaagggaaagaaattcgctcggtaccagctgggcgacctgctgctgcacctggaaaagaagcacggcgaggactggggaaaggtgtacgacgaggcctgggagcggattgacaagaaagtggaaggcctgagcaagcacatcaagctggaagaggaacggagaagcgaggacgcccagagcaaggccgccctgaccgactggctgcgggctaaggccagcttcgtgatcgagggcctgaaggaggccgacaaggacgagttctgcagatgcgagctgaagctgcagaagtggtacggggacctgcggggaaagcccttcgccatcgaagccgagaacagcatcctggacatcagcggcttcagcaagcagtacaactgtgccttcatctggcagaaggacggcgtgaagaagctgaacctgtacctgatcatcaactacttcaagggcggcaagctgcggttcaagaagatcaaacctgaagccttcgaagccaacagattctacaccgtgatcaacaaaaagagcggcgagatcgtgcccatggaggtgaacttcaacttcgacgaccccaacctgatcatcctgcctctggcctttggcaagagacagggcagagaattcatctggaacgacctgctgtccctggaaaccggcagcctgaagctggccaacggaagagtgatcgagaagacactgtacaacagaagaacccggcaggatgagcctgccctgttcgtggccctgaccttcgagcggcgggaggtcctggactcctccaatatcaaaccaatgaacctgatcggcgtggcaagaggcgaaaacatccccgccgtgatcgccctgaccgaccccgagggctgcccactgagccggtttaaggatagcctgggaaacccaacccacatcctgagaatcggcgagagctataaggagaagcagcggaccatccaggccaagaaggaggtggagcagcggagagccggcggctacagccggaagtacgccagcaaagccaagaatctggcagacgatatggtgagaaacaccgctagagatctgctgtactacgccgtgacccaggatgccatgctgatcttcgccaacctgagccggggcttcggccggcagggcaagcggaccttcatggccgagagacagtacacacggatggaggactggctgaccgccaagctggcctacgagggcctgagcaagacctacctgtccaagacactggcccagtacacctccaagacatgcagcaactgtgggtttaccatcaccagcgccgactacgacagggtgctggagaagctgaagaagacagcaacaggctggatgaccacaattaacggcaaggagctgaaggtggagggccagattacctactacaacagatacaagagacagaacgtagtcaaggacctgtccgtcgagctggatagactgagcgaagaatctgtgaacaacgacatctcctcctggacaaagggcagaagcggagaagctctgagcctcctgaagaaaagattctcccatagacccgtgcaggagaagttcgtgtgcctgaactgcggcttcgagacacacgcagccgagcaagccgccctgaacatcgccagatcctggctgttcctgcggagccaggagtacaagaaataccagacaaacaagacaaccggcaacaccgataagagagccttcgtcgagacctggcagtccttttaccggaagaagcttaaggaggtgtggaaacctgccgtgcggtctggcggatctggcggaggctccaccagccccaagaaaaagagaaaagtctaagctgccttctgcggggcttgccttctggccatgcccttcttctctcccttgcacctgtacctcttggtctttgaataaagcctgagtaggaaggctagcaaaaaaaaaaaaaaaaaaaaaaaaaaaaaaaaaaaaaaaaaaaaaaaaaaaaaaaaaaaaaaaaaaaaaaaaaaaaaaaa

SEQ ID NO: 9938 - RNA, 8787 nt, synthetic construct
  source 1..8787: mol_type = other RNA
aggaaataagagagaaaagaagagtaagaagaaatataagagccaccatggcccctaagaagaagcgtaaagtgagccggatgaaccacgaccaggagttcgacccccctaaggtgtaccctcccgtccccgccgagaagagaaagcccatccgggtcctgagcctgttcgatggcatcgccaccggtctgctggtgctgaaggacctgggcatccaggtggataggtacattgcctccgaggtgtgcgaggactccatcaccgtgggaatggtgcgtcatcagggcaagatcatgtacgtgggcgacgtgcggagcgtgacacagaagcatatccaggagtggggccctttcgacctggtgatcggcggcagcccttgcaatgacctgagcatcgtgaacccagcccggaagggcctgtacgagggaaccggcagactgttcttcgagttttacagactgctgcacgacgcccggcctaaggaaggcgacgaccggcccttcttttggctgttcgagaatgtggtggccatgggagtcagcgacaagcgggatattagccggttcctggagagcaaccccgtgatgatcgatgccaaggaagtgagcgccgcccaccgggccagatacttctggggcaatctgcctggcatgaacagacccctggccagcaccgtgaacgacaagctggagctgcaggagtgcctggagcacggccggatcgccaagttcagcaaggtgagaaccatcaccacccgaagcaacagcatcaaacaaggcaaggaccagcactttcctgtgttcatgaacgagaaggaggacatcctgtggtgtaccgagatggagagagtgttcgggttcccagtccactacacagatgtcagcaacatgtctagactggccagacagagactgctgggaagaagctggtccgtccctgtgatcagacacctgttcgcccctctgaaggagtacttcgcctgcgtgagcagcggcaacagcaacgccaacagccggggccccagcttctctagcggcctggtgccactgtccctgagagggagccacatgggccccatggagatctacaaaaccgtgagcgcctggaagcggcagcctgtgcgcgtgctgagcctgtttcggaatatcgataaagtcctgaaaagcctgggattcctggagagcggctctggctccggcggtggcaccctgaagtacgtggaggatgtgacaaacgtggtcagacgggatgtggagaagtggggccccttcgatctggtgtacggcagcacccaacccctgggcagctcttgtgaccggtgccctggctggtacatgtttcagttccaccggatcctgcagtacgccctgccgagacaggagtcccagcggccattcttttggattttcatggacaacttgctgctgaccgaggatgaccaggaaactaccactcggttcctgcagaccgaagccgtgaccctgcaggacgtgagaggccgggactaccagaacgccatgcgggtgtggtccaacatccctggactgaaaagcaagcacgcacctctgacccctaaagaagaggagtacctgcaggcccaggtgcggagcagaagcaagctggacgcccctaaggtggatctgctggtgaagaattgcctcctgcccctgagagagtacttcaagtatttcagccagaatagtctgcccctgggaggcagcggcggcggcagccaggagctgctgaccttcaaggacatcagcgtggacttcacccaggaggagtggggccagctgcccctggcccacaggaacctgtacagggaggtgatgctggagaactacggcaacctggtgagcgtggccggctaccagctgagcaagcccagcgtgatcagccagctggagaagggccaggagccctggatgaccgagaaggaggtgcccgaggaccccagcagcgacctgaggaccggcggcccaagcagcggcgcccctcctcccagcggcggcaggcggcccaagcagcggcgcccctcctcccagcggcggcagcccagccggctccccaacctctaccgaggagggcacctctgagtccgccacccccgagagcggccctggcacctccaccgagcccagcgagggcagcgcacccggcagccctgccggcagccccacctccacagaggagggaaccagcaccgagcccagcgaaggcagcgccccaggcaccagcaccgagcctagtgagcaggagattaaacggatcaacaagatcagaagaagacttgtgaaagacagcaacaccaagaaggccggcaagacaggccccatgaaaaccctgctggttagagtgatgacacccgatctgagagagcggctggaaaacctgagaaagaagcctgaaaatatcccccagcccatcagcaatacatctagagccaacctgaataagctgctgaccgattacaccgaaatgaagaaggcgatcctgcatgtgtactgggaagagttccagaaggaccctgtgggcctgatgagccgggtggcccagcctgccagcaagaagatcgatcagaacaagctgaaacctgagatggacgagaagggcaacctgaccaccgccggctttgcctgctctcagtgtggccagcccctgttcgtgtacaagctggagcaggtgtctgagaagggcaaggcttacaccaactacttcggacggtgcaatgtggccgagcacgaaaagctgatcctgctggcccagctgaagcccgagaaggatagcgacgaagccgtgacatatagcctgggaaagtttgggcagagggccctggatttctacagcattcatgtgaccaaggagtccacccaccccgtgaagcccctggcccagatcgccggaaacagatacgcctccggacctgtgggaaaggccctgagcgacgcatgtatgggcacaatcgcctccttcctgtctaagtaccaggacatcatcatcgaacaccagaaggtggtgaagggcaaccagaagagactggagagcctgcgggagctggccggcaaggaaaacctggaataccctagcgtgaccctgccacctcagcctcacaccaaggagggcgttgatgcctacaacgaagtgatcgcccgggtgcgaatgtgggtgaacctgaacctgtggcagaagctgaagctaagcagagatgatgccaagcctctgctgagactgaagggattcccttcctttcctctggtcgagagacaggccaacgaagtggactggtgggacatggtgtgtaacgtgaagaagctgatcaacgagaaaaaggaggatggcaaggtgttttggcagaatctggctggctacaagagacaggaagccctgagaccatacctgagcagcgaggaagatcggaagaagggaaagaaattcgctcggtaccagctgggcgacctgctgctgcacctggaaaagaagcacggcgaggactggggaaaggtgtacgacgaggcctgggagcggattgacaagaaagtggaaggcctgagcaagcacatcaagctggaagaggaacggagaagcgaggacgcccagagcaaggccgccctgaccgactggctgcgggctaaggccagcttcgtgatcgagggcctgaaggaggccgacaaggacgagttctgcagatgcgagctgaagctgcagaagtggtacggggacctgcggggaaagcccttcgccatcgaagccgagaacagcatcctggacatcagcggcttcagcaagcagtacaactgtgccttcatctggcagaaggacggcgtgaagaagctgaacctgtacctgatcatcaactacttcaagggcggcaagctgcggttcaagaagatcaaacctgaagccttcgaagccaacagattctacaccgtgatcaacaaaaagagcggcgagatcgtgcccatggaggtgaacttcaacttcgacgaccccaacctgatcatcctgcctctggcctttggcaagagacagggcagagaattcatctggaacgacctgctgtccctggaaaccggcagcctgaagctggccaacggaagagtgatcgagaagacactgtacaacagaagaacccggcaggatgagcctgccctgttcgtggccctgaccttcgagcggcgggaggtcctggactcctccaatatcaaaccaatgaacctgatcggcgtggcaagaggcgaaaacatccccgccgtgatcgccctgaccgaccccgagggctgcccactgagccggtttaaggatagcctgggaaacccaacccacatcctgagaatcggcgagagctataaggagaagcagcggaccatccaggccaagaaggaggtggagcagcggagagccggcggctacagccggaagtacgccagcaaagccaagaatctggcagacgatatggtgagaaacaccgctagagatctgctgtactacgccgtgacccaggatgccatgctgatcttcgccaacctgagccggggcttcggccggcagggcaagcggaccttcatggccgagagacagtacacacggatggaggactggctgaccgccaagctggcctacgagggcctgagcaagacctacctgtccaagacactggcccagtacacctccaagacatgcagcaactgtgggtttaccatcaccagcgccgactacgacagggtgctggagaagctgaagaagacagcaacaggctggatgaccacaattaacggcaaggagctgaaggtggagggccagattacctactacaacagatacaagagacagaacgtagtcaaggacctgtccgtcgagctggatagactgagcgaagaatctgtgaacaacgacatctcctcctggacaaagggcagaagcggagaagctctgagcctcctgaagaaaagattctcccatagacccgtgcaggagaagttcgtgtgcctgaactgcggcttcgagacacacgcagccgagcaagccgccctgaacatcgccagatcctggctgttcctgcggagccaggagtacaagaaataccagacaaacaagacaaccggcaacaccgataagagagccttcgtcgagacctggcagtccttttaccggaagaagcttaaggaggtgtggaaacctgccgtgcggtctggcggatctggcggaggctccaccagccccaagaaaaagagaaaagtctaagctgccttctgcggggcttgccttctggccatgcccttcttctctcccttgcacctgtacctcttggtctttgaataaagcctgagtaggaaggctagcaaaaaaaaaaaaaaaaaaaaaaaaaaaaaaaaaaaaaaaaaaaaaaaaaaaaaaaaaaaaaaaaaaaaaaaaaaaaaaaagcccagccggctccccaacctctaccgaggagggcacctctgagtccgccacccccgagagcggccctggcacctccaccgagcccagcgagggcagcgcacccggcagccctgccggcagccccacctccacagaggagggaaccagcaccgagcccagcgaaggcagcgccccaggcaccagcaccgagcctagtgagcaggagattaaacggatcaacaagatcagaagaagacttgtgaaagacagcaacaccaagaaggccggcaagacaggccccatgaaaaccctgctggttagagtgatgacacccgatctgagagagcggctggaaaacctgagaaagaagcctgaaaatatcccccagcccatcagcaatacatctagagccaacctgaataagctgctgaccgattacaccgaaatgaagaaggcgatcctgcatgtgtactgggaagagttccagaaggaccctgtgggcctgatgagccgggtggcccagcctgccagcaagaagatcgatcagaacaagctgaaacctgagatggacgagaagggcaacctgaccaccgccggctttgcctgctctcagtgtggccagcccctgttcgtgtacaagctggagcaggtgtctgagaagggcaaggcttacaccaactacttcggacggtgcaatgtggccgagcacgaaaagctgatcctgctggcccagctgaagcccgagaaggatagcgacgaagccgtgacatatagcctgggaaagtttgggcagagggccctggatttctacagcattcatgtgaccaaggagtccacccaccccgtgaagcccctggcccagatcgccggaaacagatacgcctccggacctgtgggaaaggccctgagcgacgcatgtatgggcacaatcgcctccttcctgtctaagtaccaggacatcatcatcgaacaccagaaggtggtgaagggcaaccagaagagactggagagcctgcgggagctggccggcaaggaaaacctggaataccctagcgtgaccctgccacctcagcctcacaccaaggagggcgttgatgcctacaacgaagtgatcgcccgggtgcgaatgtgggtgaacctgaacctgtggcagaagctgaagctaagcagagatgatgccaagcctctgctgagactgaagggattcccttcctttcctctggtcgagagacaggccaacgaagtggactggtgggacatggtgtgtaacgtgaagaagctgatcaacgagaaaaaggaggatggcaaggtgttttggcagaatctggctggctacaagagacaggaagccctgagaccatacctgagcagcgaggaagatcggaagaagggaaagaaattcgctcggtaccagctgggcgacctgctgctgcacctggaaaagaagcacggcgaggactggggaaaggtgtacgacgaggcctgggagcggattgacaagaaagtggaaggcctgagcaagcacatcaagctggaagaggaacggagaagcgaggacgcccagagcaaggccgccctgaccgactggctgcgggctaaggccagcttcgtgatcgagggcctgaaggaggccgacaaggacgagttctgcagatgcgagctgaagctgcagaagtggtacggggacctgcggggaaagcccttcgccatcgaagccgagaacagcatcctggacatcagcggcttcagcaagcagtacaactgtgccttcatctggcagaaggacggcgtgaagaagctgaacctgtacctgatcatcaactacttcaagggcggcaagctgcggttcaagaagatcaaacctgaagccttcgaagccaacagattctacaccgtgatcaacaaaaagagcggcgagatcgtgcccatggaggtgaacttcaacttcgacgaccccaacctgatcatcctgcctctggcctttggcaagagacagggcagagaattcatctggaacgacctgctgtccctggaaaccggcagcctgaagctggccaacggaagagtgatcgagaagacactgtacaacagaagaacccggcaggatgagcctgccctgttcgtggccctgaccttcgagcggcgggaggtcctggactcctccaatatcaaaccaatgaacctgatcggcgtggcaagaggcgaaaacatccccgccgtgatcgccctgaccgaccccgagggctgcccactgagccggtttaaggatagcctgggaaacccaacccacatcctgagaatcggcgagagctataaggagaagcagcggaccatccaggccaagaaggaggtggagcagcggagagccggcggctacagccggaagtacgccagcaaagccaagaatctggcagacgatatggtgagaaacaccgctagagatctgctgtactacgccgtgacccaggatgccatgctgatcttcgccaacctgagccggggcttcggccggcagggcaagcggaccttcatggccgagagacagtacacacggatggaggactggctgaccgccaagctggcctacgagggcctgagcaagacctacctgtccaagacactggcccagtacacctccaagacatgcagcaactgtgggtttaccatcaccagcgccgactacgacagggtgctggagaagctgaagaagacagcaacaggctggatgaccacaattaacggcaaggagctgaaggtggagggccagattacctactacaacagatacaagagacagaacgtagtcaaggacctgtccgtcgagctggatagactgagcgaagaatctgtgaacaacgacatctcctcctggacaaagggcagaagcggagaagctctgagcctcctgaagaaaagattctcccatagacccgtgcaggagaagttcgtgtgcctgaactgcggcttcgagacacacgcagccgagcaagccgccctgaacatcgccagatcctggctgttcctgcggagccaggagtacaagaaataccagacaaacaagacaaccggcaacaccgataagagagccttcgtcgagacctggcagtccttttaccggaagaagcttaaggaggtgtggaaacctgccgtgcggtctggcggatctggcggaggctccaccagccccaagaaaaagagaaaagtctaagctgccttctgcggggcttgccttctggccatgcccttcttctctcccttgcacctgtacctcttggtctttgaataaagcctgagtaggaaggctagcaaaaaaaaaaaaaaaaaaaaaaaaaaaaaaaaaaaaaaaaaaaaaaaaaaaaaaaaaaaaaaaaaaaaaaaaaaaaaaaa

SEQ ID NO: 9939 - RNA, 8787 nt, synthetic construct
  source 1..8787: mol_type = other RNA
aggaaataagagagaaaagaagagtaagaagaaatataagagccaccatggcccctaagaagaagcgtaaagtgagccggatgaaccacgaccaggagttcgacccccctaaggtgtaccctcccgtccccgccgagaagagaaagcccatccgggtcctgagcctgttcgatggcatcgccaccggtctgctggtgctgaaggacctgggcatccaggtggataggtacattgcctccgaggtgtgcgaggactccatcaccgtgggaatggtgcgtcatcagggcaagatcatgtacgtgggcgacgtgcggagcgtgacacagaagcatatccaggagtggggccctttcgacctggtgatcggcggcagcccttgcaatgacctgagcatcgtgaacccagcccggaagggcctgtacgagggaaccggcagactgttcttcgagttttacagactgctgcacgacgcccggcctaaggaaggcgacgaccggcccttcttttggctgttcgagaatgtggtggccatgggagtcagcgacaagcgggatattagccggttcctggagagcaaccccgtgatgatcgatgccaaggaagtgagcgccgcccaccgggccagatacttctggggcaatctgcctggcatgaacagacccctggccagcaccgtgaacgacaagctggagctgcaggagtgcctggagcacggccggatcgccaagttcagcaaggtgagaaccatcaccacccgaagcaacagcatcaaacaaggcaaggaccagcactttcctgtgttcatgaacgagaaggaggacatcctgtggtgtaccgagatggagagagtgttcgggttcccagtccactacacagatgtcagcaacatgtctagactggccagacagagactgctgggaagaagctggtccgtccctgtgatcagacacctgttcgcccctctgaaggagtacttcgcctgcgtgagcagcggcaacagcaacgccaacagccggggccccagcttctctagcggcctggtgccactgtccctgagagggagccacatgggccccatggagatctacaaaaccgtgagcgcctggaagcggcagcctgtgcgcgtgctgagcctgtttcggaatatcgataaagtcctgaaaagcctgggattcctggagagcggctctggctccggcggtggcaccctgaagtacgtggaggatgtgacaaacgtggtcagacgggatgtggagaagtggggccccttcgatctggtgtacggcagcacccaacccctgggcagctcttgtgaccggtgccctggctggtacatgtttcagttccaccggatcctgcagtacgccctgccgagacaggagtcccagcggccattcttttggattttcatggacaacttgctgctgaccgaggatgaccaggaaactaccactcggttcctgcagaccgaagccgtgaccctgcaggacgtgagaggccgggactaccagaacgccatgcgggtgtggtccaacatccctggactgaaaagcaagcacgcacctctgacccctaaagaagaggagtacctgcaggcccaggtgcggagcagaagcaagctggacgcccctaaggtggatctgctggtgaagaattgcctcctgcccctgagagagtacttcaagtatttcagccagaatagtctgcccctgggaggcagcggcggcggcgcccaggagctggtgaccttccaggacgtggccgtggacttcaccgaggaggagtggggcctgctggaccacagccagaaggagctgtacaaggaggtgatgctggagaacgcccagaacctgctgagcctgggcctgcccgtgaccagggaggacctgatcagcttcttccagaagggcgaggccccctggatcctggagcccaagggcccctggaacttctgccccgacgccgtgaccaggggcggcccaagcagcggcgcccctcctcccagcggcggcaggcggcccaagcagcggcgcccctcctcccagcggcggcagcccagccggctccccaacctctaccgaggagggcacctctgagtccgccacccccgagagcggccctggcacctccaccgagcccagcgagggcagcgcacccggcagccctgccggcagccccacctccacagaggagggaaccagcaccgagcccagcgaaggcagcgccccaggcaccagcaccgagcctagtgagcaggagattaaacggatcaacaagatcagaagaagacttgtgaaagacagcaacaccaagaaggccggcaagacaggccccatgaaaaccctgctggttagagtgatgacacccgatctgagagagcggctggaaaacctgagaaagaagcctgaaaatatcccccagcccatcagcaatacatctagagccaacctgaataagctgctgaccgattacaccgaaatgaagaaggcgatcctgcatgtgtactgggaagagttccagaaggaccctgtgggcctgatgagccgggtggcccagcctgccagcaagaagatcgatcagaacaagctgaaacctgagatggacgagaagggcaacctgaccaccgccggctttgcctgctctcagtgtggccagcccctgttcgtgtacaagctggagcaggtgtctgagaagggcaaggcttacaccaactacttcggacggtgcaatgtggccgagcacgaaaagctgatcctgctggcccagctgaagcccgagaaggatagcgacgaagccgtgacatatagcctgggaaagtttgggcagagggccctggatttctacagcattcatgtgaccaaggagtccacccaccccgtgaagcccctggcccagatcgccggaaacagatacgcctccggacctgtgggaaaggccctgagcgacgcatgtatgggcacaatcgcctccttcctgtctaagtaccaggacatcatcatcgaacaccagaaggtggtgaagggcaaccagaagagactggagagcctgcgggagctggccggcaaggaaaacctggaataccctagcgtgaccctgccacctcagcctcacaccaaggagggcgttgatgcctacaacgaagtgatcgcccgggtgcgaatgtgggtgaacctgaacctgtggcagaagctgaagctaagcagagatgatgccaagcctctgctgagactgaagggattcccttcctttcctctggtcgagagacaggccaacgaagtggactggtgggacatggtgtgtaacgtgaagaagctgatcaacgagaaaaaggaggatggcaaggtgttttggcagaatctggctggctacaagagacaggaagccctgagaccatacctgagcagcgaggaagatcggaagaagggaaagaaattcgctcggtaccagctgggcgacctgctgctgcacctggaaaagaagcacggcgaggactggggaaaggtgtacgacgaggcctgggagcggattgacaagaaagtggaaggcctgagcaagcacatcaagctggaagaggaacggagaagcgaggacgcccagagcaaggccgccctgaccgactggctgcgggctaaggccagcttcgtgatcgagggcctgaaggaggccgacaaggacgagttctgcagatgcgagctgaagctgcagaagtggtacggggacctgcggggaaagcccttcgccatcgaagccgagaacagcatcctggacatcagcggcttcagcaagcagtacaactgtgccttcatctggcagaaggacggcgtgaagaagctgaacctgtacctgatcatcaactacttcaagggcggcaagctgcggttcaagaagatcaaacctgaagccttcgaagccaacagattctacaccgtgatcaacaaaaagagcggcgagatcgtgcccatggaggtgaacttcaacttcgacgaccccaacctgatcatcctgcctctggcctttggcaagagacagggcagagaattcatctggaacgacctgctgtccctggaaaccggcagcctgaagctggccaacggaagagtgatcgagaagacactgtacaacagaagaacccggcaggatgagcctgccctgttcgtggccctgaccttcgagcggcgggaggtcctggactcctccaatatcaaaccaatgaacctgatcggcgtggcaagaggcgaaaacatccccgccgtgatcgccctgaccgaccccgagggctgcccactgagccggtttaaggatagcctgggaaacccaacccacatcctgagaatcggcgagagctataaggagaagcagcggaccatccaggccaagaaggaggtggagcagcggagagccggcggctacagccggaagtacgccagcaaagccaagaatctggcagacgatatggtgagaaacaccgctagagatctgctgtactacgccgtgacccaggatgccatgctgatcttcgccaacctgagccggggcttcggccggcagggcaagcggaccttcatggccgagagacagtacacacggatggaggactggctgaccgccaagctggcctacgagggcctgagcaagacctacctgtccaagacactggcccagtacacctccaagacatgcagcaactgtgggtttaccatcaccagcgccgactacgacagggtgctggagaagctgaagaagacagcaacaggctggatgaccacaattaacggcaaggagctgaaggtggagggccagattacctactacaacagatacaagagacagaacgtagtcaaggacctgtccgtcgagctggatagactgagcgaagaatctgtgaacaacgacatctcctcctggacaaagggcagaagcggagaagctctgagcctcctgaagaaaagattctcccatagacccgtgcaggagaagttcgtgtgcctgaactgcggcttcgagacacacgcagccgagcaagccgccctgaacatcgccagatcctggctgttcctgcggagccaggagtacaagaaataccagacaaacaagacaaccggcaacaccgataagagagccttcgtcgagacctggcagtccttttaccggaagaagcttaaggaggtgtggaaacctgccgtgcggtctggcggatctggcggaggctccaccagccccaagaaaaagagaaaagtctaagctgccttctgcggggcttgccttctggccatgcccttcttctctcccttgcacctgtacctcttggtctttgaataaagcctgagtaggaaggctagcaaaaaaaaaaaaaaaaaaaaaaaaaaaaaaaaaaaaaaaaaaaaaaaaaaaaaaaaaaaaaaaaaaaaaaaaaaaaaaaagcccagccggctccccaacctctaccgaggagggcacctctgagtccgccacccccgagagcggccctggcacctccaccgagcccagcgagggcagcgcacccggcagccctgccggcagccccacctccacagaggagggaaccagcaccgagcccagcgaaggcagcgccccaggcaccagcaccgagcctagtgagcaggagattaaacggatcaacaagatcagaagaagacttgtgaaagacagcaacaccaagaaggccggcaagacaggccccatgaaaaccctgctggttagagtgatgacacccgatctgagagagcggctggaaaacctgagaaagaagcctgaaaatatcccccagcccatcagcaatacatctagagccaacctgaataagctgctgaccgattacaccgaaatgaagaaggcgatcctgcatgtgtactgggaagagttccagaaggaccctgtgggcctgatgagccgggtggcccagcctgccagcaagaagatcgatcagaacaagctgaaacctgagatggacgagaagggcaacctgaccaccgccggctttgcctgctctcagtgtggccagcccctgttcgtgtacaagctggagcaggtgtctgagaagggcaaggcttacaccaactacttcggacggtgcaatgtggccgagcacgaaaagctgatcctgctggcccagctgaagcccgagaaggatagcgacgaagccgtgacatatagcctgggaaagtttgggcagagggccctggatttctacagcattcatgtgaccaaggagtccacccaccccgtgaagcccctggcccagatcgccggaaacagatacgcctccggacctgtgggaaaggccctgagcgacgcatgtatgggcacaatcgcctccttcctgtctaagtaccaggacatcatcatcgaacaccagaaggtggtgaagggcaaccagaagagactggagagcctgcgggagctggccggcaaggaaaacctggaataccctagcgtgaccctgccacctcagcctcacaccaaggagggcgttgatgcctacaacgaagtgatcgcccgggtgcgaatgtgggtgaacctgaacctgtggcagaagctgaagctaagcagagatgatgccaagcctctgctgagactgaagggattcccttcctttcctctggtcgagagacaggccaacgaagtggactggtgggacatggtgtgtaacgtgaagaagctgatcaacgagaaaaaggaggatggcaaggtgttttggcagaatctggctggctacaagagacaggaagccctgagaccatacctgagcagcgaggaagatcggaagaagggaaagaaattcgctcggtaccagctgggcgacctgctgctgcacctggaaaagaagcacggcgaggactggggaaaggtgtacgacgaggcctgggagcggattgacaagaaagtggaaggcctgagcaagcacatcaagctggaagaggaacggagaagcgaggacgcccagagcaaggccgccctgaccgactggctgcgggctaaggccagcttcgtgatcgagggcctgaaggaggccgacaaggacgagttctgcagatgcgagctgaagctgcagaagtggtacggggacctgcggggaaagcccttcgccatcgaagccgagaacagcatcctggacatcagcggcttcagcaagcagtacaactgtgccttcatctggcagaaggacggcgtgaagaagctgaacctgtacctgatcatcaactacttcaagggcggcaagctgcggttcaagaagatcaaacctgaagccttcgaagccaacagattctacaccgtgatcaacaaaaagagcggcgagatcgtgcccatggaggtgaacttcaacttcgacgaccccaacctgatcatcctgcctctggcctttggcaagagacagggcagagaattcatctggaacgacctgctgtccctggaaaccggcagcctgaagctggccaacggaagagtgatcgagaagacactgtacaacagaagaacccggcaggatgagcctgccctgttcgtggccctgaccttcgagcggcgggaggtcctggactcctccaatatcaaaccaatgaacctgatcggcgtggcaagaggcgaaaacatccccgccgtgatcgccctgaccgaccccgagggctgcccactgagccggtttaaggatagcctgggaaacccaacccacatcctgagaatcggcgagagctataaggagaagcagcggaccatccaggccaagaaggaggtggagcagcggagagccggcggctacagccggaagtacgccagcaaagccaagaatctggcagacgatatggtgagaaacaccgctagagatctgctgtactacgccgtgacccaggatgccatgctgatcttcgccaacctgagccggggcttcggccggcagggcaagcggaccttcatggccgagagacagtacacacggatggaggactggctgaccgccaagctggcctacgagggcctgagcaagacctacctgtccaagacactggcccagtacacctccaagacatgcagcaactgtgggtttaccatcaccagcgccgactacgacagggtgctggagaagctgaagaagacagcaacaggctggatgaccacaattaacggcaaggagctgaaggtggagggccagattacctactacaacagatacaagagacagaacgtagtcaaggacctgtccgtcgagctggatagactgagcgaagaatctgtgaacaacgacatctcctcctggacaaagggcagaagcggagaagctctgagcctcctgaagaaaagattctcccatagacccgtgcaggagaagttcgtgtgcctgaactgcggcttcgagacacacgcagccgagcaagccgccctgaacatcgccagatcctggctgttcctgcggagccaggagtacaagaaataccagacaaacaagacaaccggcaacaccgataagagagccttcgtcgagacctggcagtccttttaccggaagaagcttaaggaggtgtggaaacctgccgtgcggtctggcggatctggcggaggctccaccagccccaagaaaaagagaaaagtctaagctgccttctgcggggcttgccttctggccatgcccttcttctctcccttgcacctgtacctcttggtctttgaataaagcctgagtaggaaggctagcaaaaaaaaaaaaaaaaaaaaaaaaaaaaaaaaaaaaaaaaaaaaaaaaaaaaaaaaaaaaaaaaaaaaaaaaaaaaaaaa

SEQ ID NO: 9940 - RNA, 8787 nt, synthetic construct
  source 1..8787: mol_type = other RNA
aggaaataagagagaaaagaagagtaagaagaaatataagagccaccatggcccctaagaagaagcgtaaagtgagccggatgaaccacgaccaggagttcgacccccctaaggtgtaccctcccgtccccgccgagaagagaaagcccatccgggtcctgagcctgttcgatggcatcgccaccggtctgctggtgctgaaggacctgggcatccaggtggataggtacattgcctccgaggtgtgcgaggactccatcaccgtgggaatggtgcgtcatcagggcaagatcatgtacgtgggcgacgtgcggagcgtgacacagaagcatatccaggagtggggccctttcgacctggtgatcggcggcagcccttgcaatgacctgagcatcgtgaacccagcccggaagggcctgtacgagggaaccggcagactgttcttcgagttttacagactgctgcacgacgcccggcctaaggaaggcgacgaccggcccttcttttggctgttcgagaatgtggtggccatgggagtcagcgacaagcgggatattagccggttcctggagagcaaccccgtgatgatcgatgccaaggaagtgagcgccgcccaccgggccagatacttctggggcaatctgcctggcatgaacagacccctggccagcaccgtgaacgacaagctggagctgcaggagtgcctggagcacggccggatcgccaagttcagcaaggtgagaaccatcaccacccgaagcaacagcatcaaacaaggcaaggaccagcactttcctgtgttcatgaacgagaaggaggacatcctgtggtgtaccgagatggagagagtgttcgggttcccagtccactacacagatgtcagcaacatgtctagactggccagacagagactgctgggaagaagctggtccgtccctgtgatcagacacctgttcgcccctctgaaggagtacttcgcctgcgtgagcagcggcaacagcaacgccaacagccggggccccagcttctctagcggcctggtgccactgtccctgagagggagccacatgggccccatggagatctacaaaaccgtgagcgcctggaagcggcagcctgtgcgcgtgctgagcctgtttcggaatatcgataaagtcctgaaaagcctgggattcctggagagcggctctggctccggcggtggcaccctgaagtacgtggaggatgtgacaaacgtggtcagacgggatgtggagaagtggggccccttcgatctggtgtacggcagcacccaacccctgggcagctcttgtgaccggtgccctggctggtacatgtttcagttccaccggatcctgcagtacgccctgccgagacaggagtcccagcggccattcttttggattttcatggacaacttgctgctgaccgaggatgaccaggaaactaccactcggttcctgcagaccgaagccgtgaccctgcaggacgtgagaggccgggactaccagaacgccatgcgggtgtggtccaacatccctggactgaaaagcaagcacgcacctctgacccctaaagaagaggagtacctgcaggcccaggtgcggagcagaagcaagctggacgcccctaaggtggatctgctggtgaagaattgcctcctgcccctgagagagtacttcaagtatttcagccagaatagtctgcccctgggaggcagcggcggcggcgccctgaggagcgtgatgttcagcgacgtgagcatcgacttcagccccgaggagtgggagtacctggacctggagcagaaggacctgtacagggacgtgatgctggagaactacagcaacctggtgagcctgggctgcttcatcagcaagcccgacgtgatcagcagcctggagcagggcaaggagccctggaaggtggtgaggaagggcaggaggcagtaccccgacctggagaccaagtacggcggcccaagcagcggcgcccctcctcccagcggcggcaggcggcccaagcagcggcgcccctcctcccagcggcggcagcccagccggctccccaacctctaccgaggagggcacctctgagtccgccacccccgagagcggccctggcacctccaccgagcccagcgagggcagcgcacccggcagccctgccggcagccccacctccacagaggagggaaccagcaccgagcccagcgaaggcagcgccccaggcaccagcaccgagcctagtgagcaggagattaaacggatcaacaagatcagaagaagacttgtgaaagacagcaacaccaagaaggccggcaagacaggccccatgaaaaccctgctggttagagtgatgacacccgatctgagagagcggctggaaaacctgagaaagaagcctgaaaatatcccccagcccatcagcaatacatctagagccaacctgaataagctgctgaccgattacaccgaaatgaagaaggcgatcctgcatgtgtactgggaagagttccagaaggaccctgtgggcctgatgagccgggtggcccagcctgccagcaagaagatcgatcagaacaagctgaaacctgagatggacgagaagggcaacctgaccaccgccggctttgcctgctctcagtgtggccagcccctgttcgtgtacaagctggagcaggtgtctgagaagggcaaggcttacaccaactacttcggacggtgcaatgtggccgagcacgaaaagctgatcctgctggcccagctgaagcccgagaaggatagcgacgaagccgtgacatatagcctgggaaagtttgggcagagggccctggatttctacagcattcatgtgaccaaggagtccacccaccccgtgaagcccctggcccagatcgccggaaacagatacgcctccggacctgtgggaaaggccctgagcgacgcatgtatgggcacaatcgcctccttcctgtctaagtaccaggacatcatcatcgaacaccagaaggtggtgaagggcaaccagaagagactggagagcctgcgggagctggccggcaaggaaaacctggaataccctagcgtgaccctgccacctcagcctcacaccaaggagggcgttgatgcctacaacgaagtgatcgcccgggtgcgaatgtgggtgaacctgaacctgtggcagaagctgaagctaagcagagatgatgccaagcctctgctgagactgaagggattcccttcctttcctctggtcgagagacaggccaacgaagtggactggtgggacatggtgtgtaacgtgaagaagctgatcaacgagaaaaaggaggatggcaaggtgttttggcagaatctggctggctacaagagacaggaagccctgagaccatacctgagcagcgaggaagatcggaagaagggaaagaaattcgctcggtaccagctgggcgacctgctgctgcacctggaaaagaagcacggcgaggactggggaaaggtgtacgacgaggcctgggagcggattgacaagaaagtggaaggcctgagcaagcacatcaagctggaagaggaacggagaagcgaggacgcccagagcaaggccgccctgaccgactggctgcgggctaaggccagcttcgtgatcgagggcctgaaggaggccgacaaggacgagttctgcagatgcgagctgaagctgcagaagtggtacggggacctgcggggaaagcccttcgccatcgaagccgagaacagcatcctggacatcagcggcttcagcaagcagtacaactgtgccttcatctggcagaaggacggcgtgaagaagctgaacctgtacctgatcatcaactacttcaagggcggcaagctgcggttcaagaagatcaaacctgaagccttcgaagccaacagattctacaccgtgatcaacaaaaagagcggcgagatcgtgcccatggaggtgaacttcaacttcgacgaccccaacctgatcatcctgcctctggcctttggcaagagacagggcagagaattcatctggaacgacctgctgtccctggaaaccggcagcctgaagctggccaacggaagagtgatcgagaagacactgtacaacagaagaacccggcaggatgagcctgccctgttcgtggccctgaccttcgagcggcgggaggtcctggactcctccaatatcaaaccaatgaacctgatcggcgtggcaagaggcgaaaacatccccgccgtgatcgccctgaccgaccccgagggctgcccactgagccggtttaaggatagcctgggaaacccaacccacatcctgagaatcggcgagagctataaggagaagcagcggaccatccaggccaagaaggaggtggagcagcggagagccggcggctacagccggaagtacgccagcaaagccaagaatctggcagacgatatggtgagaaacaccgctagagatctgctgtactacgccgtgacccaggatgccatgctgatcttcgccaacctgagccggggcttcggccggcagggcaagcggaccttcatggccgagagacagtacacacggatggaggactggctgaccgccaagctggcctacgagggcctgagcaagacctacctgtccaagacactggcccagtacacctccaagacatgcagcaactgtgggtttaccatcaccagcgccgactacgacagggtgctggagaagctgaagaagacagcaacaggctggatgaccacaattaacggcaaggagctgaaggtggagggccagattacctactacaacagatacaagagacagaacgtagtcaaggacctgtccgtcgagctggatagactgagcgaagaatctgtgaacaacgacatctcctcctggacaaagggcagaagcggagaagctctgagcctcctgaagaaaagattctcccatagacccgtgcaggagaagttcgtgtgcctgaactgcggcttcgagacacacgcagccgagcaagccgccctgaacatcgccagatcctggctgttcctgcggagccaggagtacaagaaataccagacaaacaagacaaccggcaacaccgataagagagccttcgtcgagacctggcagtccttttaccggaagaagcttaaggaggtgtggaaacctgccgtgcggtctggcggatctggcggaggctccaccagccccaagaaaaagagaaaagtctaagctgccttctgcggggcttgccttctggccatgcccttcttctctcccttgcacctgtacctcttggtctttgaataaagcctgagtaggaaggctagcaaaaaaaaaaaaaaaaaaaaaaaaaaaaaaaaaaaaaaaaaaaaaaaaaaaaaaaaaaaaaaaaaaaaaaaaaaaaaaaagcccagccggctccccaacctctaccgaggagggcacctctgagtccgccacccccgagagcggccctggcacctccaccgagcccagcgagggcagcgcacccggcagccctgccggcagccccacctccacagaggagggaaccagcaccgagcccagcgaaggcagcgccccaggcaccagcaccgagcctagtgagcaggagattaaacggatcaacaagatcagaagaagacttgtgaaagacagcaacaccaagaaggccggcaagacaggccccatgaaaaccctgctggttagagtgatgacacccgatctgagagagcggctggaaaacctgagaaagaagcctgaaaatatcccccagcccatcagcaatacatctagagccaacctgaataagctgctgaccgattacaccgaaatgaagaaggcgatcctgcatgtgtactgggaagagttccagaaggaccctgtgggcctgatgagccgggtggcccagcctgccagcaagaagatcgatcagaacaagctgaaacctgagatggacgagaagggcaacctgaccaccgccggctttgcctgctctcagtgtggccagcccctgttcgtgtacaagctggagcaggtgtctgagaagggcaaggcttacaccaactacttcggacggtgcaatgtggccgagcacgaaaagctgatcctgctggcccagctgaagcccgagaaggatagcgacgaagccgtgacatatagcctgggaaagtttgggcagagggccctggatttctacagcattcatgtgaccaaggagtccacccaccccgtgaagcccctggcccagatcgccggaaacagatacgcctccggacctgtgggaaaggccctgagcgacgcatgtatgggcacaatcgcctccttcctgtctaagtaccaggacatcatcatcgaacaccagaaggtggtgaagggcaaccagaagagactggagagcctgcgggagctggccggcaaggaaaacctggaataccctagcgtgaccctgccacctcagcctcacaccaaggagggcgttgatgcctacaacgaagtgatcgcccgggtgcgaatgtgggtgaacctgaacctgtggcagaagctgaagctaagcagagatgatgccaagcctctgctgagactgaagggattcccttcctttcctctggtcgagagacaggccaacgaagtggactggtgggacatggtgtgtaacgtgaagaagctgatcaacgagaaaaaggaggatggcaaggtgttttggcagaatctggctggctacaagagacaggaagccctgagaccatacctgagcagcgaggaagatcggaagaagggaaagaaattcgctcggtaccagctgggcgacctgctgctgcacctggaaaagaagcacggcgaggactggggaaaggtgtacgacgaggcctgggagcggattgacaagaaagtggaaggcctgagcaagcacatcaagctggaagaggaacggagaagcgaggacgcccagagcaaggccgccctgaccgactggctgcgggctaaggccagcttcgtgatcgagggcctgaaggaggccgacaaggacgagttctgcagatgcgagctgaagctgcagaagtggtacggggacctgcggggaaagcccttcgccatcgaagccgagaacagcatcctggacatcagcggcttcagcaagcagtacaactgtgccttcatctggcagaaggacggcgtgaagaagctgaacctgtacctgatcatcaactacttcaagggcggcaagctgcggttcaagaagatcaaacctgaagccttcgaagccaacagattctacaccgtgatcaacaaaaagagcggcgagatcgtgcccatggaggtgaacttcaacttcgacgaccccaacctgatcatcctgcctctggcctttggcaagagacagggcagagaattcatctggaacgacctgctgtccctggaaaccggcagcctgaagctggccaacggaagagtgatcgagaagacactgtacaacagaagaacccggcaggatgagcctgccctgttcgtggccctgaccttcgagcggcgggaggtcctggactcctccaatatcaaaccaatgaacctgatcggcgtggcaagaggcgaaaacatccccgccgtgatcgccctgaccgaccccgagggctgcccactgagccggtttaaggatagcctgggaaacccaacccacatcctgagaatcggcgagagctataaggagaagcagcggaccatccaggccaagaaggaggtggagcagcggagagccggcggctacagccggaagtacgccagcaaagccaagaatctggcagacgatatggtgagaaacaccgctagagatctgctgtactacgccgtgacccaggatgccatgctgatcttcgccaacctgagccggggcttcggccggcagggcaagcggaccttcatggccgagagacagtacacacggatggaggactggctgaccgccaagctggcctacgagggcctgagcaagacctacctgtccaagacactggcccagtacacctccaagacatgcagcaactgtgggtttaccatcaccagcgccgactacgacagggtgctggagaagctgaagaagacagcaacaggctggatgaccacaattaacggcaaggagctgaaggtggagggccagattacctactacaacagatacaagagacagaacgtagtcaaggacctgtccgtcgagctggatagactgagcgaagaatctgtgaacaacgacatctcctcctggacaaagggcagaagcggagaagctctgagcctcctgaagaaaagattctcccatagacccgtgcaggagaagttcgtgtgcctgaactgcggcttcgagacacacgcagccgagcaagccgccctgaacatcgccagatcctggctgttcctgcggagccaggagtacaagaaataccagacaaacaagacaaccggcaacaccgataagagagccttcgtcgagacctggcagtccttttaccggaagaagcttaaggaggtgtggaaacctgccgtgcggtctggcggatctggcggaggctccaccagccccaagaaaaagagaaaagtctaagctgccttctgcggggcttgccttctggccatgcccttcttctctcccttgcacctgtacctcttggtctttgaataaagcctgagtaggaaggctagcaaaaaaaaaaaaaaaaaaaaaaaaaaaaaaaaaaaaaaaaaaaaaaaaaaaaaaaaaaaaaaaaaaaaaaaaaaaaaaaa

SEQ ID NO: 9941 - RNA, 8787 nt, synthetic construct
  source 1..8787: mol_type = other RNA
aggaaataagagagaaaagaagagtaagaagaaatataagagccaccatggcccctaagaagaagcgtaaagtgagccggatgaaccacgaccaggagttcgacccccctaaggtgtaccctcccgtccccgccgagaagagaaagcccatccgggtcctgagcctgttcgatggcatcgccaccggtctgctggtgctgaaggacctgggcatccaggtggataggtacattgcctccgaggtgtgcgaggactccatcaccgtgggaatggtgcgtcatcagggcaagatcatgtacgtgggcgacgtgcggagcgtgacacagaagcatatccaggagtggggccctttcgacctggtgatcggcggcagcccttgcaatgacctgagcatcgtgaacccagcccggaagggcctgtacgagggaaccggcagactgttcttcgagttttacagactgctgcacgacgcccggcctaaggaaggcgacgaccggcccttcttttggctgttcgagaatgtggtggccatgggagtcagcgacaagcgggatattagccggttcctggagagcaaccccgtgatgatcgatgccaaggaagtgagcgccgcccaccgggccagatacttctggggcaatctgcctggcatgaacagacccctggccagcaccgtgaacgacaagctggagctgcaggagtgcctggagcacggccggatcgccaagttcagcaaggtgagaaccatcaccacccgaagcaacagcatcaaacaaggcaaggaccagcactttcctgtgttcatgaacgagaaggaggacatcctgtggtgtaccgagatggagagagtgttcgggttcccagtccactacacagatgtcagcaacatgtctagactggccagacagagactgctgggaagaagctggtccgtccctgtgatcagacacctgttcgcccctctgaaggagtacttcgcctgcgtgagcagcggcaacagcaacgccaacagccggggccccagcttctctagcggcctggtgccactgtccctgagagggagccacatgggccccatggagatctacaaaaccgtgagcgcctggaagcggcagcctgtgcgcgtgctgagcctgtttcggaatatcgataaagtcctgaaaagcctgggattcctggagagcggctctggctccggcggtggcaccctgaagtacgtggaggatgtgacaaacgtggtcagacgggatgtggagaagtggggccccttcgatctggtgtacggcagcacccaacccctgggcagctcttgtgaccggtgccctggctggtacatgtttcagttccaccggatcctgcagtacgccctgccgagacaggagtcccagcggccattcttttggattttcatggacaacttgctgctgaccgaggatgaccaggaaactaccactcggttcctgcagaccgaagccgtgaccctgcaggacgtgagaggccgggactaccagaacgccatgcgggtgtggtccaacatccctggactgaaaagcaagcacgcacctctgacccctaaagaagaggagtacctgcaggcccaggtgcggagcagaagcaagctggacgcccctaaggtggatctgctggtgaagaattgcctcctgcccctgagagagtacttcaagtatttcagccagaatagtctgcccctgggaggcagcggcggcggcgtgaccttcgaggaggtggccgtgtacttcagcgaggaggagtgggccctgctggaccccggccagagggccctgtacagggacgtgatgcaggagaactacgagaccgtgatcagcctgggcaaggacttctgccccctgagccccgagcaggtggccctgtgcggcatgctgtgcggcaggagcgagggccacgtgagccagagccccgagcagagggagacctgcaagaggcagcacaagggcggcccaagcagcggcgcccctcctcccagcggcggcaggcggcccaagcagcggcgcccctcctcccagcggcggcagcccagccggctccccaacctctaccgaggagggcacctctgagtccgccacccccgagagcggccctggcacctccaccgagcccagcgagggcagcgcacccggcagccctgccggcagccccacctccacagaggagggaaccagcaccgagcccagcgaaggcagcgccccaggcaccagcaccgagcctagtgagcaggagattaaacggatcaacaagatcagaagaagacttgtgaaagacagcaacaccaagaaggccggcaagacaggccccatgaaaaccctgctggttagagtgatgacacccgatctgagagagcggctggaaaacctgagaaagaagcctgaaaatatcccccagcccatcagcaatacatctagagccaacctgaataagctgctgaccgattacaccgaaatgaagaaggcgatcctgcatgtgtactgggaagagttccagaaggaccctgtgggcctgatgagccgggtggcccagcctgccagcaagaagatcgatcagaacaagctgaaacctgagatggacgagaagggcaacctgaccaccgccggctttgcctgctctcagtgtggccagcccctgttcgtgtacaagctggagcaggtgtctgagaagggcaaggcttacaccaactacttcggacggtgcaatgtggccgagcacgaaaagctgatcctgctggcccagctgaagcccgagaaggatagcgacgaagccgtgacatatagcctgggaaagtttgggcagagggccctggatttctacagcattcatgtgaccaaggagtccacccaccccgtgaagcccctggcccagatcgccggaaacagatacgcctccggacctgtgggaaaggccctgagcgacgcatgtatgggcacaatcgcctccttcctgtctaagtaccaggacatcatcatcgaacaccagaaggtggtgaagggcaaccagaagagactggagagcctgcgggagctggccggcaaggaaaacctggaataccctagcgtgaccctgccacctcagcctcacaccaaggagggcgttgatgcctacaacgaagtgatcgcccgggtgcgaatgtgggtgaacctgaacctgtggcagaagctgaagctaagcagagatgatgccaagcctctgctgagactgaagggattcccttcctttcctctggtcgagagacaggccaacgaagtggactggtgggacatggtgtgtaacgtgaagaagctgatcaacgagaaaaaggaggatggcaaggtgttttggcagaatctggctggctacaagagacaggaagccctgagaccatacctgagcagcgaggaagatcggaagaagggaaagaaattcgctcggtaccagctgggcgacctgctgctgcacctggaaaagaagcacggcgaggactggggaaaggtgtacgacgaggcctgggagcggattgacaagaaagtggaaggcctgagcaagcacatcaagctggaagaggaacggagaagcgaggacgcccagagcaaggccgccctgaccgactggctgcgggctaaggccagcttcgtgatcgagggcctgaaggaggccgacaaggacgagttctgcagatgcgagctgaagctgcagaagtggtacggggacctgcggggaaagcccttcgccatcgaagccgagaacagcatcctggacatcagcggcttcagcaagcagtacaactgtgccttcatctggcagaaggacggcgtgaagaagctgaacctgtacctgatcatcaactacttcaagggcggcaagctgcggttcaagaagatcaaacctgaagccttcgaagccaacagattctacaccgtgatcaacaaaaagagcggcgagatcgtgcccatggaggtgaacttcaacttcgacgaccccaacctgatcatcctgcctctggcctttggcaagagacagggcagagaattcatctggaacgacctgctgtccctggaaaccggcagcctgaagctggccaacggaagagtgatcgagaagacactgtacaacagaagaacccggcaggatgagcctgccctgttcgtggccctgaccttcgagcggcgggaggtcctggactcctccaatatcaaaccaatgaacctgatcggcgtggcaagaggcgaaaacatccccgccgtgatcgccctgaccgaccccgagggctgcccactgagccggtttaaggatagcctgggaaacccaacccacatcctgagaatcggcgagagctataaggagaagcagcggaccatccaggccaagaaggaggtggagcagcggagagccggcggctacagccggaagtacgccagcaaagccaagaatctggcagacgatatggtgagaaacaccgctagagatctgctgtactacgccgtgacccaggatgccatgctgatcttcgccaacctgagccggggcttcggccggcagggcaagcggaccttcatggccgagagacagtacacacggatggaggactggctgaccgccaagctggcctacgagggcctgagcaagacctacctgtccaagacactggcccagtacacctccaagacatgcagcaactgtgggtttaccatcaccagcgccgactacgacagggtgctggagaagctgaagaagacagcaacaggctggatgaccacaattaacggcaaggagctgaaggtggagggccagattacctactacaacagatacaagagacagaacgtagtcaaggacctgtccgtcgagctggatagactgagcgaagaatctgtgaacaacgacatctcctcctggacaaagggcagaagcggagaagctctgagcctcctgaagaaaagattctcccatagacccgtgcaggagaagttcgtgtgcctgaactgcggcttcgagacacacgcagccgagcaagccgccctgaacatcgccagatcctggctgttcctgcggagccaggagtacaagaaataccagacaaacaagacaaccggcaacaccgataagagagccttcgtcgagacctggcagtccttttaccggaagaagcttaaggaggtgtggaaacctgccgtgcggtctggcggatctggcggaggctccaccagccccaagaaaaagagaaaagtctaagctgccttctgcggggcttgccttctggccatgcccttcttctctcccttgcacctgtacctcttggtctttgaataaagcctgagtaggaaggctagcaaaaaaaaaaaaaaaaaaaaaaaaaaaaaaaaaaaaaaaaaaaaaaaaaaaaaaaaaaaaaaaaaaaaaaaaaaaaaaaagcccagccggctccccaacctctaccgaggagggcacctctgagtccgccacccccgagagcggccctggcacctccaccgagcccagcgagggcagcgcacccggcagccctgccggcagccccacctccacagaggagggaaccagcaccgagcccagcgaaggcagcgccccaggcaccagcaccgagcctagtgagcaggagattaaacggatcaacaagatcagaagaagacttgtgaaagacagcaacaccaagaaggccggcaagacaggccccatgaaaaccctgctggttagagtgatgacacccgatctgagagagcggctggaaaacctgagaaagaagcctgaaaatatcccccagcccatcagcaatacatctagagccaacctgaataagctgctgaccgattacaccgaaatgaagaaggcgatcctgcatgtgtactgggaagagttccagaaggaccctgtgggcctgatgagccgggtggcccagcctgccagcaagaagatcgatcagaacaagctgaaacctgagatggacgagaagggcaacctgaccaccgccggctttgcctgctctcagtgtggccagcccctgttcgtgtacaagctggagcaggtgtctgagaagggcaaggcttacaccaactacttcggacggtgcaatgtggccgagcacgaaaagctgatcctgctggcccagctgaagcccgagaaggatagcgacgaagccgtgacatatagcctgggaaagtttgggcagagggccctggatttctacagcattcatgtgaccaaggagtccacccaccccgtgaagcccctggcccagatcgccggaaacagatacgcctccggacctgtgggaaaggccctgagcgacgcatgtatgggcacaatcgcctccttcctgtctaagtaccaggacatcatcatcgaacaccagaaggtggtgaagggcaaccagaagagactggagagcctgcgggagctggccggcaaggaaaacctggaataccctagcgtgaccctgccacctcagcctcacaccaaggagggcgttgatgcctacaacgaagtgatcgcccgggtgcgaatgtgggtgaacctgaacctgtggcagaagctgaagctaagcagagatgatgccaagcctctgctgagactgaagggattcccttcctttcctctggtcgagagacaggccaacgaagtggactggtgggacatggtgtgtaacgtgaagaagctgatcaacgagaaaaaggaggatggcaaggtgttttggcagaatctggctggctacaagagacaggaagccctgagaccatacctgagcagcgaggaagatcggaagaagggaaagaaattcgctcggtaccagctgggcgacctgctgctgcacctggaaaagaagcacggcgaggactggggaaaggtgtacgacgaggcctgggagcggattgacaagaaagtggaaggcctgagcaagcacatcaagctggaagaggaacggagaagcgaggacgcccagagcaaggccgccctgaccgactggctgcgggctaaggccagcttcgtgatcgagggcctgaaggaggccgacaaggacgagttctgcagatgcgagctgaagctgcagaagtggtacggggacctgcggggaaagcccttcgccatcgaagccgagaacagcatcctggacatcagcggcttcagcaagcagtacaactgtgccttcatctggcagaaggacggcgtgaagaagctgaacctgtacctgatcatcaactacttcaagggcggcaagctgcggttcaagaagatcaaacctgaagccttcgaagccaacagattctacaccgtgatcaacaaaaagagcggcgagatcgtgcccatggaggtgaacttcaacttcgacgaccccaacctgatcatcctgcctctggcctttggcaagagacagggcagagaattcatctggaacgacctgctgtccctggaaaccggcagcctgaagctggccaacggaagagtgatcgagaagacactgtacaacagaagaacccggcaggatgagcctgccctgttcgtggccctgaccttcgagcggcgggaggtcctggactcctccaatatcaaaccaatgaacctgatcggcgtggcaagaggcgaaaacatccccgccgtgatcgccctgaccgaccccgagggctgcccactgagccggtttaaggatagcctgggaaacccaacccacatcctgagaatcggcgagagctataaggagaagcagcggaccatccaggccaagaaggaggtggagcagcggagagccggcggctacagccggaagtacgccagcaaagccaagaatctggcagacgatatggtgagaaacaccgctagagatctgctgtactacgccgtgacccaggatgccatgctgatcttcgccaacctgagccggggcttcggccggcagggcaagcggaccttcatggccgagagacagtacacacggatggaggactggctgaccgccaagctggcctacgagggcctgagcaagacctacctgtccaagacactggcccagtacacctccaagacatgcagcaactgtgggtttaccatcaccagcgccgactacgacagggtgctggagaagctgaagaagacagcaacaggctggatgaccacaattaacggcaaggagctgaaggtggagggccagattacctactacaacagatacaagagacagaacgtagtcaaggacctgtccgtcgagctggatagactgagcgaagaatctgtgaacaacgacatctcctcctggacaaagggcagaagcggagaagctctgagcctcctgaagaaaagattctcccatagacccgtgcaggagaagttcgtgtgcctgaactgcggcttcgagacacacgcagccgagcaagccgccctgaacatcgccagatcctggctgttcctgcggagccaggagtacaagaaataccagacaaacaagacaaccggcaacaccgataagagagccttcgtcgagacctggcagtccttttaccggaagaagcttaaggaggtgtggaaacctgccgtgcggtctggcggatctggcggaggctccaccagccccaagaaaaagagaaaagtctaagctgccttctgcggggcttgccttctggccatgcccttcttctctcccttgcacctgtacctcttggtctttgaataaagcctgagtaggaaggctagcaaaaaaaaaaaaaaaaaaaaaaaaaaaaaaaaaaaaaaaaaaaaaaaaaaaaaaaaaaaaaaaaaaaaaaaaaaaaaaaa

SEQ ID NO: 9942 - RNA, 8787 nt, synthetic construct
  source 1..8787: mol_type = other RNA
aggaaataagagagaaaagaagagtaagaagaaatataagagccaccatggcccctaagaagaagcgtaaagtgagccggatgaaccacgaccaggagttcgacccccctaaggtgtaccctcccgtccccgccgagaagagaaagcccatccgggtcctgagcctgttcgatggcatcgccaccggtctgctggtgctgaaggacctgggcatccaggtggataggtacattgcctccgaggtgtgcgaggactccatcaccgtgggaatggtgcgtcatcagggcaagatcatgtacgtgggcgacgtgcggagcgtgacacagaagcatatccaggagtggggccctttcgacctggtgatcggcggcagcccttgcaatgacctgagcatcgtgaacccagcccggaagggcctgtacgagggaaccggcagactgttcttcgagttttacagactgctgcacgacgcccggcctaaggaaggcgacgaccggcccttcttttggctgttcgagaatgtggtggccatgggagtcagcgacaagcgggatattagccggttcctggagagcaaccccgtgatgatcgatgccaaggaagtgagcgccgcccaccgggccagatacttctggggcaatctgcctggcatgaacagacccctggccagcaccgtgaacgacaagctggagctgcaggagtgcctggagcacggccggatcgccaagttcagcaaggtgagaaccatcaccacccgaagcaacagcatcaaacaaggcaaggaccagcactttcctgtgttcatgaacgagaaggaggacatcctgtggtgtaccgagatggagagagtgttcgggttcccagtccactacacagatgtcagcaacatgtctagactggccagacagagactgctgggaagaagctggtccgtccctgtgatcagacacctgttcgcccctctgaaggagtacttcgcctgcgtgagcagcggcaacagcaacgccaacagccggggccccagcttctctagcggcctggtgccactgtccctgagagggagccacatgggccccatggagatctacaaaaccgtgagcgcctggaagcggcagcctgtgcgcgtgctgagcctgtttcggaatatcgataaagtcctgaaaagcctgggattcctggagagcggctctggctccggcggtggcaccctgaagtacgtggaggatgtgacaaacgtggtcagacgggatgtggagaagtggggccccttcgatctggtgtacggcagcacccaacccctgggcagctcttgtgaccggtgccctggctggtacatgtttcagttccaccggatcctgcagtacgccctgccgagacaggagtcccagcggccattcttttggattttcatggacaacttgctgctgaccgaggatgaccaggaaactaccactcggttcctgcagaccgaagccgtgaccctgcaggacgtgagaggccgggactaccagaacgccatgcgggtgtggtccaacatccctggactgaaaagcaagcacgcacctctgacccctaaagaagaggagtacctgcaggcccaggtgcggagcagaagcaagctggacgcccctaaggtggatctgctggtgaagaattgcctcctgcccctgagagagtacttcaagtatttcagccagaatagtctgcccctgggaggcagcggcggcggcgtgcaggagagcgtgaccttcaaggacgtggccgtgctgttcacccaggacgagtgggcccagctgagccccgcccagagggccctgtacagggacgtgatgctggagaactacagcaacctggtgagcctgggcctgctgggccccaagcccgacgtgttcagccagctgggcaagggcgaggagtggatgcccgaggacagcctgggcggcttctgcctggactggatgaccacccccgtgggcggcccaagcagcggcgcccctcctcccagcggcggcaggcggcccaagcagcggcgcccctcctcccagcggcggcagcccagccggctccccaacctctaccgaggagggcacctctgagtccgccacccccgagagcggccctggcacctccaccgagcccagcgagggcagcgcacccggcagccctgccggcagccccacctccacagaggagggaaccagcaccgagcccagcgaaggcagcgccccaggcaccagcaccgagcctagtgagcaggagattaaacggatcaacaagatcagaagaagacttgtgaaagacagcaacaccaagaaggccggcaagacaggccccatgaaaaccctgctggttagagtgatgacacccgatctgagagagcggctggaaaacctgagaaagaagcctgaaaatatcccccagcccatcagcaatacatctagagccaacctgaataagctgctgaccgattacaccgaaatgaagaaggcgatcctgcatgtgtactgggaagagttccagaaggaccctgtgggcctgatgagccgggtggcccagcctgccagcaagaagatcgatcagaacaagctgaaacctgagatggacgagaagggcaacctgaccaccgccggctttgcctgctctcagtgtggccagcccctgttcgtgtacaagctggagcaggtgtctgagaagggcaaggcttacaccaactacttcggacggtgcaatgtggccgagcacgaaaagctgatcctgctggcccagctgaagcccgagaaggatagcgacgaagccgtgacatatagcctgggaaagtttgggcagagggccctggatttctacagcattcatgtgaccaaggagtccacccaccccgtgaagcccctggcccagatcgccggaaacagatacgcctccggacctgtgggaaaggccctgagcgacgcatgtatgggcacaatcgcctccttcctgtctaagtaccaggacatcatcatcgaacaccagaaggtggtgaagggcaaccagaagagactggagagcctgcgggagctggccggcaaggaaaacctggaataccctagcgtgaccctgccacctcagcctcacaccaaggagggcgttgatgcctacaacgaagtgatcgcccgggtgcgaatgtgggtgaacctgaacctgtggcagaagctgaagctaagcagagatgatgccaagcctctgctgagactgaagggattcccttcctttcctctggtcgagagacaggccaacgaagtggactggtgggacatggtgtgtaacgtgaagaagctgatcaacgagaaaaaggaggatggcaaggtgttttggcagaatctggctggctacaagagacaggaagccctgagaccatacctgagcagcgaggaagatcggaagaagggaaagaaattcgctcggtaccagctgggcgacctgctgctgcacctggaaaagaagcacggcgaggactggggaaaggtgtacgacgaggcctgggagcggattgacaagaaagtggaaggcctgagcaagcacatcaagctggaagaggaacggagaagcgaggacgcccagagcaaggccgccctgaccgactggctgcgggctaaggccagcttcgtgatcgagggcctgaaggaggccgacaaggacgagttctgcagatgcgagctgaagctgcagaagtggtacggggacctgcggggaaagcccttcgccatcgaagccgagaacagcatcctggacatcagcggcttcagcaagcagtacaactgtgccttcatctggcagaaggacggcgtgaagaagctgaacctgtacctgatcatcaactacttcaagggcggcaagctgcggttcaagaagatcaaacctgaagccttcgaagccaacagattctacaccgtgatcaacaaaaagagcggcgagatcgtgcccatggaggtgaacttcaacttcgacgaccccaacctgatcatcctgcctctggcctttggcaagagacagggcagagaattcatctggaacgacctgctgtccctggaaaccggcagcctgaagctggccaacggaagagtgatcgagaagacactgtacaacagaagaacccggcaggatgagcctgccctgttcgtggccctgaccttcgagcggcgggaggtcctggactcctccaatatcaaaccaatgaacctgatcggcgtggcaagaggcgaaaacatccccgccgtgatcgccctgaccgaccccgagggctgcccactgagccggtttaaggatagcctgggaaacccaacccacatcctgagaatcggcgagagctataaggagaagcagcggaccatccaggccaagaaggaggtggagcagcggagagccggcggctacagccggaagtacgccagcaaagccaagaatctggcagacgatatggtgagaaacaccgctagagatctgctgtactacgccgtgacccaggatgccatgctgatcttcgccaacctgagccggggcttcggccggcagggcaagcggaccttcatggccgagagacagtacacacggatggaggactggctgaccgccaagctggcctacgagggcctgagcaagacctacctgtccaagacactggcccagtacacctccaagacatgcagcaactgtgggtttaccatcaccagcgccgactacgacagggtgctggagaagctgaagaagacagcaacaggctggatgaccacaattaacggcaaggagctgaaggtggagggccagattacctactacaacagatacaagagacagaacgtagtcaaggacctgtccgtcgagctggatagactgagcgaagaatctgtgaacaacgacatctcctcctggacaaagggcagaagcggagaagctctgagcctcctgaagaaaagattctcccatagacccgtgcaggagaagttcgtgtgcctgaactgcggcttcgagacacacgcagccgagcaagccgccctgaacatcgccagatcctggctgttcctgcggagccaggagtacaagaaataccagacaaacaagacaaccggcaacaccgataagagagccttcgtcgagacctggcagtccttttaccggaagaagcttaaggaggtgtggaaacctgccgtgcggtctggcggatctggcggaggctccaccagccccaagaaaaagagaaaagtctaagctgccttctgcggggcttgccttctggccatgcccttcttctctcccttgcacctgtacctcttggtctttgaataaagcctgagtaggaaggctagcaaaaaaaaaaaaaaaaaaaaaaaaaaaaaaaaaaaaaaaaaaaaaaaaaaaaaaaaaaaaaaaaaaaaaaaaaaaaaaaagcccagccggctccccaacctctaccgaggagggcacctctgagtccgccacccccgagagcggccctggcacctccaccgagcccagcgagggcagcgcacccggcagccctgccggcagccccacctccacagaggagggaaccagcaccgagcccagcgaaggcagcgccccaggcaccagcaccgagcctagtgagcaggagattaaacggatcaacaagatcagaagaagacttgtgaaagacagcaacaccaagaaggccggcaagacaggccccatgaaaaccctgctggttagagtgatgacacccgatctgagagagcggctggaaaacctgagaaagaagcctgaaaatatcccccagcccatcagcaatacatctagagccaacctgaataagctgctgaccgattacaccgaaatgaagaaggcgatcctgcatgtgtactgggaagagttccagaaggaccctgtgggcctgatgagccgggtggcccagcctgccagcaagaagatcgatcagaacaagctgaaacctgagatggacgagaagggcaacctgaccaccgccggctttgcctgctctcagtgtggccagcccctgttcgtgtacaagctggagcaggtgtctgagaagggcaaggcttacaccaactacttcggacggtgcaatgtggccgagcacgaaaagctgatcctgctggcccagctgaagcccgagaaggatagcgacgaagccgtgacatatagcctgggaaagtttgggcagagggccctggatttctacagcattcatgtgaccaaggagtccacccaccccgtgaagcccctggcccagatcgccggaaacagatacgcctccggacctgtgggaaaggccctgagcgacgcatgtatgggcacaatcgcctccttcctgtctaagtaccaggacatcatcatcgaacaccagaaggtggtgaagggcaaccagaagagactggagagcctgcgggagctggccggcaaggaaaacctggaataccctagcgtgaccctgccacctcagcctcacaccaaggagggcgttgatgcctacaacgaagtgatcgcccgggtgcgaatgtgggtgaacctgaacctgtggcagaagctgaagctaagcagagatgatgccaagcctctgctgagactgaagggattcccttcctttcctctggtcgagagacaggccaacgaagtggactggtgggacatggtgtgtaacgtgaagaagctgatcaacgagaaaaaggaggatggcaaggtgttttggcagaatctggctggctacaagagacaggaagccctgagaccatacctgagcagcgaggaagatcggaagaagggaaagaaattcgctcggtaccagctgggcgacctgctgctgcacctggaaaagaagcacggcgaggactggggaaaggtgtacgacgaggcctgggagcggattgacaagaaagtggaaggcctgagcaagcacatcaagctggaagaggaacggagaagcgaggacgcccagagcaaggccgccctgaccgactggctgcgggctaaggccagcttcgtgatcgagggcctgaaggaggccgacaaggacgagttctgcagatgcgagctgaagctgcagaagtggtacggggacctgcggggaaagcccttcgccatcgaagccgagaacagcatcctggacatcagcggcttcagcaagcagtacaactgtgccttcatctggcagaaggacggcgtgaagaagctgaacctgtacctgatcatcaactacttcaagggcggcaagctgcggttcaagaagatcaaacctgaagccttcgaagccaacagattctacaccgtgatcaacaaaaagagcggcgagatcgtgcccatggaggtgaacttcaacttcgacgaccccaacctgatcatcctgcctctggcctttggcaagagacagggcagagaattcatctggaacgacctgctgtccctggaaaccggcagcctgaagctggccaacggaagagtgatcgagaagacactgtacaacagaagaacccggcaggatgagcctgccctgttcgtggccctgaccttcgagcggcgggaggtcctggactcctccaatatcaaaccaatgaacctgatcggcgtggcaagaggcgaaaacatccccgccgtgatcgccctgaccgaccccgagggctgcccactgagccggtttaaggatagcctgggaaacccaacccacatcctgagaatcggcgagagctataaggagaagcagcggaccatccaggccaagaaggaggtggagcagcggagagccggcggctacagccggaagtacgccagcaaagccaagaatctggcagacgatatggtgagaaacaccgctagagatctgctgtactacgccgtgacccaggatgccatgctgatcttcgccaacctgagccggggcttcggccggcagggcaagcggaccttcatggccgagagacagtacacacggatggaggactggctgaccgccaagctggcctacgagggcctgagcaagacctacctgtccaagacactggcccagtacacctccaagacatgcagcaactgtgggtttaccatcaccagcgccgactacgacagggtgctggagaagctgaagaagacagcaacaggctggatgaccacaattaacggcaaggagctgaaggtggagggccagattacctactacaacagatacaagagacagaacgtagtcaaggacctgtccgtcgagctggatagactgagcgaagaatctgtgaacaacgacatctcctcctggacaaagggcagaagcggagaagctctgagcctcctgaagaaaagattctcccatagacccgtgcaggagaagttcgtgtgcctgaactgcggcttcgagacacacgcagccgagcaagccgccctgaacatcgccagatcctggctgttcctgcggagccaggagtacaagaaataccagacaaacaagacaaccggcaacaccgataagagagccttcgtcgagacctggcagtccttttaccggaagaagcttaaggaggtgtggaaacctgccgtgcggtctggcggatctggcggaggctccaccagccccaagaaaaagagaaaagtctaagctgccttctgcggggcttgccttctggccatgcccttcttctctcccttgcacctgtacctcttggtctttgaataaagcctgagtaggaaggctagcaaaaaaaaaaaaaaaaaaaaaaaaaaaaaaaaaaaaaaaaaaaaaaaaaaaaaaaaaaaaaaaaaaaaaaaaaaaaaaaa

SEQ ID NO: 9943 - RNA, 8787 nt, synthetic construct
  source 1..8787: mol_type = other RNA
aggaaataagagagaaaagaagagtaagaagaaatataagagccaccatggcccctaagaagaagcgtaaagtgagccggatgaaccacgaccaggagttcgacccccctaaggtgtaccctcccgtccccgccgagaagagaaagcccatccgggtcctgagcctgttcgatggcatcgccaccggtctgctggtgctgaaggacctgggcatccaggtggataggtacattgcctccgaggtgtgcgaggactccatcaccgtgggaatggtgcgtcatcagggcaagatcatgtacgtgggcgacgtgcggagcgtgacacagaagcatatccaggagtggggccctttcgacctggtgatcggcggcagcccttgcaatgacctgagcatcgtgaacccagcccggaagggcctgtacgagggaaccggcagactgttcttcgagttttacagactgctgcacgacgcccggcctaaggaaggcgacgaccggcccttcttttggctgttcgagaatgtggtggccatgggagtcagcgacaagcgggatattagccggttcctggagagcaaccccgtgatgatcgatgccaaggaagtgagcgccgcccaccgggccagatacttctggggcaatctgcctggcatgaacagacccctggccagcaccgtgaacgacaagctggagctgcaggagtgcctggagcacggccggatcgccaagttcagcaaggtgagaaccatcaccacccgaagcaacagcatcaaacaaggcaaggaccagcactttcctgtgttcatgaacgagaaggaggacatcctgtggtgtaccgagatggagagagtgttcgggttcccagtccactacacagatgtcagcaacatgtctagactggccagacagagactgctgggaagaagctggtccgtccctgtgatcagacacctgttcgcccctctgaaggagtacttcgcctgcgtgagcagcggcaacagcaacgccaacagccggggccccagcttctctagcggcctggtgccactgtccctgagagggagccacatgggccccatggagatctacaaaaccgtgagcgcctggaagcggcagcctgtgcgcgtgctgagcctgtttcggaatatcgataaagtcctgaaaagcctgggattcctggagagcggctctggctccggcggtggcaccctgaagtacgtggaggatgtgacaaacgtggtcagacgggatgtggagaagtggggccccttcgatctggtgtacggcagcacccaacccctgggcagctcttgtgaccggtgccctggctggtacatgtttcagttccaccggatcctgcagtacgccctgccgagacaggagtcccagcggccattcttttggattttcatggacaacttgctgctgaccgaggatgaccaggaaactaccactcggttcctgcagaccgaagccgtgaccctgcaggacgtgagaggccgggactaccagaacgccatgcgggtgtggtccaacatccctggactgaaaagcaagcacgcacctctgacccctaaagaagaggagtacctgcaggcccaggtgcggagcagaagcaagctggacgcccctaaggtggatctgctggtgaagaattgcctcctgcccctgagagagtacttcaagtatttcagccagaatagtctgcccctgggaggcagcggcggcggcttccagggcagcgtgagcttcgaggacgtgaccgtgggcttcagccaggaggagtggcagcacctggaccccagccagagggccctgtacagggacgtgatgctggagaactacagcaacctggtgagcgtgggctactgcgtgcacaagcccgaggtgatcttcaggctggagcagggcgaggagccctggaggctggaggaggagttccccagccagagcttccccgaggtgtggaccgccggcggcccaagcagcggcgcccctcctcccagcggcggcaggcggcccaagcagcggcgcccctcctcccagcggcggcagcccagccggctccccaacctctaccgaggagggcacctctgagtccgccacccccgagagcggccctggcacctccaccgagcccagcgagggcagcgcacccggcagccctgccggcagccccacctccacagaggagggaaccagcaccgagcccagcgaaggcagcgccccaggcaccagcaccgagcctagtgagcaggagattaaacggatcaacaagatcagaagaagacttgtgaaagacagcaacaccaagaaggccggcaagacaggccccatgaaaaccctgctggttagagtgatgacacccgatctgagagagcggctggaaaacctgagaaagaagcctgaaaatatcccccagcccatcagcaatacatctagagccaacctgaataagctgctgaccgattacaccgaaatgaagaaggcgatcctgcatgtgtactgggaagagttccagaaggaccctgtgggcctgatgagccgggtggcccagcctgccagcaagaagatcgatcagaacaagctgaaacctgagatggacgagaagggcaacctgaccaccgccggctttgcctgctctcagtgtggccagcccctgttcgtgtacaagctggagcaggtgtctgagaagggcaaggcttacaccaactacttcggacggtgcaatgtggccgagcacgaaaagctgatcctgctggcccagctgaagcccgagaaggatagcgacgaagccgtgacatatagcctgggaaagtttgggcagagggccctggatttctacagcattcatgtgaccaaggagtccacccaccccgtgaagcccctggcccagatcgccggaaacagatacgcctccggacctgtgggaaaggccctgagcgacgcatgtatgggcacaatcgcctccttcctgtctaagtaccaggacatcatcatcgaacaccagaaggtggtgaagggcaaccagaagagactggagagcctgcgggagctggccggcaaggaaaacctggaataccctagcgtgaccctgccacctcagcctcacaccaaggagggcgttgatgcctacaacgaagtgatcgcccgggtgcgaatgtgggtgaacctgaacctgtggcagaagctgaagctaagcagagatgatgccaagcctctgctgagactgaagggattcccttcctttcctctggtcgagagacaggccaacgaagtggactggtgggacatggtgtgtaacgtgaagaagctgatcaacgagaaaaaggaggatggcaaggtgttttggcagaatctggctggctacaagagacaggaagccctgagaccatacctgagcagcgaggaagatcggaagaagggaaagaaattcgctcggtaccagctgggcgacctgctgctgcacctggaaaagaagcacggcgaggactggggaaaggtgtacgacgaggcctgggagcggattgacaagaaagtggaaggcctgagcaagcacatcaagctggaagaggaacggagaagcgaggacgcccagagcaaggccgccctgaccgactggctgcgggctaaggccagcttcgtgatcgagggcctgaaggaggccgacaaggacgagttctgcagatgcgagctgaagctgcagaagtggtacggggacctgcggggaaagcccttcgccatcgaagccgagaacagcatcctggacatcagcggcttcagcaagcagtacaactgtgccttcatctggcagaaggacggcgtgaagaagctgaacctgtacctgatcatcaactacttcaagggcggcaagctgcggttcaagaagatcaaacctgaagccttcgaagccaacagattctacaccgtgatcaacaaaaagagcggcgagatcgtgcccatggaggtgaacttcaacttcgacgaccccaacctgatcatcctgcctctggcctttggcaagagacagggcagagaattcatctggaacgacctgctgtccctggaaaccggcagcctgaagctggccaacggaagagtgatcgagaagacactgtacaacagaagaacccggcaggatgagcctgccctgttcgtggccctgaccttcgagcggcgggaggtcctggactcctccaatatcaaaccaatgaacctgatcggcgtggcaagaggcgaaaacatccccgccgtgatcgccctgaccgaccccgagggctgcccactgagccggtttaaggatagcctgggaaacccaacccacatcctgagaatcggcgagagctataaggagaagcagcggaccatccaggccaagaaggaggtggagcagcggagagccggcggctacagccggaagtacgccagcaaagccaagaatctggcagacgatatggtgagaaacaccgctagagatctgctgtactacgccgtgacccaggatgccatgctgatcttcgccaacctgagccggggcttcggccggcagggcaagcggaccttcatggccgagagacagtacacacggatggaggactggctgaccgccaagctggcctacgagggcctgagcaagacctacctgtccaagacactggcccagtacacctccaagacatgcagcaactgtgggtttaccatcaccagcgccgactacgacagggtgctggagaagctgaagaagacagcaacaggctggatgaccacaattaacggcaaggagctgaaggtggagggccagattacctactacaacagatacaagagacagaacgtagtcaaggacctgtccgtcgagctggatagactgagcgaagaatctgtgaacaacgacatctcctcctggacaaagggcagaagcggagaagctctgagcctcctgaagaaaagattctcccatagacccgtgcaggagaagttcgtgtgcctgaactgcggcttcgagacacacgcagccgagcaagccgccctgaacatcgccagatcctggctgttcctgcggagccaggagtacaagaaataccagacaaacaagacaaccggcaacaccgataagagagccttcgtcgagacctggcagtccttttaccggaagaagcttaaggaggtgtggaaacctgccgtgcggtctggcggatctggcggaggctccaccagccccaagaaaaagagaaaagtctaagctgccttctgcggggcttgccttctggccatgcccttcttctctcccttgcacctgtacctcttggtctttgaataaagcctgagtaggaaggctagcaaaaaaaaaaaaaaaaaaaaaaaaaaaaaaaaaaaaaaaaaaaaaaaaaaaaaaaaaaaaaaaaaaaaaaaaaaaaaaaagcccagccggctccccaacctctaccgaggagggcacctctgagtccgccacccccgagagcggccctggcacctccaccgagcccagcgagggcagcgcacccggcagccctgccggcagccccacctccacagaggagggaaccagcaccgagcccagcgaaggcagcgccccaggcaccagcaccgagcctagtgagcaggagattaaacggatcaacaagatcagaagaagacttgtgaaagacagcaacaccaagaaggccggcaagacaggccccatgaaaaccctgctggttagagtgatgacacccgatctgagagagcggctggaaaacctgagaaagaagcctgaaaatatcccccagcccatcagcaatacatctagagccaacctgaataagctgctgaccgattacaccgaaatgaagaaggcgatcctgcatgtgtactgggaagagttccagaaggaccctgtgggcctgatgagccgggtggcccagcctgccagcaagaagatcgatcagaacaagctgaaacctgagatggacgagaagggcaacctgaccaccgccggctttgcctgctctcagtgtggccagcccctgttcgtgtacaagctggagcaggtgtctgagaagggcaaggcttacaccaactacttcggacggtgcaatgtggccgagcacgaaaagctgatcctgctggcccagctgaagcccgagaaggatagcgacgaagccgtgacatatagcctgggaaagtttgggcagagggccctggatttctacagcattcatgtgaccaaggagtccacccaccccgtgaagcccctggcccagatcgccggaaacagatacgcctccggacctgtgggaaaggccctgagcgacgcatgtatgggcacaatcgcctccttcctgtctaagtaccaggacatcatcatcgaacaccagaaggtggtgaagggcaaccagaagagactggagagcctgcgggagctggccggcaaggaaaacctggaataccctagcgtgaccctgccacctcagcctcacaccaaggagggcgttgatgcctacaacgaagtgatcgcccgggtgcgaatgtgggtgaacctgaacctgtggcagaagctgaagctaagcagagatgatgccaagcctctgctgagactgaagggattcccttcctttcctctggtcgagagacaggccaacgaagtggactggtgggacatggtgtgtaacgtgaagaagctgatcaacgagaaaaaggaggatggcaaggtgttttggcagaatctggctggctacaagagacaggaagccctgagaccatacctgagcagcgaggaagatcggaagaagggaaagaaattcgctcggtaccagctgggcgacctgctgctgcacctggaaaagaagcacggcgaggactggggaaaggtgtacgacgaggcctgggagcggattgacaagaaagtggaaggcctgagcaagcacatcaagctggaagaggaacggagaagcgaggacgcccagagcaaggccgccctgaccgactggctgcgggctaaggccagcttcgtgatcgagggcctgaaggaggccgacaaggacgagttctgcagatgcgagctgaagctgcagaagtggtacggggacctgcggggaaagcccttcgccatcgaagccgagaacagcatcctggacatcagcggcttcagcaagcagtacaactgtgccttcatctggcagaaggacggcgtgaagaagctgaacctgtacctgatcatcaactacttcaagggcggcaagctgcggttcaagaagatcaaacctgaagccttcgaagccaacagattctacaccgtgatcaacaaaaagagcggcgagatcgtgcccatggaggtgaacttcaacttcgacgaccccaacctgatcatcctgcctctggcctttggcaagagacagggcagagaattcatctggaacgacctgctgtccctggaaaccggcagcctgaagctggccaacggaagagtgatcgagaagacactgtacaacagaagaacccggcaggatgagcctgccctgttcgtggccctgaccttcgagcggcgggaggtcctggactcctccaatatcaaaccaatgaacctgatcggcgtggcaagaggcgaaaacatccccgccgtgatcgccctgaccgaccccgagggctgcccactgagccggtttaaggatagcctgggaaacccaacccacatcctgagaatcggcgagagctataaggagaagcagcggaccatccaggccaagaaggaggtggagcagcggagagccggcggctacagccggaagtacgccagcaaagccaagaatctggcagacgatatggtgagaaacaccgctagagatctgctgtactacgccgtgacccaggatgccatgctgatcttcgccaacctgagccggggcttcggccggcagggcaagcggaccttcatggccgagagacagtacacacggatggaggactggctgaccgccaagctggcctacgagggcctgagcaagacctacctgtccaagacactggcccagtacacctccaagacatgcagcaactgtgggtttaccatcaccagcgccgactacgacagggtgctggagaagctgaagaagacagcaacaggctggatgaccacaattaacggcaaggagctgaaggtggagggccagattacctactacaacagatacaagagacagaacgtagtcaaggacctgtccgtcgagctggatagactgagcgaagaatctgtgaacaacgacatctcctcctggacaaagggcagaagcggagaagctctgagcctcctgaagaaaagattctcccatagacccgtgcaggagaagttcgtgtgcctgaactgcggcttcgagacacacgcagccgagcaagccgccctgaacatcgccagatcctggctgttcctgcggagccaggagtacaagaaataccagacaaacaagacaaccggcaacaccgataagagagccttcgtcgagacctggcagtccttttaccggaagaagcttaaggaggtgtggaaacctgccgtgcggtctggcggatctggcggaggctccaccagccccaagaaaaagagaaaagtctaagctgccttctgcggggcttgccttctggccatgcccttcttctctcccttgcacctgtacctcttggtctttgaataaagcctgagtaggaaggctagcaaaaaaaaaaaaaaaaaaaaaaaaaaaaaaaaaaaaaaaaaaaaaaaaaaaaaaaaaaaaaaaaaaaaaaaaaaaaaaaa

SEQ ID NO: 9944 - RNA, 8787 nt, synthetic construct
  source 1..8787: mol_type = other RNA
aggaaataagagagaaaagaagagtaagaagaaatataagagccaccatggcccctaagaagaagcgtaaagtgagccggatgaaccacgaccaggagttcgacccccctaaggtgtaccctcccgtccccgccgagaagagaaagcccatccgggtcctgagcctgttcgatggcatcgccaccggtctgctggtgctgaaggacctgggcatccaggtggataggtacattgcctccgaggtgtgcgaggactccatcaccgtgggaatggtgcgtcatcagggcaagatcatgtacgtgggcgacgtgcggagcgtgacacagaagcatatccaggagtggggccctttcgacctggtgatcggcggcagcccttgcaatgacctgagcatcgtgaacccagcccggaagggcctgtacgagggaaccggcagactgttcttcgagttttacagactgctgcacgacgcccggcctaaggaaggcgacgaccggcccttcttttggctgttcgagaatgtggtggccatgggagtcagcgacaagcgggatattagccggttcctggagagcaaccccgtgatgatcgatgccaaggaagtgagcgccgcccaccgggccagatacttctggggcaatctgcctggcatgaacagacccctggccagcaccgtgaacgacaagctggagctgcaggagtgcctggagcacggccggatcgccaagttcagcaaggtgagaaccatcaccacccgaagcaacagcatcaaacaaggcaaggaccagcactttcctgtgttcatgaacgagaaggaggacatcctgtggtgtaccgagatggagagagtgttcgggttcccagtccactacacagatgtcagcaacatgtctagactggccagacagagactgctgggaagaagctggtccgtccctgtgatcagacacctgttcgcccctctgaaggagtacttcgcctgcgtgagcagcggcaacagcaacgccaacagccggggccccagcttctctagcggcctggtgccactgtccctgagagggagccacatgggccccatggagatctacaaaaccgtgagcgcctggaagcggcagcctgtgcgcgtgctgagcctgtttcggaatatcgataaagtcctgaaaagcctgggattcctggagagcggctctggctccggcggtggcaccctgaagtacgtggaggatgtgacaaacgtggtcagacgggatgtggagaagtggggccccttcgatctggtgtacggcagcacccaacccctgggcagctcttgtgaccggtgccctggctggtacatgtttcagttccaccggatcctgcagtacgccctgccgagacaggagtcccagcggccattcttttggattttcatggacaacttgctgctgaccgaggatgaccaggaaactaccactcggttcctgcagaccgaagccgtgaccctgcaggacgtgagaggccgggactaccagaacgccatgcgggtgtggtccaacatccctggactgaaaagcaagcacgcacctctgacccctaaagaagaggagtacctgcaggcccaggtgcggagcagaagcaagctggacgcccctaaggtggatctgctggtgaagaattgcctcctgcccctgagagagtacttcaagtatttcagccagaatagtctgcccctgggaggcagcggcggcggcgacagcgtggccttcgaggacgtggccatcaacttcacctgcgaggagtgggccctgctgggccccagccagaagagcctgtacagggacgtgatgcaggagaccatcaggaacctggactgcatcggcatgaagtggcagaacctggacatcgaggaggacgagtacaagaaccccggcaggaacctgaggtgcttcatggtggagaggagctgcgagatcaaggacaacagccagtgcggcggcggcccaagcagcggcgcccctcctcccagcggcggcaggcggcccaagcagcggcgcccctcctcccagcggcggcagcccagccggctccccaacctctaccgaggagggcacctctgagtccgccacccccgagagcggccctggcacctccaccgagcccagcgagggcagcgcacccggcagccctgccggcagccccacctccacagaggagggaaccagcaccgagcccagcgaaggcagcgccccaggcaccagcaccgagcctagtgagcaggagattaaacggatcaacaagatcagaagaagacttgtgaaagacagcaacaccaagaaggccggcaagacaggccccatgaaaaccctgctggttagagtgatgacacccgatctgagagagcggctggaaaacctgagaaagaagcctgaaaatatcccccagcccatcagcaatacatctagagccaacctgaataagctgctgaccgattacaccgaaatgaagaaggcgatcctgcatgtgtactgggaagagttccagaaggaccctgtgggcctgatgagccgggtggcccagcctgccagcaagaagatcgatcagaacaagctgaaacctgagatggacgagaagggcaacctgaccaccgccggctttgcctgctctcagtgtggccagcccctgttcgtgtacaagctggagcaggtgtctgagaagggcaaggcttacaccaactacttcggacggtgcaatgtggccgagcacgaaaagctgatcctgctggcccagctgaagcccgagaaggatagcgacgaagccgtgacatatagcctgggaaagtttgggcagagggccctggatttctacagcattcatgtgaccaaggagtccacccaccccgtgaagcccctggcccagatcgccggaaacagatacgcctccggacctgtgggaaaggccctgagcgacgcatgtatgggcacaatcgcctccttcctgtctaagtaccaggacatcatcatcgaacaccagaaggtggtgaagggcaaccagaagagactggagagcctgcgggagctggccggcaaggaaaacctggaataccctagcgtgaccctgccacctcagcctcacaccaaggagggcgttgatgcctacaacgaagtgatcgcccgggtgcgaatgtgggtgaacctgaacctgtggcagaagctgaagctaagcagagatgatgccaagcctctgctgagactgaagggattcccttcctttcctctggtcgagagacaggccaacgaagtggactggtgggacatggtgtgtaacgtgaagaagctgatcaacgagaaaaaggaggatggcaaggtgttttggcagaatctggctggctacaagagacaggaagccctgagaccatacctgagcagcgaggaagatcggaagaagggaaagaaattcgctcggtaccagctgggcgacctgctgctgcacctggaaaagaagcacggcgaggactggggaaaggtgtacgacgaggcctgggagcggattgacaagaaagtggaaggcctgagcaagcacatcaagctggaagaggaacggagaagcgaggacgcccagagcaaggccgccctgaccgactggctgcgggctaaggccagcttcgtgatcgagggcctgaaggaggccgacaaggacgagttctgcagatgcgagctgaagctgcagaagtggtacggggacctgcggggaaagcccttcgccatcgaagccgagaacagcatcctggacatcagcggcttcagcaagcagtacaactgtgccttcatctggcagaaggacggcgtgaagaagctgaacctgtacctgatcatcaactacttcaagggcggcaagctgcggttcaagaagatcaaacctgaagccttcgaagccaacagattctacaccgtgatcaacaaaaagagcggcgagatcgtgcccatggaggtgaacttcaacttcgacgaccccaacctgatcatcctgcctctggcctttggcaagagacagggcagagaattcatctggaacgacctgctgtccctggaaaccggcagcctgaagctggccaacggaagagtgatcgagaagacactgtacaacagaagaacccggcaggatgagcctgccctgttcgtggccctgaccttcgagcggcgggaggtcctggactcctccaatatcaaaccaatgaacctgatcggcgtggcaagaggcgaaaacatccccgccgtgatcgccctgaccgaccccgagggctgcccactgagccggtttaaggatagcctgggaaacccaacccacatcctgagaatcggcgagagctataaggagaagcagcggaccatccaggccaagaaggaggtggagcagcggagagccggcggctacagccggaagtacgccagcaaagccaagaatctggcagacgatatggtgagaaacaccgctagagatctgctgtactacgccgtgacccaggatgccatgctgatcttcgccaacctgagccggggcttcggccggcagggcaagcggaccttcatggccgagagacagtacacacggatggaggactggctgaccgccaagctggcctacgagggcctgagcaagacctacctgtccaagacactggcccagtacacctccaagacatgcagcaactgtgggtttaccatcaccagcgccgactacgacagggtgctggagaagctgaagaagacagcaacaggctggatgaccacaattaacggcaaggagctgaaggtggagggccagattacctactacaacagatacaagagacagaacgtagtcaaggacctgtccgtcgagctggatagactgagcgaagaatctgtgaacaacgacatctcctcctggacaaagggcagaagcggagaagctctgagcctcctgaagaaaagattctcccatagacccgtgcaggagaagttcgtgtgcctgaactgcggcttcgagacacacgcagccgagcaagccgccctgaacatcgccagatcctggctgttcctgcggagccaggagtacaagaaataccagacaaacaagacaaccggcaacaccgataagagagccttcgtcgagacctggcagtccttttaccggaagaagcttaaggaggtgtggaaacctgccgtgcggtctggcggatctggcggaggctccaccagccccaagaaaaagagaaaagtctaagctgccttctgcggggcttgccttctggccatgcccttcttctctcccttgcacctgtacctcttggtctttgaataaagcctgagtaggaaggctagcaaaaaaaaaaaaaaaaaaaaaaaaaaaaaaaaaaaaaaaaaaaaaaaaaaaaaaaaaaaaaaaaaaaaaaaaaaaaaaaagcccagccggctccccaacctctaccgaggagggcacctctgagtccgccacccccgagagcggccctggcacctccaccgagcccagcgagggcagcgcacccggcagccctgccggcagccccacctccacagaggagggaaccagcaccgagcccagcgaaggcagcgccccaggcaccagcaccgagcctagtgagcaggagattaaacggatcaacaagatcagaagaagacttgtgaaagacagcaacaccaagaaggccggcaagacaggccccatgaaaaccctgctggttagagtgatgacacccgatctgagagagcggctggaaaacctgagaaagaagcctgaaaatatcccccagcccatcagcaatacatctagagccaacctgaataagctgctgaccgattacaccgaaatgaagaaggcgatcctgcatgtgtactgggaagagttccagaaggaccctgtgggcctgatgagccgggtggcccagcctgccagcaagaagatcgatcagaacaagctgaaacctgagatggacgagaagggcaacctgaccaccgccggctttgcctgctctcagtgtggccagcccctgttcgtgtacaagctggagcaggtgtctgagaagggcaaggcttacaccaactacttcggacggtgcaatgtggccgagcacgaaaagctgatcctgctggcccagctgaagcccgagaaggatagcgacgaagccgtgacatatagcctgggaaagtttgggcagagggccctggatttctacagcattcatgtgaccaaggagtccacccaccccgtgaagcccctggcccagatcgccggaaacagatacgcctccggacctgtgggaaaggccctgagcgacgcatgtatgggcacaatcgcctccttcctgtctaagtaccaggacatcatcatcgaacaccagaaggtggtgaagggcaaccagaagagactggagagcctgcgggagctggccggcaaggaaaacctggaataccctagcgtgaccctgccacctcagcctcacaccaaggagggcgttgatgcctacaacgaagtgatcgcccgggtgcgaatgtgggtgaacctgaacctgtggcagaagctgaagctaagcagagatgatgccaagcctctgctgagactgaagggattcccttcctttcctctggtcgagagacaggccaacgaagtggactggtgggacatggtgtgtaacgtgaagaagctgatcaacgagaaaaaggaggatggcaaggtgttttggcagaatctggctggctacaagagacaggaagccctgagaccatacctgagcagcgaggaagatcggaagaagggaaagaaattcgctcggtaccagctgggcgacctgctgctgcacctggaaaagaagcacggcgaggactggggaaaggtgtacgacgaggcctgggagcggattgacaagaaagtggaaggcctgagcaagcacatcaagctggaagaggaacggagaagcgaggacgcccagagcaaggccgccctgaccgactggctgcgggctaaggccagcttcgtgatcgagggcctgaaggaggccgacaaggacgagttctgcagatgcgagctgaagctgcagaagtggtacggggacctgcggggaaagcccttcgccatcgaagccgagaacagcatcctggacatcagcggcttcagcaagcagtacaactgtgccttcatctggcagaaggacggcgtgaagaagctgaacctgtacctgatcatcaactacttcaagggcggcaagctgcggttcaagaagatcaaacctgaagccttcgaagccaacagattctacaccgtgatcaacaaaaagagcggcgagatcgtgcccatggaggtgaacttcaacttcgacgaccccaacctgatcatcctgcctctggcctttggcaagagacagggcagagaattcatctggaacgacctgctgtccctggaaaccggcagcctgaagctggccaacggaagagtgatcgagaagacactgtacaacagaagaacccggcaggatgagcctgccctgttcgtggccctgaccttcgagcggcgggaggtcctggactcctccaatatcaaaccaatgaacctgatcggcgtggcaagaggcgaaaacatccccgccgtgatcgccctgaccgaccccgagggctgcccactgagccggtttaaggatagcctgggaaacccaacccacatcctgagaatcggcgagagctataaggagaagcagcggaccatccaggccaagaaggaggtggagcagcggagagccggcggctacagccggaagtacgccagcaaagccaagaatctggcagacgatatggtgagaaacaccgctagagatctgctgtactacgccgtgacccaggatgccatgctgatcttcgccaacctgagccggggcttcggccggcagggcaagcggaccttcatggccgagagacagtacacacggatggaggactggctgaccgccaagctggcctacgagggcctgagcaagacctacctgtccaagacactggcccagtacacctccaagacatgcagcaactgtgggtttaccatcaccagcgccgactacgacagggtgctggagaagctgaagaagacagcaacaggctggatgaccacaattaacggcaaggagctgaaggtggagggccagattacctactacaacagatacaagagacagaacgtagtcaaggacctgtccgtcgagctggatagactgagcgaagaatctgtgaacaacgacatctcctcctggacaaagggcagaagcggagaagctctgagcctcctgaagaaaagattctcccatagacccgtgcaggagaagttcgtgtgcctgaactgcggcttcgagacacacgcagccgagcaagccgccctgaacatcgccagatcctggctgttcctgcggagccaggagtacaagaaataccagacaaacaagacaaccggcaacaccgataagagagccttcgtcgagacctggcagtccttttaccggaagaagcttaaggaggtgtggaaacctgccgtgcggtctggcggatctggcggaggctccaccagccccaagaaaaagagaaaagtctaagctgccttctgcggggcttgccttctggccatgcccttcttctctcccttgcacctgtacctcttggtctttgaataaagcctgagtaggaaggctagcaaaaaaaaaaaaaaaaaaaaaaaaaaaaaaaaaaaaaaaaaaaaaaaaaaaaaaaaaaaaaaaaaaaaaaaaaaaaaaaa

SEQ ID NO: 9945 - RNA, 8787 nt, synthetic construct
  source 1..8787: mol_type = other RNA
aggaaataagagagaaaagaagagtaagaagaaatataagagccaccatggcccctaagaagaagcgtaaagtgagccggatgaaccacgaccaggagttcgacccccctaaggtgtaccctcccgtccccgccgagaagagaaagcccatccgggtcctgagcctgttcgatggcatcgccaccggtctgctggtgctgaaggacctgggcatccaggtggataggtacattgcctccgaggtgtgcgaggactccatcaccgtgggaatggtgcgtcatcagggcaagatcatgtacgtgggcgacgtgcggagcgtgacacagaagcatatccaggagtggggccctttcgacctggtgatcggcggcagcccttgcaatgacctgagcatcgtgaacccagcccggaagggcctgtacgagggaaccggcagactgttcttcgagttttacagactgctgcacgacgcccggcctaaggaaggcgacgaccggcccttcttttggctgttcgagaatgtggtggccatgggagtcagcgacaagcgggatattagccggttcctggagagcaaccccgtgatgatcgatgccaaggaagtgagcgccgcccaccgggccagatacttctggggcaatctgcctggcatgaacagacccctggccagcaccgtgaacgacaagctggagctgcaggagtgcctggagcacggccggatcgccaagttcagcaaggtgagaaccatcaccacccgaagcaacagcatcaaacaaggcaaggaccagcactttcctgtgttcatgaacgagaaggaggacatcctgtggtgtaccgagatggagagagtgttcgggttcccagtccactacacagatgtcagcaacatgtctagactggccagacagagactgctgggaagaagctggtccgtccctgtgatcagacacctgttcgcccctctgaaggagtacttcgcctgcgtgagcagcggcaacagcaacgccaacagccggggccccagcttctctagcggcctggtgccactgtccctgagagggagccacatgggccccatggagatctacaaaaccgtgagcgcctggaagcggcagcctgtgcgcgtgctgagcctgtttcggaatatcgataaagtcctgaaaagcctgggattcctggagagcggctctggctccggcggtggcaccctgaagtacgtggaggatgtgacaaacgtggtcagacgggatgtggagaagtggggccccttcgatctggtgtacggcagcacccaacccctgggcagctcttgtgaccggtgccctggctggtacatgtttcagttccaccggatcctgcagtacgccctgccgagacaggagtcccagcggccattcttttggattttcatggacaacttgctgctgaccgaggatgaccaggaaactaccactcggttcctgcagaccgaagccgtgaccctgcaggacgtgagaggccgggactaccagaacgccatgcgggtgtggtccaacatccctggactgaaaagcaagcacgcacctctgacccctaaagaagaggagtacctgcaggcccaggtgcggagcagaagcaagctggacgcccctaaggtggatctgctggtgaagaattgcctcctgcccctgagagagtacttcaagtatttcagccagaatagtctgcccctgggaggcagcggcggcggccacggcagcagctacgagggcagcgtgagcttcagggacgtggccatcaacttcagcagggaggagtggaggcacctggacctgagccagaggaacctgtactgggacgtgatgctggagacctacagccacctgctgagcgtgggctaccagttccccaagcccgaggtggtgatgctggagcagggcaacgagccctgggccctgcagggcgagaggcccaggcacagctgccccggcgagggcggcccaagcagcggcgcccctcctcccagcggcggcaggcggcccaagcagcggcgcccctcctcccagcggcggcagcccagccggctccccaacctctaccgaggagggcacctctgagtccgccacccccgagagcggccctggcacctccaccgagcccagcgagggcagcgcacccggcagccctgccggcagccccacctccacagaggagggaaccagcaccgagcccagcgaaggcagcgccccaggcaccagcaccgagcctagtgagcaggagattaaacggatcaacaagatcagaagaagacttgtgaaagacagcaacaccaagaaggccggcaagacaggccccatgaaaaccctgctggttagagtgatgacacccgatctgagagagcggctggaaaacctgagaaagaagcctgaaaatatcccccagcccatcagcaatacatctagagccaacctgaataagctgctgaccgattacaccgaaatgaagaaggcgatcctgcatgtgtactgggaagagttccagaaggaccctgtgggcctgatgagccgggtggcccagcctgccagcaagaagatcgatcagaacaagctgaaacctgagatggacgagaagggcaacctgaccaccgccggctttgcctgctctcagtgtggccagcccctgttcgtgtacaagctggagcaggtgtctgagaagggcaaggcttacaccaactacttcggacggtgcaatgtggccgagcacgaaaagctgatcctgctggcccagctgaagcccgagaaggatagcgacgaagccgtgacatatagcctgggaaagtttgggcagagggccctggatttctacagcattcatgtgaccaaggagtccacccaccccgtgaagcccctggcccagatcgccggaaacagatacgcctccggacctgtgggaaaggccctgagcgacgcatgtatgggcacaatcgcctccttcctgtctaagtaccaggacatcatcatcgaacaccagaaggtggtgaagggcaaccagaagagactggagagcctgcgggagctggccggcaaggaaaacctggaataccctagcgtgaccctgccacctcagcctcacaccaaggagggcgttgatgcctacaacgaagtgatcgcccgggtgcgaatgtgggtgaacctgaacctgtggcagaagctgaagctaagcagagatgatgccaagcctctgctgagactgaagggattcccttcctttcctctggtcgagagacaggccaacgaagtggactggtgggacatggtgtgtaacgtgaagaagctgatcaacgagaaaaaggaggatggcaaggtgttttggcagaatctggctggctacaagagacaggaagccctgagaccatacctgagcagcgaggaagatcggaagaagggaaagaaattcgctcggtaccagctgggcgacctgctgctgcacctggaaaagaagcacggcgaggactggggaaaggtgtacgacgaggcctgggagcggattgacaagaaagtggaaggcctgagcaagcacatcaagctggaagaggaacggagaagcgaggacgcccagagcaaggccgccctgaccgactggctgcgggctaaggccagcttcgtgatcgagggcctgaaggaggccgacaaggacgagttctgcagatgcgagctgaagctgcagaagtggtacggggacctgcggggaaagcccttcgccatcgaagccgagaacagcatcctggacatcagcggcttcagcaagcagtacaactgtgccttcatctggcagaaggacggcgtgaagaagctgaacctgtacctgatcatcaactacttcaagggcggcaagctgcggttcaagaagatcaaacctgaagccttcgaagccaacagattctacaccgtgatcaacaaaaagagcggcgagatcgtgcccatggaggtgaacttcaacttcgacgaccccaacctgatcatcctgcctctggcctttggcaagagacagggcagagaattcatctggaacgacctgctgtccctggaaaccggcagcctgaagctggccaacggaagagtgatcgagaagacactgtacaacagaagaacccggcaggatgagcctgccctgttcgtggccctgaccttcgagcggcgggaggtcctggactcctccaatatcaaaccaatgaacctgatcggcgtggcaagaggcgaaaacatccccgccgtgatcgccctgaccgaccccgagggctgcccactgagccggtttaaggatagcctgggaaacccaacccacatcctgagaatcggcgagagctataaggagaagcagcggaccatccaggccaagaaggaggtggagcagcggagagccggcggctacagccggaagtacgccagcaaagccaagaatctggcagacgatatggtgagaaacaccgctagagatctgctgtactacgccgtgacccaggatgccatgctgatcttcgccaacctgagccggggcttcggccggcagggcaagcggaccttcatggccgagagacagtacacacggatggaggactggctgaccgccaagctggcctacgagggcctgagcaagacctacctgtccaagacactggcccagtacacctccaagacatgcagcaactgtgggtttaccatcaccagcgccgactacgacagggtgctggagaagctgaagaagacagcaacaggctggatgaccacaattaacggcaaggagctgaaggtggagggccagattacctactacaacagatacaagagacagaacgtagtcaaggacctgtccgtcgagctggatagactgagcgaagaatctgtgaacaacgacatctcctcctggacaaagggcagaagcggagaagctctgagcctcctgaagaaaagattctcccatagacccgtgcaggagaagttcgtgtgcctgaactgcggcttcgagacacacgcagccgagcaagccgccctgaacatcgccagatcctggctgttcctgcggagccaggagtacaagaaataccagacaaacaagacaaccggcaacaccgataagagagccttcgtcgagacctggcagtccttttaccggaagaagcttaaggaggtgtggaaacctgccgtgcggtctggcggatctggcggaggctccaccagccccaagaaaaagagaaaagtctaagctgccttctgcggggcttgccttctggccatgcccttcttctctcccttgcacctgtacctcttggtctttgaataaagcctgagtaggaaggctagcaaaaaaaaaaaaaaaaaaaaaaaaaaaaaaaaaaaaaaaaaaaaaaaaaaaaaaaaaaaaaaaaaaaaaaaaaaaaaaaagcccagccggctccccaacctctaccgaggagggcacctctgagtccgccacccccgagagcggccctggcacctccaccgagcccagcgagggcagcgcacccggcagccctgccggcagccccacctccacagaggagggaaccagcaccgagcccagcgaaggcagcgccccaggcaccagcaccgagcctagtgagcaggagattaaacggatcaacaagatcagaagaagacttgtgaaagacagcaacaccaagaaggccggcaagacaggccccatgaaaaccctgctggttagagtgatgacacccgatctgagagagcggctggaaaacctgagaaagaagcctgaaaatatcccccagcccatcagcaatacatctagagccaacctgaataagctgctgaccgattacaccgaaatgaagaaggcgatcctgcatgtgtactgggaagagttccagaaggaccctgtgggcctgatgagccgggtggcccagcctgccagcaagaagatcgatcagaacaagctgaaacctgagatggacgagaagggcaacctgaccaccgccggctttgcctgctctcagtgtggccagcccctgttcgtgtacaagctggagcaggtgtctgagaagggcaaggcttacaccaactacttcggacggtgcaatgtggccgagcacgaaaagctgatcctgctggcccagctgaagcccgagaaggatagcgacgaagccgtgacatatagcctgggaaagtttgggcagagggccctggatttctacagcattcatgtgaccaaggagtccacccaccccgtgaagcccctggcccagatcgccggaaacagatacgcctccggacctgtgggaaaggccctgagcgacgcatgtatgggcacaatcgcctccttcctgtctaagtaccaggacatcatcatcgaacaccagaaggtggtgaagggcaaccagaagagactggagagcctgcgggagctggccggcaaggaaaacctggaataccctagcgtgaccctgccacctcagcctcacaccaaggagggcgttgatgcctacaacgaagtgatcgcccgggtgcgaatgtgggtgaacctgaacctgtggcagaagctgaagctaagcagagatgatgccaagcctctgctgagactgaagggattcccttcctttcctctggtcgagagacaggccaacgaagtggactggtgggacatggtgtgtaacgtgaagaagctgatcaacgagaaaaaggaggatggcaaggtgttttggcagaatctggctggctacaagagacaggaagccctgagaccatacctgagcagcgaggaagatcggaagaagggaaagaaattcgctcggtaccagctgggcgacctgctgctgcacctggaaaagaagcacggcgaggactggggaaaggtgtacgacgaggcctgggagcggattgacaagaaagtggaaggcctgagcaagcacatcaagctggaagaggaacggagaagcgaggacgcccagagcaaggccgccctgaccgactggctgcgggctaaggccagcttcgtgatcgagggcctgaaggaggccgacaaggacgagttctgcagatgcgagctgaagctgcagaagtggtacggggacctgcggggaaagcccttcgccatcgaagccgagaacagcatcctggacatcagcggcttcagcaagcagtacaactgtgccttcatctggcagaaggacggcgtgaagaagctgaacctgtacctgatcatcaactacttcaagggcggcaagctgcggttcaagaagatcaaacctgaagccttcgaagccaacagattctacaccgtgatcaacaaaaagagcggcgagatcgtgcccatggaggtgaacttcaacttcgacgaccccaacctgatcatcctgcctctggcctttggcaagagacagggcagagaattcatctggaacgacctgctgtccctggaaaccggcagcctgaagctggccaacggaagagtgatcgagaagacactgtacaacagaagaacccggcaggatgagcctgccctgttcgtggccctgaccttcgagcggcgggaggtcctggactcctccaatatcaaaccaatgaacctgatcggcgtggcaagaggcgaaaacatccccgccgtgatcgccctgaccgaccccgagggctgcccactgagccggtttaaggatagcctgggaaacccaacccacatcctgagaatcggcgagagctataaggagaagcagcggaccatccaggccaagaaggaggtggagcagcggagagccggcggctacagccggaagtacgccagcaaagccaagaatctggcagacgatatggtgagaaacaccgctagagatctgctgtactacgccgtgacccaggatgccatgctgatcttcgccaacctgagccggggcttcggccggcagggcaagcggaccttcatggccgagagacagtacacacggatggaggactggctgaccgccaagctggcctacgagggcctgagcaagacctacctgtccaagacactggcccagtacacctccaagacatgcagcaactgtgggtttaccatcaccagcgccgactacgacagggtgctggagaagctgaagaagacagcaacaggctggatgaccacaattaacggcaaggagctgaaggtggagggccagattacctactacaacagatacaagagacagaacgtagtcaaggacctgtccgtcgagctggatagactgagcgaagaatctgtgaacaacgacatctcctcctggacaaagggcagaagcggagaagctctgagcctcctgaagaaaagattctcccatagacccgtgcaggagaagttcgtgtgcctgaactgcggcttcgagacacacgcagccgagcaagccgccctgaacatcgccagatcctggctgttcctgcggagccaggagtacaagaaataccagacaaacaagacaaccggcaacaccgataagagagccttcgtcgagacctggcagtccttttaccggaagaagcttaaggaggtgtggaaacctgccgtgcggtctggcggatctggcggaggctccaccagccccaagaaaaagagaaaagtctaagctgccttctgcggggcttgccttctggccatgcccttcttctctcccttgcacctgtacctcttggtctttgaataaagcctgagtaggaaggctagcaaaaaaaaaaaaaaaaaaaaaaaaaaaaaaaaaaaaaaaaaaaaaaaaaaaaaaaaaaaaaaaaaaaaaaaaaaaaaaaa

SEQ ID NO: 9946 - RNA, 8787 nt, synthetic construct
  source 1..8787: mol_type = other RNA
aggaaataagagagaaaagaagagtaagaagaaatataagagccaccatggcccctaagaagaagcgtaaagtgagccggatgaaccacgaccaggagttcgacccccctaaggtgtaccctcccgtccccgccgagaagagaaagcccatccgggtcctgagcctgttcgatggcatcgccaccggtctgctggtgctgaaggacctgggcatccaggtggataggtacattgcctccgaggtgtgcgaggactccatcaccgtgggaatggtgcgtcatcagggcaagatcatgtacgtgggcgacgtgcggagcgtgacacagaagcatatccaggagtggggccctttcgacctggtgatcggcggcagcccttgcaatgacctgagcatcgtgaacccagcccggaagggcctgtacgagggaaccggcagactgttcttcgagttttacagactgctgcacgacgcccggcctaaggaaggcgacgaccggcccttcttttggctgttcgagaatgtggtggccatgggagtcagcgacaagcgggatattagccggttcctggagagcaaccccgtgatgatcgatgccaaggaagtgagcgccgcccaccgggccagatacttctggggcaatctgcctggcatgaacagacccctggccagcaccgtgaacgacaagctggagctgcaggagtgcctggagcacggccggatcgccaagttcagcaaggtgagaaccatcaccacccgaagcaacagcatcaaacaaggcaaggaccagcactttcctgtgttcatgaacgagaaggaggacatcctgtggtgtaccgagatggagagagtgttcgggttcccagtccactacacagatgtcagcaacatgtctagactggccagacagagactgctgggaagaagctggtccgtccctgtgatcagacacctgttcgcccctctgaaggagtacttcgcctgcgtgagcagcggcaacagcaacgccaacagccggggccccagcttctctagcggcctggtgccactgtccctgagagggagccacatgggccccatggagatctacaaaaccgtgagcgcctggaagcggcagcctgtgcgcgtgctgagcctgtttcggaatatcgataaagtcctgaaaagcctgggattcctggagagcggctctggctccggcggtggcaccctgaagtacgtggaggatgtgacaaacgtggtcagacgggatgtggagaagtggggccccttcgatctggtgtacggcagcacccaacccctgggcagctcttgtgaccggtgccctggctggtacatgtttcagttccaccggatcctgcagtacgccctgccgagacaggagtcccagcggccattcttttggattttcatggacaacttgctgctgaccgaggatgaccaggaaactaccactcggttcctgcagaccgaagccgtgaccctgcaggacgtgagaggccgggactaccagaacgccatgcgggtgtggtccaacatccctggactgaaaagcaagcacgcacctctgacccctaaagaagaggagtacctgcaggcccaggtgcggagcagaagcaagctggacgcccctaaggtggatctgctggtgaagaattgcctcctgcccctgagagagtacttcaagtatttcagccagaatagtctgcccctgggaggcagcggcggcggccagcccggcgccgtgaggttcgccgacgtggccgtgtacttcagccccgaggagtggggctgcctgaggcccgtgcagagggccctgtacagggacgtgatgagggagacctacagccacctggtggccctgggcgtgggcggcaccaagcccaagctgatcagctgggtggaggaggaggccgagctgtggggccccgaggcccaggacctggagggcgccaagtgcctgaccgaggccaacggcggcccaagcagcggcgcccctcctcccagcggcggcaggcggcccaagcagcggcgcccctcctcccagcggcggcagcccagccggctccccaacctctaccgaggagggcacctctgagtccgccacccccgagagcggccctggcacctccaccgagcccagcgagggcagcgcacccggcagccctgccggcagccccacctccacagaggagggaaccagcaccgagcccagcgaaggcagcgccccaggcaccagcaccgagcctagtgagcaggagattaaacggatcaacaagatcagaagaagacttgtgaaagacagcaacaccaagaaggccggcaagacaggccccatgaaaaccctgctggttagagtgatgacacccgatctgagagagcggctggaaaacctgagaaagaagcctgaaaatatcccccagcccatcagcaatacatctagagccaacctgaataagctgctgaccgattacaccgaaatgaagaaggcgatcctgcatgtgtactgggaagagttccagaaggaccctgtgggcctgatgagccgggtggcccagcctgccagcaagaagatcgatcagaacaagctgaaacctgagatggacgagaagggcaacctgaccaccgccggctttgcctgctctcagtgtggccagcccctgttcgtgtacaagctggagcaggtgtctgagaagggcaaggcttacaccaactacttcggacggtgcaatgtggccgagcacgaaaagctgatcctgctggcccagctgaagcccgagaaggatagcgacgaagccgtgacatatagcctgggaaagtttgggcagagggccctggatttctacagcattcatgtgaccaaggagtccacccaccccgtgaagcccctggcccagatcgccggaaacagatacgcctccggacctgtgggaaaggccctgagcgacgcatgtatgggcacaatcgcctccttcctgtctaagtaccaggacatcatcatcgaacaccagaaggtggtgaagggcaaccagaagagactggagagcctgcgggagctggccggcaaggaaaacctggaataccctagcgtgaccctgccacctcagcctcacaccaaggagggcgttgatgcctacaacgaagtgatcgcccgggtgcgaatgtgggtgaacctgaacctgtggcagaagctgaagctaagcagagatgatgccaagcctctgctgagactgaagggattcccttcctttcctctggtcgagagacaggccaacgaagtggactggtgggacatggtgtgtaacgtgaagaagctgatcaacgagaaaaaggaggatggcaaggtgttttggcagaatctggctggctacaagagacaggaagccctgagaccatacctgagcagcgaggaagatcggaagaagggaaagaaattcgctcggtaccagctgggcgacctgctgctgcacctggaaaagaagcacggcgaggactggggaaaggtgtacgacgaggcctgggagcggattgacaagaaagtggaaggcctgagcaagcacatcaagctggaagaggaacggagaagcgaggacgcccagagcaaggccgccctgaccgactggctgcgggctaaggccagcttcgtgatcgagggcctgaaggaggccgacaaggacgagttctgcagatgcgagctgaagctgcagaagtggtacggggacctgcggggaaagcccttcgccatcgaagccgagaacagcatcctggacatcagcggcttcagcaagcagtacaactgtgccttcatctggcagaaggacggcgtgaagaagctgaacctgtacctgatcatcaactacttcaagggcggcaagctgcggttcaagaagatcaaacctgaagccttcgaagccaacagattctacaccgtgatcaacaaaaagagcggcgagatcgtgcccatggaggtgaacttcaacttcgacgaccccaacctgatcatcctgcctctggcctttggcaagagacagggcagagaattcatctggaacgacctgctgtccctggaaaccggcagcctgaagctggccaacggaagagtgatcgagaagacactgtacaacagaagaacccggcaggatgagcctgccctgttcgtggccctgaccttcgagcggcgggaggtcctggactcctccaatatcaaaccaatgaacctgatcggcgtggcaagaggcgaaaacatccccgccgtgatcgccctgaccgaccccgagggctgcccactgagccggtttaaggatagcctgggaaacccaacccacatcctgagaatcggcgagagctataaggagaagcagcggaccatccaggccaagaaggaggtggagcagcggagagccggcggctacagccggaagtacgccagcaaagccaagaatctggcagacgatatggtgagaaacaccgctagagatctgctgtactacgccgtgacccaggatgccatgctgatcttcgccaacctgagccggggcttcggccggcagggcaagcggaccttcatggccgagagacagtacacacggatggaggactggctgaccgccaagctggcctacgagggcctgagcaagacctacctgtccaagacactggcccagtacacctccaagacatgcagcaactgtgggtttaccatcaccagcgccgactacgacagggtgctggagaagctgaagaagacagcaacaggctggatgaccacaattaacggcaaggagctgaaggtggagggccagattacctactacaacagatacaagagacagaacgtagtcaaggacctgtccgtcgagctggatagactgagcgaagaatctgtgaacaacgacatctcctcctggacaaagggcagaagcggagaagctctgagcctcctgaagaaaagattctcccatagacccgtgcaggagaagttcgtgtgcctgaactgcggcttcgagacacacgcagccgagcaagccgccctgaacatcgccagatcctggctgttcctgcggagccaggagtacaagaaataccagacaaacaagacaaccggcaacaccgataagagagccttcgtcgagacctggcagtccttttaccggaagaagcttaaggaggtgtggaaacctgccgtgcggtctggcggatctggcggaggctccaccagccccaagaaaaagagaaaagtctaagctgccttctgcggggcttgccttctggccatgcccttcttctctcccttgcacctgtacctcttggtctttgaataaagcctgagtaggaaggctagcaaaaaaaaaaaaaaaaaaaaaaaaaaaaaaaaaaaaaaaaaaaaaaaaaaaaaaaaaaaaaaaaaaaaaaaaaaaaaaaagcccagccggctccccaacctctaccgaggagggcacctctgagtccgccacccccgagagcggccctggcacctccaccgagcccagcgagggcagcgcacccggcagccctgccggcagccccacctccacagaggagggaaccagcaccgagcccagcgaaggcagcgccccaggcaccagcaccgagcctagtgagcaggagattaaacggatcaacaagatcagaagaagacttgtgaaagacagcaacaccaagaaggccggcaagacaggccccatgaaaaccctgctggttagagtgatgacacccgatctgagagagcggctggaaaacctgagaaagaagcctgaaaatatcccccagcccatcagcaatacatctagagccaacctgaataagctgctgaccgattacaccgaaatgaagaaggcgatcctgcatgtgtactgggaagagttccagaaggaccctgtgggcctgatgagccgggtggcccagcctgccagcaagaagatcgatcagaacaagctgaaacctgagatggacgagaagggcaacctgaccaccgccggctttgcctgctctcagtgtggccagcccctgttcgtgtacaagctggagcaggtgtctgagaagggcaaggcttacaccaactacttcggacggtgcaatgtggccgagcacgaaaagctgatcctgctggcccagctgaagcccgagaaggatagcgacgaagccgtgacatatagcctgggaaagtttgggcagagggccctggatttctacagcattcatgtgaccaaggagtccacccaccccgtgaagcccctggcccagatcgccggaaacagatacgcctccggacctgtgggaaaggccctgagcgacgcatgtatgggcacaatcgcctccttcctgtctaagtaccaggacatcatcatcgaacaccagaaggtggtgaagggcaaccagaagagactggagagcctgcgggagctggccggcaaggaaaacctggaataccctagcgtgaccctgccacctcagcctcacaccaaggagggcgttgatgcctacaacgaagtgatcgcccgggtgcgaatgtgggtgaacctgaacctgtggcagaagctgaagctaagcagagatgatgccaagcctctgctgagactgaagggattcccttcctttcctctggtcgagagacaggccaacgaagtggactggtgggacatggtgtgtaacgtgaagaagctgatcaacgagaaaaaggaggatggcaaggtgttttggcagaatctggctggctacaagagacaggaagccctgagaccatacctgagcagcgaggaagatcggaagaagggaaagaaattcgctcggtaccagctgggcgacctgctgctgcacctggaaaagaagcacggcgaggactggggaaaggtgtacgacgaggcctgggagcggattgacaagaaagtggaaggcctgagcaagcacatcaagctggaagaggaacggagaagcgaggacgcccagagcaaggccgccctgaccgactggctgcgggctaaggccagcttcgtgatcgagggcctgaaggaggccgacaaggacgagttctgcagatgcgagctgaagctgcagaagtggtacggggacctgcggggaaagcccttcgccatcgaagccgagaacagcatcctggacatcagcggcttcagcaagcagtacaactgtgccttcatctggcagaaggacggcgtgaagaagctgaacctgtacctgatcatcaactacttcaagggcggcaagctgcggttcaagaagatcaaacctgaagccttcgaagccaacagattctacaccgtgatcaacaaaaagagcggcgagatcgtgcccatggaggtgaacttcaacttcgacgaccccaacctgatcatcctgcctctggcctttggcaagagacagggcagagaattcatctggaacgacctgctgtccctggaaaccggcagcctgaagctggccaacggaagagtgatcgagaagacactgtacaacagaagaacccggcaggatgagcctgccctgttcgtggccctgaccttcgagcggcgggaggtcctggactcctccaatatcaaaccaatgaacctgatcggcgtggcaagaggcgaaaacatccccgccgtgatcgccctgaccgaccccgagggctgcccactgagccggtttaaggatagcctgggaaacccaacccacatcctgagaatcggcgagagctataaggagaagcagcggaccatccaggccaagaaggaggtggagcagcggagagccggcggctacagccggaagtacgccagcaaagccaagaatctggcagacgatatggtgagaaacaccgctagagatctgctgtactacgccgtgacccaggatgccatgctgatcttcgccaacctgagccggggcttcggccggcagggcaagcggaccttcatggccgagagacagtacacacggatggaggactggctgaccgccaagctggcctacgagggcctgagcaagacctacctgtccaagacactggcccagtacacctccaagacatgcagcaactgtgggtttaccatcaccagcgccgactacgacagggtgctggagaagctgaagaagacagcaacaggctggatgaccacaattaacggcaaggagctgaaggtggagggccagattacctactacaacagatacaagagacagaacgtagtcaaggacctgtccgtcgagctggatagactgagcgaagaatctgtgaacaacgacatctcctcctggacaaagggcagaagcggagaagctctgagcctcctgaagaaaagattctcccatagacccgtgcaggagaagttcgtgtgcctgaactgcggcttcgagacacacgcagccgagcaagccgccctgaacatcgccagatcctggctgttcctgcggagccaggagtacaagaaataccagacaaacaagacaaccggcaacaccgataagagagccttcgtcgagacctggcagtccttttaccggaagaagcttaaggaggtgtggaaacctgccgtgcggtctggcggatctggcggaggctccaccagccccaagaaaaagagaaaagtctaagctgccttctgcggggcttgccttctggccatgcccttcttctctcccttgcacctgtacctcttggtctttgaataaagcctgagtaggaaggctagcaaaaaaaaaaaaaaaaaaaaaaaaaaaaaaaaaaaaaaaaaaaaaaaaaaaaaaaaaaaaaaaaaaaaaaaaaaaaaaaa

SEQ ID NO: 9947 - RNA, 8787 nt, synthetic construct
  source 1..8787: mol_type = other RNA
aggaaataagagagaaaagaagagtaagaagaaatataagagccaccatggcccctaagaagaagcgtaaagtgagccggatgaaccacgaccaggagttcgacccccctaaggtgtaccctcccgtccccgccgagaagagaaagcccatccgggtcctgagcctgttcgatggcatcgccaccggtctgctggtgctgaaggacctgggcatccaggtggataggtacattgcctccgaggtgtgcgaggactccatcaccgtgggaatggtgcgtcatcagggcaagatcatgtacgtgggcgacgtgcggagcgtgacacagaagcatatccaggagtggggccctttcgacctggtgatcggcggcagcccttgcaatgacctgagcatcgtgaacccagcccggaagggcctgtacgagggaaccggcagactgttcttcgagttttacagactgctgcacgacgcccggcctaaggaaggcgacgaccggcccttcttttggctgttcgagaatgtggtggccatgggagtcagcgacaagcgggatattagccggttcctggagagcaaccccgtgatgatcgatgccaaggaagtgagcgccgcccaccgggccagatacttctggggcaatctgcctggcatgaacagacccctggccagcaccgtgaacgacaagctggagctgcaggagtgcctggagcacggccggatcgccaagttcagcaaggtgagaaccatcaccacccgaagcaacagcatcaaacaaggcaaggaccagcactttcctgtgttcatgaacgagaaggaggacatcctgtggtgtaccgagatggagagagtgttcgggttcccagtccactacacagatgtcagcaacatgtctagactggccagacagagactgctgggaagaagctggtccgtccctgtgatcagacacctgttcgcccctctgaaggagtacttcgcctgcgtgagcagcggcaacagcaacgccaacagccggggccccagcttctctagcggcctggtgccactgtccctgagagggagccacatgggccccatggagatctacaaaaccgtgagcgcctggaagcggcagcctgtgcgcgtgctgagcctgtttcggaatatcgataaagtcctgaaaagcctgggattcctggagagcggctctggctccggcggtggcaccctgaagtacgtggaggatgtgacaaacgtggtcagacgggatgtggagaagtggggccccttcgatctggtgtacggcagcacccaacccctgggcagctcttgtgaccggtgccctggctggtacatgtttcagttccaccggatcctgcagtacgccctgccgagacaggagtcccagcggccattcttttggattttcatggacaacttgctgctgaccgaggatgaccaggaaactaccactcggttcctgcagaccgaagccgtgaccctgcaggacgtgagaggccgggactaccagaacgccatgcgggtgtggtccaacatccctggactgaaaagcaagcacgcacctctgacccctaaagaagaggagtacctgcaggcccaggtgcggagcagaagcaagctggacgcccctaaggtggatctgctggtgaagaattgcctcctgcccctgagagagtacttcaagtatttcagccagaatagtctgcccctgggaggcagcggcggcggcttcgaggagctggtgaccttcgaggacgtgttcgtggacttcagccccgaggagctgagcagcctgagcgccgcccagaggaacctgtacagggaggtgatgctggagaactacaggaacctggtgagcctgggctaccagttcagcaagcccgacatcatcagcaggctggaggccgaggagagcagggccatggagaaggacagcaggcacaccgtgatctgccagggcgaggcccacgacggcggcccaagcagcggcgcccctcctcccagcggcggcaggcggcccaagcagcggcgcccctcctcccagcggcggcagcccagccggctccccaacctctaccgaggagggcacctctgagtccgccacccccgagagcggccctggcacctccaccgagcccagcgagggcagcgcacccggcagccctgccggcagccccacctccacagaggagggaaccagcaccgagcccagcgaaggcagcgccccaggcaccagcaccgagcctagtgagcaggagattaaacggatcaacaagatcagaagaagacttgtgaaagacagcaacaccaagaaggccggcaagacaggccccatgaaaaccctgctggttagagtgatgacacccgatctgagagagcggctggaaaacctgagaaagaagcctgaaaatatcccccagcccatcagcaatacatctagagccaacctgaataagctgctgaccgattacaccgaaatgaagaaggcgatcctgcatgtgtactgggaagagttccagaaggaccctgtgggcctgatgagccgggtggcccagcctgccagcaagaagatcgatcagaacaagctgaaacctgagatggacgagaagggcaacctgaccaccgccggctttgcctgctctcagtgtggccagcccctgttcgtgtacaagctggagcaggtgtctgagaagggcaaggcttacaccaactacttcggacggtgcaatgtggccgagcacgaaaagctgatcctgctggcccagctgaagcccgagaaggatagcgacgaagccgtgacatatagcctgggaaagtttgggcagagggccctggatttctacagcattcatgtgaccaaggagtccacccaccccgtgaagcccctggcccagatcgccggaaacagatacgcctccggacctgtgggaaaggccctgagcgacgcatgtatgggcacaatcgcctccttcctgtctaagtaccaggacatcatcatcgaacaccagaaggtggtgaagggcaaccagaagagactggagagcctgcgggagctggccggcaaggaaaacctggaataccctagcgtgaccctgccacctcagcctcacaccaaggagggcgttgatgcctacaacgaagtgatcgcccgggtgcgaatgtgggtgaacctgaacctgtggcagaagctgaagctaagcagagatgatgccaagcctctgctgagactgaagggattcccttcctttcctctggtcgagagacaggccaacgaagtggactggtgggacatggtgtgtaacgtgaagaagctgatcaacgagaaaaaggaggatggcaaggtgttttggcagaatctggctggctacaagagacaggaagccctgagaccatacctgagcagcgaggaagatcggaagaagggaaagaaattcgctcggtaccagctgggcgacctgctgctgcacctggaaaagaagcacggcgaggactggggaaaggtgtacgacgaggcctgggagcggattgacaagaaagtggaaggcctgagcaagcacatcaagctggaagaggaacggagaagcgaggacgcccagagcaaggccgccctgaccgactggctgcgggctaaggccagcttcgtgatcgagggcctgaaggaggccgacaaggacgagttctgcagatgcgagctgaagctgcagaagtggtacggggacctgcggggaaagcccttcgccatcgaagccgagaacagcatcctggacatcagcggcttcagcaagcagtacaactgtgccttcatctggcagaaggacggcgtgaagaagctgaacctgtacctgatcatcaactacttcaagggcggcaagctgcggttcaagaagatcaaacctgaagccttcgaagccaacagattctacaccgtgatcaacaaaaagagcggcgagatcgtgcccatggaggtgaacttcaacttcgacgaccccaacctgatcatcctgcctctggcctttggcaagagacagggcagagaattcatctggaacgacctgctgtccctggaaaccggcagcctgaagctggccaacggaagagtgatcgagaagacactgtacaacagaagaacccggcaggatgagcctgccctgttcgtggccctgaccttcgagcggcgggaggtcctggactcctccaatatcaaaccaatgaacctgatcggcgtggcaagaggcgaaaacatccccgccgtgatcgccctgaccgaccccgagggctgcccactgagccggtttaaggatagcctgggaaacccaacccacatcctgagaatcggcgagagctataaggagaagcagcggaccatccaggccaagaaggaggtggagcagcggagagccggcggctacagccggaagtacgccagcaaagccaagaatctggcagacgatatggtgagaaacaccgctagagatctgctgtactacgccgtgacccaggatgccatgctgatcttcgccaacctgagccggggcttcggccggcagggcaagcggaccttcatggccgagagacagtacacacggatggaggactggctgaccgccaagctggcctacgagggcctgagcaagacctacctgtccaagacactggcccagtacacctccaagacatgcagcaactgtgggtttaccatcaccagcgccgactacgacagggtgctggagaagctgaagaagacagcaacaggctggatgaccacaattaacggcaaggagctgaaggtggagggccagattacctactacaacagatacaagagacagaacgtagtcaaggacctgtccgtcgagctggatagactgagcgaagaatctgtgaacaacgacatctcctcctggacaaagggcagaagcggagaagctctgagcctcctgaagaaaagattctcccatagacccgtgcaggagaagttcgtgtgcctgaactgcggcttcgagacacacgcagccgagcaagccgccctgaacatcgccagatcctggctgttcctgcggagccaggagtacaagaaataccagacaaacaagacaaccggcaacaccgataagagagccttcgtcgagacctggcagtccttttaccggaagaagcttaaggaggtgtggaaacctgccgtgcggtctggcggatctggcggaggctccaccagccccaagaaaaagagaaaagtctaagctgccttctgcggggcttgccttctggccatgcccttcttctctcccttgcacctgtacctcttggtctttgaataaagcctgagtaggaaggctagcaaaaaaaaaaaaaaaaaaaaaaaaaaaaaaaaaaaaaaaaaaaaaaaaaaaaaaaaaaaaaaaaaaaaaaaaaaaaaaaagcccagccggctccccaacctctaccgaggagggcacctctgagtccgccacccccgagagcggccctggcacctccaccgagcccagcgagggcagcgcacccggcagccctgccggcagccccacctccacagaggagggaaccagcaccgagcccagcgaaggcagcgccccaggcaccagcaccgagcctagtgagcaggagattaaacggatcaacaagatcagaagaagacttgtgaaagacagcaacaccaagaaggccggcaagacaggccccatgaaaaccctgctggttagagtgatgacacccgatctgagagagcggctggaaaacctgagaaagaagcctgaaaatatcccccagcccatcagcaatacatctagagccaacctgaataagctgctgaccgattacaccgaaatgaagaaggcgatcctgcatgtgtactgggaagagttccagaaggaccctgtgggcctgatgagccgggtggcccagcctgccagcaagaagatcgatcagaacaagctgaaacctgagatggacgagaagggcaacctgaccaccgccggctttgcctgctctcagtgtggccagcccctgttcgtgtacaagctggagcaggtgtctgagaagggcaaggcttacaccaactacttcggacggtgcaatgtggccgagcacgaaaagctgatcctgctggcccagctgaagcccgagaaggatagcgacgaagccgtgacatatagcctgggaaagtttgggcagagggccctggatttctacagcattcatgtgaccaaggagtccacccaccccgtgaagcccctggcccagatcgccggaaacagatacgcctccggacctgtgggaaaggccctgagcgacgcatgtatgggcacaatcgcctccttcctgtctaagtaccaggacatcatcatcgaacaccagaaggtggtgaagggcaaccagaagagactggagagcctgcgggagctggccggcaaggaaaacctggaataccctagcgtgaccctgccacctcagcctcacaccaaggagggcgttgatgcctacaacgaagtgatcgcccgggtgcgaatgtgggtgaacctgaacctgtggcagaagctgaagctaagcagagatgatgccaagcctctgctgagactgaagggattcccttcctttcctctggtcgagagacaggccaacgaagtggactggtgggacatggtgtgtaacgtgaagaagctgatcaacgagaaaaaggaggatggcaaggtgttttggcagaatctggctggctacaagagacaggaagccctgagaccatacctgagcagcgaggaagatcggaagaagggaaagaaattcgctcggtaccagctgggcgacctgctgctgcacctggaaaagaagcacggcgaggactggggaaaggtgtacgacgaggcctgggagcggattgacaagaaagtggaaggcctgagcaagcacatcaagctggaagaggaacggagaagcgaggacgcccagagcaaggccgccctgaccgactggctgcgggctaaggccagcttcgtgatcgagggcctgaaggaggccgacaaggacgagttctgcagatgcgagctgaagctgcagaagtggtacggggacctgcggggaaagcccttcgccatcgaagccgagaacagcatcctggacatcagcggcttcagcaagcagtacaactgtgccttcatctggcagaaggacggcgtgaagaagctgaacctgtacctgatcatcaactacttcaagggcggcaagctgcggttcaagaagatcaaacctgaagccttcgaagccaacagattctacaccgtgatcaacaaaaagagcggcgagatcgtgcccatggaggtgaacttcaacttcgacgaccccaacctgatcatcctgcctctggcctttggcaagagacagggcagagaattcatctggaacgacctgctgtccctggaaaccggcagcctgaagctggccaacggaagagtgatcgagaagacactgtacaacagaagaacccggcaggatgagcctgccctgttcgtggccctgaccttcgagcggcgggaggtcctggactcctccaatatcaaaccaatgaacctgatcggcgtggcaagaggcgaaaacatccccgccgtgatcgccctgaccgaccccgagggctgcccactgagccggtttaaggatagcctgggaaacccaacccacatcctgagaatcggcgagagctataaggagaagcagcggaccatccaggccaagaaggaggtggagcagcggagagccggcggctacagccggaagtacgccagcaaagccaagaatctggcagacgatatggtgagaaacaccgctagagatctgctgtactacgccgtgacccaggatgccatgctgatcttcgccaacctgagccggggcttcggccggcagggcaagcggaccttcatggccgagagacagtacacacggatggaggactggctgaccgccaagctggcctacgagggcctgagcaagacctacctgtccaagacactggcccagtacacctccaagacatgcagcaactgtgggtttaccatcaccagcgccgactacgacagggtgctggagaagctgaagaagacagcaacaggctggatgaccacaattaacggcaaggagctgaaggtggagggccagattacctactacaacagatacaagagacagaacgtagtcaaggacctgtccgtcgagctggatagactgagcgaagaatctgtgaacaacgacatctcctcctggacaaagggcagaagcggagaagctctgagcctcctgaagaaaagattctcccatagacccgtgcaggagaagttcgtgtgcctgaactgcggcttcgagacacacgcagccgagcaagccgccctgaacatcgccagatcctggctgttcctgcggagccaggagtacaagaaataccagacaaacaagacaaccggcaacaccgataagagagccttcgtcgagacctggcagtccttttaccggaagaagcttaaggaggtgtggaaacctgccgtgcggtctggcggatctggcggaggctccaccagccccaagaaaaagagaaaagtctaagctgccttctgcggggcttgccttctggccatgcccttcttctctcccttgcacctgtacctcttggtctttgaataaagcctgagtaggaaggctagcaaaaaaaaaaaaaaaaaaaaaaaaaaaaaaaaaaaaaaaaaaaaaaaaaaaaaaaaaaaaaaaaaaaaaaaaaaaaaaaa

SEQ ID NO: 9948 - RNA, 8787 nt, synthetic construct
  source 1..8787: mol_type = other RNA
aggaaataagagagaaaagaagagtaagaagaaatataagagccaccatggcccctaagaagaagcgtaaagtgagccggatgaaccacgaccaggagttcgacccccctaaggtgtaccctcccgtccccgccgagaagagaaagcccatccgggtcctgagcctgttcgatggcatcgccaccggtctgctggtgctgaaggacctgggcatccaggtggataggtacattgcctccgaggtgtgcgaggactccatcaccgtgggaatggtgcgtcatcagggcaagatcatgtacgtgggcgacgtgcggagcgtgacacagaagcatatccaggagtggggccctttcgacctggtgatcggcggcagcccttgcaatgacctgagcatcgtgaacccagcccggaagggcctgtacgagggaaccggcagactgttcttcgagttttacagactgctgcacgacgcccggcctaaggaaggcgacgaccggcccttcttttggctgttcgagaatgtggtggccatgggagtcagcgacaagcgggatattagccggttcctggagagcaaccccgtgatgatcgatgccaaggaagtgagcgccgcccaccgggccagatacttctggggcaatctgcctggcatgaacagacccctggccagcaccgtgaacgacaagctggagctgcaggagtgcctggagcacggccggatcgccaagttcagcaaggtgagaaccatcaccacccgaagcaacagcatcaaacaaggcaaggaccagcactttcctgtgttcatgaacgagaaggaggacatcctgtggtgtaccgagatggagagagtgttcgggttcccagtccactacacagatgtcagcaacatgtctagactggccagacagagactgctgggaagaagctggtccgtccctgtgatcagacacctgttcgcccctctgaaggagtacttcgcctgcgtgagcagcggcaacagcaacgccaacagccggggccccagcttctctagcggcctggtgccactgtccctgagagggagccacatgggccccatggagatctacaaaaccgtgagcgcctggaagcggcagcctgtgcgcgtgctgagcctgtttcggaatatcgataaagtcctgaaaagcctgggattcctggagagcggctctggctccggcggtggcaccctgaagtacgtggaggatgtgacaaacgtggtcagacgggatgtggagaagtggggccccttcgatctggtgtacggcagcacccaacccctgggcagctcttgtgaccggtgccctggctggtacatgtttcagttccaccggatcctgcagtacgccctgccgagacaggagtcccagcggccattcttttggattttcatggacaacttgctgctgaccgaggatgaccaggaaactaccactcggttcctgcagaccgaagccgtgaccctgcaggacgtgagaggccgggactaccagaacgccatgcgggtgtggtccaacatccctggactgaaaagcaagcacgcacctctgacccctaaagaagaggagtacctgcaggcccaggtgcggagcagaagcaagctggacgcccctaaggtggatctgctggtgaagaattgcctcctgcccctgagagagtacttcaagtatttcagccagaatagtctgcccctgggaggcagcggcggcggccagccccaggaggccctgaccttcaaggacgtggaggtgaccttcagccaggacgagtggggctggctggacgccagccagaggaacctgtacagggacgtgatgctggagaactacggcaacatcgccagcctgatgggccccttcaccaagcccgccctgatcagctggctggagaccagggagccctgggtgctgaacgtgcagggcgcccagcccgagggcaaccccggcgccgacgtgggcggcccaagcagcggcgcccctcctcccagcggcggcaggcggcccaagcagcggcgcccctcctcccagcggcggcagcccagccggctccccaacctctaccgaggagggcacctctgagtccgccacccccgagagcggccctggcacctccaccgagcccagcgagggcagcgcacccggcagccctgccggcagccccacctccacagaggagggaaccagcaccgagcccagcgaaggcagcgccccaggcaccagcaccgagcctagtgagcaggagattaaacggatcaacaagatcagaagaagacttgtgaaagacagcaacaccaagaaggccggcaagacaggccccatgaaaaccctgctggttagagtgatgacacccgatctgagagagcggctggaaaacctgagaaagaagcctgaaaatatcccccagcccatcagcaatacatctagagccaacctgaataagctgctgaccgattacaccgaaatgaagaaggcgatcctgcatgtgtactgggaagagttccagaaggaccctgtgggcctgatgagccgggtggcccagcctgccagcaagaagatcgatcagaacaagctgaaacctgagatggacgagaagggcaacctgaccaccgccggctttgcctgctctcagtgtggccagcccctgttcgtgtacaagctggagcaggtgtctgagaagggcaaggcttacaccaactacttcggacggtgcaatgtggccgagcacgaaaagctgatcctgctggcccagctgaagcccgagaaggatagcgacgaagccgtgacatatagcctgggaaagtttgggcagagggccctggatttctacagcattcatgtgaccaaggagtccacccaccccgtgaagcccctggcccagatcgccggaaacagatacgcctccggacctgtgggaaaggccctgagcgacgcatgtatgggcacaatcgcctccttcctgtctaagtaccaggacatcatcatcgaacaccagaaggtggtgaagggcaaccagaagagactggagagcctgcgggagctggccggcaaggaaaacctggaataccctagcgtgaccctgccacctcagcctcacaccaaggagggcgttgatgcctacaacgaagtgatcgcccgggtgcgaatgtgggtgaacctgaacctgtggcagaagctgaagctaagcagagatgatgccaagcctctgctgagactgaagggattcccttcctttcctctggtcgagagacaggccaacgaagtggactggtgggacatggtgtgtaacgtgaagaagctgatcaacgagaaaaaggaggatggcaaggtgttttggcagaatctggctggctacaagagacaggaagccctgagaccatacctgagcagcgaggaagatcggaagaagggaaagaaattcgctcggtaccagctgggcgacctgctgctgcacctggaaaagaagcacggcgaggactggggaaaggtgtacgacgaggcctgggagcggattgacaagaaagtggaaggcctgagcaagcacatcaagctggaagaggaacggagaagcgaggacgcccagagcaaggccgccctgaccgactggctgcgggctaaggccagcttcgtgatcgagggcctgaaggaggccgacaaggacgagttctgcagatgcgagctgaagctgcagaagtggtacggggacctgcggggaaagcccttcgccatcgaagccgagaacagcatcctggacatcagcggcttcagcaagcagtacaactgtgccttcatctggcagaaggacggcgtgaagaagctgaacctgtacctgatcatcaactacttcaagggcggcaagctgcggttcaagaagatcaaacctgaagccttcgaagccaacagattctacaccgtgatcaacaaaaagagcggcgagatcgtgcccatggaggtgaacttcaacttcgacgaccccaacctgatcatcctgcctctggcctttggcaagagacagggcagagaattcatctggaacgacctgctgtccctggaaaccggcagcctgaagctggccaacggaagagtgatcgagaagacactgtacaacagaagaacccggcaggatgagcctgccctgttcgtggccctgaccttcgagcggcgggaggtcctggactcctccaatatcaaaccaatgaacctgatcggcgtggcaagaggcgaaaacatccccgccgtgatcgccctgaccgaccccgagggctgcccactgagccggtttaaggatagcctgggaaacccaacccacatcctgagaatcggcgagagctataaggagaagcagcggaccatccaggccaagaaggaggtggagcagcggagagccggcggctacagccggaagtacgccagcaaagccaagaatctggcagacgatatggtgagaaacaccgctagagatctgctgtactacgccgtgacccaggatgccatgctgatcttcgccaacctgagccggggcttcggccggcagggcaagcggaccttcatggccgagagacagtacacacggatggaggactggctgaccgccaagctggcctacgagggcctgagcaagacctacctgtccaagacactggcccagtacacctccaagacatgcagcaactgtgggtttaccatcaccagcgccgactacgacagggtgctggagaagctgaagaagacagcaacaggctggatgaccacaattaacggcaaggagctgaaggtggagggccagattacctactacaacagatacaagagacagaacgtagtcaaggacctgtccgtcgagctggatagactgagcgaagaatctgtgaacaacgacatctcctcctggacaaagggcagaagcggagaagctctgagcctcctgaagaaaagattctcccatagacccgtgcaggagaagttcgtgtgcctgaactgcggcttcgagacacacgcagccgagcaagccgccctgaacatcgccagatcctggctgttcctgcggagccaggagtacaagaaataccagacaaacaagacaaccggcaacaccgataagagagccttcgtcgagacctggcagtccttttaccggaagaagcttaaggaggtgtggaaacctgccgtgcggtctggcggatctggcggaggctccaccagccccaagaaaaagagaaaagtctaagctgccttctgcggggcttgccttctggccatgcccttcttctctcccttgcacctgtacctcttggtctttgaataaagcctgagtaggaaggctagcaaaaaaaaaaaaaaaaaaaaaaaaaaaaaaaaaaaaaaaaaaaaaaaaaaaaaaaaaaaaaaaaaaaaaaaaaaaaaaaagcccagccggctccccaacctctaccgaggagggcacctctgagtccgccacccccgagagcggccctggcacctccaccgagcccagcgagggcagcgcacccggcagccctgccggcagccccacctccacagaggagggaaccagcaccgagcccagcgaaggcagcgccccaggcaccagcaccgagcctagtgagcaggagattaaacggatcaacaagatcagaagaagacttgtgaaagacagcaacaccaagaaggccggcaagacaggccccatgaaaaccctgctggttagagtgatgacacccgatctgagagagcggctggaaaacctgagaaagaagcctgaaaatatcccccagcccatcagcaatacatctagagccaacctgaataagctgctgaccgattacaccgaaatgaagaaggcgatcctgcatgtgtactgggaagagttccagaaggaccctgtgggcctgatgagccgggtggcccagcctgccagcaagaagatcgatcagaacaagctgaaacctgagatggacgagaagggcaacctgaccaccgccggctttgcctgctctcagtgtggccagcccctgttcgtgtacaagctggagcaggtgtctgagaagggcaaggcttacaccaactacttcggacggtgcaatgtggccgagcacgaaaagctgatcctgctggcccagctgaagcccgagaaggatagcgacgaagccgtgacatatagcctgggaaagtttgggcagagggccctggatttctacagcattcatgtgaccaaggagtccacccaccccgtgaagcccctggcccagatcgccggaaacagatacgcctccggacctgtgggaaaggccctgagcgacgcatgtatgggcacaatcgcctccttcctgtctaagtaccaggacatcatcatcgaacaccagaaggtggtgaagggcaaccagaagagactggagagcctgcgggagctggccggcaaggaaaacctggaataccctagcgtgaccctgccacctcagcctcacaccaaggagggcgttgatgcctacaacgaagtgatcgcccgggtgcgaatgtgggtgaacctgaacctgtggcagaagctgaagctaagcagagatgatgccaagcctctgctgagactgaagggattcccttcctttcctctggtcgagagacaggccaacgaagtggactggtgggacatggtgtgtaacgtgaagaagctgatcaacgagaaaaaggaggatggcaaggtgttttggcagaatctggctggctacaagagacaggaagccctgagaccatacctgagcagcgaggaagatcggaagaagggaaagaaattcgctcggtaccagctgggcgacctgctgctgcacctggaaaagaagcacggcgaggactggggaaaggtgtacgacgaggcctgggagcggattgacaagaaagtggaaggcctgagcaagcacatcaagctggaagaggaacggagaagcgaggacgcccagagcaaggccgccctgaccgactggctgcgggctaaggccagcttcgtgatcgagggcctgaaggaggccgacaaggacgagttctgcagatgcgagctgaagctgcagaagtggtacggggacctgcggggaaagcccttcgccatcgaagccgagaacagcatcctggacatcagcggcttcagcaagcagtacaactgtgccttcatctggcagaaggacggcgtgaagaagctgaacctgtacctgatcatcaactacttcaagggcggcaagctgcggttcaagaagatcaaacctgaagccttcgaagccaacagattctacaccgtgatcaacaaaaagagcggcgagatcgtgcccatggaggtgaacttcaacttcgacgaccccaacctgatcatcctgcctctggcctttggcaagagacagggcagagaattcatctggaacgacctgctgtccctggaaaccggcagcctgaagctggccaacggaagagtgatcgagaagacactgtacaacagaagaacccggcaggatgagcctgccctgttcgtggccctgaccttcgagcggcgggaggtcctggactcctccaatatcaaaccaatgaacctgatcggcgtggcaagaggcgaaaacatccccgccgtgatcgccctgaccgaccccgagggctgcccactgagccggtttaaggatagcctgggaaacccaacccacatcctgagaatcggcgagagctataaggagaagcagcggaccatccaggccaagaaggaggtggagcagcggagagccggcggctacagccggaagtacgccagcaaagccaagaatctggcagacgatatggtgagaaacaccgctagagatctgctgtactacgccgtgacccaggatgccatgctgatcttcgccaacctgagccggggcttcggccggcagggcaagcggaccttcatggccgagagacagtacacacggatggaggactggctgaccgccaagctggcctacgagggcctgagcaagacctacctgtccaagacactggcccagtacacctccaagacatgcagcaactgtgggtttaccatcaccagcgccgactacgacagggtgctggagaagctgaagaagacagcaacaggctggatgaccacaattaacggcaaggagctgaaggtggagggccagattacctactacaacagatacaagagacagaacgtagtcaaggacctgtccgtcgagctggatagactgagcgaagaatctgtgaacaacgacatctcctcctggacaaagggcagaagcggagaagctctgagcctcctgaagaaaagattctcccatagacccgtgcaggagaagttcgtgtgcctgaactgcggcttcgagacacacgcagccgagcaagccgccctgaacatcgccagatcctggctgttcctgcggagccaggagtacaagaaataccagacaaacaagacaaccggcaacaccgataagagagccttcgtcgagacctggcagtccttttaccggaagaagcttaaggaggtgtggaaacctgccgtgcggtctggcggatctggcggaggctccaccagccccaagaaaaagagaaaagtctaagctgccttctgcggggcttgccttctggccatgcccttcttctctcccttgcacctgtacctcttggtctttgaataaagcctgagtaggaaggctagcaaaaaaaaaaaaaaaaaaaaaaaaaaaaaaaaaaaaaaaaaaaaaaaaaaaaaaaaaaaaaaaaaaaaaaaaaaaaaaaa

SEQ ID NO: 9949 - RNA, 8787 nt, synthetic construct
  source 1..8787: mol_type = other RNA
aggaaataagagagaaaagaagagtaagaagaaatataagagccaccatggcccctaagaagaagcgtaaagtgagccggatgaaccacgaccaggagttcgacccccctaaggtgtaccctcccgtccccgccgagaagagaaagcccatccgggtcctgagcctgttcgatggcatcgccaccggtctgctggtgctgaaggacctgggcatccaggtggataggtacattgcctccgaggtgtgcgaggactccatcaccgtgggaatggtgcgtcatcagggcaagatcatgtacgtgggcgacgtgcggagcgtgacacagaagcatatccaggagtggggccctttcgacctggtgatcggcggcagcccttgcaatgacctgagcatcgtgaacccagcccggaagggcctgtacgagggaaccggcagactgttcttcgagttttacagactgctgcacgacgcccggcctaaggaaggcgacgaccggcccttcttttggctgttcgagaatgtggtggccatgggagtcagcgacaagcgggatattagccggttcctggagagcaaccccgtgatgatcgatgccaaggaagtgagcgccgcccaccgggccagatacttctggggcaatctgcctggcatgaacagacccctggccagcaccgtgaacgacaagctggagctgcaggagtgcctggagcacggccggatcgccaagttcagcaaggtgagaaccatcaccacccgaagcaacagcatcaaacaaggcaaggaccagcactttcctgtgttcatgaacgagaaggaggacatcctgtggtgtaccgagatggagagagtgttcgggttcccagtccactacacagatgtcagcaacatgtctagactggccagacagagactgctgggaagaagctggtccgtccctgtgatcagacacctgttcgcccctctgaaggagtacttcgcctgcgtgagcagcggcaacagcaacgccaacagccggggccccagcttctctagcggcctggtgccactgtccctgagagggagccacatgggccccatggagatctacaaaaccgtgagcgcctggaagcggcagcctgtgcgcgtgctgagcctgtttcggaatatcgataaagtcctgaaaagcctgggattcctggagagcggctctggctccggcggtggcaccctgaagtacgtggaggatgtgacaaacgtggtcagacgggatgtggagaagtggggccccttcgatctggtgtacggcagcacccaacccctgggcagctcttgtgaccggtgccctggctggtacatgtttcagttccaccggatcctgcagtacgccctgccgagacaggagtcccagcggccattcttttggattttcatggacaacttgctgctgaccgaggatgaccaggaaactaccactcggttcctgcagaccgaagccgtgaccctgcaggacgtgagaggccgggactaccagaacgccatgcgggtgtggtccaacatccctggactgaaaagcaagcacgcacctctgacccctaaagaagaggagtacctgcaggcccaggtgcggagcagaagcaagctggacgcccctaaggtggatctgctggtgaagaattgcctcctgcccctgagagagtacttcaagtatttcagccagaatagtctgcccctgggaggcagcggcggcggcccccagaagagcgtgaccttcgaggacgtggccgtgtacttcacccagaccgagtgggacggcctgagccccgcccagagggccctgtacagggacgtgatgctggagaactacggcaacgtggccagcctgggcttccccctgctgaagcccaccgtgatcagccagctggagggcggcggcgagctggagggccccagccccctgaccagcggcaccggcaccggccaccagggcctgtggggcggcccaagcagcggcgcccctcctcccagcggcggcaggcggcccaagcagcggcgcccctcctcccagcggcggcagcccagccggctccccaacctctaccgaggagggcacctctgagtccgccacccccgagagcggccctggcacctccaccgagcccagcgagggcagcgcacccggcagccctgccggcagccccacctccacagaggagggaaccagcaccgagcccagcgaaggcagcgccccaggcaccagcaccgagcctagtgagcaggagattaaacggatcaacaagatcagaagaagacttgtgaaagacagcaacaccaagaaggccggcaagacaggccccatgaaaaccctgctggttagagtgatgacacccgatctgagagagcggctggaaaacctgagaaagaagcctgaaaatatcccccagcccatcagcaatacatctagagccaacctgaataagctgctgaccgattacaccgaaatgaagaaggcgatcctgcatgtgtactgggaagagttccagaaggaccctgtgggcctgatgagccgggtggcccagcctgccagcaagaagatcgatcagaacaagctgaaacctgagatggacgagaagggcaacctgaccaccgccggctttgcctgctctcagtgtggccagcccctgttcgtgtacaagctggagcaggtgtctgagaagggcaaggcttacaccaactacttcggacggtgcaatgtggccgagcacgaaaagctgatcctgctggcccagctgaagcccgagaaggatagcgacgaagccgtgacatatagcctgggaaagtttgggcagagggccctggatttctacagcattcatgtgaccaaggagtccacccaccccgtgaagcccctggcccagatcgccggaaacagatacgcctccggacctgtgggaaaggccctgagcgacgcatgtatgggcacaatcgcctccttcctgtctaagtaccaggacatcatcatcgaacaccagaaggtggtgaagggcaaccagaagagactggagagcctgcgggagctggccggcaaggaaaacctggaataccctagcgtgaccctgccacctcagcctcacaccaaggagggcgttgatgcctacaacgaagtgatcgcccgggtgcgaatgtgggtgaacctgaacctgtggcagaagctgaagctaagcagagatgatgccaagcctctgctgagactgaagggattcccttcctttcctctggtcgagagacaggccaacgaagtggactggtgggacatggtgtgtaacgtgaagaagctgatcaacgagaaaaaggaggatggcaaggtgttttggcagaatctggctggctacaagagacaggaagccctgagaccatacctgagcagcgaggaagatcggaagaagggaaagaaattcgctcggtaccagctgggcgacctgctgctgcacctggaaaagaagcacggcgaggactggggaaaggtgtacgacgaggcctgggagcggattgacaagaaagtggaaggcctgagcaagcacatcaagctggaagaggaacggagaagcgaggacgcccagagcaaggccgccctgaccgactggctgcgggctaaggccagcttcgtgatcgagggcctgaaggaggccgacaaggacgagttctgcagatgcgagctgaagctgcagaagtggtacggggacctgcggggaaagcccttcgccatcgaagccgagaacagcatcctggacatcagcggcttcagcaagcagtacaactgtgccttcatctggcagaaggacggcgtgaagaagctgaacctgtacctgatcatcaactacttcaagggcggcaagctgcggttcaagaagatcaaacctgaagccttcgaagccaacagattctacaccgtgatcaacaaaaagagcggcgagatcgtgcccatggaggtgaacttcaacttcgacgaccccaacctgatcatcctgcctctggcctttggcaagagacagggcagagaattcatctggaacgacctgctgtccctggaaaccggcagcctgaagctggccaacggaagagtgatcgagaagacactgtacaacagaagaacccggcaggatgagcctgccctgttcgtggccctgaccttcgagcggcgggaggtcctggactcctccaatatcaaaccaatgaacctgatcggcgtggcaagaggcgaaaacatccccgccgtgatcgccctgaccgaccccgagggctgcccactgagccggtttaaggatagcctgggaaacccaacccacatcctgagaatcggcgagagctataaggagaagcagcggaccatccaggccaagaaggaggtggagcagcggagagccggcggctacagccggaagtacgccagcaaagccaagaatctggcagacgatatggtgagaaacaccgctagagatctgctgtactacgccgtgacccaggatgccatgctgatcttcgccaacctgagccggggcttcggccggcagggcaagcggaccttcatggccgagagacagtacacacggatggaggactggctgaccgccaagctggcctacgagggcctgagcaagacctacctgtccaagacactggcccagtacacctccaagacatgcagcaactgtgggtttaccatcaccagcgccgactacgacagggtgctggagaagctgaagaagacagcaacaggctggatgaccacaattaacggcaaggagctgaaggtggagggccagattacctactacaacagatacaagagacagaacgtagtcaaggacctgtccgtcgagctggatagactgagcgaagaatctgtgaacaacgacatctcctcctggacaaagggcagaagcggagaagctctgagcctcctgaagaaaagattctcccatagacccgtgcaggagaagttcgtgtgcctgaactgcggcttcgagacacacgcagccgagcaagccgccctgaacatcgccagatcctggctgttcctgcggagccaggagtacaagaaataccagacaaacaagacaaccggcaacaccgataagagagccttcgtcgagacctggcagtccttttaccggaagaagcttaaggaggtgtggaaacctgccgtgcggtctggcggatctggcggaggctccaccagccccaagaaaaagagaaaagtctaagctgccttctgcggggcttgccttctggccatgcccttcttctctcccttgcacctgtacctcttggtctttgaataaagcctgagtaggaaggctagcaaaaaaaaaaaaaaaaaaaaaaaaaaaaaaaaaaaaaaaaaaaaaaaaaaaaaaaaaaaaaaaaaaaaaaaaaaaaaaaagcccagccggctccccaacctctaccgaggagggcacctctgagtccgccacccccgagagcggccctggcacctccaccgagcccagcgagggcagcgcacccggcagccctgccggcagccccacctccacagaggagggaaccagcaccgagcccagcgaaggcagcgccccaggcaccagcaccgagcctagtgagcaggagattaaacggatcaacaagatcagaagaagacttgtgaaagacagcaacaccaagaaggccggcaagacaggccccatgaaaaccctgctggttagagtgatgacacccgatctgagagagcggctggaaaacctgagaaagaagcctgaaaatatcccccagcccatcagcaatacatctagagccaacctgaataagctgctgaccgattacaccgaaatgaagaaggcgatcctgcatgtgtactgggaagagttccagaaggaccctgtgggcctgatgagccgggtggcccagcctgccagcaagaagatcgatcagaacaagctgaaacctgagatggacgagaagggcaacctgaccaccgccggctttgcctgctctcagtgtggccagcccctgttcgtgtacaagctggagcaggtgtctgagaagggcaaggcttacaccaactacttcggacggtgcaatgtggccgagcacgaaaagctgatcctgctggcccagctgaagcccgagaaggatagcgacgaagccgtgacatatagcctgggaaagtttgggcagagggccctggatttctacagcattcatgtgaccaaggagtccacccaccccgtgaagcccctggcccagatcgccggaaacagatacgcctccggacctgtgggaaaggccctgagcgacgcatgtatgggcacaatcgcctccttcctgtctaagtaccaggacatcatcatcgaacaccagaaggtggtgaagggcaaccagaagagactggagagcctgcgggagctggccggcaaggaaaacctggaataccctagcgtgaccctgccacctcagcctcacaccaaggagggcgttgatgcctacaacgaagtgatcgcccgggtgcgaatgtgggtgaacctgaacctgtggcagaagctgaagctaagcagagatgatgccaagcctctgctgagactgaagggattcccttcctttcctctggtcgagagacaggccaacgaagtggactggtgggacatggtgtgtaacgtgaagaagctgatcaacgagaaaaaggaggatggcaaggtgttttggcagaatctggctggctacaagagacaggaagccctgagaccatacctgagcagcgaggaagatcggaagaagggaaagaaattcgctcggtaccagctgggcgacctgctgctgcacctggaaaagaagcacggcgaggactggggaaaggtgtacgacgaggcctgggagcggattgacaagaaagtggaaggcctgagcaagcacatcaagctggaagaggaacggagaagcgaggacgcccagagcaaggccgccctgaccgactggctgcgggctaaggccagcttcgtgatcgagggcctgaaggaggccgacaaggacgagttctgcagatgcgagctgaagctgcagaagtggtacggggacctgcggggaaagcccttcgccatcgaagccgagaacagcatcctggacatcagcggcttcagcaagcagtacaactgtgccttcatctggcagaaggacggcgtgaagaagctgaacctgtacctgatcatcaactacttcaagggcggcaagctgcggttcaagaagatcaaacctgaagccttcgaagccaacagattctacaccgtgatcaacaaaaagagcggcgagatcgtgcccatggaggtgaacttcaacttcgacgaccccaacctgatcatcctgcctctggcctttggcaagagacagggcagagaattcatctggaacgacctgctgtccctggaaaccggcagcctgaagctggccaacggaagagtgatcgagaagacactgtacaacagaagaacccggcaggatgagcctgccctgttcgtggccctgaccttcgagcggcgggaggtcctggactcctccaatatcaaaccaatgaacctgatcggcgtggcaagaggcgaaaacatccccgccgtgatcgccctgaccgaccccgagggctgcccactgagccggtttaaggatagcctgggaaacccaacccacatcctgagaatcggcgagagctataaggagaagcagcggaccatccaggccaagaaggaggtggagcagcggagagccggcggctacagccggaagtacgccagcaaagccaagaatctggcagacgatatggtgagaaacaccgctagagatctgctgtactacgccgtgacccaggatgccatgctgatcttcgccaacctgagccggggcttcggccggcagggcaagcggaccttcatggccgagagacagtacacacggatggaggactggctgaccgccaagctggcctacgagggcctgagcaagacctacctgtccaagacactggcccagtacacctccaagacatgcagcaactgtgggtttaccatcaccagcgccgactacgacagggtgctggagaagctgaagaagacagcaacaggctggatgaccacaattaacggcaaggagctgaaggtggagggccagattacctactacaacagatacaagagacagaacgtagtcaaggacctgtccgtcgagctggatagactgagcgaagaatctgtgaacaacgacatctcctcctggacaaagggcagaagcggagaagctctgagcctcctgaagaaaagattctcccatagacccgtgcaggagaagttcgtgtgcctgaactgcggcttcgagacacacgcagccgagcaagccgccctgaacatcgccagatcctggctgttcctgcggagccaggagtacaagaaataccagacaaacaagacaaccggcaacaccgataagagagccttcgtcgagacctggcagtccttttaccggaagaagcttaaggaggtgtggaaacctgccgtgcggtctggcggatctggcggaggctccaccagccccaagaaaaagagaaaagtctaagctgccttctgcggggcttgccttctggccatgcccttcttctctcccttgcacctgtacctcttggtctttgaataaagcctgagtaggaaggctagcaaaaaaaaaaaaaaaaaaaaaaaaaaaaaaaaaaaaaaaaaaaaaaaaaaaaaaaaaaaaaaaaaaaaaaaaaaaaaaaa

SEQ ID NO: 9950 - RNA, 8787 nt, synthetic construct
  source 1..8787: mol_type = other RNA
aggaaataagagagaaaagaagagtaagaagaaatataagagccaccatggcccctaagaagaagcgtaaagtgagccggatgaaccacgaccaggagttcgacccccctaaggtgtaccctcccgtccccgccgagaagagaaagcccatccgggtcctgagcctgttcgatggcatcgccaccggtctgctggtgctgaaggacctgggcatccaggtggataggtacattgcctccgaggtgtgcgaggactccatcaccgtgggaatggtgcgtcatcagggcaagatcatgtacgtgggcgacgtgcggagcgtgacacagaagcatatccaggagtggggccctttcgacctggtgatcggcggcagcccttgcaatgacctgagcatcgtgaacccagcccggaagggcctgtacgagggaaccggcagactgttcttcgagttttacagactgctgcacgacgcccggcctaaggaaggcgacgaccggcccttcttttggctgttcgagaatgtggtggccatgggagtcagcgacaagcgggatattagccggttcctggagagcaaccccgtgatgatcgatgccaaggaagtgagcgccgcccaccgggccagatacttctggggcaatctgcctggcatgaacagacccctggccagcaccgtgaacgacaagctggagctgcaggagtgcctggagcacggccggatcgccaagttcagcaaggtgagaaccatcaccacccgaagcaacagcatcaaacaaggcaaggaccagcactttcctgtgttcatgaacgagaaggaggacatcctgtggtgtaccgagatggagagagtgttcgggttcccagtccactacacagatgtcagcaacatgtctagactggccagacagagactgctgggaagaagctggtccgtccctgtgatcagacacctgttcgcccctctgaaggagtacttcgcctgcgtgagcagcggcaacagcaacgccaacagccggggccccagcttctctagcggcctggtgccactgtccctgagagggagccacatgggccccatggagatctacaaaaccgtgagcgcctggaagcggcagcctgtgcgcgtgctgagcctgtttcggaatatcgataaagtcctgaaaagcctgggattcctggagagcggctctggctccggcggtggcaccctgaagtacgtggaggatgtgacaaacgtggtcagacgggatgtggagaagtggggccccttcgatctggtgtacggcagcacccaacccctgggcagctcttgtgaccggtgccctggctggtacatgtttcagttccaccggatcctgcagtacgccctgccgagacaggagtcccagcggccattcttttggattttcatggacaacttgctgctgaccgaggatgaccaggaaactaccactcggttcctgcagaccgaagccgtgaccctgcaggacgtgagaggccgggactaccagaacgccatgcgggtgtggtccaacatccctggactgaaaagcaagcacgcacctctgacccctaaagaagaggagtacctgcaggcccaggtgcggagcagaagcaagctggacgcccctaaggtggatctgctggtgaagaattgcctcctgcccctgagagagtacttcaagtatttcagccagaatagtctgcccctgggaggcagcggcggcggcagccagatccccctgaccttccaggacgtggccgtggacttcacctgggaggagtggggcctgctggagcccagccagaaggacatgtactgggacgtgatgctggagaactacgagaacttcgtgagcctgggcggcctgcccatctgcctgcccgacgtgatcagcaggatggagaggatcgaggccccctggatggccgagggcggcgtgctggtgagcaccttcctgggcagcctgagcggcggcccaagcagcggcgcccctcctcccagcggcggcaggcggcccaagcagcggcgcccctcctcccagcggcggcagcccagccggctccccaacctctaccgaggagggcacctctgagtccgccacccccgagagcggccctggcacctccaccgagcccagcgagggcagcgcacccggcagccctgccggcagccccacctccacagaggagggaaccagcaccgagcccagcgaaggcagcgccccaggcaccagcaccgagcctagtgagcaggagattaaacggatcaacaagatcagaagaagacttgtgaaagacagcaacaccaagaaggccggcaagacaggccccatgaaaaccctgctggttagagtgatgacacccgatctgagagagcggctggaaaacctgagaaagaagcctgaaaatatcccccagcccatcagcaatacatctagagccaacctgaataagctgctgaccgattacaccgaaatgaagaaggcgatcctgcatgtgtactgggaagagttccagaaggaccctgtgggcctgatgagccgggtggcccagcctgccagcaagaagatcgatcagaacaagctgaaacctgagatggacgagaagggcaacctgaccaccgccggctttgcctgctctcagtgtggccagcccctgttcgtgtacaagctggagcaggtgtctgagaagggcaaggcttacaccaactacttcggacggtgcaatgtggccgagcacgaaaagctgatcctgctggcccagctgaagcccgagaaggatagcgacgaagccgtgacatatagcctgggaaagtttgggcagagggccctggatttctacagcattcatgtgaccaaggagtccacccaccccgtgaagcccctggcccagatcgccggaaacagatacgcctccggacctgtgggaaaggccctgagcgacgcatgtatgggcacaatcgcctccttcctgtctaagtaccaggacatcatcatcgaacaccagaaggtggtgaagggcaaccagaagagactggagagcctgcgggagctggccggcaaggaaaacctggaataccctagcgtgaccctgccacctcagcctcacaccaaggagggcgttgatgcctacaacgaagtgatcgcccgggtgcgaatgtgggtgaacctgaacctgtggcagaagctgaagctaagcagagatgatgccaagcctctgctgagactgaagggattcccttcctttcctctggtcgagagacaggccaacgaagtggactggtgggacatggtgtgtaacgtgaagaagctgatcaacgagaaaaaggaggatggcaaggtgttttggcagaatctggctggctacaagagacaggaagccctgagaccatacctgagcagcgaggaagatcggaagaagggaaagaaattcgctcggtaccagctgggcgacctgctgctgcacctggaaaagaagcacggcgaggactggggaaaggtgtacgacgaggcctgggagcggattgacaagaaagtggaaggcctgagcaagcacatcaagctggaagaggaacggagaagcgaggacgcccagagcaaggccgccctgaccgactggctgcgggctaaggccagcttcgtgatcgagggcctgaaggaggccgacaaggacgagttctgcagatgcgagctgaagctgcagaagtggtacggggacctgcggggaaagcccttcgccatcgaagccgagaacagcatcctggacatcagcggcttcagcaagcagtacaactgtgccttcatctggcagaaggacggcgtgaagaagctgaacctgtacctgatcatcaactacttcaagggcggcaagctgcggttcaagaagatcaaacctgaagccttcgaagccaacagattctacaccgtgatcaacaaaaagagcggcgagatcgtgcccatggaggtgaacttcaacttcgacgaccccaacctgatcatcctgcctctggcctttggcaagagacagggcagagaattcatctggaacgacctgctgtccctggaaaccggcagcctgaagctggccaacggaagagtgatcgagaagacactgtacaacagaagaacccggcaggatgagcctgccctgttcgtggccctgaccttcgagcggcgggaggtcctggactcctccaatatcaaaccaatgaacctgatcggcgtggcaagaggcgaaaacatccccgccgtgatcgccctgaccgaccccgagggctgcccactgagccggtttaaggatagcctgggaaacccaacccacatcctgagaatcggcgagagctataaggagaagcagcggaccatccaggccaagaaggaggtggagcagcggagagccggcggctacagccggaagtacgccagcaaagccaagaatctggcagacgatatggtgagaaacaccgctagagatctgctgtactacgccgtgacccaggatgccatgctgatcttcgccaacctgagccggggcttcggccggcagggcaagcggaccttcatggccgagagacagtacacacggatggaggactggctgaccgccaagctggcctacgagggcctgagcaagacctacctgtccaagacactggcccagtacacctccaagacatgcagcaactgtgggtttaccatcaccagcgccgactacgacagggtgctggagaagctgaagaagacagcaacaggctggatgaccacaattaacggcaaggagctgaaggtggagggccagattacctactacaacagatacaagagacagaacgtagtcaaggacctgtccgtcgagctggatagactgagcgaagaatctgtgaacaacgacatctcctcctggacaaagggcagaagcggagaagctctgagcctcctgaagaaaagattctcccatagacccgtgcaggagaagttcgtgtgcctgaactgcggcttcgagacacacgcagccgagcaagccgccctgaacatcgccagatcctggctgttcctgcggagccaggagtacaagaaataccagacaaacaagacaaccggcaacaccgataagagagccttcgtcgagacctggcagtccttttaccggaagaagcttaaggaggtgtggaaacctgccgtgcggtctggcggatctggcggaggctccaccagccccaagaaaaagagaaaagtctaagctgccttctgcggggcttgccttctggccatgcccttcttctctcccttgcacctgtacctcttggtctttgaataaagcctgagtaggaaggctagcaaaaaaaaaaaaaaaaaaaaaaaaaaaaaaaaaaaaaaaaaaaaaaaaaaaaaaaaaaaaaaaaaaaaaaaaaaaaaaaagcccagccggctccccaacctctaccgaggagggcacctctgagtccgccacccccgagagcggccctggcacctccaccgagcccagcgagggcagcgcacccggcagccctgccggcagccccacctccacagaggagggaaccagcaccgagcccagcgaaggcagcgccccaggcaccagcaccgagcctagtgagcaggagattaaacggatcaacaagatcagaagaagacttgtgaaagacagcaacaccaagaaggccggcaagacaggccccatgaaaaccctgctggttagagtgatgacacccgatctgagagagcggctggaaaacctgagaaagaagcctgaaaatatcccccagcccatcagcaatacatctagagccaacctgaataagctgctgaccgattacaccgaaatgaagaaggcgatcctgcatgtgtactgggaagagttccagaaggaccctgtgggcctgatgagccgggtggcccagcctgccagcaagaagatcgatcagaacaagctgaaacctgagatggacgagaagggcaacctgaccaccgccggctttgcctgctctcagtgtggccagcccctgttcgtgtacaagctggagcaggtgtctgagaagggcaaggcttacaccaactacttcggacggtgcaatgtggccgagcacgaaaagctgatcctgctggcccagctgaagcccgagaaggatagcgacgaagccgtgacatatagcctgggaaagtttgggcagagggccctggatttctacagcattcatgtgaccaaggagtccacccaccccgtgaagcccctggcccagatcgccggaaacagatacgcctccggacctgtgggaaaggccctgagcgacgcatgtatgggcacaatcgcctccttcctgtctaagtaccaggacatcatcatcgaacaccagaaggtggtgaagggcaaccagaagagactggagagcctgcgggagctggccggcaaggaaaacctggaataccctagcgtgaccctgccacctcagcctcacaccaaggagggcgttgatgcctacaacgaagtgatcgcccgggtgcgaatgtgggtgaacctgaacctgtggcagaagctgaagctaagcagagatgatgccaagcctctgctgagactgaagggattcccttcctttcctctggtcgagagacaggccaacgaagtggactggtgggacatggtgtgtaacgtgaagaagctgatcaacgagaaaaaggaggatggcaaggtgttttggcagaatctggctggctacaagagacaggaagccctgagaccatacctgagcagcgaggaagatcggaagaagggaaagaaattcgctcggtaccagctgggcgacctgctgctgcacctggaaaagaagcacggcgaggactggggaaaggtgtacgacgaggcctgggagcggattgacaagaaagtggaaggcctgagcaagcacatcaagctggaagaggaacggagaagcgaggacgcccagagcaaggccgccctgaccgactggctgcgggctaaggccagcttcgtgatcgagggcctgaaggaggccgacaaggacgagttctgcagatgcgagctgaagctgcagaagtggtacggggacctgcggggaaagcccttcgccatcgaagccgagaacagcatcctggacatcagcggcttcagcaagcagtacaactgtgccttcatctggcagaaggacggcgtgaagaagctgaacctgtacctgatcatcaactacttcaagggcggcaagctgcggttcaagaagatcaaacctgaagccttcgaagccaacagattctacaccgtgatcaacaaaaagagcggcgagatcgtgcccatggaggtgaacttcaacttcgacgaccccaacctgatcatcctgcctctggcctttggcaagagacagggcagagaattcatctggaacgacctgctgtccctggaaaccggcagcctgaagctggccaacggaagagtgatcgagaagacactgtacaacagaagaacccggcaggatgagcctgccctgttcgtggccctgaccttcgagcggcgggaggtcctggactcctccaatatcaaaccaatgaacctgatcggcgtggcaagaggcgaaaacatccccgccgtgatcgccctgaccgaccccgagggctgcccactgagccggtttaaggatagcctgggaaacccaacccacatcctgagaatcggcgagagctataaggagaagcagcggaccatccaggccaagaaggaggtggagcagcggagagccggcggctacagccggaagtacgccagcaaagccaagaatctggcagacgatatggtgagaaacaccgctagagatctgctgtactacgccgtgacccaggatgccatgctgatcttcgccaacctgagccggggcttcggccggcagggcaagcggaccttcatggccgagagacagtacacacggatggaggactggctgaccgccaagctggcctacgagggcctgagcaagacctacctgtccaagacactggcccagtacacctccaagacatgcagcaactgtgggtttaccatcaccagcgccgactacgacagggtgctggagaagctgaagaagacagcaacaggctggatgaccacaattaacggcaaggagctgaaggtggagggccagattacctactacaacagatacaagagacagaacgtagtcaaggacctgtccgtcgagctggatagactgagcgaagaatctgtgaacaacgacatctcctcctggacaaagggcagaagcggagaagctctgagcctcctgaagaaaagattctcccatagacccgtgcaggagaagttcgtgtgcctgaactgcggcttcgagacacacgcagccgagcaagccgccctgaacatcgccagatcctggctgttcctgcggagccaggagtacaagaaataccagacaaacaagacaaccggcaacaccgataagagagccttcgtcgagacctggcagtccttttaccggaagaagcttaaggaggtgtggaaacctgccgtgcggtctggcggatctggcggaggctccaccagccccaagaaaaagagaaaagtctaagctgccttctgcggggcttgccttctggccatgcccttcttctctcccttgcacctgtacctcttggtctttgaataaagcctgagtaggaaggctagcaaaaaaaaaaaaaaaaaaaaaaaaaaaaaaaaaaaaaaaaaaaaaaaaaaaaaaaaaaaaaaaaaaaaaaaaaaaaaaaa

SEQ ID NO: 9951 - RNA, 8787 nt, synthetic construct
  source 1..8787: mol_type = other RNA
aggaaataagagagaaaagaagagtaagaagaaatataagagccaccatggcccctaagaagaagcgtaaagtgagccggatgaaccacgaccaggagttcgacccccctaaggtgtaccctcccgtccccgccgagaagagaaagcccatccgggtcctgagcctgttcgatggcatcgccaccggtctgctggtgctgaaggacctgggcatccaggtggataggtacattgcctccgaggtgtgcgaggactccatcaccgtgggaatggtgcgtcatcagggcaagatcatgtacgtgggcgacgtgcggagcgtgacacagaagcatatccaggagtggggccctttcgacctggtgatcggcggcagcccttgcaatgacctgagcatcgtgaacccagcccggaagggcctgtacgagggaaccggcagactgttcttcgagttttacagactgctgcacgacgcccggcctaaggaaggcgacgaccggcccttcttttggctgttcgagaatgtggtggccatgggagtcagcgacaagcgggatattagccggttcctggagagcaaccccgtgatgatcgatgccaaggaagtgagcgccgcccaccgggccagatacttctggggcaatctgcctggcatgaacagacccctggccagcaccgtgaacgacaagctggagctgcaggagtgcctggagcacggccggatcgccaagttcagcaaggtgagaaccatcaccacccgaagcaacagcatcaaacaaggcaaggaccagcactttcctgtgttcatgaacgagaaggaggacatcctgtggtgtaccgagatggagagagtgttcgggttcccagtccactacacagatgtcagcaacatgtctagactggccagacagagactgctgggaagaagctggtccgtccctgtgatcagacacctgttcgcccctctgaaggagtacttcgcctgcgtgagcagcggcaacagcaacgccaacagccggggccccagcttctctagcggcctggtgccactgtccctgagagggagccacatgggccccatggagatctacaaaaccgtgagcgcctggaagcggcagcctgtgcgcgtgctgagcctgtttcggaatatcgataaagtcctgaaaagcctgggattcctggagagcggctctggctccggcggtggcaccctgaagtacgtggaggatgtgacaaacgtggtcagacgggatgtggagaagtggggccccttcgatctggtgtacggcagcacccaacccctgggcagctcttgtgaccggtgccctggctggtacatgtttcagttccaccggatcctgcagtacgccctgccgagacaggagtcccagcggccattcttttggattttcatggacaacttgctgctgaccgaggatgaccaggaaactaccactcggttcctgcagaccgaagccgtgaccctgcaggacgtgagaggccgggactaccagaacgccatgcgggtgtggtccaacatccctggactgaaaagcaagcacgcacctctgacccctaaagaagaggagtacctgcaggcccaggtgcggagcagaagcaagctggacgcccctaaggtggatctgctggtgaagaattgcctcctgcccctgagagagtacttcaagtatttcagccagaatagtctgcccctgggaggcagcggcggcggctgccaggagctggtgaccttcgaggacgtggccgtgtacttcagcctggaggagtgggagaggctggaggccgaccagaggggcctgtaccaggaggtgatgcaggagaactacggcatcctggtgagcctgggctaccccatccccaagcccgacctgatcttcaggctggagcagggcgaggagccctgggtgcccgacagccccaggcccgaggagggcgacatcgtgaccggcgtgtacggcggcccaagcagcggcgcccctcctcccagcggcggcaggcggcccaagcagcggcgcccctcctcccagcggcggcagcccagccggctccccaacctctaccgaggagggcacctctgagtccgccacccccgagagcggccctggcacctccaccgagcccagcgagggcagcgcacccggcagccctgccggcagccccacctccacagaggagggaaccagcaccgagcccagcgaaggcagcgccccaggcaccagcaccgagcctagtgagcaggagattaaacggatcaacaagatcagaagaagacttgtgaaagacagcaacaccaagaaggccggcaagacaggccccatgaaaaccctgctggttagagtgatgacacccgatctgagagagcggctggaaaacctgagaaagaagcctgaaaatatcccccagcccatcagcaatacatctagagccaacctgaataagctgctgaccgattacaccgaaatgaagaaggcgatcctgcatgtgtactgggaagagttccagaaggaccctgtgggcctgatgagccgggtggcccagcctgccagcaagaagatcgatcagaacaagctgaaacctgagatggacgagaagggcaacctgaccaccgccggctttgcctgctctcagtgtggccagcccctgttcgtgtacaagctggagcaggtgtctgagaagggcaaggcttacaccaactacttcggacggtgcaatgtggccgagcacgaaaagctgatcctgctggcccagctgaagcccgagaaggatagcgacgaagccgtgacatatagcctgggaaagtttgggcagagggccctggatttctacagcattcatgtgaccaaggagtccacccaccccgtgaagcccctggcccagatcgccggaaacagatacgcctccggacctgtgggaaaggccctgagcgacgcatgtatgggcacaatcgcctccttcctgtctaagtaccaggacatcatcatcgaacaccagaaggtggtgaagggcaaccagaagagactggagagcctgcgggagctggccggcaaggaaaacctggaataccctagcgtgaccctgccacctcagcctcacaccaaggagggcgttgatgcctacaacgaagtgatcgcccgggtgcgaatgtgggtgaacctgaacctgtggcagaagctgaagctaagcagagatgatgccaagcctctgctgagactgaagggattcccttcctttcctctggtcgagagacaggccaacgaagtggactggtgggacatggtgtgtaacgtgaagaagctgatcaacgagaaaaaggaggatggcaaggtgttttggcagaatctggctggctacaagagacaggaagccctgagaccatacctgagcagcgaggaagatcggaagaagggaaagaaattcgctcggtaccagctgggcgacctgctgctgcacctggaaaagaagcacggcgaggactggggaaaggtgtacgacgaggcctgggagcggattgacaagaaagtggaaggcctgagcaagcacatcaagctggaagaggaacggagaagcgaggacgcccagagcaaggccgccctgaccgactggctgcgggctaaggccagcttcgtgatcgagggcctgaaggaggccgacaaggacgagttctgcagatgcgagctgaagctgcagaagtggtacggggacctgcggggaaagcccttcgccatcgaagccgagaacagcatcctggacatcagcggcttcagcaagcagtacaactgtgccttcatctggcagaaggacggcgtgaagaagctgaacctgtacctgatcatcaactacttcaagggcggcaagctgcggttcaagaagatcaaacctgaagccttcgaagccaacagattctacaccgtgatcaacaaaaagagcggcgagatcgtgcccatggaggtgaacttcaacttcgacgaccccaacctgatcatcctgcctctggcctttggcaagagacagggcagagaattcatctggaacgacctgctgtccctggaaaccggcagcctgaagctggccaacggaagagtgatcgagaagacactgtacaacagaagaacccggcaggatgagcctgccctgttcgtggccctgaccttcgagcggcgggaggtcctggactcctccaatatcaaaccaatgaacctgatcggcgtggcaagaggcgaaaacatccccgccgtgatcgccctgaccgaccccgagggctgcccactgagccggtttaaggatagcctgggaaacccaacccacatcctgagaatcggcgagagctataaggagaagcagcggaccatccaggccaagaaggaggtggagcagcggagagccggcggctacagccggaagtacgccagcaaagccaagaatctggcagacgatatggtgagaaacaccgctagagatctgctgtactacgccgtgacccaggatgccatgctgatcttcgccaacctgagccggggcttcggccggcagggcaagcggaccttcatggccgagagacagtacacacggatggaggactggctgaccgccaagctggcctacgagggcctgagcaagacctacctgtccaagacactggcccagtacacctccaagacatgcagcaactgtgggtttaccatcaccagcgccgactacgacagggtgctggagaagctgaagaagacagcaacaggctggatgaccacaattaacggcaaggagctgaaggtggagggccagattacctactacaacagatacaagagacagaacgtagtcaaggacctgtccgtcgagctggatagactgagcgaagaatctgtgaacaacgacatctcctcctggacaaagggcagaagcggagaagctctgagcctcctgaagaaaagattctcccatagacccgtgcaggagaagttcgtgtgcctgaactgcggcttcgagacacacgcagccgagcaagccgccctgaacatcgccagatcctggctgttcctgcggagccaggagtacaagaaataccagacaaacaagacaaccggcaacaccgataagagagccttcgtcgagacctggcagtccttttaccggaagaagcttaaggaggtgtggaaacctgccgtgcggtctggcggatctggcggaggctccaccagccccaagaaaaagagaaaagtctaagctgccttctgcggggcttgccttctggccatgcccttcttctctcccttgcacctgtacctcttggtctttgaataaagcctgagtaggaaggctagcaaaaaaaaaaaaaaaaaaaaaaaaaaaaaaaaaaaaaaaaaaaaaaaaaaaaaaaaaaaaaaaaaaaaaaaaaaaaaaaagcccagccggctccccaacctctaccgaggagggcacctctgagtccgccacccccgagagcggccctggcacctccaccgagcccagcgagggcagcgcacccggcagccctgccggcagccccacctccacagaggagggaaccagcaccgagcccagcgaaggcagcgccccaggcaccagcaccgagcctagtgagcaggagattaaacggatcaacaagatcagaagaagacttgtgaaagacagcaacaccaagaaggccggcaagacaggccccatgaaaaccctgctggttagagtgatgacacccgatctgagagagcggctggaaaacctgagaaagaagcctgaaaatatcccccagcccatcagcaatacatctagagccaacctgaataagctgctgaccgattacaccgaaatgaagaaggcgatcctgcatgtgtactgggaagagttccagaaggaccctgtgggcctgatgagccgggtggcccagcctgccagcaagaagatcgatcagaacaagctgaaacctgagatggacgagaagggcaacctgaccaccgccggctttgcctgctctcagtgtggccagcccctgttcgtgtacaagctggagcaggtgtctgagaagggcaaggcttacaccaactacttcggacggtgcaatgtggccgagcacgaaaagctgatcctgctggcccagctgaagcccgagaaggatagcgacgaagccgtgacatatagcctgggaaagtttgggcagagggccctggatttctacagcattcatgtgaccaaggagtccacccaccccgtgaagcccctggcccagatcgccggaaacagatacgcctccggacctgtgggaaaggccctgagcgacgcatgtatgggcacaatcgcctccttcctgtctaagtaccaggacatcatcatcgaacaccagaaggtggtgaagggcaaccagaagagactggagagcctgcgggagctggccggcaaggaaaacctggaataccctagcgtgaccctgccacctcagcctcacaccaaggagggcgttgatgcctacaacgaagtgatcgcccgggtgcgaatgtgggtgaacctgaacctgtggcagaagctgaagctaagcagagatgatgccaagcctctgctgagactgaagggattcccttcctttcctctggtcgagagacaggccaacgaagtggactggtgggacatggtgtgtaacgtgaagaagctgatcaacgagaaaaaggaggatggcaaggtgttttggcagaatctggctggctacaagagacaggaagccctgagaccatacctgagcagcgaggaagatcggaagaagggaaagaaattcgctcggtaccagctgggcgacctgctgctgcacctggaaaagaagcacggcgaggactggggaaaggtgtacgacgaggcctgggagcggattgacaagaaagtggaaggcctgagcaagcacatcaagctggaagaggaacggagaagcgaggacgcccagagcaaggccgccctgaccgactggctgcgggctaaggccagcttcgtgatcgagggcctgaaggaggccgacaaggacgagttctgcagatgcgagctgaagctgcagaagtggtacggggacctgcggggaaagcccttcgccatcgaagccgagaacagcatcctggacatcagcggcttcagcaagcagtacaactgtgccttcatctggcagaaggacggcgtgaagaagctgaacctgtacctgatcatcaactacttcaagggcggcaagctgcggttcaagaagatcaaacctgaagccttcgaagccaacagattctacaccgtgatcaacaaaaagagcggcgagatcgtgcccatggaggtgaacttcaacttcgacgaccccaacctgatcatcctgcctctggcctttggcaagagacagggcagagaattcatctggaacgacctgctgtccctggaaaccggcagcctgaagctggccaacggaagagtgatcgagaagacactgtacaacagaagaacccggcaggatgagcctgccctgttcgtggccctgaccttcgagcggcgggaggtcctggactcctccaatatcaaaccaatgaacctgatcggcgtggcaagaggcgaaaacatccccgccgtgatcgccctgaccgaccccgagggctgcccactgagccggtttaaggatagcctgggaaacccaacccacatcctgagaatcggcgagagctataaggagaagcagcggaccatccaggccaagaaggaggtggagcagcggagagccggcggctacagccggaagtacgccagcaaagccaagaatctggcagacgatatggtgagaaacaccgctagagatctgctgtactacgccgtgacccaggatgccatgctgatcttcgccaacctgagccggggcttcggccggcagggcaagcggaccttcatggccgagagacagtacacacggatggaggactggctgaccgccaagctggcctacgagggcctgagcaagacctacctgtccaagacactggcccagtacacctccaagacatgcagcaactgtgggtttaccatcaccagcgccgactacgacagggtgctggagaagctgaagaagacagcaacaggctggatgaccacaattaacggcaaggagctgaaggtggagggccagattacctactacaacagatacaagagacagaacgtagtcaaggacctgtccgtcgagctggatagactgagcgaagaatctgtgaacaacgacatctcctcctggacaaagggcagaagcggagaagctctgagcctcctgaagaaaagattctcccatagacccgtgcaggagaagttcgtgtgcctgaactgcggcttcgagacacacgcagccgagcaagccgccctgaacatcgccagatcctggctgttcctgcggagccaggagtacaagaaataccagacaaacaagacaaccggcaacaccgataagagagccttcgtcgagacctggcagtccttttaccggaagaagcttaaggaggtgtggaaacctgccgtgcggtctggcggatctggcggaggctccaccagccccaagaaaaagagaaaagtctaagctgccttctgcggggcttgccttctggccatgcccttcttctctcccttgcacctgtacctcttggtctttgaataaagcctgagtaggaaggctagcaaaaaaaaaaaaaaaaaaaaaaaaaaaaaaaaaaaaaaaaaaaaaaaaaaaaaaaaaaaaaaaaaaaaaaaaaaaaaaaa

SEQ ID NO: 9952 - RNA, 8787 nt, synthetic construct
  source 1..8787: mol_type = other RNA
aggaaataagagagaaaagaagagtaagaagaaatataagagccaccatggcccctaagaagaagcgtaaagtgagccggatgaaccacgaccaggagttcgacccccctaaggtgtaccctcccgtccccgccgagaagagaaagcccatccgggtcctgagcctgttcgatggcatcgccaccggtctgctggtgctgaaggacctgggcatccaggtggataggtacattgcctccgaggtgtgcgaggactccatcaccgtgggaatggtgcgtcatcagggcaagatcatgtacgtgggcgacgtgcggagcgtgacacagaagcatatccaggagtggggccctttcgacctggtgatcggcggcagcccttgcaatgacctgagcatcgtgaacccagcccggaagggcctgtacgagggaaccggcagactgttcttcgagttttacagactgctgcacgacgcccggcctaaggaaggcgacgaccggcccttcttttggctgttcgagaatgtggtggccatgggagtcagcgacaagcgggatattagccggttcctggagagcaaccccgtgatgatcgatgccaaggaagtgagcgccgcccaccgggccagatacttctggggcaatctgcctggcatgaacagacccctggccagcaccgtgaacgacaagctggagctgcaggagtgcctggagcacggccggatcgccaagttcagcaaggtgagaaccatcaccacccgaagcaacagcatcaaacaaggcaaggaccagcactttcctgtgttcatgaacgagaaggaggacatcctgtggtgtaccgagatggagagagtgttcgggttcccagtccactacacagatgtcagcaacatgtctagactggccagacagagactgctgggaagaagctggtccgtccctgtgatcagacacctgttcgcccctctgaaggagtacttcgcctgcgtgagcagcggcaacagcaacgccaacagccggggccccagcttctctagcggcctggtgccactgtccctgagagggagccacatgggccccatggagatctacaaaaccgtgagcgcctggaagcggcagcctgtgcgcgtgctgagcctgtttcggaatatcgataaagtcctgaaaagcctgggattcctggagagcggctctggctccggcggtggcaccctgaagtacgtggaggatgtgacaaacgtggtcagacgggatgtggagaagtggggccccttcgatctggtgtacggcagcacccaacccctgggcagctcttgtgaccggtgccctggctggtacatgtttcagttccaccggatcctgcagtacgccctgccgagacaggagtcccagcggccattcttttggattttcatggacaacttgctgctgaccgaggatgaccaggaaactaccactcggttcctgcagaccgaagccgtgaccctgcaggacgtgagaggccgggactaccagaacgccatgcgggtgtggtccaacatccctggactgaaaagcaagcacgcacctctgacccctaaagaagaggagtacctgcaggcccaggtgcggagcagaagcaagctggacgcccctaaggtggatctgctggtgaagaattgcctcctgcccctgagagagtacttcaagtatttcagccagaatagtctgcccctgggaggcagcggcggcggcatgagccagggcctggtgaccttcagggacgtggccatcgacttcagccaggaggagtggaagtggctgcagcccgcccagagggacctgtacaggtgcgtgatgctggagaactacggccacctggtgagcctgggcctgagcatcagcaagcccgacgtggtgagcctgctggagcagggcaaggagccctggctgggcaagagggaggtgaagagggacctgttcagcgtgagcgagagcggcggcccaagcagcggcgcccctcctcccagcggcggcaggcggcccaagcagcggcgcccctcctcccagcggcggcagcccagccggctccccaacctctaccgaggagggcacctctgagtccgccacccccgagagcggccctggcacctccaccgagcccagcgagggcagcgcacccggcagccctgccggcagccccacctccacagaggagggaaccagcaccgagcccagcgaaggcagcgccccaggcaccagcaccgagcctagtgagcaggagattaaacggatcaacaagatcagaagaagacttgtgaaagacagcaacaccaagaaggccggcaagacaggccccatgaaaaccctgctggttagagtgatgacacccgatctgagagagcggctggaaaacctgagaaagaagcctgaaaatatcccccagcccatcagcaatacatctagagccaacctgaataagctgctgaccgattacaccgaaatgaagaaggcgatcctgcatgtgtactgggaagagttccagaaggaccctgtgggcctgatgagccgggtggcccagcctgccagcaagaagatcgatcagaacaagctgaaacctgagatggacgagaagggcaacctgaccaccgccggctttgcctgctctcagtgtggccagcccctgttcgtgtacaagctggagcaggtgtctgagaagggcaaggcttacaccaactacttcggacggtgcaatgtggccgagcacgaaaagctgatcctgctggcccagctgaagcccgagaaggatagcgacgaagccgtgacatatagcctgggaaagtttgggcagagggccctggatttctacagcattcatgtgaccaaggagtccacccaccccgtgaagcccctggcccagatcgccggaaacagatacgcctccggacctgtgggaaaggccctgagcgacgcatgtatgggcacaatcgcctccttcctgtctaagtaccaggacatcatcatcgaacaccagaaggtggtgaagggcaaccagaagagactggagagcctgcgggagctggccggcaaggaaaacctggaataccctagcgtgaccctgccacctcagcctcacaccaaggagggcgttgatgcctacaacgaagtgatcgcccgggtgcgaatgtgggtgaacctgaacctgtggcagaagctgaagctaagcagagatgatgccaagcctctgctgagactgaagggattcccttcctttcctctggtcgagagacaggccaacgaagtggactggtgggacatggtgtgtaacgtgaagaagctgatcaacgagaaaaaggaggatggcaaggtgttttggcagaatctggctggctacaagagacaggaagccctgagaccatacctgagcagcgaggaagatcggaagaagggaaagaaattcgctcggtaccagctgggcgacctgctgctgcacctggaaaagaagcacggcgaggactggggaaaggtgtacgacgaggcctgggagcggattgacaagaaagtggaaggcctgagcaagcacatcaagctggaagaggaacggagaagcgaggacgcccagagcaaggccgccctgaccgactggctgcgggctaaggccagcttcgtgatcgagggcctgaaggaggccgacaaggacgagttctgcagatgcgagctgaagctgcagaagtggtacggggacctgcggggaaagcccttcgccatcgaagccgagaacagcatcctggacatcagcggcttcagcaagcagtacaactgtgccttcatctggcagaaggacggcgtgaagaagctgaacctgtacctgatcatcaactacttcaagggcggcaagctgcggttcaagaagatcaaacctgaagccttcgaagccaacagattctacaccgtgatcaacaaaaagagcggcgagatcgtgcccatggaggtgaacttcaacttcgacgaccccaacctgatcatcctgcctctggcctttggcaagagacagggcagagaattcatctggaacgacctgctgtccctggaaaccggcagcctgaagctggccaacggaagagtgatcgagaagacactgtacaacagaagaacccggcaggatgagcctgccctgttcgtggccctgaccttcgagcggcgggaggtcctggactcctccaatatcaaaccaatgaacctgatcggcgtggcaagaggcgaaaacatccccgccgtgatcgccctgaccgaccccgagggctgcccactgagccggtttaaggatagcctgggaaacccaacccacatcctgagaatcggcgagagctataaggagaagcagcggaccatccaggccaagaaggaggtggagcagcggagagccggcggctacagccggaagtacgccagcaaagccaagaatctggcagacgatatggtgagaaacaccgctagagatctgctgtactacgccgtgacccaggatgccatgctgatcttcgccaacctgagccggggcttcggccggcagggcaagcggaccttcatggccgagagacagtacacacggatggaggactggctgaccgccaagctggcctacgagggcctgagcaagacctacctgtccaagacactggcccagtacacctccaagacatgcagcaactgtgggtttaccatcaccagcgccgactacgacagggtgctggagaagctgaagaagacagcaacaggctggatgaccacaattaacggcaaggagctgaaggtggagggccagattacctactacaacagatacaagagacagaacgtagtcaaggacctgtccgtcgagctggatagactgagcgaagaatctgtgaacaacgacatctcctcctggacaaagggcagaagcggagaagctctgagcctcctgaagaaaagattctcccatagacccgtgcaggagaagttcgtgtgcctgaactgcggcttcgagacacacgcagccgagcaagccgccctgaacatcgccagatcctggctgttcctgcggagccaggagtacaagaaataccagacaaacaagacaaccggcaacaccgataagagagccttcgtcgagacctggcagtccttttaccggaagaagcttaaggaggtgtggaaacctgccgtgcggtctggcggatctggcggaggctccaccagccccaagaaaaagagaaaagtctaagctgccttctgcggggcttgccttctggccatgcccttcttctctcccttgcacctgtacctcttggtctttgaataaagcctgagtaggaaggctagcaaaaaaaaaaaaaaaaaaaaaaaaaaaaaaaaaaaaaaaaaaaaaaaaaaaaaaaaaaaaaaaaaaaaaaaaaaaaaaaagcccagccggctccccaacctctaccgaggagggcacctctgagtccgccacccccgagagcggccctggcacctccaccgagcccagcgagggcagcgcacccggcagccctgccggcagccccacctccacagaggagggaaccagcaccgagcccagcgaaggcagcgccccaggcaccagcaccgagcctagtgagcaggagattaaacggatcaacaagatcagaagaagacttgtgaaagacagcaacaccaagaaggccggcaagacaggccccatgaaaaccctgctggttagagtgatgacacccgatctgagagagcggctggaaaacctgagaaagaagcctgaaaatatcccccagcccatcagcaatacatctagagccaacctgaataagctgctgaccgattacaccgaaatgaagaaggcgatcctgcatgtgtactgggaagagttccagaaggaccctgtgggcctgatgagccgggtggcccagcctgccagcaagaagatcgatcagaacaagctgaaacctgagatggacgagaagggcaacctgaccaccgccggctttgcctgctctcagtgtggccagcccctgttcgtgtacaagctggagcaggtgtctgagaagggcaaggcttacaccaactacttcggacggtgcaatgtggccgagcacgaaaagctgatcctgctggcccagctgaagcccgagaaggatagcgacgaagccgtgacatatagcctgggaaagtttgggcagagggccctggatttctacagcattcatgtgaccaaggagtccacccaccccgtgaagcccctggcccagatcgccggaaacagatacgcctccggacctgtgggaaaggccctgagcgacgcatgtatgggcacaatcgcctccttcctgtctaagtaccaggacatcatcatcgaacaccagaaggtggtgaagggcaaccagaagagactggagagcctgcgggagctggccggcaaggaaaacctggaataccctagcgtgaccctgccacctcagcctcacaccaaggagggcgttgatgcctacaacgaagtgatcgcccgggtgcgaatgtgggtgaacctgaacctgtggcagaagctgaagctaagcagagatgatgccaagcctctgctgagactgaagggattcccttcctttcctctggtcgagagacaggccaacgaagtggactggtgggacatggtgtgtaacgtgaagaagctgatcaacgagaaaaaggaggatggcaaggtgttttggcagaatctggctggctacaagagacaggaagccctgagaccatacctgagcagcgaggaagatcggaagaagggaaagaaattcgctcggtaccagctgggcgacctgctgctgcacctggaaaagaagcacggcgaggactggggaaaggtgtacgacgaggcctgggagcggattgacaagaaagtggaaggcctgagcaagcacatcaagctggaagaggaacggagaagcgaggacgcccagagcaaggccgccctgaccgactggctgcgggctaaggccagcttcgtgatcgagggcctgaaggaggccgacaaggacgagttctgcagatgcgagctgaagctgcagaagtggtacggggacctgcggggaaagcccttcgccatcgaagccgagaacagcatcctggacatcagcggcttcagcaagcagtacaactgtgccttcatctggcagaaggacggcgtgaagaagctgaacctgtacctgatcatcaactacttcaagggcggcaagctgcggttcaagaagatcaaacctgaagccttcgaagccaacagattctacaccgtgatcaacaaaaagagcggcgagatcgtgcccatggaggtgaacttcaacttcgacgaccccaacctgatcatcctgcctctggcctttggcaagagacagggcagagaattcatctggaacgacctgctgtccctggaaaccggcagcctgaagctggccaacggaagagtgatcgagaagacactgtacaacagaagaacccggcaggatgagcctgccctgttcgtggccctgaccttcgagcggcgggaggtcctggactcctccaatatcaaaccaatgaacctgatcggcgtggcaagaggcgaaaacatccccgccgtgatcgccctgaccgaccccgagggctgcccactgagccggtttaaggatagcctgggaaacccaacccacatcctgagaatcggcgagagctataaggagaagcagcggaccatccaggccaagaaggaggtggagcagcggagagccggcggctacagccggaagtacgccagcaaagccaagaatctggcagacgatatggtgagaaacaccgctagagatctgctgtactacgccgtgacccaggatgccatgctgatcttcgccaacctgagccggggcttcggccggcagggcaagcggaccttcatggccgagagacagtacacacggatggaggactggctgaccgccaagctggcctacgagggcctgagcaagacctacctgtccaagacactggcccagtacacctccaagacatgcagcaactgtgggtttaccatcaccagcgccgactacgacagggtgctggagaagctgaagaagacagcaacaggctggatgaccacaattaacggcaaggagctgaaggtggagggccagattacctactacaacagatacaagagacagaacgtagtcaaggacctgtccgtcgagctggatagactgagcgaagaatctgtgaacaacgacatctcctcctggacaaagggcagaagcggagaagctctgagcctcctgaagaaaagattctcccatagacccgtgcaggagaagttcgtgtgcctgaactgcggcttcgagacacacgcagccgagcaagccgccctgaacatcgccagatcctggctgttcctgcggagccaggagtacaagaaataccagacaaacaagacaaccggcaacaccgataagagagccttcgtcgagacctggcagtccttttaccggaagaagcttaaggaggtgtggaaacctgccgtgcggtctggcggatctggcggaggctccaccagccccaagaaaaagagaaaagtctaagctgccttctgcggggcttgccttctggccatgcccttcttctctcccttgcacctgtacctcttggtctttgaataaagcctgagtaggaaggctagcaaaaaaaaaaaaaaaaaaaaaaaaaaaaaaaaaaaaaaaaaaaaaaaaaaaaaaaaaaaaaaaaaaaaaaaaaaaaaaaa

SEQ ID NO: 9953 - RNA, 8787 nt, synthetic construct
  source 1..8787: mol_type = other RNA
aggaaataagagagaaaagaagagtaagaagaaatataagagccaccatggcccctaagaagaagcgtaaagtgagccggatgaaccacgaccaggagttcgacccccctaaggtgtaccctcccgtccccgccgagaagagaaagcccatccgggtcctgagcctgttcgatggcatcgccaccggtctgctggtgctgaaggacctgggcatccaggtggataggtacattgcctccgaggtgtgcgaggactccatcaccgtgggaatggtgcgtcatcagggcaagatcatgtacgtgggcgacgtgcggagcgtgacacagaagcatatccaggagtggggccctttcgacctggtgatcggcggcagcccttgcaatgacctgagcatcgtgaacccagcccggaagggcctgtacgagggaaccggcagactgttcttcgagttttacagactgctgcacgacgcccggcctaaggaaggcgacgaccggcccttcttttggctgttcgagaatgtggtggccatgggagtcagcgacaagcgggatattagccggttcctggagagcaaccccgtgatgatcgatgccaaggaagtgagcgccgcccaccgggccagatacttctggggcaatctgcctggcatgaacagacccctggccagcaccgtgaacgacaagctggagctgcaggagtgcctggagcacggccggatcgccaagttcagcaaggtgagaaccatcaccacccgaagcaacagcatcaaacaaggcaaggaccagcactttcctgtgttcatgaacgagaaggaggacatcctgtggtgtaccgagatggagagagtgttcgggttcccagtccactacacagatgtcagcaacatgtctagactggccagacagagactgctgggaagaagctggtccgtccctgtgatcagacacctgttcgcccctctgaaggagtacttcgcctgcgtgagcagcggcaacagcaacgccaacagccggggccccagcttctctagcggcctggtgccactgtccctgagagggagccacatgggccccatggagatctacaaaaccgtgagcgcctggaagcggcagcctgtgcgcgtgctgagcctgtttcggaatatcgataaagtcctgaaaagcctgggattcctggagagcggctctggctccggcggtggcaccctgaagtacgtggaggatgtgacaaacgtggtcagacgggatgtggagaagtggggccccttcgatctggtgtacggcagcacccaacccctgggcagctcttgtgaccggtgccctggctggtacatgtttcagttccaccggatcctgcagtacgccctgccgagacaggagtcccagcggccattcttttggattttcatggacaacttgctgctgaccgaggatgaccaggaaactaccactcggttcctgcagaccgaagccgtgaccctgcaggacgtgagaggccgggactaccagaacgccatgcgggtgtggtccaacatccctggactgaaaagcaagcacgcacctctgacccctaaagaagaggagtacctgcaggcccaggtgcggagcagaagcaagctggacgcccctaaggtggatctgctggtgaagaattgcctcctgcccctgagagagtacttcaagtatttcagccagaatagtctgcccctgggaggcagcggcggcggcagccaggagcccgtgaccttcgccgacgtggccgtggtgttcacccccgaggagtgggtgttcctggacagcacccagaggagcctgtacagggacgtgatgctggagaactacaggaacctggccagcgtggccgaccagctgtgcaagcccaacgccctgagctacctggaggagaggggcgagcagtggaccaccgacaggggcatcctgagcgacacctgcgccgagccccagtgccagggcggcccaagcagcggcgcccctcctcccagcggcggcaggcggcccaagcagcggcgcccctcctcccagcggcggcagcccagccggctccccaacctctaccgaggagggcacctctgagtccgccacccccgagagcggccctggcacctccaccgagcccagcgagggcagcgcacccggcagccctgccggcagccccacctccacagaggagggaaccagcaccgagcccagcgaaggcagcgccccaggcaccagcaccgagcctagtgagcaggagattaaacggatcaacaagatcagaagaagacttgtgaaagacagcaacaccaagaaggccggcaagacaggccccatgaaaaccctgctggttagagtgatgacacccgatctgagagagcggctggaaaacctgagaaagaagcctgaaaatatcccccagcccatcagcaatacatctagagccaacctgaataagctgctgaccgattacaccgaaatgaagaaggcgatcctgcatgtgtactgggaagagttccagaaggaccctgtgggcctgatgagccgggtggcccagcctgccagcaagaagatcgatcagaacaagctgaaacctgagatggacgagaagggcaacctgaccaccgccggctttgcctgctctcagtgtggccagcccctgttcgtgtacaagctggagcaggtgtctgagaagggcaaggcttacaccaactacttcggacggtgcaatgtggccgagcacgaaaagctgatcctgctggcccagctgaagcccgagaaggatagcgacgaagccgtgacatatagcctgggaaagtttgggcagagggccctggatttctacagcattcatgtgaccaaggagtccacccaccccgtgaagcccctggcccagatcgccggaaacagatacgcctccggacctgtgggaaaggccctgagcgacgcatgtatgggcacaatcgcctccttcctgtctaagtaccaggacatcatcatcgaacaccagaaggtggtgaagggcaaccagaagagactggagagcctgcgggagctggccggcaaggaaaacctggaataccctagcgtgaccctgccacctcagcctcacaccaaggagggcgttgatgcctacaacgaagtgatcgcccgggtgcgaatgtgggtgaacctgaacctgtggcagaagctgaagctaagcagagatgatgccaagcctctgctgagactgaagggattcccttcctttcctctggtcgagagacaggccaacgaagtggactggtgggacatggtgtgtaacgtgaagaagctgatcaacgagaaaaaggaggatggcaaggtgttttggcagaatctggctggctacaagagacaggaagccctgagaccatacctgagcagcgaggaagatcggaagaagggaaagaaattcgctcggtaccagctgggcgacctgctgctgcacctggaaaagaagcacggcgaggactggggaaaggtgtacgacgaggcctgggagcggattgacaagaaagtggaaggcctgagcaagcacatcaagctggaagaggaacggagaagcgaggacgcccagagcaaggccgccctgaccgactggctgcgggctaaggccagcttcgtgatcgagggcctgaaggaggccgacaaggacgagttctgcagatgcgagctgaagctgcagaagtggtacggggacctgcggggaaagcccttcgccatcgaagccgagaacagcatcctggacatcagcggcttcagcaagcagtacaactgtgccttcatctggcagaaggacggcgtgaagaagctgaacctgtacctgatcatcaactacttcaagggcggcaagctgcggttcaagaagatcaaacctgaagccttcgaagccaacagattctacaccgtgatcaacaaaaagagcggcgagatcgtgcccatggaggtgaacttcaacttcgacgaccccaacctgatcatcctgcctctggcctttggcaagagacagggcagagaattcatctggaacgacctgctgtccctggaaaccggcagcctgaagctggccaacggaagagtgatcgagaagacactgtacaacagaagaacccggcaggatgagcctgccctgttcgtggccctgaccttcgagcggcgggaggtcctggactcctccaatatcaaaccaatgaacctgatcggcgtggcaagaggcgaaaacatccccgccgtgatcgccctgaccgaccccgagggctgcccactgagccggtttaaggatagcctgggaaacccaacccacatcctgagaatcggcgagagctataaggagaagcagcggaccatccaggccaagaaggaggtggagcagcggagagccggcggctacagccggaagtacgccagcaaagccaagaatctggcagacgatatggtgagaaacaccgctagagatctgctgtactacgccgtgacccaggatgccatgctgatcttcgccaacctgagccggggcttcggccggcagggcaagcggaccttcatggccgagagacagtacacacggatggaggactggctgaccgccaagctggcctacgagggcctgagcaagacctacctgtccaagacactggcccagtacacctccaagacatgcagcaactgtgggtttaccatcaccagcgccgactacgacagggtgctggagaagctgaagaagacagcaacaggctggatgaccacaattaacggcaaggagctgaaggtggagggccagattacctactacaacagatacaagagacagaacgtagtcaaggacctgtccgtcgagctggatagactgagcgaagaatctgtgaacaacgacatctcctcctggacaaagggcagaagcggagaagctctgagcctcctgaagaaaagattctcccatagacccgtgcaggagaagttcgtgtgcctgaactgcggcttcgagacacacgcagccgagcaagccgccctgaacatcgccagatcctggctgttcctgcggagccaggagtacaagaaataccagacaaacaagacaaccggcaacaccgataagagagccttcgtcgagacctggcagtccttttaccggaagaagcttaaggaggtgtggaaacctgccgtgcggtctggcggatctggcggaggctccaccagccccaagaaaaagagaaaagtctaagctgccttctgcggggcttgccttctggccatgcccttcttctctcccttgcacctgtacctcttggtctttgaataaagcctgagtaggaaggctagcaaaaaaaaaaaaaaaaaaaaaaaaaaaaaaaaaaaaaaaaaaaaaaaaaaaaaaaaaaaaaaaaaaaaaaaaaaaaaaaagcccagccggctccccaacctctaccgaggagggcacctctgagtccgccacccccgagagcggccctggcacctccaccgagcccagcgagggcagcgcacccggcagccctgccggcagccccacctccacagaggagggaaccagcaccgagcccagcgaaggcagcgccccaggcaccagcaccgagcctagtgagcaggagattaaacggatcaacaagatcagaagaagacttgtgaaagacagcaacaccaagaaggccggcaagacaggccccatgaaaaccctgctggttagagtgatgacacccgatctgagagagcggctggaaaacctgagaaagaagcctgaaaatatcccccagcccatcagcaatacatctagagccaacctgaataagctgctgaccgattacaccgaaatgaagaaggcgatcctgcatgtgtactgggaagagttccagaaggaccctgtgggcctgatgagccgggtggcccagcctgccagcaagaagatcgatcagaacaagctgaaacctgagatggacgagaagggcaacctgaccaccgccggctttgcctgctctcagtgtggccagcccctgttcgtgtacaagctggagcaggtgtctgagaagggcaaggcttacaccaactacttcggacggtgcaatgtggccgagcacgaaaagctgatcctgctggcccagctgaagcccgagaaggatagcgacgaagccgtgacatatagcctgggaaagtttgggcagagggccctggatttctacagcattcatgtgaccaaggagtccacccaccccgtgaagcccctggcccagatcgccggaaacagatacgcctccggacctgtgggaaaggccctgagcgacgcatgtatgggcacaatcgcctccttcctgtctaagtaccaggacatcatcatcgaacaccagaaggtggtgaagggcaaccagaagagactggagagcctgcgggagctggccggcaaggaaaacctggaataccctagcgtgaccctgccacctcagcctcacaccaaggagggcgttgatgcctacaacgaagtgatcgcccgggtgcgaatgtgggtgaacctgaacctgtggcagaagctgaagctaagcagagatgatgccaagcctctgctgagactgaagggattcccttcctttcctctggtcgagagacaggccaacgaagtggactggtgggacatggtgtgtaacgtgaagaagctgatcaacgagaaaaaggaggatggcaaggtgttttggcagaatctggctggctacaagagacaggaagccctgagaccatacctgagcagcgaggaagatcggaagaagggaaagaaattcgctcggtaccagctgggcgacctgctgctgcacctggaaaagaagcacggcgaggactggggaaaggtgtacgacgaggcctgggagcggattgacaagaaagtggaaggcctgagcaagcacatcaagctggaagaggaacggagaagcgaggacgcccagagcaaggccgccctgaccgactggctgcgggctaaggccagcttcgtgatcgagggcctgaaggaggccgacaaggacgagttctgcagatgcgagctgaagctgcagaagtggtacggggacctgcggggaaagcccttcgccatcgaagccgagaacagcatcctggacatcagcggcttcagcaagcagtacaactgtgccttcatctggcagaaggacggcgtgaagaagctgaacctgtacctgatcatcaactacttcaagggcggcaagctgcggttcaagaagatcaaacctgaagccttcgaagccaacagattctacaccgtgatcaacaaaaagagcggcgagatcgtgcccatggaggtgaacttcaacttcgacgaccccaacctgatcatcctgcctctggcctttggcaagagacagggcagagaattcatctggaacgacctgctgtccctggaaaccggcagcctgaagctggccaacggaagagtgatcgagaagacactgtacaacagaagaacccggcaggatgagcctgccctgttcgtggccctgaccttcgagcggcgggaggtcctggactcctccaatatcaaaccaatgaacctgatcggcgtggcaagaggcgaaaacatccccgccgtgatcgccctgaccgaccccgagggctgcccactgagccggtttaaggatagcctgggaaacccaacccacatcctgagaatcggcgagagctataaggagaagcagcggaccatccaggccaagaaggaggtggagcagcggagagccggcggctacagccggaagtacgccagcaaagccaagaatctggcagacgatatggtgagaaacaccgctagagatctgctgtactacgccgtgacccaggatgccatgctgatcttcgccaacctgagccggggcttcggccggcagggcaagcggaccttcatggccgagagacagtacacacggatggaggactggctgaccgccaagctggcctacgagggcctgagcaagacctacctgtccaagacactggcccagtacacctccaagacatgcagcaactgtgggtttaccatcaccagcgccgactacgacagggtgctggagaagctgaagaagacagcaacaggctggatgaccacaattaacggcaaggagctgaaggtggagggccagattacctactacaacagatacaagagacagaacgtagtcaaggacctgtccgtcgagctggatagactgagcgaagaatctgtgaacaacgacatctcctcctggacaaagggcagaagcggagaagctctgagcctcctgaagaaaagattctcccatagacccgtgcaggagaagttcgtgtgcctgaactgcggcttcgagacacacgcagccgagcaagccgccctgaacatcgccagatcctggctgttcctgcggagccaggagtacaagaaataccagacaaacaagacaaccggcaacaccgataagagagccttcgtcgagacctggcagtccttttaccggaagaagcttaaggaggtgtggaaacctgccgtgcggtctggcggatctggcggaggctccaccagccccaagaaaaagagaaaagtctaagctgccttctgcggggcttgccttctggccatgcccttcttctctcccttgcacctgtacctcttggtctttgaataaagcctgagtaggaaggctagcaaaaaaaaaaaaaaaaaaaaaaaaaaaaaaaaaaaaaaaaaaaaaaaaaaaaaaaaaaaaaaaaaaaaaaaaaaaaaaaa

SEQ ID NO: 9954 - RNA, 8811 nt, synthetic construct
  source 1..8811: mol_type = other RNA
aggaaataagagagaaaagaagagtaagaagaaatataagagccaccatggcccctaagaagaagcgtaaagtgagccggatgaaccacgaccaggagttcgacccccctaaggtgtaccctcccgtccccgccgagaagagaaagcccatccgggtcctgagcctgttcgatggcatcgccaccggtctgctggtgctgaaggacctgggcatccaggtggataggtacattgcctccgaggtgtgcgaggactccatcaccgtgggaatggtgcgtcatcagggcaagatcatgtacgtgggcgacgtgcggagcgtgacacagaagcatatccaggagtggggccctttcgacctggtgatcggcggcagcccttgcaatgacctgagcatcgtgaacccagcccggaagggcctgtacgagggaaccggcagactgttcttcgagttttacagactgctgcacgacgcccggcctaaggaaggcgacgaccggcccttcttttggctgttcgagaatgtggtggccatgggagtcagcgacaagcgggatattagccggttcctggagagcaaccccgtgatgatcgatgccaaggaagtgagcgccgcccaccgggccagatacttctggggcaatctgcctggcatgaacagacccctggccagcaccgtgaacgacaagctggagctgcaggagtgcctggagcacggccggatcgccaagttcagcaaggtgagaaccatcaccacccgaagcaacagcatcaaacaaggcaaggaccagcactttcctgtgttcatgaacgagaaggaggacatcctgtggtgtaccgagatggagagagtgttcgggttcccagtccactacacagatgtcagcaacatgtctagactggccagacagagactgctgggaagaagctggtccgtccctgtgatcagacacctgttcgcccctctgaaggagtacttcgcctgcgtgagcagcggcaacagcaacgccaacagccggggccccagcttctctagcggcctggtgccactgtccctgagagggagccacatgggccccatggagatctacaaaaccgtgagcgcctggaagcggcagcctgtgcgcgtgctgagcctgtttcggaatatcgataaagtcctgaaaagcctgggattcctggagagcggctctggctccggcggtggcaccctgaagtacgtggaggatgtgacaaacgtggtcagacgggatgtggagaagtggggccccttcgatctggtgtacggcagcacccaacccctgggcagctcttgtgaccggtgccctggctggtacatgtttcagttccaccggatcctgcagtacgccctgccgagacaggagtcccagcggccattcttttggattttcatggacaacttgctgctgaccgaggatgaccaggaaactaccactcggttcctgcagaccgaagccgtgaccctgcaggacgtgagaggccgggactaccagaacgccatgcgggtgtggtccaacatccctggactgaaaagcaagcacgcacctctgacccctaaagaagaggagtacctgcaggcccaggtgcggagcagaagcaagctggacgcccctaaggtggatctgctggtgaagaattgcctcctgcccctgagagagtacttcaagtatttcagccagaatagtctgcccctgggaggcagcggcggcggcgtggtgttcgaggacgtggccgtgaacttcaccctggaggagtgggccctgctggacagcagccagaaggagctgtacagggacgtgatgctggagaccttcaggaacctggccagcgtggacggcgagacccagtacaaggccaacggcagcgtgagccagcaggacatctacaggaacaagatcagcaaggagcacaagatcagcaagttcaccggcaacgacagctggcccttcgtgctgggcaagatctgggaggagctgagcggcggcccaagcagcggcgcccctcctcccagcggcggcaggcggcccaagcagcggcgcccctcctcccagcggcggcagcccagccggctccccaacctctaccgaggagggcacctctgagtccgccacccccgagagcggccctggcacctccaccgagcccagcgagggcagcgcacccggcagccctgccggcagccccacctccacagaggagggaaccagcaccgagcccagcgaaggcagcgccccaggcaccagcaccgagcctagtgagcaggagattaaacggatcaacaagatcagaagaagacttgtgaaagacagcaacaccaagaaggccggcaagacaggccccatgaaaaccctgctggttagagtgatgacacccgatctgagagagcggctggaaaacctgagaaagaagcctgaaaatatcccccagcccatcagcaatacatctagagccaacctgaataagctgctgaccgattacaccgaaatgaagaaggcgatcctgcatgtgtactgggaagagttccagaaggaccctgtgggcctgatgagccgggtggcccagcctgccagcaagaagatcgatcagaacaagctgaaacctgagatggacgagaagggcaacctgaccaccgccggctttgcctgctctcagtgtggccagcccctgttcgtgtacaagctggagcaggtgtctgagaagggcaaggcttacaccaactacttcggacggtgcaatgtggccgagcacgaaaagctgatcctgctggcccagctgaagcccgagaaggatagcgacgaagccgtgacatatagcctgggaaagtttgggcagagggccctggatttctacagcattcatgtgaccaaggagtccacccaccccgtgaagcccctggcccagatcgccggaaacagatacgcctccggacctgtgggaaaggccctgagcgacgcatgtatgggcacaatcgcctccttcctgtctaagtaccaggacatcatcatcgaacaccagaaggtggtgaagggcaaccagaagagactggagagcctgcgggagctggccggcaaggaaaacctggaataccctagcgtgaccctgccacctcagcctcacaccaaggagggcgttgatgcctacaacgaagtgatcgcccgggtgcgaatgtgggtgaacctgaacctgtggcagaagctgaagctaagcagagatgatgccaagcctctgctgagactgaagggattcccttcctttcctctggtcgagagacaggccaacgaagtggactggtgggacatggtgtgtaacgtgaagaagctgatcaacgagaaaaaggaggatggcaaggtgttttggcagaatctggctggctacaagagacaggaagccctgagaccatacctgagcagcgaggaagatcggaagaagggaaagaaattcgctcggtaccagctgggcgacctgctgctgcacctggaaaagaagcacggcgaggactggggaaaggtgtacgacgaggcctgggagcggattgacaagaaagtggaaggcctgagcaagcacatcaagctggaagaggaacggagaagcgaggacgcccagagcaaggccgccctgaccgactggctgcgggctaaggccagcttcgtgatcgagggcctgaaggaggccgacaaggacgagttctgcagatgcgagctgaagctgcagaagtggtacggggacctgcggggaaagcccttcgccatcgaagccgagaacagcatcctggacatcagcggcttcagcaagcagtacaactgtgccttcatctggcagaaggacggcgtgaagaagctgaacctgtacctgatcatcaactacttcaagggcggcaagctgcggttcaagaagatcaaacctgaagccttcgaagccaacagattctacaccgtgatcaacaaaaagagcggcgagatcgtgcccatggaggtgaacttcaacttcgacgaccccaacctgatcatcctgcctctggcctttggcaagagacagggcagagaattcatctggaacgacctgctgtccctggaaaccggcagcctgaagctggccaacggaagagtgatcgagaagacactgtacaacagaagaacccggcaggatgagcctgccctgttcgtggccctgaccttcgagcggcgggaggtcctggactcctccaatatcaaaccaatgaacctgatcggcgtggcaagaggcgaaaacatccccgccgtgatcgccctgaccgaccccgagggctgcccactgagccggtttaaggatagcctgggaaacccaacccacatcctgagaatcggcgagagctataaggagaagcagcggaccatccaggccaagaaggaggtggagcagcggagagccggcggctacagccggaagtacgccagcaaagccaagaatctggcagacgatatggtgagaaacaccgctagagatctgctgtactacgccgtgacccaggatgccatgctgatcttcgccaacctgagccggggcttcggccggcagggcaagcggaccttcatggccgagagacagtacacacggatggaggactggctgaccgccaagctggcctacgagggcctgagcaagacctacctgtccaagacactggcccagtacacctccaagacatgcagcaactgtgggtttaccatcaccagcgccgactacgacagggtgctggagaagctgaagaagacagcaacaggctggatgaccacaattaacggcaaggagctgaaggtggagggccagattacctactacaacagatacaagagacagaacgtagtcaaggacctgtccgtcgagctggatagactgagcgaagaatctgtgaacaacgacatctcctcctggacaaagggcagaagcggagaagctctgagcctcctgaagaaaagattctcccatagacccgtgcaggagaagttcgtgtgcctgaactgcggcttcgagacacacgcagccgagcaagccgccctgaacatcgccagatcctggctgttcctgcggagccaggagtacaagaaataccagacaaacaagacaaccggcaacaccgataagagagccttcgtcgagacctggcagtccttttaccggaagaagcttaaggaggtgtggaaacctgccgtgcggtctggcggatctggcggaggctccaccagccccaagaaaaagagaaaagtctaagctgccttctgcggggcttgccttctggccatgcccttcttctctcccttgcacctgtacctcttggtctttgaataaagcctgagtaggaaggctagcaaaaaaaaaaaaaaaaaaaaaaaaaaaaaaaaaaaaaaaaaaaaaaaaaaaaaaaaaaaaaaaaaaaaaaaaaaaaaaaagcccagccggctccccaacctctaccgaggagggcacctctgagtccgccacccccgagagcggccctggcacctccaccgagcccagcgagggcagcgcacccggcagccctgccggcagccccacctccacagaggagggaaccagcaccgagcccagcgaaggcagcgccccaggcaccagcaccgagcctagtgagcaggagattaaacggatcaacaagatcagaagaagacttgtgaaagacagcaacaccaagaaggccggcaagacaggccccatgaaaaccctgctggttagagtgatgacacccgatctgagagagcggctggaaaacctgagaaagaagcctgaaaatatcccccagcccatcagcaatacatctagagccaacctgaataagctgctgaccgattacaccgaaatgaagaaggcgatcctgcatgtgtactgggaagagttccagaaggaccctgtgggcctgatgagccgggtggcccagcctgccagcaagaagatcgatcagaacaagctgaaacctgagatggacgagaagggcaacctgaccaccgccggctttgcctgctctcagtgtggccagcccctgttcgtgtacaagctggagcaggtgtctgagaagggcaaggcttacaccaactacttcggacggtgcaatgtggccgagcacgaaaagctgatcctgctggcccagctgaagcccgagaaggatagcgacgaagccgtgacatatagcctgggaaagtttgggcagagggccctggatttctacagcattcatgtgaccaaggagtccacccaccccgtgaagcccctggcccagatcgccggaaacagatacgcctccggacctgtgggaaaggccctgagcgacgcatgtatgggcacaatcgcctccttcctgtctaagtaccaggacatcatcatcgaacaccagaaggtggtgaagggcaaccagaagagactggagagcctgcgggagctggccggcaaggaaaacctggaataccctagcgtgaccctgccacctcagcctcacaccaaggagggcgttgatgcctacaacgaagtgatcgcccgggtgcgaatgtgggtgaacctgaacctgtggcagaagctgaagctaagcagagatgatgccaagcctctgctgagactgaagggattcccttcctttcctctggtcgagagacaggccaacgaagtggactggtgggacatggtgtgtaacgtgaagaagctgatcaacgagaaaaaggaggatggcaaggtgttttggcagaatctggctggctacaagagacaggaagccctgagaccatacctgagcagcgaggaagatcggaagaagggaaagaaattcgctcggtaccagctgggcgacctgctgctgcacctggaaaagaagcacggcgaggactggggaaaggtgtacgacgaggcctgggagcggattgacaagaaagtggaaggcctgagcaagcacatcaagctggaagaggaacggagaagcgaggacgcccagagcaaggccgccctgaccgactggctgcgggctaaggccagcttcgtgatcgagggcctgaaggaggccgacaaggacgagttctgcagatgcgagctgaagctgcagaagtggtacggggacctgcggggaaagcccttcgccatcgaagccgagaacagcatcctggacatcagcggcttcagcaagcagtacaactgtgccttcatctggcagaaggacggcgtgaagaagctgaacctgtacctgatcatcaactacttcaagggcggcaagctgcggttcaagaagatcaaacctgaagccttcgaagccaacagattctacaccgtgatcaacaaaaagagcggcgagatcgtgcccatggaggtgaacttcaacttcgacgaccccaacctgatcatcctgcctctggcctttggcaagagacagggcagagaattcatctggaacgacctgctgtccctggaaaccggcagcctgaagctggccaacggaagagtgatcgagaagacactgtacaacagaagaacccggcaggatgagcctgccctgttcgtggccctgaccttcgagcggcgggaggtcctggactcctccaatatcaaaccaatgaacctgatcggcgtggcaagaggcgaaaacatccccgccgtgatcgccctgaccgaccccgagggctgcccactgagccggtttaaggatagcctgggaaacccaacccacatcctgagaatcggcgagagctataaggagaagcagcggaccatccaggccaagaaggaggtggagcagcggagagccggcggctacagccggaagtacgccagcaaagccaagaatctggcagacgatatggtgagaaacaccgctagagatctgctgtactacgccgtgacccaggatgccatgctgatcttcgccaacctgagccggggcttcggccggcagggcaagcggaccttcatggccgagagacagtacacacggatggaggactggctgaccgccaagctggcctacgagggcctgagcaagacctacctgtccaagacactggcccagtacacctccaagacatgcagcaactgtgggtttaccatcaccagcgccgactacgacagggtgctggagaagctgaagaagacagcaacaggctggatgaccacaattaacggcaaggagctgaaggtggagggccagattacctactacaacagatacaagagacagaacgtagtcaaggacctgtccgtcgagctggatagactgagcgaagaatctgtgaacaacgacatctcctcctggacaaagggcagaagcggagaagctctgagcctcctgaagaaaagattctcccatagacccgtgcaggagaagttcgtgtgcctgaactgcggcttcgagacacacgcagccgagcaagccgccctgaacatcgccagatcctggctgttcctgcggagccaggagtacaagaaataccagacaaacaagacaaccggcaacaccgataagagagccttcgtcgagacctggcagtccttttaccggaagaagcttaaggaggtgtggaaacctgccgtgcggtctggcggatctggcggaggctccaccagccccaagaaaaagagaaaagtctaagctgccttctgcggggcttgccttctggccatgcccttcttctctcccttgcacctgtacctcttggtctttgaataaagcctgagtaggaaggctagcaaaaaaaaaaaaaaaaaaaaaaaaaaaaaaaaaaaaaaaaaaaaaaaaaaaaaaaaaaaaaaaaaaaaaaaaaaaaaaaa

SEQ ID NO: 9955 - RNA, 8787 nt, synthetic construct
  source 1..8787: mol_type = other RNA
aggaaataagagagaaaagaagagtaagaagaaatataagagccaccatggcccctaagaagaagcgtaaagtgagccggatgaaccacgaccaggagttcgacccccctaaggtgtaccctcccgtccccgccgagaagagaaagcccatccgggtcctgagcctgttcgatggcatcgccaccggtctgctggtgctgaaggacctgggcatccaggtggataggtacattgcctccgaggtgtgcgaggactccatcaccgtgggaatggtgcgtcatcagggcaagatcatgtacgtgggcgacgtgcggagcgtgacacagaagcatatccaggagtggggccctttcgacctggtgatcggcggcagcccttgcaatgacctgagcatcgtgaacccagcccggaagggcctgtacgagggaaccggcagactgttcttcgagttttacagactgctgcacgacgcccggcctaaggaaggcgacgaccggcccttcttttggctgttcgagaatgtggtggccatgggagtcagcgacaagcgggatattagccggttcctggagagcaaccccgtgatgatcgatgccaaggaagtgagcgccgcccaccgggccagatacttctggggcaatctgcctggcatgaacagacccctggccagcaccgtgaacgacaagctggagctgcaggagtgcctggagcacggccggatcgccaagttcagcaaggtgagaaccatcaccacccgaagcaacagcatcaaacaaggcaaggaccagcactttcctgtgttcatgaacgagaaggaggacatcctgtggtgtaccgagatggagagagtgttcgggttcccagtccactacacagatgtcagcaacatgtctagactggccagacagagactgctgggaagaagctggtccgtccctgtgatcagacacctgttcgcccctctgaaggagtacttcgcctgcgtgagcagcggcaacagcaacgccaacagccggggccccagcttctctagcggcctggtgccactgtccctgagagggagccacatgggccccatggagatctacaaaaccgtgagcgcctggaagcggcagcctgtgcgcgtgctgagcctgtttcggaatatcgataaagtcctgaaaagcctgggattcctggagagcggctctggctccggcggtggcaccctgaagtacgtggaggatgtgacaaacgtggtcagacgggatgtggagaagtggggccccttcgatctggtgtacggcagcacccaacccctgggcagctcttgtgaccggtgccctggctggtacatgtttcagttccaccggatcctgcagtacgccctgccgagacaggagtcccagcggccattcttttggattttcatggacaacttgctgctgaccgaggatgaccaggaaactaccactcggttcctgcagaccgaagccgtgaccctgcaggacgtgagaggccgggactaccagaacgccatgcgggtgtggtccaacatccctggactgaaaagcaagcacgcacctctgacccctaaagaagaggagtacctgcaggcccaggtgcggagcagaagcaagctggacgcccctaaggtggatctgctggtgaagaattgcctcctgcccctgagagagtacttcaagtatttcagccagaatagtctgcccctgggaggcagcggcggcggcgccgacatcaccctgatgagccaggcccaggacagcaggagcatcctgttccaggagagcgtgaccttcgaggacgtggccgtgaacttcaccaacagggagtggcagtgcctgacctacgcccagaggcacctgtacaaggacgtgatgctggagaactacaggaacatggccagcctgggcttccccttccccaagccccccctgatcagccacctggagagggaggtggacccctgcgtgggcggcccaagcagcggcgcccctcctcccagcggcggcaggcggcccaagcagcggcgcccctcctcccagcggcggcagcccagccggctccccaacctctaccgaggagggcacctctgagtccgccacccccgagagcggccctggcacctccaccgagcccagcgagggcagcgcacccggcagccctgccggcagccccacctccacagaggagggaaccagcaccgagcccagcgaaggcagcgccccaggcaccagcaccgagcctagtgagcaggagattaaacggatcaacaagatcagaagaagacttgtgaaagacagcaacaccaagaaggccggcaagacaggccccatgaaaaccctgctggttagagtgatgacacccgatctgagagagcggctggaaaacctgagaaagaagcctgaaaatatcccccagcccatcagcaatacatctagagccaacctgaataagctgctgaccgattacaccgaaatgaagaaggcgatcctgcatgtgtactgggaagagttccagaaggaccctgtgggcctgatgagccgggtggcccagcctgccagcaagaagatcgatcagaacaagctgaaacctgagatggacgagaagggcaacctgaccaccgccggctttgcctgctctcagtgtggccagcccctgttcgtgtacaagctggagcaggtgtctgagaagggcaaggcttacaccaactacttcggacggtgcaatgtggccgagcacgaaaagctgatcctgctggcccagctgaagcccgagaaggatagcgacgaagccgtgacatatagcctgggaaagtttgggcagagggccctggatttctacagcattcatgtgaccaaggagtccacccaccccgtgaagcccctggcccagatcgccggaaacagatacgcctccggacctgtgggaaaggccctgagcgacgcatgtatgggcacaatcgcctccttcctgtctaagtaccaggacatcatcatcgaacaccagaaggtggtgaagggcaaccagaagagactggagagcctgcgggagctggccggcaaggaaaacctggaataccctagcgtgaccctgccacctcagcctcacaccaaggagggcgttgatgcctacaacgaagtgatcgcccgggtgcgaatgtgggtgaacctgaacctgtggcagaagctgaagctaagcagagatgatgccaagcctctgctgagactgaagggattcccttcctttcctctggtcgagagacaggccaacgaagtggactggtgggacatggtgtgtaacgtgaagaagctgatcaacgagaaaaaggaggatggcaaggtgttttggcagaatctggctggctacaagagacaggaagccctgagaccatacctgagcagcgaggaagatcggaagaagggaaagaaattcgctcggtaccagctgggcgacctgctgctgcacctggaaaagaagcacggcgaggactggggaaaggtgtacgacgaggcctgggagcggattgacaagaaagtggaaggcctgagcaagcacatcaagctggaagaggaacggagaagcgaggacgcccagagcaaggccgccctgaccgactggctgcgggctaaggccagcttcgtgatcgagggcctgaaggaggccgacaaggacgagttctgcagatgcgagctgaagctgcagaagtggtacggggacctgcggggaaagcccttcgccatcgaagccgagaacagcatcctggacatcagcggcttcagcaagcagtacaactgtgccttcatctggcagaaggacggcgtgaagaagctgaacctgtacctgatcatcaactacttcaagggcggcaagctgcggttcaagaagatcaaacctgaagccttcgaagccaacagattctacaccgtgatcaacaaaaagagcggcgagatcgtgcccatggaggtgaacttcaacttcgacgaccccaacctgatcatcctgcctctggcctttggcaagagacagggcagagaattcatctggaacgacctgctgtccctggaaaccggcagcctgaagctggccaacggaagagtgatcgagaagacactgtacaacagaagaacccggcaggatgagcctgccctgttcgtggccctgaccttcgagcggcgggaggtcctggactcctccaatatcaaaccaatgaacctgatcggcgtggcaagaggcgaaaacatccccgccgtgatcgccctgaccgaccccgagggctgcccactgagccggtttaaggatagcctgggaaacccaacccacatcctgagaatcggcgagagctataaggagaagcagcggaccatccaggccaagaaggaggtggagcagcggagagccggcggctacagccggaagtacgccagcaaagccaagaatctggcagacgatatggtgagaaacaccgctagagatctgctgtactacgccgtgacccaggatgccatgctgatcttcgccaacctgagccggggcttcggccggcagggcaagcggaccttcatggccgagagacagtacacacggatggaggactggctgaccgccaagctggcctacgagggcctgagcaagacctacctgtccaagacactggcccagtacacctccaagacatgcagcaactgtgggtttaccatcaccagcgccgactacgacagggtgctggagaagctgaagaagacagcaacaggctggatgaccacaattaacggcaaggagctgaaggtggagggccagattacctactacaacagatacaagagacagaacgtagtcaaggacctgtccgtcgagctggatagactgagcgaagaatctgtgaacaacgacatctcctcctggacaaagggcagaagcggagaagctctgagcctcctgaagaaaagattctcccatagacccgtgcaggagaagttcgtgtgcctgaactgcggcttcgagacacacgcagccgagcaagccgccctgaacatcgccagatcctggctgttcctgcggagccaggagtacaagaaataccagacaaacaagacaaccggcaacaccgataagagagccttcgtcgagacctggcagtccttttaccggaagaagcttaaggaggtgtggaaacctgccgtgcggtctggcggatctggcggaggctccaccagccccaagaaaaagagaaaagtctaagctgccttctgcggggcttgccttctggccatgcccttcttctctcccttgcacctgtacctcttggtctttgaataaagcctgagtaggaaggctagcaaaaaaaaaaaaaaaaaaaaaaaaaaaaaaaaaaaaaaaaaaaaaaaaaaaaaaaaaaaaaaaaaaaaaaaaaaaaaaaagcccagccggctccccaacctctaccgaggagggcacctctgagtccgccacccccgagagcggccctggcacctccaccgagcccagcgagggcagcgcacccggcagccctgccggcagccccacctccacagaggagggaaccagcaccgagcccagcgaaggcagcgccccaggcaccagcaccgagcctagtgagcaggagattaaacggatcaacaagatcagaagaagacttgtgaaagacagcaacaccaagaaggccggcaagacaggccccatgaaaaccctgctggttagagtgatgacacccgatctgagagagcggctggaaaacctgagaaagaagcctgaaaatatcccccagcccatcagcaatacatctagagccaacctgaataagctgctgaccgattacaccgaaatgaagaaggcgatcctgcatgtgtactgggaagagttccagaaggaccctgtgggcctgatgagccgggtggcccagcctgccagcaagaagatcgatcagaacaagctgaaacctgagatggacgagaagggcaacctgaccaccgccggctttgcctgctctcagtgtggccagcccctgttcgtgtacaagctggagcaggtgtctgagaagggcaaggcttacaccaactacttcggacggtgcaatgtggccgagcacgaaaagctgatcctgctggcccagctgaagcccgagaaggatagcgacgaagccgtgacatatagcctgggaaagtttgggcagagggccctggatttctacagcattcatgtgaccaaggagtccacccaccccgtgaagcccctggcccagatcgccggaaacagatacgcctccggacctgtgggaaaggccctgagcgacgcatgtatgggcacaatcgcctccttcctgtctaagtaccaggacatcatcatcgaacaccagaaggtggtgaagggcaaccagaagagactggagagcctgcgggagctggccggcaaggaaaacctggaataccctagcgtgaccctgccacctcagcctcacaccaaggagggcgttgatgcctacaacgaagtgatcgcccgggtgcgaatgtgggtgaacctgaacctgtggcagaagctgaagctaagcagagatgatgccaagcctctgctgagactgaagggattcccttcctttcctctggtcgagagacaggccaacgaagtggactggtgggacatggtgtgtaacgtgaagaagctgatcaacgagaaaaaggaggatggcaaggtgttttggcagaatctggctggctacaagagacaggaagccctgagaccatacctgagcagcgaggaagatcggaagaagggaaagaaattcgctcggtaccagctgggcgacctgctgctgcacctggaaaagaagcacggcgaggactggggaaaggtgtacgacgaggcctgggagcggattgacaagaaagtggaaggcctgagcaagcacatcaagctggaagaggaacggagaagcgaggacgcccagagcaaggccgccctgaccgactggctgcgggctaaggccagcttcgtgatcgagggcctgaaggaggccgacaaggacgagttctgcagatgcgagctgaagctgcagaagtggtacggggacctgcggggaaagcccttcgccatcgaagccgagaacagcatcctggacatcagcggcttcagcaagcagtacaactgtgccttcatctggcagaaggacggcgtgaagaagctgaacctgtacctgatcatcaactacttcaagggcggcaagctgcggttcaagaagatcaaacctgaagccttcgaagccaacagattctacaccgtgatcaacaaaaagagcggcgagatcgtgcccatggaggtgaacttcaacttcgacgaccccaacctgatcatcctgcctctggcctttggcaagagacagggcagagaattcatctggaacgacctgctgtccctggaaaccggcagcctgaagctggccaacggaagagtgatcgagaagacactgtacaacagaagaacccggcaggatgagcctgccctgttcgtggccctgaccttcgagcggcgggaggtcctggactcctccaatatcaaaccaatgaacctgatcggcgtggcaagaggcgaaaacatccccgccgtgatcgccctgaccgaccccgagggctgcccactgagccggtttaaggatagcctgggaaacccaacccacatcctgagaatcggcgagagctataaggagaagcagcggaccatccaggccaagaaggaggtggagcagcggagagccggcggctacagccggaagtacgccagcaaagccaagaatctggcagacgatatggtgagaaacaccgctagagatctgctgtactacgccgtgacccaggatgccatgctgatcttcgccaacctgagccggggcttcggccggcagggcaagcggaccttcatggccgagagacagtacacacggatggaggactggctgaccgccaagctggcctacgagggcctgagcaagacctacctgtccaagacactggcccagtacacctccaagacatgcagcaactgtgggtttaccatcaccagcgccgactacgacagggtgctggagaagctgaagaagacagcaacaggctggatgaccacaattaacggcaaggagctgaaggtggagggccagattacctactacaacagatacaagagacagaacgtagtcaaggacctgtccgtcgagctggatagactgagcgaagaatctgtgaacaacgacatctcctcctggacaaagggcagaagcggagaagctctgagcctcctgaagaaaagattctcccatagacccgtgcaggagaagttcgtgtgcctgaactgcggcttcgagacacacgcagccgagcaagccgccctgaacatcgccagatcctggctgttcctgcggagccaggagtacaagaaataccagacaaacaagacaaccggcaacaccgataagagagccttcgtcgagacctggcagtccttttaccggaagaagcttaaggaggtgtggaaacctgccgtgcggtctggcggatctggcggaggctccaccagccccaagaaaaagagaaaagtctaagctgccttctgcggggcttgccttctggccatgcccttcttctctcccttgcacctgtacctcttggtctttgaataaagcctgagtaggaaggctagcaaaaaaaaaaaaaaaaaaaaaaaaaaaaaaaaaaaaaaaaaaaaaaaaaaaaaaaaaaaaaaaaaaaaaaaaaaaaaaaa

SEQ ID NO: 9956 - RNA, 8787 nt, synthetic construct
  source 1..8787: mol_type = other RNA
aggaaataagagagaaaagaagagtaagaagaaatataagagccaccatggcccctaagaagaagcgtaaagtgagccggatgaaccacgaccaggagttcgacccccctaaggtgtaccctcccgtccccgccgagaagagaaagcccatccgggtcctgagcctgttcgatggcatcgccaccggtctgctggtgctgaaggacctgggcatccaggtggataggtacattgcctccgaggtgtgcgaggactccatcaccgtgggaatggtgcgtcatcagggcaagatcatgtacgtgggcgacgtgcggagcgtgacacagaagcatatccaggagtggggccctttcgacctggtgatcggcggcagcccttgcaatgacctgagcatcgtgaacccagcccggaagggcctgtacgagggaaccggcagactgttcttcgagttttacagactgctgcacgacgcccggcctaaggaaggcgacgaccggcccttcttttggctgttcgagaatgtggtggccatgggagtcagcgacaagcgggatattagccggttcctggagagcaaccccgtgatgatcgatgccaaggaagtgagcgccgcccaccgggccagatacttctggggcaatctgcctggcatgaacagacccctggccagcaccgtgaacgacaagctggagctgcaggagtgcctggagcacggccggatcgccaagttcagcaaggtgagaaccatcaccacccgaagcaacagcatcaaacaaggcaaggaccagcactttcctgtgttcatgaacgagaaggaggacatcctgtggtgtaccgagatggagagagtgttcgggttcccagtccactacacagatgtcagcaacatgtctagactggccagacagagactgctgggaagaagctggtccgtccctgtgatcagacacctgttcgcccctctgaaggagtacttcgcctgcgtgagcagcggcaacagcaacgccaacagccggggccccagcttctctagcggcctggtgccactgtccctgagagggagccacatgggccccatggagatctacaaaaccgtgagcgcctggaagcggcagcctgtgcgcgtgctgagcctgtttcggaatatcgataaagtcctgaaaagcctgggattcctggagagcggctctggctccggcggtggcaccctgaagtacgtggaggatgtgacaaacgtggtcagacgggatgtggagaagtggggccccttcgatctggtgtacggcagcacccaacccctgggcagctcttgtgaccggtgccctggctggtacatgtttcagttccaccggatcctgcagtacgccctgccgagacaggagtcccagcggccattcttttggattttcatggacaacttgctgctgaccgaggatgaccaggaaactaccactcggttcctgcagaccgaagccgtgaccctgcaggacgtgagaggccgggactaccagaacgccatgcgggtgtggtccaacatccctggactgaaaagcaagcacgcacctctgacccctaaagaagaggagtacctgcaggcccaggtgcggagcagaagcaagctggacgcccctaaggtggatctgctggtgaagaattgcctcctgcccctgagagagtacttcaagtatttcagccagaatagtctgcccctgggaggcagcggcggcggcgagatggagccccacagccacgccgtgccctgccagcccagcatgagcttcaaggacgtggccgtgaccttcacccaggaggagtggggccagctgaacctggcccagaggaggctgtacaggaacgtgaccctggagacctggagccacctggtgagcctgggcctgctgctgagcaagcccgacgtgatcagctggctggagcagggccaggacccctggagggccgagcagggcccccccggcggcccaagcagcggcgcccctcctcccagcggcggcaggcggcccaagcagcggcgcccctcctcccagcggcggcagcccagccggctccccaacctctaccgaggagggcacctctgagtccgccacccccgagagcggccctggcacctccaccgagcccagcgagggcagcgcacccggcagccctgccggcagccccacctccacagaggagggaaccagcaccgagcccagcgaaggcagcgccccaggcaccagcaccgagcctagtgagcaggagattaaacggatcaacaagatcagaagaagacttgtgaaagacagcaacaccaagaaggccggcaagacaggccccatgaaaaccctgctggttagagtgatgacacccgatctgagagagcggctggaaaacctgagaaagaagcctgaaaatatcccccagcccatcagcaatacatctagagccaacctgaataagctgctgaccgattacaccgaaatgaagaaggcgatcctgcatgtgtactgggaagagttccagaaggaccctgtgggcctgatgagccgggtggcccagcctgccagcaagaagatcgatcagaacaagctgaaacctgagatggacgagaagggcaacctgaccaccgccggctttgcctgctctcagtgtggccagcccctgttcgtgtacaagctggagcaggtgtctgagaagggcaaggcttacaccaactacttcggacggtgcaatgtggccgagcacgaaaagctgatcctgctggcccagctgaagcccgagaaggatagcgacgaagccgtgacatatagcctgggaaagtttgggcagagggccctggatttctacagcattcatgtgaccaaggagtccacccaccccgtgaagcccctggcccagatcgccggaaacagatacgcctccggacctgtgggaaaggccctgagcgacgcatgtatgggcacaatcgcctccttcctgtctaagtaccaggacatcatcatcgaacaccagaaggtggtgaagggcaaccagaagagactggagagcctgcgggagctggccggcaaggaaaacctggaataccctagcgtgaccctgccacctcagcctcacaccaaggagggcgttgatgcctacaacgaagtgatcgcccgggtgcgaatgtgggtgaacctgaacctgtggcagaagctgaagctaagcagagatgatgccaagcctctgctgagactgaagggattcccttcctttcctctggtcgagagacaggccaacgaagtggactggtgggacatggtgtgtaacgtgaagaagctgatcaacgagaaaaaggaggatggcaaggtgttttggcagaatctggctggctacaagagacaggaagccctgagaccatacctgagcagcgaggaagatcggaagaagggaaagaaattcgctcggtaccagctgggcgacctgctgctgcacctggaaaagaagcacggcgaggactggggaaaggtgtacgacgaggcctgggagcggattgacaagaaagtggaaggcctgagcaagcacatcaagctggaagaggaacggagaagcgaggacgcccagagcaaggccgccctgaccgactggctgcgggctaaggccagcttcgtgatcgagggcctgaaggaggccgacaaggacgagttctgcagatgcgagctgaagctgcagaagtggtacggggacctgcggggaaagcccttcgccatcgaagccgagaacagcatcctggacatcagcggcttcagcaagcagtacaactgtgccttcatctggcagaaggacggcgtgaagaagctgaacctgtacctgatcatcaactacttcaagggcggcaagctgcggttcaagaagatcaaacctgaagccttcgaagccaacagattctacaccgtgatcaacaaaaagagcggcgagatcgtgcccatggaggtgaacttcaacttcgacgaccccaacctgatcatcctgcctctggcctttggcaagagacagggcagagaattcatctggaacgacctgctgtccctggaaaccggcagcctgaagctggccaacggaagagtgatcgagaagacactgtacaacagaagaacccggcaggatgagcctgccctgttcgtggccctgaccttcgagcggcgggaggtcctggactcctccaatatcaaaccaatgaacctgatcggcgtggcaagaggcgaaaacatccccgccgtgatcgccctgaccgaccccgagggctgcccactgagccggtttaaggatagcctgggaaacccaacccacatcctgagaatcggcgagagctataaggagaagcagcggaccatccaggccaagaaggaggtggagcagcggagagccggcggctacagccggaagtacgccagcaaagccaagaatctggcagacgatatggtgagaaacaccgctagagatctgctgtactacgccgtgacccaggatgccatgctgatcttcgccaacctgagccggggcttcggccggcagggcaagcggaccttcatggccgagagacagtacacacggatggaggactggctgaccgccaagctggcctacgagggcctgagcaagacctacctgtccaagacactggcccagtacacctccaagacatgcagcaactgtgggtttaccatcaccagcgccgactacgacagggtgctggagaagctgaagaagacagcaacaggctggatgaccacaattaacggcaaggagctgaaggtggagggccagattacctactacaacagatacaagagacagaacgtagtcaaggacctgtccgtcgagctggatagactgagcgaagaatctgtgaacaacgacatctcctcctggacaaagggcagaagcggagaagctctgagcctcctgaagaaaagattctcccatagacccgtgcaggagaagttcgtgtgcctgaactgcggcttcgagacacacgcagccgagcaagccgccctgaacatcgccagatcctggctgttcctgcggagccaggagtacaagaaataccagacaaacaagacaaccggcaacaccgataagagagccttcgtcgagacctggcagtccttttaccggaagaagcttaaggaggtgtggaaacctgccgtgcggtctggcggatctggcggaggctccaccagccccaagaaaaagagaaaagtctaagctgccttctgcggggcttgccttctggccatgcccttcttctctcccttgcacctgtacctcttggtctttgaataaagcctgagtaggaaggctagcaaaaaaaaaaaaaaaaaaaaaaaaaaaaaaaaaaaaaaaaaaaaaaaaaaaaaaaaaaaaaaaaaaaaaaaaaaaaaaaagcccagccggctccccaacctctaccgaggagggcacctctgagtccgccacccccgagagcggccctggcacctccaccgagcccagcgagggcagcgcacccggcagccctgccggcagccccacctccacagaggagggaaccagcaccgagcccagcgaaggcagcgccccaggcaccagcaccgagcctagtgagcaggagattaaacggatcaacaagatcagaagaagacttgtgaaagacagcaacaccaagaaggccggcaagacaggccccatgaaaaccctgctggttagagtgatgacacccgatctgagagagcggctggaaaacctgagaaagaagcctgaaaatatcccccagcccatcagcaatacatctagagccaacctgaataagctgctgaccgattacaccgaaatgaagaaggcgatcctgcatgtgtactgggaagagttccagaaggaccctgtgggcctgatgagccgggtggcccagcctgccagcaagaagatcgatcagaacaagctgaaacctgagatggacgagaagggcaacctgaccaccgccggctttgcctgctctcagtgtggccagcccctgttcgtgtacaagctggagcaggtgtctgagaagggcaaggcttacaccaactacttcggacggtgcaatgtggccgagcacgaaaagctgatcctgctggcccagctgaagcccgagaaggatagcgacgaagccgtgacatatagcctgggaaagtttgggcagagggccctggatttctacagcattcatgtgaccaaggagtccacccaccccgtgaagcccctggcccagatcgccggaaacagatacgcctccggacctgtgggaaaggccctgagcgacgcatgtatgggcacaatcgcctccttcctgtctaagtaccaggacatcatcatcgaacaccagaaggtggtgaagggcaaccagaagagactggagagcctgcgggagctggccggcaaggaaaacctggaataccctagcgtgaccctgccacctcagcctcacaccaaggagggcgttgatgcctacaacgaagtgatcgcccgggtgcgaatgtgggtgaacctgaacctgtggcagaagctgaagctaagcagagatgatgccaagcctctgctgagactgaagggattcccttcctttcctctggtcgagagacaggccaacgaagtggactggtgggacatggtgtgtaacgtgaagaagctgatcaacgagaaaaaggaggatggcaaggtgttttggcagaatctggctggctacaagagacaggaagccctgagaccatacctgagcagcgaggaagatcggaagaagggaaagaaattcgctcggtaccagctgggcgacctgctgctgcacctggaaaagaagcacggcgaggactggggaaaggtgtacgacgaggcctgggagcggattgacaagaaagtggaaggcctgagcaagcacatcaagctggaagaggaacggagaagcgaggacgcccagagcaaggccgccctgaccgactggctgcgggctaaggccagcttcgtgatcgagggcctgaaggaggccgacaaggacgagttctgcagatgcgagctgaagctgcagaagtggtacggggacctgcggggaaagcccttcgccatcgaagccgagaacagcatcctggacatcagcggcttcagcaagcagtacaactgtgccttcatctggcagaaggacggcgtgaagaagctgaacctgtacctgatcatcaactacttcaagggcggcaagctgcggttcaagaagatcaaacctgaagccttcgaagccaacagattctacaccgtgatcaacaaaaagagcggcgagatcgtgcccatggaggtgaacttcaacttcgacgaccccaacctgatcatcctgcctctggcctttggcaagagacagggcagagaattcatctggaacgacctgctgtccctggaaaccggcagcctgaagctggccaacggaagagtgatcgagaagacactgtacaacagaagaacccggcaggatgagcctgccctgttcgtggccctgaccttcgagcggcgggaggtcctggactcctccaatatcaaaccaatgaacctgatcggcgtggcaagaggcgaaaacatccccgccgtgatcgccctgaccgaccccgagggctgcccactgagccggtttaaggatagcctgggaaacccaacccacatcctgagaatcggcgagagctataaggagaagcagcggaccatccaggccaagaaggaggtggagcagcggagagccggcggctacagccggaagtacgccagcaaagccaagaatctggcagacgatatggtgagaaacaccgctagagatctgctgtactacgccgtgacccaggatgccatgctgatcttcgccaacctgagccggggcttcggccggcagggcaagcggaccttcatggccgagagacagtacacacggatggaggactggctgaccgccaagctggcctacgagggcctgagcaagacctacctgtccaagacactggcccagtacacctccaagacatgcagcaactgtgggtttaccatcaccagcgccgactacgacagggtgctggagaagctgaagaagacagcaacaggctggatgaccacaattaacggcaaggagctgaaggtggagggccagattacctactacaacagatacaagagacagaacgtagtcaaggacctgtccgtcgagctggatagactgagcgaagaatctgtgaacaacgacatctcctcctggacaaagggcagaagcggagaagctctgagcctcctgaagaaaagattctcccatagacccgtgcaggagaagttcgtgtgcctgaactgcggcttcgagacacacgcagccgagcaagccgccctgaacatcgccagatcctggctgttcctgcggagccaggagtacaagaaataccagacaaacaagacaaccggcaacaccgataagagagccttcgtcgagacctggcagtccttttaccggaagaagcttaaggaggtgtggaaacctgccgtgcggtctggcggatctggcggaggctccaccagccccaagaaaaagagaaaagtctaagctgccttctgcggggcttgccttctggccatgcccttcttctctcccttgcacctgtacctcttggtctttgaataaagcctgagtaggaaggctagcaaaaaaaaaaaaaaaaaaaaaaaaaaaaaaaaaaaaaaaaaaaaaaaaaaaaaaaaaaaaaaaaaaaaaaaaaaaaaaaa

SEQ ID NO: 9957 - RNA, 8787 nt, synthetic construct
  source 1..8787: mol_type = other RNA
aggaaataagagagaaaagaagagtaagaagaaatataagagccaccatggcccctaagaagaagcgtaaagtgagccggatgaaccacgaccaggagttcgacccccctaaggtgtaccctcccgtccccgccgagaagagaaagcccatccgggtcctgagcctgttcgatggcatcgccaccggtctgctggtgctgaaggacctgggcatccaggtggataggtacattgcctccgaggtgtgcgaggactccatcaccgtgggaatggtgcgtcatcagggcaagatcatgtacgtgggcgacgtgcggagcgtgacacagaagcatatccaggagtggggccctttcgacctggtgatcggcggcagcccttgcaatgacctgagcatcgtgaacccagcccggaagggcctgtacgagggaaccggcagactgttcttcgagttttacagactgctgcacgacgcccggcctaaggaaggcgacgaccggcccttcttttggctgttcgagaatgtggtggccatgggagtcagcgacaagcgggatattagccggttcctggagagcaaccccgtgatgatcgatgccaaggaagtgagcgccgcccaccgggccagatacttctggggcaatctgcctggcatgaacagacccctggccagcaccgtgaacgacaagctggagctgcaggagtgcctggagcacggccggatcgccaagttcagcaaggtgagaaccatcaccacccgaagcaacagcatcaaacaaggcaaggaccagcactttcctgtgttcatgaacgagaaggaggacatcctgtggtgtaccgagatggagagagtgttcgggttcccagtccactacacagatgtcagcaacatgtctagactggccagacagagactgctgggaagaagctggtccgtccctgtgatcagacacctgttcgcccctctgaaggagtacttcgcctgcgtgagcagcggcaacagcaacgccaacagccggggccccagcttctctagcggcctggtgccactgtccctgagagggagccacatgggccccatggagatctacaaaaccgtgagcgcctggaagcggcagcctgtgcgcgtgctgagcctgtttcggaatatcgataaagtcctgaaaagcctgggattcctggagagcggctctggctccggcggtggcaccctgaagtacgtggaggatgtgacaaacgtggtcagacgggatgtggagaagtggggccccttcgatctggtgtacggcagcacccaacccctgggcagctcttgtgaccggtgccctggctggtacatgtttcagttccaccggatcctgcagtacgccctgccgagacaggagtcccagcggccattcttttggattttcatggacaacttgctgctgaccgaggatgaccaggaaactaccactcggttcctgcagaccgaagccgtgaccctgcaggacgtgagaggccgggactaccagaacgccatgcgggtgtggtccaacatccctggactgaaaagcaagcacgcacctctgacccctaaagaagaggagtacctgcaggcccaggtgcggagcagaagcaagctggacgcccctaaggtggatctgctggtgaagaattgcctcctgcccctgagagagtacttcaagtatttcagccagaatagtctgcccctgggaggcagcggcggcggccaccaggaggtggtgaccttcgaggacgtggccgtgtacttcacccagaccgagtgggccggcctgagccccgcccagagggccctgtacaggagcgtgatgctggagatctacggcaacctgaccagcctgggctaccccgtgcccaagcccgccctggtgagcctgctggagaggggcgagctgccctggggcctggagaccagggacgacccccccgcccagggcaccaaggacatctgcggcggcccaagcagcggcgcccctcctcccagcggcggcaggcggcccaagcagcggcgcccctcctcccagcggcggcagcccagccggctccccaacctctaccgaggagggcacctctgagtccgccacccccgagagcggccctggcacctccaccgagcccagcgagggcagcgcacccggcagccctgccggcagccccacctccacagaggagggaaccagcaccgagcccagcgaaggcagcgccccaggcaccagcaccgagcctagtgagcaggagattaaacggatcaacaagatcagaagaagacttgtgaaagacagcaacaccaagaaggccggcaagacaggccccatgaaaaccctgctggttagagtgatgacacccgatctgagagagcggctggaaaacctgagaaagaagcctgaaaatatcccccagcccatcagcaatacatctagagccaacctgaataagctgctgaccgattacaccgaaatgaagaaggcgatcctgcatgtgtactgggaagagttccagaaggaccctgtgggcctgatgagccgggtggcccagcctgccagcaagaagatcgatcagaacaagctgaaacctgagatggacgagaagggcaacctgaccaccgccggctttgcctgctctcagtgtggccagcccctgttcgtgtacaagctggagcaggtgtctgagaagggcaaggcttacaccaactacttcggacggtgcaatgtggccgagcacgaaaagctgatcctgctggcccagctgaagcccgagaaggatagcgacgaagccgtgacatatagcctgggaaagtttgggcagagggccctggatttctacagcattcatgtgaccaaggagtccacccaccccgtgaagcccctggcccagatcgccggaaacagatacgcctccggacctgtgggaaaggccctgagcgacgcatgtatgggcacaatcgcctccttcctgtctaagtaccaggacatcatcatcgaacaccagaaggtggtgaagggcaaccagaagagactggagagcctgcgggagctggccggcaaggaaaacctggaataccctagcgtgaccctgccacctcagcctcacaccaaggagggcgttgatgcctacaacgaagtgatcgcccgggtgcgaatgtgggtgaacctgaacctgtggcagaagctgaagctaagcagagatgatgccaagcctctgctgagactgaagggattcccttcctttcctctggtcgagagacaggccaacgaagtggactggtgggacatggtgtgtaacgtgaagaagctgatcaacgagaaaaaggaggatggcaaggtgttttggcagaatctggctggctacaagagacaggaagccctgagaccatacctgagcagcgaggaagatcggaagaagggaaagaaattcgctcggtaccagctgggcgacctgctgctgcacctggaaaagaagcacggcgaggactggggaaaggtgtacgacgaggcctgggagcggattgacaagaaagtggaaggcctgagcaagcacatcaagctggaagaggaacggagaagcgaggacgcccagagcaaggccgccctgaccgactggctgcgggctaaggccagcttcgtgatcgagggcctgaaggaggccgacaaggacgagttctgcagatgcgagctgaagctgcagaagtggtacggggacctgcggggaaagcccttcgccatcgaagccgagaacagcatcctggacatcagcggcttcagcaagcagtacaactgtgccttcatctggcagaaggacggcgtgaagaagctgaacctgtacctgatcatcaactacttcaagggcggcaagctgcggttcaagaagatcaaacctgaagccttcgaagccaacagattctacaccgtgatcaacaaaaagagcggcgagatcgtgcccatggaggtgaacttcaacttcgacgaccccaacctgatcatcctgcctctggcctttggcaagagacagggcagagaattcatctggaacgacctgctgtccctggaaaccggcagcctgaagctggccaacggaagagtgatcgagaagacactgtacaacagaagaacccggcaggatgagcctgccctgttcgtggccctgaccttcgagcggcgggaggtcctggactcctccaatatcaaaccaatgaacctgatcggcgtggcaagaggcgaaaacatccccgccgtgatcgccctgaccgaccccgagggctgcccactgagccggtttaaggatagcctgggaaacccaacccacatcctgagaatcggcgagagctataaggagaagcagcggaccatccaggccaagaaggaggtggagcagcggagagccggcggctacagccggaagtacgccagcaaagccaagaatctggcagacgatatggtgagaaacaccgctagagatctgctgtactacgccgtgacccaggatgccatgctgatcttcgccaacctgagccggggcttcggccggcagggcaagcggaccttcatggccgagagacagtacacacggatggaggactggctgaccgccaagctggcctacgagggcctgagcaagacctacctgtccaagacactggcccagtacacctccaagacatgcagcaactgtgggtttaccatcaccagcgccgactacgacagggtgctggagaagctgaagaagacagcaacaggctggatgaccacaattaacggcaaggagctgaaggtggagggccagattacctactacaacagatacaagagacagaacgtagtcaaggacctgtccgtcgagctggatagactgagcgaagaatctgtgaacaacgacatctcctcctggacaaagggcagaagcggagaagctctgagcctcctgaagaaaagattctcccatagacccgtgcaggagaagttcgtgtgcctgaactgcggcttcgagacacacgcagccgagcaagccgccctgaacatcgccagatcctggctgttcctgcggagccaggagtacaagaaataccagacaaacaagacaaccggcaacaccgataagagagccttcgtcgagacctggcagtccttttaccggaagaagcttaaggaggtgtggaaacctgccgtgcggtctggcggatctggcggaggctccaccagccccaagaaaaagagaaaagtctaagctgccttctgcggggcttgccttctggccatgcccttcttctctcccttgcacctgtacctcttggtctttgaataaagcctgagtaggaaggctagcaaaaaaaaaaaaaaaaaaaaaaaaaaaaaaaaaaaaaaaaaaaaaaaaaaaaaaaaaaaaaaaaaaaaaaaaaaaaaaaagcccagccggctccccaacctctaccgaggagggcacctctgagtccgccacccccgagagcggccctggcacctccaccgagcccagcgagggcagcgcacccggcagccctgccggcagccccacctccacagaggagggaaccagcaccgagcccagcgaaggcagcgccccaggcaccagcaccgagcctagtgagcaggagattaaacggatcaacaagatcagaagaagacttgtgaaagacagcaacaccaagaaggccggcaagacaggccccatgaaaaccctgctggttagagtgatgacacccgatctgagagagcggctggaaaacctgagaaagaagcctgaaaatatcccccagcccatcagcaatacatctagagccaacctgaataagctgctgaccgattacaccgaaatgaagaaggcgatcctgcatgtgtactgggaagagttccagaaggaccctgtgggcctgatgagccgggtggcccagcctgccagcaagaagatcgatcagaacaagctgaaacctgagatggacgagaagggcaacctgaccaccgccggctttgcctgctctcagtgtggccagcccctgttcgtgtacaagctggagcaggtgtctgagaagggcaaggcttacaccaactacttcggacggtgcaatgtggccgagcacgaaaagctgatcctgctggcccagctgaagcccgagaaggatagcgacgaagccgtgacatatagcctgggaaagtttgggcagagggccctggatttctacagcattcatgtgaccaaggagtccacccaccccgtgaagcccctggcccagatcgccggaaacagatacgcctccggacctgtgggaaaggccctgagcgacgcatgtatgggcacaatcgcctccttcctgtctaagtaccaggacatcatcatcgaacaccagaaggtggtgaagggcaaccagaagagactggagagcctgcgggagctggccggcaaggaaaacctggaataccctagcgtgaccctgccacctcagcctcacaccaaggagggcgttgatgcctacaacgaagtgatcgcccgggtgcgaatgtgggtgaacctgaacctgtggcagaagctgaagctaagcagagatgatgccaagcctctgctgagactgaagggattcccttcctttcctctggtcgagagacaggccaacgaagtggactggtgggacatggtgtgtaacgtgaagaagctgatcaacgagaaaaaggaggatggcaaggtgttttggcagaatctggctggctacaagagacaggaagccctgagaccatacctgagcagcgaggaagatcggaagaagggaaagaaattcgctcggtaccagctgggcgacctgctgctgcacctggaaaagaagcacggcgaggactggggaaaggtgtacgacgaggcctgggagcggattgacaagaaagtggaaggcctgagcaagcacatcaagctggaagaggaacggagaagcgaggacgcccagagcaaggccgccctgaccgactggctgcgggctaaggccagcttcgtgatcgagggcctgaaggaggccgacaaggacgagttctgcagatgcgagctgaagctgcagaagtggtacggggacctgcggggaaagcccttcgccatcgaagccgagaacagcatcctggacatcagcggcttcagcaagcagtacaactgtgccttcatctggcagaaggacggcgtgaagaagctgaacctgtacctgatcatcaactacttcaagggcggcaagctgcggttcaagaagatcaaacctgaagccttcgaagccaacagattctacaccgtgatcaacaaaaagagcggcgagatcgtgcccatggaggtgaacttcaacttcgacgaccccaacctgatcatcctgcctctggcctttggcaagagacagggcagagaattcatctggaacgacctgctgtccctggaaaccggcagcctgaagctggccaacggaagagtgatcgagaagacactgtacaacagaagaacccggcaggatgagcctgccctgttcgtggccctgaccttcgagcggcgggaggtcctggactcctccaatatcaaaccaatgaacctgatcggcgtggcaagaggcgaaaacatccccgccgtgatcgccctgaccgaccccgagggctgcccactgagccggtttaaggatagcctgggaaacccaacccacatcctgagaatcggcgagagctataaggagaagcagcggaccatccaggccaagaaggaggtggagcagcggagagccggcggctacagccggaagtacgccagcaaagccaagaatctggcagacgatatggtgagaaacaccgctagagatctgctgtactacgccgtgacccaggatgccatgctgatcttcgccaacctgagccggggcttcggccggcagggcaagcggaccttcatggccgagagacagtacacacggatggaggactggctgaccgccaagctggcctacgagggcctgagcaagacctacctgtccaagacactggcccagtacacctccaagacatgcagcaactgtgggtttaccatcaccagcgccgactacgacagggtgctggagaagctgaagaagacagcaacaggctggatgaccacaattaacggcaaggagctgaaggtggagggccagattacctactacaacagatacaagagacagaacgtagtcaaggacctgtccgtcgagctggatagactgagcgaagaatctgtgaacaacgacatctcctcctggacaaagggcagaagcggagaagctctgagcctcctgaagaaaagattctcccatagacccgtgcaggagaagttcgtgtgcctgaactgcggcttcgagacacacgcagccgagcaagccgccctgaacatcgccagatcctggctgttcctgcggagccaggagtacaagaaataccagacaaacaagacaaccggcaacaccgataagagagccttcgtcgagacctggcagtccttttaccggaagaagcttaaggaggtgtggaaacctgccgtgcggtctggcggatctggcggaggctccaccagccccaagaaaaagagaaaagtctaagctgccttctgcggggcttgccttctggccatgcccttcttctctcccttgcacctgtacctcttggtctttgaataaagcctgagtaggaaggctagcaaaaaaaaaaaaaaaaaaaaaaaaaaaaaaaaaaaaaaaaaaaaaaaaaaaaaaaaaaaaaaaaaaaaaaaaaaaaaaaa

SEQ ID NO: 9958 - RNA, 8787 nt, synthetic construct
  source 1..8787: mol_type = other RNA
aggaaataagagagaaaagaagagtaagaagaaatataagagccaccatggcccctaagaagaagcgtaaagtgagccggatgaaccacgaccaggagttcgacccccctaaggtgtaccctcccgtccccgccgagaagagaaagcccatccgggtcctgagcctgttcgatggcatcgccaccggtctgctggtgctgaaggacctgggcatccaggtggataggtacattgcctccgaggtgtgcgaggactccatcaccgtgggaatggtgcgtcatcagggcaagatcatgtacgtgggcgacgtgcggagcgtgacacagaagcatatccaggagtggggccctttcgacctggtgatcggcggcagcccttgcaatgacctgagcatcgtgaacccagcccggaagggcctgtacgagggaaccggcagactgttcttcgagttttacagactgctgcacgacgcccggcctaaggaaggcgacgaccggcccttcttttggctgttcgagaatgtggtggccatgggagtcagcgacaagcgggatattagccggttcctggagagcaaccccgtgatgatcgatgccaaggaagtgagcgccgcccaccgggccagatacttctggggcaatctgcctggcatgaacagacccctggccagcaccgtgaacgacaagctggagctgcaggagtgcctggagcacggccggatcgccaagttcagcaaggtgagaaccatcaccacccgaagcaacagcatcaaacaaggcaaggaccagcactttcctgtgttcatgaacgagaaggaggacatcctgtggtgtaccgagatggagagagtgttcgggttcccagtccactacacagatgtcagcaacatgtctagactggccagacagagactgctgggaagaagctggtccgtccctgtgatcagacacctgttcgcccctctgaaggagtacttcgcctgcgtgagcagcggcaacagcaacgccaacagccggggccccagcttctctagcggcctggtgccactgtccctgagagggagccacatgggccccatggagatctacaaaaccgtgagcgcctggaagcggcagcctgtgcgcgtgctgagcctgtttcggaatatcgataaagtcctgaaaagcctgggattcctggagagcggctctggctccggcggtggcaccctgaagtacgtggaggatgtgacaaacgtggtcagacgggatgtggagaagtggggccccttcgatctggtgtacggcagcacccaacccctgggcagctcttgtgaccggtgccctggctggtacatgtttcagttccaccggatcctgcagtacgccctgccgagacaggagtcccagcggccattcttttggattttcatggacaacttgctgctgaccgaggatgaccaggaaactaccactcggttcctgcagaccgaagccgtgaccctgcaggacgtgagaggccgggactaccagaacgccatgcgggtgtggtccaacatccctggactgaaaagcaagcacgcacctctgacccctaaagaagaggagtacctgcaggcccaggtgcggagcagaagcaagctggacgcccctaaggtggatctgctggtgaagaattgcctcctgcccctgagagagtacttcaagtatttcagccagaatagtctgcccctgggaggcagcggcggcggcatggccaccgccctgaccgaccccgcccaggtgagcgtgaccttcgacgacgtggccgtgaccttcacccaggaggagtggggccagctggacctggcccagaggaccctgtaccaggaggtgatgctggagaactgcggcctgctggtgagcctgggctgccccgtgcccaggcccgagctgatctaccacctggagcacggccaggagccctggaccaggaaggaggacctgagccagggcggcggcccaagcagcggcgcccctcctcccagcggcggcaggcggcccaagcagcggcgcccctcctcccagcggcggcagcccagccggctccccaacctctaccgaggagggcacctctgagtccgccacccccgagagcggccctggcacctccaccgagcccagcgagggcagcgcacccggcagccctgccggcagccccacctccacagaggagggaaccagcaccgagcccagcgaaggcagcgccccaggcaccagcaccgagcctagtgagcaggagattaaacggatcaacaagatcagaagaagacttgtgaaagacagcaacaccaagaaggccggcaagacaggccccatgaaaaccctgctggttagagtgatgacacccgatctgagagagcggctggaaaacctgagaaagaagcctgaaaatatcccccagcccatcagcaatacatctagagccaacctgaataagctgctgaccgattacaccgaaatgaagaaggcgatcctgcatgtgtactgggaagagttccagaaggaccctgtgggcctgatgagccgggtggcccagcctgccagcaagaagatcgatcagaacaagctgaaacctgagatggacgagaagggcaacctgaccaccgccggctttgcctgctctcagtgtggccagcccctgttcgtgtacaagctggagcaggtgtctgagaagggcaaggcttacaccaactacttcggacggtgcaatgtggccgagcacgaaaagctgatcctgctggcccagctgaagcccgagaaggatagcgacgaagccgtgacatatagcctgggaaagtttgggcagagggccctggatttctacagcattcatgtgaccaaggagtccacccaccccgtgaagcccctggcccagatcgccggaaacagatacgcctccggacctgtgggaaaggccctgagcgacgcatgtatgggcacaatcgcctccttcctgtctaagtaccaggacatcatcatcgaacaccagaaggtggtgaagggcaaccagaagagactggagagcctgcgggagctggccggcaaggaaaacctggaataccctagcgtgaccctgccacctcagcctcacaccaaggagggcgttgatgcctacaacgaagtgatcgcccgggtgcgaatgtgggtgaacctgaacctgtggcagaagctgaagctaagcagagatgatgccaagcctctgctgagactgaagggattcccttcctttcctctggtcgagagacaggccaacgaagtggactggtgggacatggtgtgtaacgtgaagaagctgatcaacgagaaaaaggaggatggcaaggtgttttggcagaatctggctggctacaagagacaggaagccctgagaccatacctgagcagcgaggaagatcggaagaagggaaagaaattcgctcggtaccagctgggcgacctgctgctgcacctggaaaagaagcacggcgaggactggggaaaggtgtacgacgaggcctgggagcggattgacaagaaagtggaaggcctgagcaagcacatcaagctggaagaggaacggagaagcgaggacgcccagagcaaggccgccctgaccgactggctgcgggctaaggccagcttcgtgatcgagggcctgaaggaggccgacaaggacgagttctgcagatgcgagctgaagctgcagaagtggtacggggacctgcggggaaagcccttcgccatcgaagccgagaacagcatcctggacatcagcggcttcagcaagcagtacaactgtgccttcatctggcagaaggacggcgtgaagaagctgaacctgtacctgatcatcaactacttcaagggcggcaagctgcggttcaagaagatcaaacctgaagccttcgaagccaacagattctacaccgtgatcaacaaaaagagcggcgagatcgtgcccatggaggtgaacttcaacttcgacgaccccaacctgatcatcctgcctctggcctttggcaagagacagggcagagaattcatctggaacgacctgctgtccctggaaaccggcagcctgaagctggccaacggaagagtgatcgagaagacactgtacaacagaagaacccggcaggatgagcctgccctgttcgtggccctgaccttcgagcggcgggaggtcctggactcctccaatatcaaaccaatgaacctgatcggcgtggcaagaggcgaaaacatccccgccgtgatcgccctgaccgaccccgagggctgcccactgagccggtttaaggatagcctgggaaacccaacccacatcctgagaatcggcgagagctataaggagaagcagcggaccatccaggccaagaaggaggtggagcagcggagagccggcggctacagccggaagtacgccagcaaagccaagaatctggcagacgatatggtgagaaacaccgctagagatctgctgtactacgccgtgacccaggatgccatgctgatcttcgccaacctgagccggggcttcggccggcagggcaagcggaccttcatggccgagagacagtacacacggatggaggactggctgaccgccaagctggcctacgagggcctgagcaagacctacctgtccaagacactggcccagtacacctccaagacatgcagcaactgtgggtttaccatcaccagcgccgactacgacagggtgctggagaagctgaagaagacagcaacaggctggatgaccacaattaacggcaaggagctgaaggtggagggccagattacctactacaacagatacaagagacagaacgtagtcaaggacctgtccgtcgagctggatagactgagcgaagaatctgtgaacaacgacatctcctcctggacaaagggcagaagcggagaagctctgagcctcctgaagaaaagattctcccatagacccgtgcaggagaagttcgtgtgcctgaactgcggcttcgagacacacgcagccgagcaagccgccctgaacatcgccagatcctggctgttcctgcggagccaggagtacaagaaataccagacaaacaagacaaccggcaacaccgataagagagccttcgtcgagacctggcagtccttttaccggaagaagcttaaggaggtgtggaaacctgccgtgcggtctggcggatctggcggaggctccaccagccccaagaaaaagagaaaagtctaagctgccttctgcggggcttgccttctggccatgcccttcttctctcccttgcacctgtacctcttggtctttgaataaagcctgagtaggaaggctagcaaaaaaaaaaaaaaaaaaaaaaaaaaaaaaaaaaaaaaaaaaaaaaaaaaaaaaaaaaaaaaaaaaaaaaaaaaaaaaaagcccagccggctccccaacctctaccgaggagggcacctctgagtccgccacccccgagagcggccctggcacctccaccgagcccagcgagggcagcgcacccggcagccctgccggcagccccacctccacagaggagggaaccagcaccgagcccagcgaaggcagcgccccaggcaccagcaccgagcctagtgagcaggagattaaacggatcaacaagatcagaagaagacttgtgaaagacagcaacaccaagaaggccggcaagacaggccccatgaaaaccctgctggttagagtgatgacacccgatctgagagagcggctggaaaacctgagaaagaagcctgaaaatatcccccagcccatcagcaatacatctagagccaacctgaataagctgctgaccgattacaccgaaatgaagaaggcgatcctgcatgtgtactgggaagagttccagaaggaccctgtgggcctgatgagccgggtggcccagcctgccagcaagaagatcgatcagaacaagctgaaacctgagatggacgagaagggcaacctgaccaccgccggctttgcctgctctcagtgtggccagcccctgttcgtgtacaagctggagcaggtgtctgagaagggcaaggcttacaccaactacttcggacggtgcaatgtggccgagcacgaaaagctgatcctgctggcccagctgaagcccgagaaggatagcgacgaagccgtgacatatagcctgggaaagtttgggcagagggccctggatttctacagcattcatgtgaccaaggagtccacccaccccgtgaagcccctggcccagatcgccggaaacagatacgcctccggacctgtgggaaaggccctgagcgacgcatgtatgggcacaatcgcctccttcctgtctaagtaccaggacatcatcatcgaacaccagaaggtggtgaagggcaaccagaagagactggagagcctgcgggagctggccggcaaggaaaacctggaataccctagcgtgaccctgccacctcagcctcacaccaaggagggcgttgatgcctacaacgaagtgatcgcccgggtgcgaatgtgggtgaacctgaacctgtggcagaagctgaagctaagcagagatgatgccaagcctctgctgagactgaagggattcccttcctttcctctggtcgagagacaggccaacgaagtggactggtgggacatggtgtgtaacgtgaagaagctgatcaacgagaaaaaggaggatggcaaggtgttttggcagaatctggctggctacaagagacaggaagccctgagaccatacctgagcagcgaggaagatcggaagaagggaaagaaattcgctcggtaccagctgggcgacctgctgctgcacctggaaaagaagcacggcgaggactggggaaaggtgtacgacgaggcctgggagcggattgacaagaaagtggaaggcctgagcaagcacatcaagctggaagaggaacggagaagcgaggacgcccagagcaaggccgccctgaccgactggctgcgggctaaggccagcttcgtgatcgagggcctgaaggaggccgacaaggacgagttctgcagatgcgagctgaagctgcagaagtggtacggggacctgcggggaaagcccttcgccatcgaagccgagaacagcatcctggacatcagcggcttcagcaagcagtacaactgtgccttcatctggcagaaggacggcgtgaagaagctgaacctgtacctgatcatcaactacttcaagggcggcaagctgcggttcaagaagatcaaacctgaagccttcgaagccaacagattctacaccgtgatcaacaaaaagagcggcgagatcgtgcccatggaggtgaacttcaacttcgacgaccccaacctgatcatcctgcctctggcctttggcaagagacagggcagagaattcatctggaacgacctgctgtccctggaaaccggcagcctgaagctggccaacggaagagtgatcgagaagacactgtacaacagaagaacccggcaggatgagcctgccctgttcgtggccctgaccttcgagcggcgggaggtcctggactcctccaatatcaaaccaatgaacctgatcggcgtggcaagaggcgaaaacatccccgccgtgatcgccctgaccgaccccgagggctgcccactgagccggtttaaggatagcctgggaaacccaacccacatcctgagaatcggcgagagctataaggagaagcagcggaccatccaggccaagaaggaggtggagcagcggagagccggcggctacagccggaagtacgccagcaaagccaagaatctggcagacgatatggtgagaaacaccgctagagatctgctgtactacgccgtgacccaggatgccatgctgatcttcgccaacctgagccggggcttcggccggcagggcaagcggaccttcatggccgagagacagtacacacggatggaggactggctgaccgccaagctggcctacgagggcctgagcaagacctacctgtccaagacactggcccagtacacctccaagacatgcagcaactgtgggtttaccatcaccagcgccgactacgacagggtgctggagaagctgaagaagacagcaacaggctggatgaccacaattaacggcaaggagctgaaggtggagggccagattacctactacaacagatacaagagacagaacgtagtcaaggacctgtccgtcgagctggatagactgagcgaagaatctgtgaacaacgacatctcctcctggacaaagggcagaagcggagaagctctgagcctcctgaagaaaagattctcccatagacccgtgcaggagaagttcgtgtgcctgaactgcggcttcgagacacacgcagccgagcaagccgccctgaacatcgccagatcctggctgttcctgcggagccaggagtacaagaaataccagacaaacaagacaaccggcaacaccgataagagagccttcgtcgagacctggcagtccttttaccggaagaagcttaaggaggtgtggaaacctgccgtgcggtctggcggatctggcggaggctccaccagccccaagaaaaagagaaaagtctaagctgccttctgcggggcttgccttctggccatgcccttcttctctcccttgcacctgtacctcttggtctttgaataaagcctgagtaggaaggctagcaaaaaaaaaaaaaaaaaaaaaaaaaaaaaaaaaaaaaaaaaaaaaaaaaaaaaaaaaaaaaaaaaaaaaaaaaaaaaaaa

SEQ ID NO: 9959 - RNA, 8784 nt, synthetic construct
  source 1..8784: mol_type = other RNA
aggaaataagagagaaaagaagagtaagaagaaatataagagccaccatggcccctaagaagaagcgtaaagtgagccggatgaaccacgaccaggagttcgacccccctaaggtgtaccctcccgtccccgccgagaagagaaagcccatccgggtcctgagcctgttcgatggcatcgccaccggtctgctggtgctgaaggacctgggcatccaggtggataggtacattgcctccgaggtgtgcgaggactccatcaccgtgggaatggtgcgtcatcagggcaagatcatgtacgtgggcgacgtgcggagcgtgacacagaagcatatccaggagtggggccctttcgacctggtgatcggcggcagcccttgcaatgacctgagcatcgtgaacccagcccggaagggcctgtacgagggaaccggcagactgttcttcgagttttacagactgctgcacgacgcccggcctaaggaaggcgacgaccggcccttcttttggctgttcgagaatgtggtggccatgggagtcagcgacaagcgggatattagccggttcctggagagcaaccccgtgatgatcgatgccaaggaagtgagcgccgcccaccgggccagatacttctggggcaatctgcctggcatgaacagacccctggccagcaccgtgaacgacaagctggagctgcaggagtgcctggagcacggccggatcgccaagttcagcaaggtgagaaccatcaccacccgaagcaacagcatcaaacaaggcaaggaccagcactttcctgtgttcatgaacgagaaggaggacatcctgtggtgtaccgagatggagagagtgttcgggttcccagtccactacacagatgtcagcaacatgtctagactggccagacagagactgctgggaagaagctggtccgtccctgtgatcagacacctgttcgcccctctgaaggagtacttcgcctgcgtgagcagcggcaacagcaacgccaacagccggggccccagcttctctagcggcctggtgccactgtccctgagagggagccacatgggccccatggagatctacaaaaccgtgagcgcctggaagcggcagcctgtgcgcgtgctgagcctgtttcggaatatcgataaagtcctgaaaagcctgggattcctggagagcggctctggctccggcggtggcaccctgaagtacgtggaggatgtgacaaacgtggtcagacgggatgtggagaagtggggccccttcgatctggtgtacggcagcacccaacccctgggcagctcttgtgaccggtgccctggctggtacatgtttcagttccaccggatcctgcagtacgccctgccgagacaggagtcccagcggccattcttttggattttcatggacaacttgctgctgaccgaggatgaccaggaaactaccactcggttcctgcagaccgaagccgtgaccctgcaggacgtgagaggccgggactaccagaacgccatgcgggtgtggtccaacatccctggactgaaaagcaagcacgcacctctgacccctaaagaagaggagtacctgcaggcccaggtgcggagcagaagcaagctggacgcccctaaggtggatctgctggtgaagaattgcctcctgcccctgagagagtacttcaagtatttcagccagaatagtctgcccctgggaggcagcggcggcggcggcagcctggaggagggcagaagagccaccggcctgcccgccgcccaggtgcaggagcccgtgaccttcaaggacgtggccgtggacttcacccaggaggagtggggccagctggacctggtgcagagaaccctgtacagagacgtgatgctggagacctacggccacctgctgagcgtgggcaaccagatcgccaagcccgaggtgatcagcctgctggagcagggcgaggagccctggggcggcccaagcagcggcgcccctcctcccagcggcggcaggcggcccaagcagcggcgcccctcctcccagcggcggcagcccagccggctccccaacctctaccgaggagggcacctctgagtccgccacccccgagagcggccctggcacctccaccgagcccagcgagggcagcgcacccggcagccctgccggcagccccacctccacagaggagggaaccagcaccgagcccagcgaaggcagcgccccaggcaccagcaccgagcctagtgagcaggagattaaacggatcaacaagatcagaagaagacttgtgaaagacagcaacaccaagaaggccggcaagacaggccccatgaaaaccctgctggttagagtgatgacacccgatctgagagagcggctggaaaacctgagaaagaagcctgaaaatatcccccagcccatcagcaatacatctagagccaacctgaataagctgctgaccgattacaccgaaatgaagaaggcgatcctgcatgtgtactgggaagagttccagaaggaccctgtgggcctgatgagccgggtggcccagcctgccagcaagaagatcgatcagaacaagctgaaacctgagatggacgagaagggcaacctgaccaccgccggctttgcctgctctcagtgtggccagcccctgttcgtgtacaagctggagcaggtgtctgagaagggcaaggcttacaccaactacttcggacggtgcaatgtggccgagcacgaaaagctgatcctgctggcccagctgaagcccgagaaggatagcgacgaagccgtgacatatagcctgggaaagtttgggcagagggccctggatttctacagcattcatgtgaccaaggagtccacccaccccgtgaagcccctggcccagatcgccggaaacagatacgcctccggacctgtgggaaaggccctgagcgacgcatgtatgggcacaatcgcctccttcctgtctaagtaccaggacatcatcatcgaacaccagaaggtggtgaagggcaaccagaagagactggagagcctgcgggagctggccggcaaggaaaacctggaataccctagcgtgaccctgccacctcagcctcacaccaaggagggcgttgatgcctacaacgaagtgatcgcccgggtgcgaatgtgggtgaacctgaacctgtggcagaagctgaagctaagcagagatgatgccaagcctctgctgagactgaagggattcccttcctttcctctggtcgagagacaggccaacgaagtggactggtgggacatggtgtgtaacgtgaagaagctgatcaacgagaaaaaggaggatggcaaggtgttttggcagaatctggctggctacaagagacaggaagccctgagaccatacctgagcagcgaggaagatcggaagaagggaaagaaattcgctcggtaccagctgggcgacctgctgctgcacctggaaaagaagcacggcgaggactggggaaaggtgtacgacgaggcctgggagcggattgacaagaaagtggaaggcctgagcaagcacatcaagctggaagaggaacggagaagcgaggacgcccagagcaaggccgccctgaccgactggctgcgggctaaggccagcttcgtgatcgagggcctgaaggaggccgacaaggacgagttctgcagatgcgagctgaagctgcagaagtggtacggggacctgcggggaaagcccttcgccatcgaagccgagaacagcatcctggacatcagcggcttcagcaagcagtacaactgtgccttcatctggcagaaggacggcgtgaagaagctgaacctgtacctgatcatcaactacttcaagggcggcaagctgcggttcaagaagatcaaacctgaagccttcgaagccaacagattctacaccgtgatcaacaaaaagagcggcgagatcgtgcccatggaggtgaacttcaacttcgacgaccccaacctgatcatcctgcctctggcctttggcaagagacagggcagagaattcatctggaacgacctgctgtccctggaaaccggcagcctgaagctggccaacggaagagtgatcgagaagacactgtacaacagaagaacccggcaggatgagcctgccctgttcgtggccctgaccttcgagcggcgggaggtcctggactcctccaatatcaaaccaatgaacctgatcggcgtggcaagaggcgaaaacatccccgccgtgatcgccctgaccgaccccgagggctgcccactgagccggtttaaggatagcctgggaaacccaacccacatcctgagaatcggcgagagctataaggagaagcagcggaccatccaggccaagaaggaggtggagcagcggagagccggcggctacagccggaagtacgccagcaaagccaagaatctggcagacgatatggtgagaaacaccgctagagatctgctgtactacgccgtgacccaggatgccatgctgatcttcgccaacctgagccggggcttcggccggcagggcaagcggaccttcatggccgagagacagtacacacggatggaggactggctgaccgccaagctggcctacgagggcctgagcaagacctacctgtccaagacactggcccagtacacctccaagacatgcagcaactgtgggtttaccatcaccagcgccgactacgacagggtgctggagaagctgaagaagacagcaacaggctggatgaccacaattaacggcaaggagctgaaggtggagggccagattacctactacaacagatacaagagacagaacgtagtcaaggacctgtccgtcgagctggatagactgagcgaagaatctgtgaacaacgacatctcctcctggacaaagggcagaagcggagaagctctgagcctcctgaagaaaagattctcccatagacccgtgcaggagaagttcgtgtgcctgaactgcggcttcgagacacacgcagccgagcaagccgccctgaacatcgccagatcctggctgttcctgcggagccaggagtacaagaaataccagacaaacaagacaaccggcaacaccgataagagagccttcgtcgagacctggcagtccttttaccggaagaagcttaaggaggtgtggaaacctgccgtgcggtctggcggatctggcggaggctccaccagccccaagaaaaagagaaaagtctaagctgccttctgcggggcttgccttctggccatgcccttcttctctcccttgcacctgtacctcttggtctttgaataaagcctgagtaggaaggctagcaaaaaaaaaaaaaaaaaaaaaaaaaaaaaaaaaaaaaaaaaaaaaaaaaaaaaaaaaaaaaaaaaaaaaaaaaaaaaaaagcccagccggctccccaacctctaccgaggagggcacctctgagtccgccacccccgagagcggccctggcacctccaccgagcccagcgagggcagcgcacccggcagccctgccggcagccccacctccacagaggagggaaccagcaccgagcccagcgaaggcagcgccccaggcaccagcaccgagcctagtgagcaggagattaaacggatcaacaagatcagaagaagacttgtgaaagacagcaacaccaagaaggccggcaagacaggccccatgaaaaccctgctggttagagtgatgacacccgatctgagagagcggctggaaaacctgagaaagaagcctgaaaatatcccccagcccatcagcaatacatctagagccaacctgaataagctgctgaccgattacaccgaaatgaagaaggcgatcctgcatgtgtactgggaagagttccagaaggaccctgtgggcctgatgagccgggtggcccagcctgccagcaagaagatcgatcagaacaagctgaaacctgagatggacgagaagggcaacctgaccaccgccggctttgcctgctctcagtgtggccagcccctgttcgtgtacaagctggagcaggtgtctgagaagggcaaggcttacaccaactacttcggacggtgcaatgtggccgagcacgaaaagctgatcctgctggcccagctgaagcccgagaaggatagcgacgaagccgtgacatatagcctgggaaagtttgggcagagggccctggatttctacagcattcatgtgaccaaggagtccacccaccccgtgaagcccctggcccagatcgccggaaacagatacgcctccggacctgtgggaaaggccctgagcgacgcatgtatgggcacaatcgcctccttcctgtctaagtaccaggacatcatcatcgaacaccagaaggtggtgaagggcaaccagaagagactggagagcctgcgggagctggccggcaaggaaaacctggaataccctagcgtgaccctgccacctcagcctcacaccaaggagggcgttgatgcctacaacgaagtgatcgcccgggtgcgaatgtgggtgaacctgaacctgtggcagaagctgaagctaagcagagatgatgccaagcctctgctgagactgaagggattcccttcctttcctctggtcgagagacaggccaacgaagtggactggtgggacatggtgtgtaacgtgaagaagctgatcaacgagaaaaaggaggatggcaaggtgttttggcagaatctggctggctacaagagacaggaagccctgagaccatacctgagcagcgaggaagatcggaagaagggaaagaaattcgctcggtaccagctgggcgacctgctgctgcacctggaaaagaagcacggcgaggactggggaaaggtgtacgacgaggcctgggagcggattgacaagaaagtggaaggcctgagcaagcacatcaagctggaagaggaacggagaagcgaggacgcccagagcaaggccgccctgaccgactggctgcgggctaaggccagcttcgtgatcgagggcctgaaggaggccgacaaggacgagttctgcagatgcgagctgaagctgcagaagtggtacggggacctgcggggaaagcccttcgccatcgaagccgagaacagcatcctggacatcagcggcttcagcaagcagtacaactgtgccttcatctggcagaaggacggcgtgaagaagctgaacctgtacctgatcatcaactacttcaagggcggcaagctgcggttcaagaagatcaaacctgaagccttcgaagccaacagattctacaccgtgatcaacaaaaagagcggcgagatcgtgcccatggaggtgaacttcaacttcgacgaccccaacctgatcatcctgcctctggcctttggcaagagacagggcagagaattcatctggaacgacctgctgtccctggaaaccggcagcctgaagctggccaacggaagagtgatcgagaagacactgtacaacagaagaacccggcaggatgagcctgccctgttcgtggccctgaccttcgagcggcgggaggtcctggactcctccaatatcaaaccaatgaacctgatcggcgtggcaagaggcgaaaacatccccgccgtgatcgccctgaccgaccccgagggctgcccactgagccggtttaaggatagcctgggaaacccaacccacatcctgagaatcggcgagagctataaggagaagcagcggaccatccaggccaagaaggaggtggagcagcggagagccggcggctacagccggaagtacgccagcaaagccaagaatctggcagacgatatggtgagaaacaccgctagagatctgctgtactacgccgtgacccaggatgccatgctgatcttcgccaacctgagccggggcttcggccggcagggcaagcggaccttcatggccgagagacagtacacacggatggaggactggctgaccgccaagctggcctacgagggcctgagcaagacctacctgtccaagacactggcccagtacacctccaagacatgcagcaactgtgggtttaccatcaccagcgccgactacgacagggtgctggagaagctgaagaagacagcaacaggctggatgaccacaattaacggcaaggagctgaaggtggagggccagattacctactacaacagatacaagagacagaacgtagtcaaggacctgtccgtcgagctggatagactgagcgaagaatctgtgaacaacgacatctcctcctggacaaagggcagaagcggagaagctctgagcctcctgaagaaaagattctcccatagacccgtgcaggagaagttcgtgtgcctgaactgcggcttcgagacacacgcagccgagcaagccgccctgaacatcgccagatcctggctgttcctgcggagccaggagtacaagaaataccagacaaacaagacaaccggcaacaccgataagagagccttcgtcgagacctggcagtccttttaccggaagaagcttaaggaggtgtggaaacctgccgtgcggtctggcggatctggcggaggctccaccagccccaagaaaaagagaaaagtctaagctgccttctgcggggcttgccttctggccatgcccttcttctctcccttgcacctgtacctcttggtctttgaataaagcctgagtaggaaggctagcaaaaaaaaaaaaaaaaaaaaaaaaaaaaaaaaaaaaaaaaaaaaaaaaaaaaaaaaaaaaaaaaaaaaaaaaaaaaaaaa

SEQ ID NO: 9960 - RNA, 8787 nt, synthetic construct
  source 1..8787: mol_type = other RNA
aggaaataagagagaaaagaagagtaagaagaaatataagagccaccatggcccctaagaagaagcgtaaagtgagccggatgaaccacgaccaggagttcgacccccctaaggtgtaccctcccgtccccgccgagaagagaaagcccatccgggtcctgagcctgttcgatggcatcgccaccggtctgctggtgctgaaggacctgggcatccaggtggataggtacattgcctccgaggtgtgcgaggactccatcaccgtgggaatggtgcgtcatcagggcaagatcatgtacgtgggcgacgtgcggagcgtgacacagaagcatatccaggagtggggccctttcgacctggtgatcggcggcagcccttgcaatgacctgagcatcgtgaacccagcccggaagggcctgtacgagggaaccggcagactgttcttcgagttttacagactgctgcacgacgcccggcctaaggaaggcgacgaccggcccttcttttggctgttcgagaatgtggtggccatgggagtcagcgacaagcgggatattagccggttcctggagagcaaccccgtgatgatcgatgccaaggaagtgagcgccgcccaccgggccagatacttctggggcaatctgcctggcatgaacagacccctggccagcaccgtgaacgacaagctggagctgcaggagtgcctggagcacggccggatcgccaagttcagcaaggtgagaaccatcaccacccgaagcaacagcatcaaacaaggcaaggaccagcactttcctgtgttcatgaacgagaaggaggacatcctgtggtgtaccgagatggagagagtgttcgggttcccagtccactacacagatgtcagcaacatgtctagactggccagacagagactgctgggaagaagctggtccgtccctgtgatcagacacctgttcgcccctctgaaggagtacttcgcctgcgtgagcagcggcaacagcaacgccaacagccggggccccagcttctctagcggcctggtgccactgtccctgagagggagccacatgggccccatggagatctacaaaaccgtgagcgcctggaagcggcagcctgtgcgcgtgctgagcctgtttcggaatatcgataaagtcctgaaaagcctgggattcctggagagcggctctggctccggcggtggcaccctgaagtacgtggaggatgtgacaaacgtggtcagacgggatgtggagaagtggggccccttcgatctggtgtacggcagcacccaacccctgggcagctcttgtgaccggtgccctggctggtacatgtttcagttccaccggatcctgcagtacgccctgccgagacaggagtcccagcggccattcttttggattttcatggacaacttgctgctgaccgaggatgaccaggaaactaccactcggttcctgcagaccgaagccgtgaccctgcaggacgtgagaggccgggactaccagaacgccatgcgggtgtggtccaacatccctggactgaaaagcaagcacgcacctctgacccctaaagaagaggagtacctgcaggcccaggtgcggagcagaagcaagctggacgcccctaaggtggatctgctggtgaagaattgcctcctgcccctgagagagtacttcaagtatttcagccagaatagtctgcccctgggaggcagcggcggcggcggccccctgaccttcagggacgtggccatcgagttcagccaggaggagtggaagagcctggaccccgtgcagaaggccctgtactgggacgtgatgctggagaactacaggaacctggtgttcctgggcatcctgcccaagtgcatgaccaaggagctgccccccatcggcaacagcaacaccggcgagaagtgccagaccgtgatgctggagaggcacgagtgctacgacgtggagaacttcggcggcccaagcagcggcgcccctcctcccagcggcggcaggcggcccaagcagcggcgcccctcctcccagcggcggcagcccagccggctccccaacctctaccgaggagggcacctctgagtccgccacccccgagagcggccctggcacctccaccgagcccagcgagggcagcgcacccggcagccctgccggcagccccacctccacagaggagggaaccagcaccgagcccagcgaaggcagcgccccaggcaccagcaccgagcctagtgagcaggagattaaacggatcaacaagatcagaagaagacttgtgaaagacagcaacaccaagaaggccggcaagacaggccccatgaaaaccctgctggttagagtgatgacacccgatctgagagagcggctggaaaacctgagaaagaagcctgaaaatatcccccagcccatcagcaatacatctagagccaacctgaataagctgctgaccgattacaccgaaatgaagaaggcgatcctgcatgtgtactgggaagagttccagaaggaccctgtgggcctgatgagccgggtggcccagcctgccagcaagaagatcgatcagaacaagctgaaacctgagatggacgagaagggcaacctgaccaccgccggctttgcctgctctcagtgtggccagcccctgttcgtgtacaagctggagcaggtgtctgagaagggcaaggcttacaccaactacttcggacggtgcaatgtggccgagcacgaaaagctgatcctgctggcccagctgaagcccgagaaggatagcgacgaagccgtgacatatagcctgggaaagtttgggcagagggccctggatttctacagcattcatgtgaccaaggagtccacccaccccgtgaagcccctggcccagatcgccggaaacagatacgcctccggacctgtgggaaaggccctgagcgacgcatgtatgggcacaatcgcctccttcctgtctaagtaccaggacatcatcatcgaacaccagaaggtggtgaagggcaaccagaagagactggagagcctgcgggagctggccggcaaggaaaacctggaataccctagcgtgaccctgccacctcagcctcacaccaaggagggcgttgatgcctacaacgaagtgatcgcccgggtgcgaatgtgggtgaacctgaacctgtggcagaagctgaagctaagcagagatgatgccaagcctctgctgagactgaagggattcccttcctttcctctggtcgagagacaggccaacgaagtggactggtgggacatggtgtgtaacgtgaagaagctgatcaacgagaaaaaggaggatggcaaggtgttttggcagaatctggctggctacaagagacaggaagccctgagaccatacctgagcagcgaggaagatcggaagaagggaaagaaattcgctcggtaccagctgggcgacctgctgctgcacctggaaaagaagcacggcgaggactggggaaaggtgtacgacgaggcctgggagcggattgacaagaaagtggaaggcctgagcaagcacatcaagctggaagaggaacggagaagcgaggacgcccagagcaaggccgccctgaccgactggctgcgggctaaggccagcttcgtgatcgagggcctgaaggaggccgacaaggacgagttctgcagatgcgagctgaagctgcagaagtggtacggggacctgcggggaaagcccttcgccatcgaagccgagaacagcatcctggacatcagcggcttcagcaagcagtacaactgtgccttcatctggcagaaggacggcgtgaagaagctgaacctgtacctgatcatcaactacttcaagggcggcaagctgcggttcaagaagatcaaacctgaagccttcgaagccaacagattctacaccgtgatcaacaaaaagagcggcgagatcgtgcccatggaggtgaacttcaacttcgacgaccccaacctgatcatcctgcctctggcctttggcaagagacagggcagagaattcatctggaacgacctgctgtccctggaaaccggcagcctgaagctggccaacggaagagtgatcgagaagacactgtacaacagaagaacccggcaggatgagcctgccctgttcgtggccctgaccttcgagcggcgggaggtcctggactcctccaatatcaaaccaatgaacctgatcggcgtggcaagaggcgaaaacatccccgccgtgatcgccctgaccgaccccgagggctgcccactgagccggtttaaggatagcctgggaaacccaacccacatcctgagaatcggcgagagctataaggagaagcagcggaccatccaggccaagaaggaggtggagcagcggagagccggcggctacagccggaagtacgccagcaaagccaagaatctggcagacgatatggtgagaaacaccgctagagatctgctgtactacgccgtgacccaggatgccatgctgatcttcgccaacctgagccggggcttcggccggcagggcaagcggaccttcatggccgagagacagtacacacggatggaggactggctgaccgccaagctggcctacgagggcctgagcaagacctacctgtccaagacactggcccagtacacctccaagacatgcagcaactgtgggtttaccatcaccagcgccgactacgacagggtgctggagaagctgaagaagacagcaacaggctggatgaccacaattaacggcaaggagctgaaggtggagggccagattacctactacaacagatacaagagacagaacgtagtcaaggacctgtccgtcgagctggatagactgagcgaagaatctgtgaacaacgacatctcctcctggacaaagggcagaagcggagaagctctgagcctcctgaagaaaagattctcccatagacccgtgcaggagaagttcgtgtgcctgaactgcggcttcgagacacacgcagccgagcaagccgccctgaacatcgccagatcctggctgttcctgcggagccaggagtacaagaaataccagacaaacaagacaaccggcaacaccgataagagagccttcgtcgagacctggcagtccttttaccggaagaagcttaaggaggtgtggaaacctgccgtgcggtctggcggatctggcggaggctccaccagccccaagaaaaagagaaaagtctaagctgccttctgcggggcttgccttctggccatgcccttcttctctcccttgcacctgtacctcttggtctttgaataaagcctgagtaggaaggctagcaaaaaaaaaaaaaaaaaaaaaaaaaaaaaaaaaaaaaaaaaaaaaaaaaaaaaaaaaaaaaaaaaaaaaaaaaaaaaaaagcccagccggctccccaacctctaccgaggagggcacctctgagtccgccacccccgagagcggccctggcacctccaccgagcccagcgagggcagcgcacccggcagccctgccggcagccccacctccacagaggagggaaccagcaccgagcccagcgaaggcagcgccccaggcaccagcaccgagcctagtgagcaggagattaaacggatcaacaagatcagaagaagacttgtgaaagacagcaacaccaagaaggccggcaagacaggccccatgaaaaccctgctggttagagtgatgacacccgatctgagagagcggctggaaaacctgagaaagaagcctgaaaatatcccccagcccatcagcaatacatctagagccaacctgaataagctgctgaccgattacaccgaaatgaagaaggcgatcctgcatgtgtactgggaagagttccagaaggaccctgtgggcctgatgagccgggtggcccagcctgccagcaagaagatcgatcagaacaagctgaaacctgagatggacgagaagggcaacctgaccaccgccggctttgcctgctctcagtgtggccagcccctgttcgtgtacaagctggagcaggtgtctgagaagggcaaggcttacaccaactacttcggacggtgcaatgtggccgagcacgaaaagctgatcctgctggcccagctgaagcccgagaaggatagcgacgaagccgtgacatatagcctgggaaagtttgggcagagggccctggatttctacagcattcatgtgaccaaggagtccacccaccccgtgaagcccctggcccagatcgccggaaacagatacgcctccggacctgtgggaaaggccctgagcgacgcatgtatgggcacaatcgcctccttcctgtctaagtaccaggacatcatcatcgaacaccagaaggtggtgaagggcaaccagaagagactggagagcctgcgggagctggccggcaaggaaaacctggaataccctagcgtgaccctgccacctcagcctcacaccaaggagggcgttgatgcctacaacgaagtgatcgcccgggtgcgaatgtgggtgaacctgaacctgtggcagaagctgaagctaagcagagatgatgccaagcctctgctgagactgaagggattcccttcctttcctctggtcgagagacaggccaacgaagtggactggtgggacatggtgtgtaacgtgaagaagctgatcaacgagaaaaaggaggatggcaaggtgttttggcagaatctggctggctacaagagacaggaagccctgagaccatacctgagcagcgaggaagatcggaagaagggaaagaaattcgctcggtaccagctgggcgacctgctgctgcacctggaaaagaagcacggcgaggactggggaaaggtgtacgacgaggcctgggagcggattgacaagaaagtggaaggcctgagcaagcacatcaagctggaagaggaacggagaagcgaggacgcccagagcaaggccgccctgaccgactggctgcgggctaaggccagcttcgtgatcgagggcctgaaggaggccgacaaggacgagttctgcagatgcgagctgaagctgcagaagtggtacggggacctgcggggaaagcccttcgccatcgaagccgagaacagcatcctggacatcagcggcttcagcaagcagtacaactgtgccttcatctggcagaaggacggcgtgaagaagctgaacctgtacctgatcatcaactacttcaagggcggcaagctgcggttcaagaagatcaaacctgaagccttcgaagccaacagattctacaccgtgatcaacaaaaagagcggcgagatcgtgcccatggaggtgaacttcaacttcgacgaccccaacctgatcatcctgcctctggcctttggcaagagacagggcagagaattcatctggaacgacctgctgtccctggaaaccggcagcctgaagctggccaacggaagagtgatcgagaagacactgtacaacagaagaacccggcaggatgagcctgccctgttcgtggccctgaccttcgagcggcgggaggtcctggactcctccaatatcaaaccaatgaacctgatcggcgtggcaagaggcgaaaacatccccgccgtgatcgccctgaccgaccccgagggctgcccactgagccggtttaaggatagcctgggaaacccaacccacatcctgagaatcggcgagagctataaggagaagcagcggaccatccaggccaagaaggaggtggagcagcggagagccggcggctacagccggaagtacgccagcaaagccaagaatctggcagacgatatggtgagaaacaccgctagagatctgctgtactacgccgtgacccaggatgccatgctgatcttcgccaacctgagccggggcttcggccggcagggcaagcggaccttcatggccgagagacagtacacacggatggaggactggctgaccgccaagctggcctacgagggcctgagcaagacctacctgtccaagacactggcccagtacacctccaagacatgcagcaactgtgggtttaccatcaccagcgccgactacgacagggtgctggagaagctgaagaagacagcaacaggctggatgaccacaattaacggcaaggagctgaaggtggagggccagattacctactacaacagatacaagagacagaacgtagtcaaggacctgtccgtcgagctggatagactgagcgaagaatctgtgaacaacgacatctcctcctggacaaagggcagaagcggagaagctctgagcctcctgaagaaaagattctcccatagacccgtgcaggagaagttcgtgtgcctgaactgcggcttcgagacacacgcagccgagcaagccgccctgaacatcgccagatcctggctgttcctgcggagccaggagtacaagaaataccagacaaacaagacaaccggcaacaccgataagagagccttcgtcgagacctggcagtccttttaccggaagaagcttaaggaggtgtggaaacctgccgtgcggtctggcggatctggcggaggctccaccagccccaagaaaaagagaaaagtctaagctgccttctgcggggcttgccttctggccatgcccttcttctctcccttgcacctgtacctcttggtctttgaataaagcctgagtaggaaggctagcaaaaaaaaaaaaaaaaaaaaaaaaaaaaaaaaaaaaaaaaaaaaaaaaaaaaaaaaaaaaaaaaaaaaaaaaaaaaaaaa

SEQ ID NO: 9961 - RNA, 8787 nt, synthetic construct
  source 1..8787: mol_type = other RNA
aggaaataagagagaaaagaagagtaagaagaaatataagagccaccatggcccctaagaagaagcgtaaagtgagccggatgaaccacgaccaggagttcgacccccctaaggtgtaccctcccgtccccgccgagaagagaaagcccatccgggtcctgagcctgttcgatggcatcgccaccggtctgctggtgctgaaggacctgggcatccaggtggataggtacattgcctccgaggtgtgcgaggactccatcaccgtgggaatggtgcgtcatcagggcaagatcatgtacgtgggcgacgtgcggagcgtgacacagaagcatatccaggagtggggccctttcgacctggtgatcggcggcagcccttgcaatgacctgagcatcgtgaacccagcccggaagggcctgtacgagggaaccggcagactgttcttcgagttttacagactgctgcacgacgcccggcctaaggaaggcgacgaccggcccttcttttggctgttcgagaatgtggtggccatgggagtcagcgacaagcgggatattagccggttcctggagagcaaccccgtgatgatcgatgccaaggaagtgagcgccgcccaccgggccagatacttctggggcaatctgcctggcatgaacagacccctggccagcaccgtgaacgacaagctggagctgcaggagtgcctggagcacggccggatcgccaagttcagcaaggtgagaaccatcaccacccgaagcaacagcatcaaacaaggcaaggaccagcactttcctgtgttcatgaacgagaaggaggacatcctgtggtgtaccgagatggagagagtgttcgggttcccagtccactacacagatgtcagcaacatgtctagactggccagacagagactgctgggaagaagctggtccgtccctgtgatcagacacctgttcgcccctctgaaggagtacttcgcctgcgtgagcagcggcaacagcaacgccaacagccggggccccagcttctctagcggcctggtgccactgtccctgagagggagccacatgggccccatggagatctacaaaaccgtgagcgcctggaagcggcagcctgtgcgcgtgctgagcctgtttcggaatatcgataaagtcctgaaaagcctgggattcctggagagcggctctggctccggcggtggcaccctgaagtacgtggaggatgtgacaaacgtggtcagacgggatgtggagaagtggggccccttcgatctggtgtacggcagcacccaacccctgggcagctcttgtgaccggtgccctggctggtacatgtttcagttccaccggatcctgcagtacgccctgccgagacaggagtcccagcggccattcttttggattttcatggacaacttgctgctgaccgaggatgaccaggaaactaccactcggttcctgcagaccgaagccgtgaccctgcaggacgtgagaggccgggactaccagaacgccatgcgggtgtggtccaacatccctggactgaaaagcaagcacgcacctctgacccctaaagaagaggagtacctgcaggcccaggtgcggagcagaagcaagctggacgcccctaaggtggatctgctggtgaagaattgcctcctgcccctgagagagtacttcaagtatttcagccagaatagtctgcccctgggaggcagcggcggcggcgcccaggacgccctgaccttccaggacgtggccgtggacttcacctgggaggagtggggccagctggaccccgcccagcagaacctgtacagggacgtgatgctggagaactaccagaacctgatcagcctgggcttccccgtgagcaagcccgaggtgatcagccagctggagcagggcgaggtgccctgggccctgaagagggccgtggccgagggcagctgccccgactgggaggccaggggcggcccaagcagcggcgcccctcctcccagcggcggcaggcggcccaagcagcggcgcccctcctcccagcggcggcagcccagccggctccccaacctctaccgaggagggcacctctgagtccgccacccccgagagcggccctggcacctccaccgagcccagcgagggcagcgcacccggcagccctgccggcagccccacctccacagaggagggaaccagcaccgagcccagcgaaggcagcgccccaggcaccagcaccgagcctagtgagcaggagattaaacggatcaacaagatcagaagaagacttgtgaaagacagcaacaccaagaaggccggcaagacaggccccatgaaaaccctgctggttagagtgatgacacccgatctgagagagcggctggaaaacctgagaaagaagcctgaaaatatcccccagcccatcagcaatacatctagagccaacctgaataagctgctgaccgattacaccgaaatgaagaaggcgatcctgcatgtgtactgggaagagttccagaaggaccctgtgggcctgatgagccgggtggcccagcctgccagcaagaagatcgatcagaacaagctgaaacctgagatggacgagaagggcaacctgaccaccgccggctttgcctgctctcagtgtggccagcccctgttcgtgtacaagctggagcaggtgtctgagaagggcaaggcttacaccaactacttcggacggtgcaatgtggccgagcacgaaaagctgatcctgctggcccagctgaagcccgagaaggatagcgacgaagccgtgacatatagcctgggaaagtttgggcagagggccctggatttctacagcattcatgtgaccaaggagtccacccaccccgtgaagcccctggcccagatcgccggaaacagatacgcctccggacctgtgggaaaggccctgagcgacgcatgtatgggcacaatcgcctccttcctgtctaagtaccaggacatcatcatcgaacaccagaaggtggtgaagggcaaccagaagagactggagagcctgcgggagctggccggcaaggaaaacctggaataccctagcgtgaccctgccacctcagcctcacaccaaggagggcgttgatgcctacaacgaagtgatcgcccgggtgcgaatgtgggtgaacctgaacctgtggcagaagctgaagctaagcagagatgatgccaagcctctgctgagactgaagggattcccttcctttcctctggtcgagagacaggccaacgaagtggactggtgggacatggtgtgtaacgtgaagaagctgatcaacgagaaaaaggaggatggcaaggtgttttggcagaatctggctggctacaagagacaggaagccctgagaccatacctgagcagcgaggaagatcggaagaagggaaagaaattcgctcggtaccagctgggcgacctgctgctgcacctggaaaagaagcacggcgaggactggggaaaggtgtacgacgaggcctgggagcggattgacaagaaagtggaaggcctgagcaagcacatcaagctggaagaggaacggagaagcgaggacgcccagagcaaggccgccctgaccgactggctgcgggctaaggccagcttcgtgatcgagggcctgaaggaggccgacaaggacgagttctgcagatgcgagctgaagctgcagaagtggtacggggacctgcggggaaagcccttcgccatcgaagccgagaacagcatcctggacatcagcggcttcagcaagcagtacaactgtgccttcatctggcagaaggacggcgtgaagaagctgaacctgtacctgatcatcaactacttcaagggcggcaagctgcggttcaagaagatcaaacctgaagccttcgaagccaacagattctacaccgtgatcaacaaaaagagcggcgagatcgtgcccatggaggtgaacttcaacttcgacgaccccaacctgatcatcctgcctctggcctttggcaagagacagggcagagaattcatctggaacgacctgctgtccctggaaaccggcagcctgaagctggccaacggaagagtgatcgagaagacactgtacaacagaagaacccggcaggatgagcctgccctgttcgtggccctgaccttcgagcggcgggaggtcctggactcctccaatatcaaaccaatgaacctgatcggcgtggcaagaggcgaaaacatccccgccgtgatcgccctgaccgaccccgagggctgcccactgagccggtttaaggatagcctgggaaacccaacccacatcctgagaatcggcgagagctataaggagaagcagcggaccatccaggccaagaaggaggtggagcagcggagagccggcggctacagccggaagtacgccagcaaagccaagaatctggcagacgatatggtgagaaacaccgctagagatctgctgtactacgccgtgacccaggatgccatgctgatcttcgccaacctgagccggggcttcggccggcagggcaagcggaccttcatggccgagagacagtacacacggatggaggactggctgaccgccaagctggcctacgagggcctgagcaagacctacctgtccaagacactggcccagtacacctccaagacatgcagcaactgtgggtttaccatcaccagcgccgactacgacagggtgctggagaagctgaagaagacagcaacaggctggatgaccacaattaacggcaaggagctgaaggtggagggccagattacctactacaacagatacaagagacagaacgtagtcaaggacctgtccgtcgagctggatagactgagcgaagaatctgtgaacaacgacatctcctcctggacaaagggcagaagcggagaagctctgagcctcctgaagaaaagattctcccatagacccgtgcaggagaagttcgtgtgcctgaactgcggcttcgagacacacgcagccgagcaagccgccctgaacatcgccagatcctggctgttcctgcggagccaggagtacaagaaataccagacaaacaagacaaccggcaacaccgataagagagccttcgtcgagacctggcagtccttttaccggaagaagcttaaggaggtgtggaaacctgccgtgcggtctggcggatctggcggaggctccaccagccccaagaaaaagagaaaagtctaagctgccttctgcggggcttgccttctggccatgcccttcttctctcccttgcacctgtacctcttggtctttgaataaagcctgagtaggaaggctagcaaaaaaaaaaaaaaaaaaaaaaaaaaaaaaaaaaaaaaaaaaaaaaaaaaaaaaaaaaaaaaaaaaaaaaaaaaaaaaaagcccagccggctccccaacctctaccgaggagggcacctctgagtccgccacccccgagagcggccctggcacctccaccgagcccagcgagggcagcgcacccggcagccctgccggcagccccacctccacagaggagggaaccagcaccgagcccagcgaaggcagcgccccaggcaccagcaccgagcctagtgagcaggagattaaacggatcaacaagatcagaagaagacttgtgaaagacagcaacaccaagaaggccggcaagacaggccccatgaaaaccctgctggttagagtgatgacacccgatctgagagagcggctggaaaacctgagaaagaagcctgaaaatatcccccagcccatcagcaatacatctagagccaacctgaataagctgctgaccgattacaccgaaatgaagaaggcgatcctgcatgtgtactgggaagagttccagaaggaccctgtgggcctgatgagccgggtggcccagcctgccagcaagaagatcgatcagaacaagctgaaacctgagatggacgagaagggcaacctgaccaccgccggctttgcctgctctcagtgtggccagcccctgttcgtgtacaagctggagcaggtgtctgagaagggcaaggcttacaccaactacttcggacggtgcaatgtggccgagcacgaaaagctgatcctgctggcccagctgaagcccgagaaggatagcgacgaagccgtgacatatagcctgggaaagtttgggcagagggccctggatttctacagcattcatgtgaccaaggagtccacccaccccgtgaagcccctggcccagatcgccggaaacagatacgcctccggacctgtgggaaaggccctgagcgacgcatgtatgggcacaatcgcctccttcctgtctaagtaccaggacatcatcatcgaacaccagaaggtggtgaagggcaaccagaagagactggagagcctgcgggagctggccggcaaggaaaacctggaataccctagcgtgaccctgccacctcagcctcacaccaaggagggcgttgatgcctacaacgaagtgatcgcccgggtgcgaatgtgggtgaacctgaacctgtggcagaagctgaagctaagcagagatgatgccaagcctctgctgagactgaagggattcccttcctttcctctggtcgagagacaggccaacgaagtggactggtgggacatggtgtgtaacgtgaagaagctgatcaacgagaaaaaggaggatggcaaggtgttttggcagaatctggctggctacaagagacaggaagccctgagaccatacctgagcagcgaggaagatcggaagaagggaaagaaattcgctcggtaccagctgggcgacctgctgctgcacctggaaaagaagcacggcgaggactggggaaaggtgtacgacgaggcctgggagcggattgacaagaaagtggaaggcctgagcaagcacatcaagctggaagaggaacggagaagcgaggacgcccagagcaaggccgccctgaccgactggctgcgggctaaggccagcttcgtgatcgagggcctgaaggaggccgacaaggacgagttctgcagatgcgagctgaagctgcagaagtggtacggggacctgcggggaaagcccttcgccatcgaagccgagaacagcatcctggacatcagcggcttcagcaagcagtacaactgtgccttcatctggcagaaggacggcgtgaagaagctgaacctgtacctgatcatcaactacttcaagggcggcaagctgcggttcaagaagatcaaacctgaagccttcgaagccaacagattctacaccgtgatcaacaaaaagagcggcgagatcgtgcccatggaggtgaacttcaacttcgacgaccccaacctgatcatcctgcctctggcctttggcaagagacagggcagagaattcatctggaacgacctgctgtccctggaaaccggcagcctgaagctggccaacggaagagtgatcgagaagacactgtacaacagaagaacccggcaggatgagcctgccctgttcgtggccctgaccttcgagcggcgggaggtcctggactcctccaatatcaaaccaatgaacctgatcggcgtggcaagaggcgaaaacatccccgccgtgatcgccctgaccgaccccgagggctgcccactgagccggtttaaggatagcctgggaaacccaacccacatcctgagaatcggcgagagctataaggagaagcagcggaccatccaggccaagaaggaggtggagcagcggagagccggcggctacagccggaagtacgccagcaaagccaagaatctggcagacgatatggtgagaaacaccgctagagatctgctgtactacgccgtgacccaggatgccatgctgatcttcgccaacctgagccggggcttcggccggcagggcaagcggaccttcatggccgagagacagtacacacggatggaggactggctgaccgccaagctggcctacgagggcctgagcaagacctacctgtccaagacactggcccagtacacctccaagacatgcagcaactgtgggtttaccatcaccagcgccgactacgacagggtgctggagaagctgaagaagacagcaacaggctggatgaccacaattaacggcaaggagctgaaggtggagggccagattacctactacaacagatacaagagacagaacgtagtcaaggacctgtccgtcgagctggatagactgagcgaagaatctgtgaacaacgacatctcctcctggacaaagggcagaagcggagaagctctgagcctcctgaagaaaagattctcccatagacccgtgcaggagaagttcgtgtgcctgaactgcggcttcgagacacacgcagccgagcaagccgccctgaacatcgccagatcctggctgttcctgcggagccaggagtacaagaaataccagacaaacaagacaaccggcaacaccgataagagagccttcgtcgagacctggcagtccttttaccggaagaagcttaaggaggtgtggaaacctgccgtgcggtctggcggatctggcggaggctccaccagccccaagaaaaagagaaaagtctaagctgccttctgcggggcttgccttctggccatgcccttcttctctcccttgcacctgtacctcttggtctttgaataaagcctgagtaggaaggctagcaaaaaaaaaaaaaaaaaaaaaaaaaaaaaaaaaaaaaaaaaaaaaaaaaaaaaaaaaaaaaaaaaaaaaaaaaaaaaaaa

SEQ ID NO: 9962 - RNA, 8787 nt, synthetic construct
  source 1..8787: mol_type = other RNA
aggaaataagagagaaaagaagagtaagaagaaatataagagccaccatggcccctaagaagaagcgtaaagtgagccggatgaaccacgaccaggagttcgacccccctaaggtgtaccctcccgtccccgccgagaagagaaagcccatccgggtcctgagcctgttcgatggcatcgccaccggtctgctggtgctgaaggacctgggcatccaggtggataggtacattgcctccgaggtgtgcgaggactccatcaccgtgggaatggtgcgtcatcagggcaagatcatgtacgtgggcgacgtgcggagcgtgacacagaagcatatccaggagtggggccctttcgacctggtgatcggcggcagcccttgcaatgacctgagcatcgtgaacccagcccggaagggcctgtacgagggaaccggcagactgttcttcgagttttacagactgctgcacgacgcccggcctaaggaaggcgacgaccggcccttcttttggctgttcgagaatgtggtggccatgggagtcagcgacaagcgggatattagccggttcctggagagcaaccccgtgatgatcgatgccaaggaagtgagcgccgcccaccgggccagatacttctggggcaatctgcctggcatgaacagacccctggccagcaccgtgaacgacaagctggagctgcaggagtgcctggagcacggccggatcgccaagttcagcaaggtgagaaccatcaccacccgaagcaacagcatcaaacaaggcaaggaccagcactttcctgtgttcatgaacgagaaggaggacatcctgtggtgtaccgagatggagagagtgttcgggttcccagtccactacacagatgtcagcaacatgtctagactggccagacagagactgctgggaagaagctggtccgtccctgtgatcagacacctgttcgcccctctgaaggagtacttcgcctgcgtgagcagcggcaacagcaacgccaacagccggggccccagcttctctagcggcctggtgccactgtccctgagagggagccacatgggccccatggagatctacaaaaccgtgagcgcctggaagcggcagcctgtgcgcgtgctgagcctgtttcggaatatcgataaagtcctgaaaagcctgggattcctggagagcggctctggctccggcggtggcaccctgaagtacgtggaggatgtgacaaacgtggtcagacgggatgtggagaagtggggccccttcgatctggtgtacggcagcacccaacccctgggcagctcttgtgaccggtgccctggctggtacatgtttcagttccaccggatcctgcagtacgccctgccgagacaggagtcccagcggccattcttttggattttcatggacaacttgctgctgaccgaggatgaccaggaaactaccactcggttcctgcagaccgaagccgtgaccctgcaggacgtgagaggccgggactaccagaacgccatgcgggtgtggtccaacatccctggactgaaaagcaagcacgcacctctgacccctaaagaagaggagtacctgcaggcccaggtgcggagcagaagcaagctggacgcccctaaggtggatctgctggtgaagaattgcctcctgcccctgagagagtacttcaagtatttcagccagaatagtctgcccctgggaggcagcggcggcggccaggtgcccgtgatcttcgaggacgtggccgtgtacttctgggaggaggagtgggagatgctggaggagtggcagaaggagctgtacaaggagaccatgaaggagaactacaagaccctggtgagcctgggcatggagctgcccaccgagaagcccgacctgatcgtgaggatcgagagggaggagaacccctgcgtgaaggcccagtgggacagcagggacaagaccaggtggaggaacagcggcggcccaagcagcggcgcccctcctcccagcggcggcaggcggcccaagcagcggcgcccctcctcccagcggcggcagcccagccggctccccaacctctaccgaggagggcacctctgagtccgccacccccgagagcggccctggcacctccaccgagcccagcgagggcagcgcacccggcagccctgccggcagccccacctccacagaggagggaaccagcaccgagcccagcgaaggcagcgccccaggcaccagcaccgagcctagtgagcaggagattaaacggatcaacaagatcagaagaagacttgtgaaagacagcaacaccaagaaggccggcaagacaggccccatgaaaaccctgctggttagagtgatgacacccgatctgagagagcggctggaaaacctgagaaagaagcctgaaaatatcccccagcccatcagcaatacatctagagccaacctgaataagctgctgaccgattacaccgaaatgaagaaggcgatcctgcatgtgtactgggaagagttccagaaggaccctgtgggcctgatgagccgggtggcccagcctgccagcaagaagatcgatcagaacaagctgaaacctgagatggacgagaagggcaacctgaccaccgccggctttgcctgctctcagtgtggccagcccctgttcgtgtacaagctggagcaggtgtctgagaagggcaaggcttacaccaactacttcggacggtgcaatgtggccgagcacgaaaagctgatcctgctggcccagctgaagcccgagaaggatagcgacgaagccgtgacatatagcctgggaaagtttgggcagagggccctggatttctacagcattcatgtgaccaaggagtccacccaccccgtgaagcccctggcccagatcgccggaaacagatacgcctccggacctgtgggaaaggccctgagcgacgcatgtatgggcacaatcgcctccttcctgtctaagtaccaggacatcatcatcgaacaccagaaggtggtgaagggcaaccagaagagactggagagcctgcgggagctggccggcaaggaaaacctggaataccctagcgtgaccctgccacctcagcctcacaccaaggagggcgttgatgcctacaacgaagtgatcgcccgggtgcgaatgtgggtgaacctgaacctgtggcagaagctgaagctaagcagagatgatgccaagcctctgctgagactgaagggattcccttcctttcctctggtcgagagacaggccaacgaagtggactggtgggacatggtgtgtaacgtgaagaagctgatcaacgagaaaaaggaggatggcaaggtgttttggcagaatctggctggctacaagagacaggaagccctgagaccatacctgagcagcgaggaagatcggaagaagggaaagaaattcgctcggtaccagctgggcgacctgctgctgcacctggaaaagaagcacggcgaggactggggaaaggtgtacgacgaggcctgggagcggattgacaagaaagtggaaggcctgagcaagcacatcaagctggaagaggaacggagaagcgaggacgcccagagcaaggccgccctgaccgactggctgcgggctaaggccagcttcgtgatcgagggcctgaaggaggccgacaaggacgagttctgcagatgcgagctgaagctgcagaagtggtacggggacctgcggggaaagcccttcgccatcgaagccgagaacagcatcctggacatcagcggcttcagcaagcagtacaactgtgccttcatctggcagaaggacggcgtgaagaagctgaacctgtacctgatcatcaactacttcaagggcggcaagctgcggttcaagaagatcaaacctgaagccttcgaagccaacagattctacaccgtgatcaacaaaaagagcggcgagatcgtgcccatggaggtgaacttcaacttcgacgaccccaacctgatcatcctgcctctggcctttggcaagagacagggcagagaattcatctggaacgacctgctgtccctggaaaccggcagcctgaagctggccaacggaagagtgatcgagaagacactgtacaacagaagaacccggcaggatgagcctgccctgttcgtggccctgaccttcgagcggcgggaggtcctggactcctccaatatcaaaccaatgaacctgatcggcgtggcaagaggcgaaaacatccccgccgtgatcgccctgaccgaccccgagggctgcccactgagccggtttaaggatagcctgggaaacccaacccacatcctgagaatcggcgagagctataaggagaagcagcggaccatccaggccaagaaggaggtggagcagcggagagccggcggctacagccggaagtacgccagcaaagccaagaatctggcagacgatatggtgagaaacaccgctagagatctgctgtactacgccgtgacccaggatgccatgctgatcttcgccaacctgagccggggcttcggccggcagggcaagcggaccttcatggccgagagacagtacacacggatggaggactggctgaccgccaagctggcctacgagggcctgagcaagacctacctgtccaagacactggcccagtacacctccaagacatgcagcaactgtgggtttaccatcaccagcgccgactacgacagggtgctggagaagctgaagaagacagcaacaggctggatgaccacaattaacggcaaggagctgaaggtggagggccagattacctactacaacagatacaagagacagaacgtagtcaaggacctgtccgtcgagctggatagactgagcgaagaatctgtgaacaacgacatctcctcctggacaaagggcagaagcggagaagctctgagcctcctgaagaaaagattctcccatagacccgtgcaggagaagttcgtgtgcctgaactgcggcttcgagacacacgcagccgagcaagccgccctgaacatcgccagatcctggctgttcctgcggagccaggagtacaagaaataccagacaaacaagacaaccggcaacaccgataagagagccttcgtcgagacctggcagtccttttaccggaagaagcttaaggaggtgtggaaacctgccgtgcggtctggcggatctggcggaggctccaccagccccaagaaaaagagaaaagtctaagctgccttctgcggggcttgccttctggccatgcccttcttctctcccttgcacctgtacctcttggtctttgaataaagcctgagtaggaaggctagcaaaaaaaaaaaaaaaaaaaaaaaaaaaaaaaaaaaaaaaaaaaaaaaaaaaaaaaaaaaaaaaaaaaaaaaaaaaaaaaagcccagccggctccccaacctctaccgaggagggcacctctgagtccgccacccccgagagcggccctggcacctccaccgagcccagcgagggcagcgcacccggcagccctgccggcagccccacctccacagaggagggaaccagcaccgagcccagcgaaggcagcgccccaggcaccagcaccgagcctagtgagcaggagattaaacggatcaacaagatcagaagaagacttgtgaaagacagcaacaccaagaaggccggcaagacaggccccatgaaaaccctgctggttagagtgatgacacccgatctgagagagcggctggaaaacctgagaaagaagcctgaaaatatcccccagcccatcagcaatacatctagagccaacctgaataagctgctgaccgattacaccgaaatgaagaaggcgatcctgcatgtgtactgggaagagttccagaaggaccctgtgggcctgatgagccgggtggcccagcctgccagcaagaagatcgatcagaacaagctgaaacctgagatggacgagaagggcaacctgaccaccgccggctttgcctgctctcagtgtggccagcccctgttcgtgtacaagctggagcaggtgtctgagaagggcaaggcttacaccaactacttcggacggtgcaatgtggccgagcacgaaaagctgatcctgctggcccagctgaagcccgagaaggatagcgacgaagccgtgacatatagcctgggaaagtttgggcagagggccctggatttctacagcattcatgtgaccaaggagtccacccaccccgtgaagcccctggcccagatcgccggaaacagatacgcctccggacctgtgggaaaggccctgagcgacgcatgtatgggcacaatcgcctccttcctgtctaagtaccaggacatcatcatcgaacaccagaaggtggtgaagggcaaccagaagagactggagagcctgcgggagctggccggcaaggaaaacctggaataccctagcgtgaccctgccacctcagcctcacaccaaggagggcgttgatgcctacaacgaagtgatcgcccgggtgcgaatgtgggtgaacctgaacctgtggcagaagctgaagctaagcagagatgatgccaagcctctgctgagactgaagggattcccttcctttcctctggtcgagagacaggccaacgaagtggactggtgggacatggtgtgtaacgtgaagaagctgatcaacgagaaaaaggaggatggcaaggtgttttggcagaatctggctggctacaagagacaggaagccctgagaccatacctgagcagcgaggaagatcggaagaagggaaagaaattcgctcggtaccagctgggcgacctgctgctgcacctggaaaagaagcacggcgaggactggggaaaggtgtacgacgaggcctgggagcggattgacaagaaagtggaaggcctgagcaagcacatcaagctggaagaggaacggagaagcgaggacgcccagagcaaggccgccctgaccgactggctgcgggctaaggccagcttcgtgatcgagggcctgaaggaggccgacaaggacgagttctgcagatgcgagctgaagctgcagaagtggtacggggacctgcggggaaagcccttcgccatcgaagccgagaacagcatcctggacatcagcggcttcagcaagcagtacaactgtgccttcatctggcagaaggacggcgtgaagaagctgaacctgtacctgatcatcaactacttcaagggcggcaagctgcggttcaagaagatcaaacctgaagccttcgaagccaacagattctacaccgtgatcaacaaaaagagcggcgagatcgtgcccatggaggtgaacttcaacttcgacgaccccaacctgatcatcctgcctctggcctttggcaagagacagggcagagaattcatctggaacgacctgctgtccctggaaaccggcagcctgaagctggccaacggaagagtgatcgagaagacactgtacaacagaagaacccggcaggatgagcctgccctgttcgtggccctgaccttcgagcggcgggaggtcctggactcctccaatatcaaaccaatgaacctgatcggcgtggcaagaggcgaaaacatccccgccgtgatcgccctgaccgaccccgagggctgcccactgagccggtttaaggatagcctgggaaacccaacccacatcctgagaatcggcgagagctataaggagaagcagcggaccatccaggccaagaaggaggtggagcagcggagagccggcggctacagccggaagtacgccagcaaagccaagaatctggcagacgatatggtgagaaacaccgctagagatctgctgtactacgccgtgacccaggatgccatgctgatcttcgccaacctgagccggggcttcggccggcagggcaagcggaccttcatggccgagagacagtacacacggatggaggactggctgaccgccaagctggcctacgagggcctgagcaagacctacctgtccaagacactggcccagtacacctccaagacatgcagcaactgtgggtttaccatcaccagcgccgactacgacagggtgctggagaagctgaagaagacagcaacaggctggatgaccacaattaacggcaaggagctgaaggtggagggccagattacctactacaacagatacaagagacagaacgtagtcaaggacctgtccgtcgagctggatagactgagcgaagaatctgtgaacaacgacatctcctcctggacaaagggcagaagcggagaagctctgagcctcctgaagaaaagattctcccatagacccgtgcaggagaagttcgtgtgcctgaactgcggcttcgagacacacgcagccgagcaagccgccctgaacatcgccagatcctggctgttcctgcggagccaggagtacaagaaataccagacaaacaagacaaccggcaacaccgataagagagccttcgtcgagacctggcagtccttttaccggaagaagcttaaggaggtgtggaaacctgccgtgcggtctggcggatctggcggaggctccaccagccccaagaaaaagagaaaagtctaagctgccttctgcggggcttgccttctggccatgcccttcttctctcccttgcacctgtacctcttggtctttgaataaagcctgagtaggaaggctagcaaaaaaaaaaaaaaaaaaaaaaaaaaaaaaaaaaaaaaaaaaaaaaaaaaaaaaaaaaaaaaaaaaaaaaaaaaaaaaaa

SEQ ID NO: 9963 - RNA, 8787 nt, synthetic construct
  source 1..8787: mol_type = other RNA
aggaaataagagagaaaagaagagtaagaagaaatataagagccaccatggcccctaagaagaagcgtaaagtgagccggatgaaccacgaccaggagttcgacccccctaaggtgtaccctcccgtccccgccgagaagagaaagcccatccgggtcctgagcctgttcgatggcatcgccaccggtctgctggtgctgaaggacctgggcatccaggtggataggtacattgcctccgaggtgtgcgaggactccatcaccgtgggaatggtgcgtcatcagggcaagatcatgtacgtgggcgacgtgcggagcgtgacacagaagcatatccaggagtggggccctttcgacctggtgatcggcggcagcccttgcaatgacctgagcatcgtgaacccagcccggaagggcctgtacgagggaaccggcagactgttcttcgagttttacagactgctgcacgacgcccggcctaaggaaggcgacgaccggcccttcttttggctgttcgagaatgtggtggccatgggagtcagcgacaagcgggatattagccggttcctggagagcaaccccgtgatgatcgatgccaaggaagtgagcgccgcccaccgggccagatacttctggggcaatctgcctggcatgaacagacccctggccagcaccgtgaacgacaagctggagctgcaggagtgcctggagcacggccggatcgccaagttcagcaaggtgagaaccatcaccacccgaagcaacagcatcaaacaaggcaaggaccagcactttcctgtgttcatgaacgagaaggaggacatcctgtggtgtaccgagatggagagagtgttcgggttcccagtccactacacagatgtcagcaacatgtctagactggccagacagagactgctgggaagaagctggtccgtccctgtgatcagacacctgttcgcccctctgaaggagtacttcgcctgcgtgagcagcggcaacagcaacgccaacagccggggccccagcttctctagcggcctggtgccactgtccctgagagggagccacatgggccccatggagatctacaaaaccgtgagcgcctggaagcggcagcctgtgcgcgtgctgagcctgtttcggaatatcgataaagtcctgaaaagcctgggattcctggagagcggctctggctccggcggtggcaccctgaagtacgtggaggatgtgacaaacgtggtcagacgggatgtggagaagtggggccccttcgatctggtgtacggcagcacccaacccctgggcagctcttgtgaccggtgccctggctggtacatgtttcagttccaccggatcctgcagtacgccctgccgagacaggagtcccagcggccattcttttggattttcatggacaacttgctgctgaccgaggatgaccaggaaactaccactcggttcctgcagaccgaagccgtgaccctgcaggacgtgagaggccgggactaccagaacgccatgcgggtgtggtccaacatccctggactgaaaagcaagcacgcacctctgacccctaaagaagaggagtacctgcaggcccaggtgcggagcagaagcaagctggacgcccctaaggtggatctgctggtgaagaattgcctcctgcccctgagagagtacttcaagtatttcagccagaatagtctgcccctgggaggcagcggcggcggcgaggagctgcccgtggccttcgaggacgtggccgtgtacttcaccagggaggagtggggcatgctggacaagaggaggaaggagctgtacagggacgtgatgaggaggaactacgagctgctggccagcctgggccccgccgccgccaagcccgacctgatcagcaagctggagaggggcgccgccccctggatcaaggaccccaacggccccaagtggggcaagggcaagaagaagatggtgggcggcccaagcagcggcgcccctcctcccagcggcggcaggcggcccaagcagcggcgcccctcctcccagcggcggcagcccagccggctccccaacctctaccgaggagggcacctctgagtccgccacccccgagagcggccctggcacctccaccgagcccagcgagggcagcgcacccggcagccctgccggcagccccacctccacagaggagggaaccagcaccgagcccagcgaaggcagcgccccaggcaccagcaccgagcctagtgagcaggagattaaacggatcaacaagatcagaagaagacttgtgaaagacagcaacaccaagaaggccggcaagacaggccccatgaaaaccctgctggttagagtgatgacacccgatctgagagagcggctggaaaacctgagaaagaagcctgaaaatatcccccagcccatcagcaatacatctagagccaacctgaataagctgctgaccgattacaccgaaatgaagaaggcgatcctgcatgtgtactgggaagagttccagaaggaccctgtgggcctgatgagccgggtggcccagcctgccagcaagaagatcgatcagaacaagctgaaacctgagatggacgagaagggcaacctgaccaccgccggctttgcctgctctcagtgtggccagcccctgttcgtgtacaagctggagcaggtgtctgagaagggcaaggcttacaccaactacttcggacggtgcaatgtggccgagcacgaaaagctgatcctgctggcccagctgaagcccgagaaggatagcgacgaagccgtgacatatagcctgggaaagtttgggcagagggccctggatttctacagcattcatgtgaccaaggagtccacccaccccgtgaagcccctggcccagatcgccggaaacagatacgcctccggacctgtgggaaaggccctgagcgacgcatgtatgggcacaatcgcctccttcctgtctaagtaccaggacatcatcatcgaacaccagaaggtggtgaagggcaaccagaagagactggagagcctgcgggagctggccggcaaggaaaacctggaataccctagcgtgaccctgccacctcagcctcacaccaaggagggcgttgatgcctacaacgaagtgatcgcccgggtgcgaatgtgggtgaacctgaacctgtggcagaagctgaagctaagcagagatgatgccaagcctctgctgagactgaagggattcccttcctttcctctggtcgagagacaggccaacgaagtggactggtgggacatggtgtgtaacgtgaagaagctgatcaacgagaaaaaggaggatggcaaggtgttttggcagaatctggctggctacaagagacaggaagccctgagaccatacctgagcagcgaggaagatcggaagaagggaaagaaattcgctcggtaccagctgggcgacctgctgctgcacctggaaaagaagcacggcgaggactggggaaaggtgtacgacgaggcctgggagcggattgacaagaaagtggaaggcctgagcaagcacatcaagctggaagaggaacggagaagcgaggacgcccagagcaaggccgccctgaccgactggctgcgggctaaggccagcttcgtgatcgagggcctgaaggaggccgacaaggacgagttctgcagatgcgagctgaagctgcagaagtggtacggggacctgcggggaaagcccttcgccatcgaagccgagaacagcatcctggacatcagcggcttcagcaagcagtacaactgtgccttcatctggcagaaggacggcgtgaagaagctgaacctgtacctgatcatcaactacttcaagggcggcaagctgcggttcaagaagatcaaacctgaagccttcgaagccaacagattctacaccgtgatcaacaaaaagagcggcgagatcgtgcccatggaggtgaacttcaacttcgacgaccccaacctgatcatcctgcctctggcctttggcaagagacagggcagagaattcatctggaacgacctgctgtccctggaaaccggcagcctgaagctggccaacggaagagtgatcgagaagacactgtacaacagaagaacccggcaggatgagcctgccctgttcgtggccctgaccttcgagcggcgggaggtcctggactcctccaatatcaaaccaatgaacctgatcggcgtggcaagaggcgaaaacatccccgccgtgatcgccctgaccgaccccgagggctgcccactgagccggtttaaggatagcctgggaaacccaacccacatcctgagaatcggcgagagctataaggagaagcagcggaccatccaggccaagaaggaggtggagcagcggagagccggcggctacagccggaagtacgccagcaaagccaagaatctggcagacgatatggtgagaaacaccgctagagatctgctgtactacgccgtgacccaggatgccatgctgatcttcgccaacctgagccggggcttcggccggcagggcaagcggaccttcatggccgagagacagtacacacggatggaggactggctgaccgccaagctggcctacgagggcctgagcaagacctacctgtccaagacactggcccagtacacctccaagacatgcagcaactgtgggtttaccatcaccagcgccgactacgacagggtgctggagaagctgaagaagacagcaacaggctggatgaccacaattaacggcaaggagctgaaggtggagggccagattacctactacaacagatacaagagacagaacgtagtcaaggacctgtccgtcgagctggatagactgagcgaagaatctgtgaacaacgacatctcctcctggacaaagggcagaagcggagaagctctgagcctcctgaagaaaagattctcccatagacccgtgcaggagaagttcgtgtgcctgaactgcggcttcgagacacacgcagccgagcaagccgccctgaacatcgccagatcctggctgttcctgcggagccaggagtacaagaaataccagacaaacaagacaaccggcaacaccgataagagagccttcgtcgagacctggcagtccttttaccggaagaagcttaaggaggtgtggaaacctgccgtgcggtctggcggatctggcggaggctccaccagccccaagaaaaagagaaaagtctaagctgccttctgcggggcttgccttctggccatgcccttcttctctcccttgcacctgtacctcttggtctttgaataaagcctgagtaggaaggctagcaaaaaaaaaaaaaaaaaaaaaaaaaaaaaaaaaaaaaaaaaaaaaaaaaaaaaaaaaaaaaaaaaaaaaaaaaaaaaaaagcccagccggctccccaacctctaccgaggagggcacctctgagtccgccacccccgagagcggccctggcacctccaccgagcccagcgagggcagcgcacccggcagccctgccggcagccccacctccacagaggagggaaccagcaccgagcccagcgaaggcagcgccccaggcaccagcaccgagcctagtgagcaggagattaaacggatcaacaagatcagaagaagacttgtgaaagacagcaacaccaagaaggccggcaagacaggccccatgaaaaccctgctggttagagtgatgacacccgatctgagagagcggctggaaaacctgagaaagaagcctgaaaatatcccccagcccatcagcaatacatctagagccaacctgaataagctgctgaccgattacaccgaaatgaagaaggcgatcctgcatgtgtactgggaagagttccagaaggaccctgtgggcctgatgagccgggtggcccagcctgccagcaagaagatcgatcagaacaagctgaaacctgagatggacgagaagggcaacctgaccaccgccggctttgcctgctctcagtgtggccagcccctgttcgtgtacaagctggagcaggtgtctgagaagggcaaggcttacaccaactacttcggacggtgcaatgtggccgagcacgaaaagctgatcctgctggcccagctgaagcccgagaaggatagcgacgaagccgtgacatatagcctgggaaagtttgggcagagggccctggatttctacagcattcatgtgaccaaggagtccacccaccccgtgaagcccctggcccagatcgccggaaacagatacgcctccggacctgtgggaaaggccctgagcgacgcatgtatgggcacaatcgcctccttcctgtctaagtaccaggacatcatcatcgaacaccagaaggtggtgaagggcaaccagaagagactggagagcctgcgggagctggccggcaaggaaaacctggaataccctagcgtgaccctgccacctcagcctcacaccaaggagggcgttgatgcctacaacgaagtgatcgcccgggtgcgaatgtgggtgaacctgaacctgtggcagaagctgaagctaagcagagatgatgccaagcctctgctgagactgaagggattcccttcctttcctctggtcgagagacaggccaacgaagtggactggtgggacatggtgtgtaacgtgaagaagctgatcaacgagaaaaaggaggatggcaaggtgttttggcagaatctggctggctacaagagacaggaagccctgagaccatacctgagcagcgaggaagatcggaagaagggaaagaaattcgctcggtaccagctgggcgacctgctgctgcacctggaaaagaagcacggcgaggactggggaaaggtgtacgacgaggcctgggagcggattgacaagaaagtggaaggcctgagcaagcacatcaagctggaagaggaacggagaagcgaggacgcccagagcaaggccgccctgaccgactggctgcgggctaaggccagcttcgtgatcgagggcctgaaggaggccgacaaggacgagttctgcagatgcgagctgaagctgcagaagtggtacggggacctgcggggaaagcccttcgccatcgaagccgagaacagcatcctggacatcagcggcttcagcaagcagtacaactgtgccttcatctggcagaaggacggcgtgaagaagctgaacctgtacctgatcatcaactacttcaagggcggcaagctgcggttcaagaagatcaaacctgaagccttcgaagccaacagattctacaccgtgatcaacaaaaagagcggcgagatcgtgcccatggaggtgaacttcaacttcgacgaccccaacctgatcatcctgcctctggcctttggcaagagacagggcagagaattcatctggaacgacctgctgtccctggaaaccggcagcctgaagctggccaacggaagagtgatcgagaagacactgtacaacagaagaacccggcaggatgagcctgccctgttcgtggccctgaccttcgagcggcgggaggtcctggactcctccaatatcaaaccaatgaacctgatcggcgtggcaagaggcgaaaacatccccgccgtgatcgccctgaccgaccccgagggctgcccactgagccggtttaaggatagcctgggaaacccaacccacatcctgagaatcggcgagagctataaggagaagcagcggaccatccaggccaagaaggaggtggagcagcggagagccggcggctacagccggaagtacgccagcaaagccaagaatctggcagacgatatggtgagaaacaccgctagagatctgctgtactacgccgtgacccaggatgccatgctgatcttcgccaacctgagccggggcttcggccggcagggcaagcggaccttcatggccgagagacagtacacacggatggaggactggctgaccgccaagctggcctacgagggcctgagcaagacctacctgtccaagacactggcccagtacacctccaagacatgcagcaactgtgggtttaccatcaccagcgccgactacgacagggtgctggagaagctgaagaagacagcaacaggctggatgaccacaattaacggcaaggagctgaaggtggagggccagattacctactacaacagatacaagagacagaacgtagtcaaggacctgtccgtcgagctggatagactgagcgaagaatctgtgaacaacgacatctcctcctggacaaagggcagaagcggagaagctctgagcctcctgaagaaaagattctcccatagacccgtgcaggagaagttcgtgtgcctgaactgcggcttcgagacacacgcagccgagcaagccgccctgaacatcgccagatcctggctgttcctgcggagccaggagtacaagaaataccagacaaacaagacaaccggcaacaccgataagagagccttcgtcgagacctggcagtccttttaccggaagaagcttaaggaggtgtggaaacctgccgtgcggtctggcggatctggcggaggctccaccagccccaagaaaaagagaaaagtctaagctgccttctgcggggcttgccttctggccatgcccttcttctctcccttgcacctgtacctcttggtctttgaataaagcctgagtaggaaggctagcaaaaaaaaaaaaaaaaaaaaaaaaaaaaaaaaaaaaaaaaaaaaaaaaaaaaaaaaaaaaaaaaaaaaaaaaaaaaaaaa

SEQ ID NO: 9964 - RNA, 8787 nt, synthetic construct
  source 1..8787: mol_type = other RNA
aggaaataagagagaaaagaagagtaagaagaaatataagagccaccatggcccctaagaagaagcgtaaagtgagccggatgaaccacgaccaggagttcgacccccctaaggtgtaccctcccgtccccgccgagaagagaaagcccatccgggtcctgagcctgttcgatggcatcgccaccggtctgctggtgctgaaggacctgggcatccaggtggataggtacattgcctccgaggtgtgcgaggactccatcaccgtgggaatggtgcgtcatcagggcaagatcatgtacgtgggcgacgtgcggagcgtgacacagaagcatatccaggagtggggccctttcgacctggtgatcggcggcagcccttgcaatgacctgagcatcgtgaacccagcccggaagggcctgtacgagggaaccggcagactgttcttcgagttttacagactgctgcacgacgcccggcctaaggaaggcgacgaccggcccttcttttggctgttcgagaatgtggtggccatgggagtcagcgacaagcgggatattagccggttcctggagagcaaccccgtgatgatcgatgccaaggaagtgagcgccgcccaccgggccagatacttctggggcaatctgcctggcatgaacagacccctggccagcaccgtgaacgacaagctggagctgcaggagtgcctggagcacggccggatcgccaagttcagcaaggtgagaaccatcaccacccgaagcaacagcatcaaacaaggcaaggaccagcactttcctgtgttcatgaacgagaaggaggacatcctgtggtgtaccgagatggagagagtgttcgggttcccagtccactacacagatgtcagcaacatgtctagactggccagacagagactgctgggaagaagctggtccgtccctgtgatcagacacctgttcgcccctctgaaggagtacttcgcctgcgtgagcagcggcaacagcaacgccaacagccggggccccagcttctctagcggcctggtgccactgtccctgagagggagccacatgggccccatggagatctacaaaaccgtgagcgcctggaagcggcagcctgtgcgcgtgctgagcctgtttcggaatatcgataaagtcctgaaaagcctgggattcctggagagcggctctggctccggcggtggcaccctgaagtacgtggaggatgtgacaaacgtggtcagacgggatgtggagaagtggggccccttcgatctggtgtacggcagcacccaacccctgggcagctcttgtgaccggtgccctggctggtacatgtttcagttccaccggatcctgcagtacgccctgccgagacaggagtcccagcggccattcttttggattttcatggacaacttgctgctgaccgaggatgaccaggaaactaccactcggttcctgcagaccgaagccgtgaccctgcaggacgtgagaggccgggactaccagaacgccatgcgggtgtggtccaacatccctggactgaaaagcaagcacgcacctctgacccctaaagaagaggagtacctgcaggcccaggtgcggagcagaagcaagctggacgcccctaaggtggatctgctggtgaagaattgcctcctgcccctgagagagtacttcaagtatttcagccagaatagtctgcccctgggaggcagcggcggcggccccctggagctggtgaccttcaaggacgtggccgtggacttcagctgggaggagtggggccacctggagcccagccagaaggagctgtacagggaggtgatgctggagaactacaggaacctggtgtgcctgggcctggccatcagcaagcccgacgtgatcttccagctggagcagggcgaggccccctggatgcccgagagggagggccccaagtgcaggtgcgccgactggaagaccaggggcggcccaagcagcggcgcccctcctcccagcggcggcaggcggcccaagcagcggcgcccctcctcccagcggcggcagcccagccggctccccaacctctaccgaggagggcacctctgagtccgccacccccgagagcggccctggcacctccaccgagcccagcgagggcagcgcacccggcagccctgccggcagccccacctccacagaggagggaaccagcaccgagcccagcgaaggcagcgccccaggcaccagcaccgagcctagtgagcaggagattaaacggatcaacaagatcagaagaagacttgtgaaagacagcaacaccaagaaggccggcaagacaggccccatgaaaaccctgctggttagagtgatgacacccgatctgagagagcggctggaaaacctgagaaagaagcctgaaaatatcccccagcccatcagcaatacatctagagccaacctgaataagctgctgaccgattacaccgaaatgaagaaggcgatcctgcatgtgtactgggaagagttccagaaggaccctgtgggcctgatgagccgggtggcccagcctgccagcaagaagatcgatcagaacaagctgaaacctgagatggacgagaagggcaacctgaccaccgccggctttgcctgctctcagtgtggccagcccctgttcgtgtacaagctggagcaggtgtctgagaagggcaaggcttacaccaactacttcggacggtgcaatgtggccgagcacgaaaagctgatcctgctggcccagctgaagcccgagaaggatagcgacgaagccgtgacatatagcctgggaaagtttgggcagagggccctggatttctacagcattcatgtgaccaaggagtccacccaccccgtgaagcccctggcccagatcgccggaaacagatacgcctccggacctgtgggaaaggccctgagcgacgcatgtatgggcacaatcgcctccttcctgtctaagtaccaggacatcatcatcgaacaccagaaggtggtgaagggcaaccagaagagactggagagcctgcgggagctggccggcaaggaaaacctggaataccctagcgtgaccctgccacctcagcctcacaccaaggagggcgttgatgcctacaacgaagtgatcgcccgggtgcgaatgtgggtgaacctgaacctgtggcagaagctgaagctaagcagagatgatgccaagcctctgctgagactgaagggattcccttcctttcctctggtcgagagacaggccaacgaagtggactggtgggacatggtgtgtaacgtgaagaagctgatcaacgagaaaaaggaggatggcaaggtgttttggcagaatctggctggctacaagagacaggaagccctgagaccatacctgagcagcgaggaagatcggaagaagggaaagaaattcgctcggtaccagctgggcgacctgctgctgcacctggaaaagaagcacggcgaggactggggaaaggtgtacgacgaggcctgggagcggattgacaagaaagtggaaggcctgagcaagcacatcaagctggaagaggaacggagaagcgaggacgcccagagcaaggccgccctgaccgactggctgcgggctaaggccagcttcgtgatcgagggcctgaaggaggccgacaaggacgagttctgcagatgcgagctgaagctgcagaagtggtacggggacctgcggggaaagcccttcgccatcgaagccgagaacagcatcctggacatcagcggcttcagcaagcagtacaactgtgccttcatctggcagaaggacggcgtgaagaagctgaacctgtacctgatcatcaactacttcaagggcggcaagctgcggttcaagaagatcaaacctgaagccttcgaagccaacagattctacaccgtgatcaacaaaaagagcggcgagatcgtgcccatggaggtgaacttcaacttcgacgaccccaacctgatcatcctgcctctggcctttggcaagagacagggcagagaattcatctggaacgacctgctgtccctggaaaccggcagcctgaagctggccaacggaagagtgatcgagaagacactgtacaacagaagaacccggcaggatgagcctgccctgttcgtggccctgaccttcgagcggcgggaggtcctggactcctccaatatcaaaccaatgaacctgatcggcgtggcaagaggcgaaaacatccccgccgtgatcgccctgaccgaccccgagggctgcccactgagccggtttaaggatagcctgggaaacccaacccacatcctgagaatcggcgagagctataaggagaagcagcggaccatccaggccaagaaggaggtggagcagcggagagccggcggctacagccggaagtacgccagcaaagccaagaatctggcagacgatatggtgagaaacaccgctagagatctgctgtactacgccgtgacccaggatgccatgctgatcttcgccaacctgagccggggcttcggccggcagggcaagcggaccttcatggccgagagacagtacacacggatggaggactggctgaccgccaagctggcctacgagggcctgagcaagacctacctgtccaagacactggcccagtacacctccaagacatgcagcaactgtgggtttaccatcaccagcgccgactacgacagggtgctggagaagctgaagaagacagcaacaggctggatgaccacaattaacggcaaggagctgaaggtggagggccagattacctactacaacagatacaagagacagaacgtagtcaaggacctgtccgtcgagctggatagactgagcgaagaatctgtgaacaacgacatctcctcctggacaaagggcagaagcggagaagctctgagcctcctgaagaaaagattctcccatagacccgtgcaggagaagttcgtgtgcctgaactgcggcttcgagacacacgcagccgagcaagccgccctgaacatcgccagatcctggctgttcctgcggagccaggagtacaagaaataccagacaaacaagacaaccggcaacaccgataagagagccttcgtcgagacctggcagtccttttaccggaagaagcttaaggaggtgtggaaacctgccgtgcggtctggcggatctggcggaggctccaccagccccaagaaaaagagaaaagtctaagctgccttctgcggggcttgccttctggccatgcccttcttctctcccttgcacctgtacctcttggtctttgaataaagcctgagtaggaaggctagcaaaaaaaaaaaaaaaaaaaaaaaaaaaaaaaaaaaaaaaaaaaaaaaaaaaaaaaaaaaaaaaaaaaaaaaaaaaaaaaagcccagccggctccccaacctctaccgaggagggcacctctgagtccgccacccccgagagcggccctggcacctccaccgagcccagcgagggcagcgcacccggcagccctgccggcagccccacctccacagaggagggaaccagcaccgagcccagcgaaggcagcgccccaggcaccagcaccgagcctagtgagcaggagattaaacggatcaacaagatcagaagaagacttgtgaaagacagcaacaccaagaaggccggcaagacaggccccatgaaaaccctgctggttagagtgatgacacccgatctgagagagcggctggaaaacctgagaaagaagcctgaaaatatcccccagcccatcagcaatacatctagagccaacctgaataagctgctgaccgattacaccgaaatgaagaaggcgatcctgcatgtgtactgggaagagttccagaaggaccctgtgggcctgatgagccgggtggcccagcctgccagcaagaagatcgatcagaacaagctgaaacctgagatggacgagaagggcaacctgaccaccgccggctttgcctgctctcagtgtggccagcccctgttcgtgtacaagctggagcaggtgtctgagaagggcaaggcttacaccaactacttcggacggtgcaatgtggccgagcacgaaaagctgatcctgctggcccagctgaagcccgagaaggatagcgacgaagccgtgacatatagcctgggaaagtttgggcagagggccctggatttctacagcattcatgtgaccaaggagtccacccaccccgtgaagcccctggcccagatcgccggaaacagatacgcctccggacctgtgggaaaggccctgagcgacgcatgtatgggcacaatcgcctccttcctgtctaagtaccaggacatcatcatcgaacaccagaaggtggtgaagggcaaccagaagagactggagagcctgcgggagctggccggcaaggaaaacctggaataccctagcgtgaccctgccacctcagcctcacaccaaggagggcgttgatgcctacaacgaagtgatcgcccgggtgcgaatgtgggtgaacctgaacctgtggcagaagctgaagctaagcagagatgatgccaagcctctgctgagactgaagggattcccttcctttcctctggtcgagagacaggccaacgaagtggactggtgggacatggtgtgtaacgtgaagaagctgatcaacgagaaaaaggaggatggcaaggtgttttggcagaatctggctggctacaagagacaggaagccctgagaccatacctgagcagcgaggaagatcggaagaagggaaagaaattcgctcggtaccagctgggcgacctgctgctgcacctggaaaagaagcacggcgaggactggggaaaggtgtacgacgaggcctgggagcggattgacaagaaagtggaaggcctgagcaagcacatcaagctggaagaggaacggagaagcgaggacgcccagagcaaggccgccctgaccgactggctgcgggctaaggccagcttcgtgatcgagggcctgaaggaggccgacaaggacgagttctgcagatgcgagctgaagctgcagaagtggtacggggacctgcggggaaagcccttcgccatcgaagccgagaacagcatcctggacatcagcggcttcagcaagcagtacaactgtgccttcatctggcagaaggacggcgtgaagaagctgaacctgtacctgatcatcaactacttcaagggcggcaagctgcggttcaagaagatcaaacctgaagccttcgaagccaacagattctacaccgtgatcaacaaaaagagcggcgagatcgtgcccatggaggtgaacttcaacttcgacgaccccaacctgatcatcctgcctctggcctttggcaagagacagggcagagaattcatctggaacgacctgctgtccctggaaaccggcagcctgaagctggccaacggaagagtgatcgagaagacactgtacaacagaagaacccggcaggatgagcctgccctgttcgtggccctgaccttcgagcggcgggaggtcctggactcctccaatatcaaaccaatgaacctgatcggcgtggcaagaggcgaaaacatccccgccgtgatcgccctgaccgaccccgagggctgcccactgagccggtttaaggatagcctgggaaacccaacccacatcctgagaatcggcgagagctataaggagaagcagcggaccatccaggccaagaaggaggtggagcagcggagagccggcggctacagccggaagtacgccagcaaagccaagaatctggcagacgatatggtgagaaacaccgctagagatctgctgtactacgccgtgacccaggatgccatgctgatcttcgccaacctgagccggggcttcggccggcagggcaagcggaccttcatggccgagagacagtacacacggatggaggactggctgaccgccaagctggcctacgagggcctgagcaagacctacctgtccaagacactggcccagtacacctccaagacatgcagcaactgtgggtttaccatcaccagcgccgactacgacagggtgctggagaagctgaagaagacagcaacaggctggatgaccacaattaacggcaaggagctgaaggtggagggccagattacctactacaacagatacaagagacagaacgtagtcaaggacctgtccgtcgagctggatagactgagcgaagaatctgtgaacaacgacatctcctcctggacaaagggcagaagcggagaagctctgagcctcctgaagaaaagattctcccatagacccgtgcaggagaagttcgtgtgcctgaactgcggcttcgagacacacgcagccgagcaagccgccctgaacatcgccagatcctggctgttcctgcggagccaggagtacaagaaataccagacaaacaagacaaccggcaacaccgataagagagccttcgtcgagacctggcagtccttttaccggaagaagcttaaggaggtgtggaaacctgccgtgcggtctggcggatctggcggaggctccaccagccccaagaaaaagagaaaagtctaagctgccttctgcggggcttgccttctggccatgcccttcttctctcccttgcacctgtacctcttggtctttgaataaagcctgagtaggaaggctagcaaaaaaaaaaaaaaaaaaaaaaaaaaaaaaaaaaaaaaaaaaaaaaaaaaaaaaaaaaaaaaaaaaaaaaaaaaaaaaaa

SEQ ID NO: 9965 - RNA, 8787 nt, synthetic construct
  source 1..8787: mol_type = other RNA
aggaaataagagagaaaagaagagtaagaagaaatataagagccaccatggcccctaagaagaagcgtaaagtgagccggatgaaccacgaccaggagttcgacccccctaaggtgtaccctcccgtccccgccgagaagagaaagcccatccgggtcctgagcctgttcgatggcatcgccaccggtctgctggtgctgaaggacctgggcatccaggtggataggtacattgcctccgaggtgtgcgaggactccatcaccgtgggaatggtgcgtcatcagggcaagatcatgtacgtgggcgacgtgcggagcgtgacacagaagcatatccaggagtggggccctttcgacctggtgatcggcggcagcccttgcaatgacctgagcatcgtgaacccagcccggaagggcctgtacgagggaaccggcagactgttcttcgagttttacagactgctgcacgacgcccggcctaaggaaggcgacgaccggcccttcttttggctgttcgagaatgtggtggccatgggagtcagcgacaagcgggatattagccggttcctggagagcaaccccgtgatgatcgatgccaaggaagtgagcgccgcccaccgggccagatacttctggggcaatctgcctggcatgaacagacccctggccagcaccgtgaacgacaagctggagctgcaggagtgcctggagcacggccggatcgccaagttcagcaaggtgagaaccatcaccacccgaagcaacagcatcaaacaaggcaaggaccagcactttcctgtgttcatgaacgagaaggaggacatcctgtggtgtaccgagatggagagagtgttcgggttcccagtccactacacagatgtcagcaacatgtctagactggccagacagagactgctgggaagaagctggtccgtccctgtgatcagacacctgttcgcccctctgaaggagtacttcgcctgcgtgagcagcggcaacagcaacgccaacagccggggccccagcttctctagcggcctggtgccactgtccctgagagggagccacatgggccccatggagatctacaaaaccgtgagcgcctggaagcggcagcctgtgcgcgtgctgagcctgtttcggaatatcgataaagtcctgaaaagcctgggattcctggagagcggctctggctccggcggtggcaccctgaagtacgtggaggatgtgacaaacgtggtcagacgggatgtggagaagtggggccccttcgatctggtgtacggcagcacccaacccctgggcagctcttgtgaccggtgccctggctggtacatgtttcagttccaccggatcctgcagtacgccctgccgagacaggagtcccagcggccattcttttggattttcatggacaacttgctgctgaccgaggatgaccaggaaactaccactcggttcctgcagaccgaagccgtgaccctgcaggacgtgagaggccgggactaccagaacgccatgcgggtgtggtccaacatccctggactgaaaagcaagcacgcacctctgacccctaaagaagaggagtacctgcaggcccaggtgcggagcagaagcaagctggacgcccctaaggtggatctgctggtgaagaattgcctcctgcccctgagagagtacttcaagtatttcagccagaatagtctgcccctgggaggcagcggcggcggcgagatgggcctgctgaccttcagggacatcgccatcgagttcagcctggccgagtggcagtgcctggaccacgcccagaggaacctgtacagggacgtgatgctggagaactacaggaacctggtgagcctgggcatcgccgtgagcaagcccgacctgatcacctgcctggagcagaacaaggagcccaggaacatcaagaggaacgagatggtggccaagcaccccggcagggagaagagcggcggcccaagcagcggcgcccctcctcccagcggcggcaggcggcccaagcagcggcgcccctcctcccagcggcggcagcccagccggctccccaacctctaccgaggagggcacctctgagtccgccacccccgagagcggccctggcacctccaccgagcccagcgagggcagcgcacccggcagccctgccggcagccccacctccacagaggagggaaccagcaccgagcccagcgaaggcagcgccccaggcaccagcaccgagcctagtgagcaggagattaaacggatcaacaagatcagaagaagacttgtgaaagacagcaacaccaagaaggccggcaagacaggccccatgaaaaccctgctggttagagtgatgacacccgatctgagagagcggctggaaaacctgagaaagaagcctgaaaatatcccccagcccatcagcaatacatctagagccaacctgaataagctgctgaccgattacaccgaaatgaagaaggcgatcctgcatgtgtactgggaagagttccagaaggaccctgtgggcctgatgagccgggtggcccagcctgccagcaagaagatcgatcagaacaagctgaaacctgagatggacgagaagggcaacctgaccaccgccggctttgcctgctctcagtgtggccagcccctgttcgtgtacaagctggagcaggtgtctgagaagggcaaggcttacaccaactacttcggacggtgcaatgtggccgagcacgaaaagctgatcctgctggcccagctgaagcccgagaaggatagcgacgaagccgtgacatatagcctgggaaagtttgggcagagggccctggatttctacagcattcatgtgaccaaggagtccacccaccccgtgaagcccctggcccagatcgccggaaacagatacgcctccggacctgtgggaaaggccctgagcgacgcatgtatgggcacaatcgcctccttcctgtctaagtaccaggacatcatcatcgaacaccagaaggtggtgaagggcaaccagaagagactggagagcctgcgggagctggccggcaaggaaaacctggaataccctagcgtgaccctgccacctcagcctcacaccaaggagggcgttgatgcctacaacgaagtgatcgcccgggtgcgaatgtgggtgaacctgaacctgtggcagaagctgaagctaagcagagatgatgccaagcctctgctgagactgaagggattcccttcctttcctctggtcgagagacaggccaacgaagtggactggtgggacatggtgtgtaacgtgaagaagctgatcaacgagaaaaaggaggatggcaaggtgttttggcagaatctggctggctacaagagacaggaagccctgagaccatacctgagcagcgaggaagatcggaagaagggaaagaaattcgctcggtaccagctgggcgacctgctgctgcacctggaaaagaagcacggcgaggactggggaaaggtgtacgacgaggcctgggagcggattgacaagaaagtggaaggcctgagcaagcacatcaagctggaagaggaacggagaagcgaggacgcccagagcaaggccgccctgaccgactggctgcgggctaaggccagcttcgtgatcgagggcctgaaggaggccgacaaggacgagttctgcagatgcgagctgaagctgcagaagtggtacggggacctgcggggaaagcccttcgccatcgaagccgagaacagcatcctggacatcagcggcttcagcaagcagtacaactgtgccttcatctggcagaaggacggcgtgaagaagctgaacctgtacctgatcatcaactacttcaagggcggcaagctgcggttcaagaagatcaaacctgaagccttcgaagccaacagattctacaccgtgatcaacaaaaagagcggcgagatcgtgcccatggaggtgaacttcaacttcgacgaccccaacctgatcatcctgcctctggcctttggcaagagacagggcagagaattcatctggaacgacctgctgtccctggaaaccggcagcctgaagctggccaacggaagagtgatcgagaagacactgtacaacagaagaacccggcaggatgagcctgccctgttcgtggccctgaccttcgagcggcgggaggtcctggactcctccaatatcaaaccaatgaacctgatcggcgtggcaagaggcgaaaacatccccgccgtgatcgccctgaccgaccccgagggctgcccactgagccggtttaaggatagcctgggaaacccaacccacatcctgagaatcggcgagagctataaggagaagcagcggaccatccaggccaagaaggaggtggagcagcggagagccggcggctacagccggaagtacgccagcaaagccaagaatctggcagacgatatggtgagaaacaccgctagagatctgctgtactacgccgtgacccaggatgccatgctgatcttcgccaacctgagccggggcttcggccggcagggcaagcggaccttcatggccgagagacagtacacacggatggaggactggctgaccgccaagctggcctacgagggcctgagcaagacctacctgtccaagacactggcccagtacacctccaagacatgcagcaactgtgggtttaccatcaccagcgccgactacgacagggtgctggagaagctgaagaagacagcaacaggctggatgaccacaattaacggcaaggagctgaaggtggagggccagattacctactacaacagatacaagagacagaacgtagtcaaggacctgtccgtcgagctggatagactgagcgaagaatctgtgaacaacgacatctcctcctggacaaagggcagaagcggagaagctctgagcctcctgaagaaaagattctcccatagacccgtgcaggagaagttcgtgtgcctgaactgcggcttcgagacacacgcagccgagcaagccgccctgaacatcgccagatcctggctgttcctgcggagccaggagtacaagaaataccagacaaacaagacaaccggcaacaccgataagagagccttcgtcgagacctggcagtccttttaccggaagaagcttaaggaggtgtggaaacctgccgtgcggtctggcggatctggcggaggctccaccagccccaagaaaaagagaaaagtctaagctgccttctgcggggcttgccttctggccatgcccttcttctctcccttgcacctgtacctcttggtctttgaataaagcctgagtaggaaggctagcaaaaaaaaaaaaaaaaaaaaaaaaaaaaaaaaaaaaaaaaaaaaaaaaaaaaaaaaaaaaaaaaaaaaaaaaaaaaaaaagcccagccggctccccaacctctaccgaggagggcacctctgagtccgccacccccgagagcggccctggcacctccaccgagcccagcgagggcagcgcacccggcagccctgccggcagccccacctccacagaggagggaaccagcaccgagcccagcgaaggcagcgccccaggcaccagcaccgagcctagtgagcaggagattaaacggatcaacaagatcagaagaagacttgtgaaagacagcaacaccaagaaggccggcaagacaggccccatgaaaaccctgctggttagagtgatgacacccgatctgagagagcggctggaaaacctgagaaagaagcctgaaaatatcccccagcccatcagcaatacatctagagccaacctgaataagctgctgaccgattacaccgaaatgaagaaggcgatcctgcatgtgtactgggaagagttccagaaggaccctgtgggcctgatgagccgggtggcccagcctgccagcaagaagatcgatcagaacaagctgaaacctgagatggacgagaagggcaacctgaccaccgccggctttgcctgctctcagtgtggccagcccctgttcgtgtacaagctggagcaggtgtctgagaagggcaaggcttacaccaactacttcggacggtgcaatgtggccgagcacgaaaagctgatcctgctggcccagctgaagcccgagaaggatagcgacgaagccgtgacatatagcctgggaaagtttgggcagagggccctggatttctacagcattcatgtgaccaaggagtccacccaccccgtgaagcccctggcccagatcgccggaaacagatacgcctccggacctgtgggaaaggccctgagcgacgcatgtatgggcacaatcgcctccttcctgtctaagtaccaggacatcatcatcgaacaccagaaggtggtgaagggcaaccagaagagactggagagcctgcgggagctggccggcaaggaaaacctggaataccctagcgtgaccctgccacctcagcctcacaccaaggagggcgttgatgcctacaacgaagtgatcgcccgggtgcgaatgtgggtgaacctgaacctgtggcagaagctgaagctaagcagagatgatgccaagcctctgctgagactgaagggattcccttcctttcctctggtcgagagacaggccaacgaagtggactggtgggacatggtgtgtaacgtgaagaagctgatcaacgagaaaaaggaggatggcaaggtgttttggcagaatctggctggctacaagagacaggaagccctgagaccatacctgagcagcgaggaagatcggaagaagggaaagaaattcgctcggtaccagctgggcgacctgctgctgcacctggaaaagaagcacggcgaggactggggaaaggtgtacgacgaggcctgggagcggattgacaagaaagtggaaggcctgagcaagcacatcaagctggaagaggaacggagaagcgaggacgcccagagcaaggccgccctgaccgactggctgcgggctaaggccagcttcgtgatcgagggcctgaaggaggccgacaaggacgagttctgcagatgcgagctgaagctgcagaagtggtacggggacctgcggggaaagcccttcgccatcgaagccgagaacagcatcctggacatcagcggcttcagcaagcagtacaactgtgccttcatctggcagaaggacggcgtgaagaagctgaacctgtacctgatcatcaactacttcaagggcggcaagctgcggttcaagaagatcaaacctgaagccttcgaagccaacagattctacaccgtgatcaacaaaaagagcggcgagatcgtgcccatggaggtgaacttcaacttcgacgaccccaacctgatcatcctgcctctggcctttggcaagagacagggcagagaattcatctggaacgacctgctgtccctggaaaccggcagcctgaagctggccaacggaagagtgatcgagaagacactgtacaacagaagaacccggcaggatgagcctgccctgttcgtggccctgaccttcgagcggcgggaggtcctggactcctccaatatcaaaccaatgaacctgatcggcgtggcaagaggcgaaaacatccccgccgtgatcgccctgaccgaccccgagggctgcccactgagccggtttaaggatagcctgggaaacccaacccacatcctgagaatcggcgagagctataaggagaagcagcggaccatccaggccaagaaggaggtggagcagcggagagccggcggctacagccggaagtacgccagcaaagccaagaatctggcagacgatatggtgagaaacaccgctagagatctgctgtactacgccgtgacccaggatgccatgctgatcttcgccaacctgagccggggcttcggccggcagggcaagcggaccttcatggccgagagacagtacacacggatggaggactggctgaccgccaagctggcctacgagggcctgagcaagacctacctgtccaagacactggcccagtacacctccaagacatgcagcaactgtgggtttaccatcaccagcgccgactacgacagggtgctggagaagctgaagaagacagcaacaggctggatgaccacaattaacggcaaggagctgaaggtggagggccagattacctactacaacagatacaagagacagaacgtagtcaaggacctgtccgtcgagctggatagactgagcgaagaatctgtgaacaacgacatctcctcctggacaaagggcagaagcggagaagctctgagcctcctgaagaaaagattctcccatagacccgtgcaggagaagttcgtgtgcctgaactgcggcttcgagacacacgcagccgagcaagccgccctgaacatcgccagatcctggctgttcctgcggagccaggagtacaagaaataccagacaaacaagacaaccggcaacaccgataagagagccttcgtcgagacctggcagtccttttaccggaagaagcttaaggaggtgtggaaacctgccgtgcggtctggcggatctggcggaggctccaccagccccaagaaaaagagaaaagtctaagctgccttctgcggggcttgccttctggccatgcccttcttctctcccttgcacctgtacctcttggtctttgaataaagcctgagtaggaaggctagcaaaaaaaaaaaaaaaaaaaaaaaaaaaaaaaaaaaaaaaaaaaaaaaaaaaaaaaaaaaaaaaaaaaaaaaaaaaaaaaa

SEQ ID NO: 9966 - RNA, 8787 nt, synthetic construct
  source 1..8787: mol_type = other RNA
aggaaataagagagaaaagaagagtaagaagaaatataagagccaccatggcccctaagaagaagcgtaaagtgagccggatgaaccacgaccaggagttcgacccccctaaggtgtaccctcccgtccccgccgagaagagaaagcccatccgggtcctgagcctgttcgatggcatcgccaccggtctgctggtgctgaaggacctgggcatccaggtggataggtacattgcctccgaggtgtgcgaggactccatcaccgtgggaatggtgcgtcatcagggcaagatcatgtacgtgggcgacgtgcggagcgtgacacagaagcatatccaggagtggggccctttcgacctggtgatcggcggcagcccttgcaatgacctgagcatcgtgaacccagcccggaagggcctgtacgagggaaccggcagactgttcttcgagttttacagactgctgcacgacgcccggcctaaggaaggcgacgaccggcccttcttttggctgttcgagaatgtggtggccatgggagtcagcgacaagcgggatattagccggttcctggagagcaaccccgtgatgatcgatgccaaggaagtgagcgccgcccaccgggccagatacttctggggcaatctgcctggcatgaacagacccctggccagcaccgtgaacgacaagctggagctgcaggagtgcctggagcacggccggatcgccaagttcagcaaggtgagaaccatcaccacccgaagcaacagcatcaaacaaggcaaggaccagcactttcctgtgttcatgaacgagaaggaggacatcctgtggtgtaccgagatggagagagtgttcgggttcccagtccactacacagatgtcagcaacatgtctagactggccagacagagactgctgggaagaagctggtccgtccctgtgatcagacacctgttcgcccctctgaaggagtacttcgcctgcgtgagcagcggcaacagcaacgccaacagccggggccccagcttctctagcggcctggtgccactgtccctgagagggagccacatgggccccatggagatctacaaaaccgtgagcgcctggaagcggcagcctgtgcgcgtgctgagcctgtttcggaatatcgataaagtcctgaaaagcctgggattcctggagagcggctctggctccggcggtggcaccctgaagtacgtggaggatgtgacaaacgtggtcagacgggatgtggagaagtggggccccttcgatctggtgtacggcagcacccaacccctgggcagctcttgtgaccggtgccctggctggtacatgtttcagttccaccggatcctgcagtacgccctgccgagacaggagtcccagcggccattcttttggattttcatggacaacttgctgctgaccgaggatgaccaggaaactaccactcggttcctgcagaccgaagccgtgaccctgcaggacgtgagaggccgggactaccagaacgccatgcgggtgtggtccaacatccctggactgaaaagcaagcacgcacctctgacccctaaagaagaggagtacctgcaggcccaggtgcggagcagaagcaagctggacgcccctaaggtggatctgctggtgaagaattgcctcctgcccctgagagagtacttcaagtatttcagccagaatagtctgcccctgggaggcagcggcggcggcagccagggcctggtgaccttcagggacgtggccctggacttcagccaggaggagtgggagtggctggaccccagccagaaggacctgtacagggacgtgatgctggagaactacaggaacctggtgtgcctgggcctgagcatcagcaagcccaacatgatcagcctgctggagcagggcaaggagccctggatggtgcagagggagatgagcgacgacccctacaccgactgggagagctggggcggcccaagcagcggcgcccctcctcccagcggcggcaggcggcccaagcagcggcgcccctcctcccagcggcggcagcccagccggctccccaacctctaccgaggagggcacctctgagtccgccacccccgagagcggccctggcacctccaccgagcccagcgagggcagcgcacccggcagccctgccggcagccccacctccacagaggagggaaccagcaccgagcccagcgaaggcagcgccccaggcaccagcaccgagcctagtgagcaggagattaaacggatcaacaagatcagaagaagacttgtgaaagacagcaacaccaagaaggccggcaagacaggccccatgaaaaccctgctggttagagtgatgacacccgatctgagagagcggctggaaaacctgagaaagaagcctgaaaatatcccccagcccatcagcaatacatctagagccaacctgaataagctgctgaccgattacaccgaaatgaagaaggcgatcctgcatgtgtactgggaagagttccagaaggaccctgtgggcctgatgagccgggtggcccagcctgccagcaagaagatcgatcagaacaagctgaaacctgagatggacgagaagggcaacctgaccaccgccggctttgcctgctctcagtgtggccagcccctgttcgtgtacaagctggagcaggtgtctgagaagggcaaggcttacaccaactacttcggacggtgcaatgtggccgagcacgaaaagctgatcctgctggcccagctgaagcccgagaaggatagcgacgaagccgtgacatatagcctgggaaagtttgggcagagggccctggatttctacagcattcatgtgaccaaggagtccacccaccccgtgaagcccctggcccagatcgccggaaacagatacgcctccggacctgtgggaaaggccctgagcgacgcatgtatgggcacaatcgcctccttcctgtctaagtaccaggacatcatcatcgaacaccagaaggtggtgaagggcaaccagaagagactggagagcctgcgggagctggccggcaaggaaaacctggaataccctagcgtgaccctgccacctcagcctcacaccaaggagggcgttgatgcctacaacgaagtgatcgcccgggtgcgaatgtgggtgaacctgaacctgtggcagaagctgaagctaagcagagatgatgccaagcctctgctgagactgaagggattcccttcctttcctctggtcgagagacaggccaacgaagtggactggtgggacatggtgtgtaacgtgaagaagctgatcaacgagaaaaaggaggatggcaaggtgttttggcagaatctggctggctacaagagacaggaagccctgagaccatacctgagcagcgaggaagatcggaagaagggaaagaaattcgctcggtaccagctgggcgacctgctgctgcacctggaaaagaagcacggcgaggactggggaaaggtgtacgacgaggcctgggagcggattgacaagaaagtggaaggcctgagcaagcacatcaagctggaagaggaacggagaagcgaggacgcccagagcaaggccgccctgaccgactggctgcgggctaaggccagcttcgtgatcgagggcctgaaggaggccgacaaggacgagttctgcagatgcgagctgaagctgcagaagtggtacggggacctgcggggaaagcccttcgccatcgaagccgagaacagcatcctggacatcagcggcttcagcaagcagtacaactgtgccttcatctggcagaaggacggcgtgaagaagctgaacctgtacctgatcatcaactacttcaagggcggcaagctgcggttcaagaagatcaaacctgaagccttcgaagccaacagattctacaccgtgatcaacaaaaagagcggcgagatcgtgcccatggaggtgaacttcaacttcgacgaccccaacctgatcatcctgcctctggcctttggcaagagacagggcagagaattcatctggaacgacctgctgtccctggaaaccggcagcctgaagctggccaacggaagagtgatcgagaagacactgtacaacagaagaacccggcaggatgagcctgccctgttcgtggccctgaccttcgagcggcgggaggtcctggactcctccaatatcaaaccaatgaacctgatcggcgtggcaagaggcgaaaacatccccgccgtgatcgccctgaccgaccccgagggctgcccactgagccggtttaaggatagcctgggaaacccaacccacatcctgagaatcggcgagagctataaggagaagcagcggaccatccaggccaagaaggaggtggagcagcggagagccggcggctacagccggaagtacgccagcaaagccaagaatctggcagacgatatggtgagaaacaccgctagagatctgctgtactacgccgtgacccaggatgccatgctgatcttcgccaacctgagccggggcttcggccggcagggcaagcggaccttcatggccgagagacagtacacacggatggaggactggctgaccgccaagctggcctacgagggcctgagcaagacctacctgtccaagacactggcccagtacacctccaagacatgcagcaactgtgggtttaccatcaccagcgccgactacgacagggtgctggagaagctgaagaagacagcaacaggctggatgaccacaattaacggcaaggagctgaaggtggagggccagattacctactacaacagatacaagagacagaacgtagtcaaggacctgtccgtcgagctggatagactgagcgaagaatctgtgaacaacgacatctcctcctggacaaagggcagaagcggagaagctctgagcctcctgaagaaaagattctcccatagacccgtgcaggagaagttcgtgtgcctgaactgcggcttcgagacacacgcagccgagcaagccgccctgaacatcgccagatcctggctgttcctgcggagccaggagtacaagaaataccagacaaacaagacaaccggcaacaccgataagagagccttcgtcgagacctggcagtccttttaccggaagaagcttaaggaggtgtggaaacctgccgtgcggtctggcggatctggcggaggctccaccagccccaagaaaaagagaaaagtctaagctgccttctgcggggcttgccttctggccatgcccttcttctctcccttgcacctgtacctcttggtctttgaataaagcctgagtaggaaggctagcaaaaaaaaaaaaaaaaaaaaaaaaaaaaaaaaaaaaaaaaaaaaaaaaaaaaaaaaaaaaaaaaaaaaaaaaaaaaaaaagcccagccggctccccaacctctaccgaggagggcacctctgagtccgccacccccgagagcggccctggcacctccaccgagcccagcgagggcagcgcacccggcagccctgccggcagccccacctccacagaggagggaaccagcaccgagcccagcgaaggcagcgccccaggcaccagcaccgagcctagtgagcaggagattaaacggatcaacaagatcagaagaagacttgtgaaagacagcaacaccaagaaggccggcaagacaggccccatgaaaaccctgctggttagagtgatgacacccgatctgagagagcggctggaaaacctgagaaagaagcctgaaaatatcccccagcccatcagcaatacatctagagccaacctgaataagctgctgaccgattacaccgaaatgaagaaggcgatcctgcatgtgtactgggaagagttccagaaggaccctgtgggcctgatgagccgggtggcccagcctgccagcaagaagatcgatcagaacaagctgaaacctgagatggacgagaagggcaacctgaccaccgccggctttgcctgctctcagtgtggccagcccctgttcgtgtacaagctggagcaggtgtctgagaagggcaaggcttacaccaactacttcggacggtgcaatgtggccgagcacgaaaagctgatcctgctggcccagctgaagcccgagaaggatagcgacgaagccgtgacatatagcctgggaaagtttgggcagagggccctggatttctacagcattcatgtgaccaaggagtccacccaccccgtgaagcccctggcccagatcgccggaaacagatacgcctccggacctgtgggaaaggccctgagcgacgcatgtatgggcacaatcgcctccttcctgtctaagtaccaggacatcatcatcgaacaccagaaggtggtgaagggcaaccagaagagactggagagcctgcgggagctggccggcaaggaaaacctggaataccctagcgtgaccctgccacctcagcctcacaccaaggagggcgttgatgcctacaacgaagtgatcgcccgggtgcgaatgtgggtgaacctgaacctgtggcagaagctgaagctaagcagagatgatgccaagcctctgctgagactgaagggattcccttcctttcctctggtcgagagacaggccaacgaagtggactggtgggacatggtgtgtaacgtgaagaagctgatcaacgagaaaaaggaggatggcaaggtgttttggcagaatctggctggctacaagagacaggaagccctgagaccatacctgagcagcgaggaagatcggaagaagggaaagaaattcgctcggtaccagctgggcgacctgctgctgcacctggaaaagaagcacggcgaggactggggaaaggtgtacgacgaggcctgggagcggattgacaagaaagtggaaggcctgagcaagcacatcaagctggaagaggaacggagaagcgaggacgcccagagcaaggccgccctgaccgactggctgcgggctaaggccagcttcgtgatcgagggcctgaaggaggccgacaaggacgagttctgcagatgcgagctgaagctgcagaagtggtacggggacctgcggggaaagcccttcgccatcgaagccgagaacagcatcctggacatcagcggcttcagcaagcagtacaactgtgccttcatctggcagaaggacggcgtgaagaagctgaacctgtacctgatcatcaactacttcaagggcggcaagctgcggttcaagaagatcaaacctgaagccttcgaagccaacagattctacaccgtgatcaacaaaaagagcggcgagatcgtgcccatggaggtgaacttcaacttcgacgaccccaacctgatcatcctgcctctggcctttggcaagagacagggcagagaattcatctggaacgacctgctgtccctggaaaccggcagcctgaagctggccaacggaagagtgatcgagaagacactgtacaacagaagaacccggcaggatgagcctgccctgttcgtggccctgaccttcgagcggcgggaggtcctggactcctccaatatcaaaccaatgaacctgatcggcgtggcaagaggcgaaaacatccccgccgtgatcgccctgaccgaccccgagggctgcccactgagccggtttaaggatagcctgggaaacccaacccacatcctgagaatcggcgagagctataaggagaagcagcggaccatccaggccaagaaggaggtggagcagcggagagccggcggctacagccggaagtacgccagcaaagccaagaatctggcagacgatatggtgagaaacaccgctagagatctgctgtactacgccgtgacccaggatgccatgctgatcttcgccaacctgagccggggcttcggccggcagggcaagcggaccttcatggccgagagacagtacacacggatggaggactggctgaccgccaagctggcctacgagggcctgagcaagacctacctgtccaagacactggcccagtacacctccaagacatgcagcaactgtgggtttaccatcaccagcgccgactacgacagggtgctggagaagctgaagaagacagcaacaggctggatgaccacaattaacggcaaggagctgaaggtggagggccagattacctactacaacagatacaagagacagaacgtagtcaaggacctgtccgtcgagctggatagactgagcgaagaatctgtgaacaacgacatctcctcctggacaaagggcagaagcggagaagctctgagcctcctgaagaaaagattctcccatagacccgtgcaggagaagttcgtgtgcctgaactgcggcttcgagacacacgcagccgagcaagccgccctgaacatcgccagatcctggctgttcctgcggagccaggagtacaagaaataccagacaaacaagacaaccggcaacaccgataagagagccttcgtcgagacctggcagtccttttaccggaagaagcttaaggaggtgtggaaacctgccgtgcggtctggcggatctggcggaggctccaccagccccaagaaaaagagaaaagtctaagctgccttctgcggggcttgccttctggccatgcccttcttctctcccttgcacctgtacctcttggtctttgaataaagcctgagtaggaaggctagcaaaaaaaaaaaaaaaaaaaaaaaaaaaaaaaaaaaaaaaaaaaaaaaaaaaaaaaaaaaaaaaaaaaaaaaaaaaaaaaa

SEQ ID NO: 9967 - RNA, 8787 nt, synthetic construct
  source 1..8787: mol_type = other RNA
aggaaataagagagaaaagaagagtaagaagaaatataagagccaccatggcccctaagaagaagcgtaaagtgagccggatgaaccacgaccaggagttcgacccccctaaggtgtaccctcccgtccccgccgagaagagaaagcccatccgggtcctgagcctgttcgatggcatcgccaccggtctgctggtgctgaaggacctgggcatccaggtggataggtacattgcctccgaggtgtgcgaggactccatcaccgtgggaatggtgcgtcatcagggcaagatcatgtacgtgggcgacgtgcggagcgtgacacagaagcatatccaggagtggggccctttcgacctggtgatcggcggcagcccttgcaatgacctgagcatcgtgaacccagcccggaagggcctgtacgagggaaccggcagactgttcttcgagttttacagactgctgcacgacgcccggcctaaggaaggcgacgaccggcccttcttttggctgttcgagaatgtggtggccatgggagtcagcgacaagcgggatattagccggttcctggagagcaaccccgtgatgatcgatgccaaggaagtgagcgccgcccaccgggccagatacttctggggcaatctgcctggcatgaacagacccctggccagcaccgtgaacgacaagctggagctgcaggagtgcctggagcacggccggatcgccaagttcagcaaggtgagaaccatcaccacccgaagcaacagcatcaaacaaggcaaggaccagcactttcctgtgttcatgaacgagaaggaggacatcctgtggtgtaccgagatggagagagtgttcgggttcccagtccactacacagatgtcagcaacatgtctagactggccagacagagactgctgggaagaagctggtccgtccctgtgatcagacacctgttcgcccctctgaaggagtacttcgcctgcgtgagcagcggcaacagcaacgccaacagccggggccccagcttctctagcggcctggtgccactgtccctgagagggagccacatgggccccatggagatctacaaaaccgtgagcgcctggaagcggcagcctgtgcgcgtgctgagcctgtttcggaatatcgataaagtcctgaaaagcctgggattcctggagagcggctctggctccggcggtggcaccctgaagtacgtggaggatgtgacaaacgtggtcagacgggatgtggagaagtggggccccttcgatctggtgtacggcagcacccaacccctgggcagctcttgtgaccggtgccctggctggtacatgtttcagttccaccggatcctgcagtacgccctgccgagacaggagtcccagcggccattcttttggattttcatggacaacttgctgctgaccgaggatgaccaggaaactaccactcggttcctgcagaccgaagccgtgaccctgcaggacgtgagaggccgggactaccagaacgccatgcgggtgtggtccaacatccctggactgaaaagcaagcacgcacctctgacccctaaagaagaggagtacctgcaggcccaggtgcggagcagaagcaagctggacgcccctaaggtggatctgctggtgaagaattgcctcctgcccctgagagagtacttcaagtatttcagccagaatagtctgcccctgggaggcagcggcggcggcctgtggctgcccctgaccttcgaggacatcgccatctacttcagcgagcaggagtggcagaacctggaggcctggcagaaggacctgtacaggaacgtgatgagggccaactacgagatcctggtgagcctggacgacggcctgcccaagcccgagctgatcagccacatcgagcagggcaaggagctgttctggaacctgggcgagacccagaagagcggcaacatcatctgcagcagcgccggcggcccaagcagcggcgcccctcctcccagcggcggcaggcggcccaagcagcggcgcccctcctcccagcggcggcagcccagccggctccccaacctctaccgaggagggcacctctgagtccgccacccccgagagcggccctggcacctccaccgagcccagcgagggcagcgcacccggcagccctgccggcagccccacctccacagaggagggaaccagcaccgagcccagcgaaggcagcgccccaggcaccagcaccgagcctagtgagcaggagattaaacggatcaacaagatcagaagaagacttgtgaaagacagcaacaccaagaaggccggcaagacaggccccatgaaaaccctgctggttagagtgatgacacccgatctgagagagcggctggaaaacctgagaaagaagcctgaaaatatcccccagcccatcagcaatacatctagagccaacctgaataagctgctgaccgattacaccgaaatgaagaaggcgatcctgcatgtgtactgggaagagttccagaaggaccctgtgggcctgatgagccgggtggcccagcctgccagcaagaagatcgatcagaacaagctgaaacctgagatggacgagaagggcaacctgaccaccgccggctttgcctgctctcagtgtggccagcccctgttcgtgtacaagctggagcaggtgtctgagaagggcaaggcttacaccaactacttcggacggtgcaatgtggccgagcacgaaaagctgatcctgctggcccagctgaagcccgagaaggatagcgacgaagccgtgacatatagcctgggaaagtttgggcagagggccctggatttctacagcattcatgtgaccaaggagtccacccaccccgtgaagcccctggcccagatcgccggaaacagatacgcctccggacctgtgggaaaggccctgagcgacgcatgtatgggcacaatcgcctccttcctgtctaagtaccaggacatcatcatcgaacaccagaaggtggtgaagggcaaccagaagagactggagagcctgcgggagctggccggcaaggaaaacctggaataccctagcgtgaccctgccacctcagcctcacaccaaggagggcgttgatgcctacaacgaagtgatcgcccgggtgcgaatgtgggtgaacctgaacctgtggcagaagctgaagctaagcagagatgatgccaagcctctgctgagactgaagggattcccttcctttcctctggtcgagagacaggccaacgaagtggactggtgggacatggtgtgtaacgtgaagaagctgatcaacgagaaaaaggaggatggcaaggtgttttggcagaatctggctggctacaagagacaggaagccctgagaccatacctgagcagcgaggaagatcggaagaagggaaagaaattcgctcggtaccagctgggcgacctgctgctgcacctggaaaagaagcacggcgaggactggggaaaggtgtacgacgaggcctgggagcggattgacaagaaagtggaaggcctgagcaagcacatcaagctggaagaggaacggagaagcgaggacgcccagagcaaggccgccctgaccgactggctgcgggctaaggccagcttcgtgatcgagggcctgaaggaggccgacaaggacgagttctgcagatgcgagctgaagctgcagaagtggtacggggacctgcggggaaagcccttcgccatcgaagccgagaacagcatcctggacatcagcggcttcagcaagcagtacaactgtgccttcatctggcagaaggacggcgtgaagaagctgaacctgtacctgatcatcaactacttcaagggcggcaagctgcggttcaagaagatcaaacctgaagccttcgaagccaacagattctacaccgtgatcaacaaaaagagcggcgagatcgtgcccatggaggtgaacttcaacttcgacgaccccaacctgatcatcctgcctctggcctttggcaagagacagggcagagaattcatctggaacgacctgctgtccctggaaaccggcagcctgaagctggccaacggaagagtgatcgagaagacactgtacaacagaagaacccggcaggatgagcctgccctgttcgtggccctgaccttcgagcggcgggaggtcctggactcctccaatatcaaaccaatgaacctgatcggcgtggcaagaggcgaaaacatccccgccgtgatcgccctgaccgaccccgagggctgcccactgagccggtttaaggatagcctgggaaacccaacccacatcctgagaatcggcgagagctataaggagaagcagcggaccatccaggccaagaaggaggtggagcagcggagagccggcggctacagccggaagtacgccagcaaagccaagaatctggcagacgatatggtgagaaacaccgctagagatctgctgtactacgccgtgacccaggatgccatgctgatcttcgccaacctgagccggggcttcggccggcagggcaagcggaccttcatggccgagagacagtacacacggatggaggactggctgaccgccaagctggcctacgagggcctgagcaagacctacctgtccaagacactggcccagtacacctccaagacatgcagcaactgtgggtttaccatcaccagcgccgactacgacagggtgctggagaagctgaagaagacagcaacaggctggatgaccacaattaacggcaaggagctgaaggtggagggccagattacctactacaacagatacaagagacagaacgtagtcaaggacctgtccgtcgagctggatagactgagcgaagaatctgtgaacaacgacatctcctcctggacaaagggcagaagcggagaagctctgagcctcctgaagaaaagattctcccatagacccgtgcaggagaagttcgtgtgcctgaactgcggcttcgagacacacgcagccgagcaagccgccctgaacatcgccagatcctggctgttcctgcggagccaggagtacaagaaataccagacaaacaagacaaccggcaacaccgataagagagccttcgtcgagacctggcagtccttttaccggaagaagcttaaggaggtgtggaaacctgccgtgcggtctggcggatctggcggaggctccaccagccccaagaaaaagagaaaagtctaagctgccttctgcggggcttgccttctggccatgcccttcttctctcccttgcacctgtacctcttggtctttgaataaagcctgagtaggaaggctagcaaaaaaaaaaaaaaaaaaaaaaaaaaaaaaaaaaaaaaaaaaaaaaaaaaaaaaaaaaaaaaaaaaaaaaaaaaaaaaaagcccagccggctccccaacctctaccgaggagggcacctctgagtccgccacccccgagagcggccctggcacctccaccgagcccagcgagggcagcgcacccggcagccctgccggcagccccacctccacagaggagggaaccagcaccgagcccagcgaaggcagcgccccaggcaccagcaccgagcctagtgagcaggagattaaacggatcaacaagatcagaagaagacttgtgaaagacagcaacaccaagaaggccggcaagacaggccccatgaaaaccctgctggttagagtgatgacacccgatctgagagagcggctggaaaacctgagaaagaagcctgaaaatatcccccagcccatcagcaatacatctagagccaacctgaataagctgctgaccgattacaccgaaatgaagaaggcgatcctgcatgtgtactgggaagagttccagaaggaccctgtgggcctgatgagccgggtggcccagcctgccagcaagaagatcgatcagaacaagctgaaacctgagatggacgagaagggcaacctgaccaccgccggctttgcctgctctcagtgtggccagcccctgttcgtgtacaagctggagcaggtgtctgagaagggcaaggcttacaccaactacttcggacggtgcaatgtggccgagcacgaaaagctgatcctgctggcccagctgaagcccgagaaggatagcgacgaagccgtgacatatagcctgggaaagtttgggcagagggccctggatttctacagcattcatgtgaccaaggagtccacccaccccgtgaagcccctggcccagatcgccggaaacagatacgcctccggacctgtgggaaaggccctgagcgacgcatgtatgggcacaatcgcctccttcctgtctaagtaccaggacatcatcatcgaacaccagaaggtggtgaagggcaaccagaagagactggagagcctgcgggagctggccggcaaggaaaacctggaataccctagcgtgaccctgccacctcagcctcacaccaaggagggcgttgatgcctacaacgaagtgatcgcccgggtgcgaatgtgggtgaacctgaacctgtggcagaagctgaagctaagcagagatgatgccaagcctctgctgagactgaagggattcccttcctttcctctggtcgagagacaggccaacgaagtggactggtgggacatggtgtgtaacgtgaagaagctgatcaacgagaaaaaggaggatggcaaggtgttttggcagaatctggctggctacaagagacaggaagccctgagaccatacctgagcagcgaggaagatcggaagaagggaaagaaattcgctcggtaccagctgggcgacctgctgctgcacctggaaaagaagcacggcgaggactggggaaaggtgtacgacgaggcctgggagcggattgacaagaaagtggaaggcctgagcaagcacatcaagctggaagaggaacggagaagcgaggacgcccagagcaaggccgccctgaccgactggctgcgggctaaggccagcttcgtgatcgagggcctgaaggaggccgacaaggacgagttctgcagatgcgagctgaagctgcagaagtggtacggggacctgcggggaaagcccttcgccatcgaagccgagaacagcatcctggacatcagcggcttcagcaagcagtacaactgtgccttcatctggcagaaggacggcgtgaagaagctgaacctgtacctgatcatcaactacttcaagggcggcaagctgcggttcaagaagatcaaacctgaagccttcgaagccaacagattctacaccgtgatcaacaaaaagagcggcgagatcgtgcccatggaggtgaacttcaacttcgacgaccccaacctgatcatcctgcctctggcctttggcaagagacagggcagagaattcatctggaacgacctgctgtccctggaaaccggcagcctgaagctggccaacggaagagtgatcgagaagacactgtacaacagaagaacccggcaggatgagcctgccctgttcgtggccctgaccttcgagcggcgggaggtcctggactcctccaatatcaaaccaatgaacctgatcggcgtggcaagaggcgaaaacatccccgccgtgatcgccctgaccgaccccgagggctgcccactgagccggtttaaggatagcctgggaaacccaacccacatcctgagaatcggcgagagctataaggagaagcagcggaccatccaggccaagaaggaggtggagcagcggagagccggcggctacagccggaagtacgccagcaaagccaagaatctggcagacgatatggtgagaaacaccgctagagatctgctgtactacgccgtgacccaggatgccatgctgatcttcgccaacctgagccggggcttcggccggcagggcaagcggaccttcatggccgagagacagtacacacggatggaggactggctgaccgccaagctggcctacgagggcctgagcaagacctacctgtccaagacactggcccagtacacctccaagacatgcagcaactgtgggtttaccatcaccagcgccgactacgacagggtgctggagaagctgaagaagacagcaacaggctggatgaccacaattaacggcaaggagctgaaggtggagggccagattacctactacaacagatacaagagacagaacgtagtcaaggacctgtccgtcgagctggatagactgagcgaagaatctgtgaacaacgacatctcctcctggacaaagggcagaagcggagaagctctgagcctcctgaagaaaagattctcccatagacccgtgcaggagaagttcgtgtgcctgaactgcggcttcgagacacacgcagccgagcaagccgccctgaacatcgccagatcctggctgttcctgcggagccaggagtacaagaaataccagacaaacaagacaaccggcaacaccgataagagagccttcgtcgagacctggcagtccttttaccggaagaagcttaaggaggtgtggaaacctgccgtgcggtctggcggatctggcggaggctccaccagccccaagaaaaagagaaaagtctaagctgccttctgcggggcttgccttctggccatgcccttcttctctcccttgcacctgtacctcttggtctttgaataaagcctgagtaggaaggctagcaaaaaaaaaaaaaaaaaaaaaaaaaaaaaaaaaaaaaaaaaaaaaaaaaaaaaaaaaaaaaaaaaaaaaaaaaaaaaaaa

SEQ ID NO: 9968 - RNA, 8787 nt, synthetic construct
  source 1..8787: mol_type = other RNA
aggaaataagagagaaaagaagagtaagaagaaatataagagccaccatggcccctaagaagaagcgtaaagtgagccggatgaaccacgaccaggagttcgacccccctaaggtgtaccctcccgtccccgccgagaagagaaagcccatccgggtcctgagcctgttcgatggcatcgccaccggtctgctggtgctgaaggacctgggcatccaggtggataggtacattgcctccgaggtgtgcgaggactccatcaccgtgggaatggtgcgtcatcagggcaagatcatgtacgtgggcgacgtgcggagcgtgacacagaagcatatccaggagtggggccctttcgacctggtgatcggcggcagcccttgcaatgacctgagcatcgtgaacccagcccggaagggcctgtacgagggaaccggcagactgttcttcgagttttacagactgctgcacgacgcccggcctaaggaaggcgacgaccggcccttcttttggctgttcgagaatgtggtggccatgggagtcagcgacaagcgggatattagccggttcctggagagcaaccccgtgatgatcgatgccaaggaagtgagcgccgcccaccgggccagatacttctggggcaatctgcctggcatgaacagacccctggccagcaccgtgaacgacaagctggagctgcaggagtgcctggagcacggccggatcgccaagttcagcaaggtgagaaccatcaccacccgaagcaacagcatcaaacaaggcaaggaccagcactttcctgtgttcatgaacgagaaggaggacatcctgtggtgtaccgagatggagagagtgttcgggttcccagtccactacacagatgtcagcaacatgtctagactggccagacagagactgctgggaagaagctggtccgtccctgtgatcagacacctgttcgcccctctgaaggagtacttcgcctgcgtgagcagcggcaacagcaacgccaacagccggggccccagcttctctagcggcctggtgccactgtccctgagagggagccacatgggccccatggagatctacaaaaccgtgagcgcctggaagcggcagcctgtgcgcgtgctgagcctgtttcggaatatcgataaagtcctgaaaagcctgggattcctggagagcggctctggctccggcggtggcaccctgaagtacgtggaggatgtgacaaacgtggtcagacgggatgtggagaagtggggccccttcgatctggtgtacggcagcacccaacccctgggcagctcttgtgaccggtgccctggctggtacatgtttcagttccaccggatcctgcagtacgccctgccgagacaggagtcccagcggccattcttttggattttcatggacaacttgctgctgaccgaggatgaccaggaaactaccactcggttcctgcagaccgaagccgtgaccctgcaggacgtgagaggccgggactaccagaacgccatgcgggtgtggtccaacatccctggactgaaaagcaagcacgcacctctgacccctaaagaagaggagtacctgcaggcccaggtgcggagcagaagcaagctggacgcccctaaggtggatctgctggtgaagaattgcctcctgcccctgagagagtacttcaagtatttcagccagaatagtctgcccctgggaggcagcggcggcggcatgaacgtggaggtggtgaaggtgatgccccaggacctggtgaccttcaaggacgtggccatcgacttcagccaggaggagtggcagtggatgaaccccgcccagaagtgcctgtacaggagcatgatgctggagaactaccagagcctggtgagcctgggcctgtgcatcagcaagccctacgtgatcagcctgctggagcagggcagggagccctgggagatgaccagcgagatgaccaggggcggcccaagcagcggcgcccctcctcccagcggcggcaggcggcccaagcagcggcgcccctcctcccagcggcggcagcccagccggctccccaacctctaccgaggagggcacctctgagtccgccacccccgagagcggccctggcacctccaccgagcccagcgagggcagcgcacccggcagccctgccggcagccccacctccacagaggagggaaccagcaccgagcccagcgaaggcagcgccccaggcaccagcaccgagcctagtgagcaggagattaaacggatcaacaagatcagaagaagacttgtgaaagacagcaacaccaagaaggccggcaagacaggccccatgaaaaccctgctggttagagtgatgacacccgatctgagagagcggctggaaaacctgagaaagaagcctgaaaatatcccccagcccatcagcaatacatctagagccaacctgaataagctgctgaccgattacaccgaaatgaagaaggcgatcctgcatgtgtactgggaagagttccagaaggaccctgtgggcctgatgagccgggtggcccagcctgccagcaagaagatcgatcagaacaagctgaaacctgagatggacgagaagggcaacctgaccaccgccggctttgcctgctctcagtgtggccagcccctgttcgtgtacaagctggagcaggtgtctgagaagggcaaggcttacaccaactacttcggacggtgcaatgtggccgagcacgaaaagctgatcctgctggcccagctgaagcccgagaaggatagcgacgaagccgtgacatatagcctgggaaagtttgggcagagggccctggatttctacagcattcatgtgaccaaggagtccacccaccccgtgaagcccctggcccagatcgccggaaacagatacgcctccggacctgtgggaaaggccctgagcgacgcatgtatgggcacaatcgcctccttcctgtctaagtaccaggacatcatcatcgaacaccagaaggtggtgaagggcaaccagaagagactggagagcctgcgggagctggccggcaaggaaaacctggaataccctagcgtgaccctgccacctcagcctcacaccaaggagggcgttgatgcctacaacgaagtgatcgcccgggtgcgaatgtgggtgaacctgaacctgtggcagaagctgaagctaagcagagatgatgccaagcctctgctgagactgaagggattcccttcctttcctctggtcgagagacaggccaacgaagtggactggtgggacatggtgtgtaacgtgaagaagctgatcaacgagaaaaaggaggatggcaaggtgttttggcagaatctggctggctacaagagacaggaagccctgagaccatacctgagcagcgaggaagatcggaagaagggaaagaaattcgctcggtaccagctgggcgacctgctgctgcacctggaaaagaagcacggcgaggactggggaaaggtgtacgacgaggcctgggagcggattgacaagaaagtggaaggcctgagcaagcacatcaagctggaagaggaacggagaagcgaggacgcccagagcaaggccgccctgaccgactggctgcgggctaaggccagcttcgtgatcgagggcctgaaggaggccgacaaggacgagttctgcagatgcgagctgaagctgcagaagtggtacggggacctgcggggaaagcccttcgccatcgaagccgagaacagcatcctggacatcagcggcttcagcaagcagtacaactgtgccttcatctggcagaaggacggcgtgaagaagctgaacctgtacctgatcatcaactacttcaagggcggcaagctgcggttcaagaagatcaaacctgaagccttcgaagccaacagattctacaccgtgatcaacaaaaagagcggcgagatcgtgcccatggaggtgaacttcaacttcgacgaccccaacctgatcatcctgcctctggcctttggcaagagacagggcagagaattcatctggaacgacctgctgtccctggaaaccggcagcctgaagctggccaacggaagagtgatcgagaagacactgtacaacagaagaacccggcaggatgagcctgccctgttcgtggccctgaccttcgagcggcgggaggtcctggactcctccaatatcaaaccaatgaacctgatcggcgtggcaagaggcgaaaacatccccgccgtgatcgccctgaccgaccccgagggctgcccactgagccggtttaaggatagcctgggaaacccaacccacatcctgagaatcggcgagagctataaggagaagcagcggaccatccaggccaagaaggaggtggagcagcggagagccggcggctacagccggaagtacgccagcaaagccaagaatctggcagacgatatggtgagaaacaccgctagagatctgctgtactacgccgtgacccaggatgccatgctgatcttcgccaacctgagccggggcttcggccggcagggcaagcggaccttcatggccgagagacagtacacacggatggaggactggctgaccgccaagctggcctacgagggcctgagcaagacctacctgtccaagacactggcccagtacacctccaagacatgcagcaactgtgggtttaccatcaccagcgccgactacgacagggtgctggagaagctgaagaagacagcaacaggctggatgaccacaattaacggcaaggagctgaaggtggagggccagattacctactacaacagatacaagagacagaacgtagtcaaggacctgtccgtcgagctggatagactgagcgaagaatctgtgaacaacgacatctcctcctggacaaagggcagaagcggagaagctctgagcctcctgaagaaaagattctcccatagacccgtgcaggagaagttcgtgtgcctgaactgcggcttcgagacacacgcagccgagcaagccgccctgaacatcgccagatcctggctgttcctgcggagccaggagtacaagaaataccagacaaacaagacaaccggcaacaccgataagagagccttcgtcgagacctggcagtccttttaccggaagaagcttaaggaggtgtggaaacctgccgtgcggtctggcggatctggcggaggctccaccagccccaagaaaaagagaaaagtctaagctgccttctgcggggcttgccttctggccatgcccttcttctctcccttgcacctgtacctcttggtctttgaataaagcctgagtaggaaggctagcaaaaaaaaaaaaaaaaaaaaaaaaaaaaaaaaaaaaaaaaaaaaaaaaaaaaaaaaaaaaaaaaaaaaaaaaaaaaaaaagcccagccggctccccaacctctaccgaggagggcacctctgagtccgccacccccgagagcggccctggcacctccaccgagcccagcgagggcagcgcacccggcagccctgccggcagccccacctccacagaggagggaaccagcaccgagcccagcgaaggcagcgccccaggcaccagcaccgagcctagtgagcaggagattaaacggatcaacaagatcagaagaagacttgtgaaagacagcaacaccaagaaggccggcaagacaggccccatgaaaaccctgctggttagagtgatgacacccgatctgagagagcggctggaaaacctgagaaagaagcctgaaaatatcccccagcccatcagcaatacatctagagccaacctgaataagctgctgaccgattacaccgaaatgaagaaggcgatcctgcatgtgtactgggaagagttccagaaggaccctgtgggcctgatgagccgggtggcccagcctgccagcaagaagatcgatcagaacaagctgaaacctgagatggacgagaagggcaacctgaccaccgccggctttgcctgctctcagtgtggccagcccctgttcgtgtacaagctggagcaggtgtctgagaagggcaaggcttacaccaactacttcggacggtgcaatgtggccgagcacgaaaagctgatcctgctggcccagctgaagcccgagaaggatagcgacgaagccgtgacatatagcctgggaaagtttgggcagagggccctggatttctacagcattcatgtgaccaaggagtccacccaccccgtgaagcccctggcccagatcgccggaaacagatacgcctccggacctgtgggaaaggccctgagcgacgcatgtatgggcacaatcgcctccttcctgtctaagtaccaggacatcatcatcgaacaccagaaggtggtgaagggcaaccagaagagactggagagcctgcgggagctggccggcaaggaaaacctggaataccctagcgtgaccctgccacctcagcctcacaccaaggagggcgttgatgcctacaacgaagtgatcgcccgggtgcgaatgtgggtgaacctgaacctgtggcagaagctgaagctaagcagagatgatgccaagcctctgctgagactgaagggattcccttcctttcctctggtcgagagacaggccaacgaagtggactggtgggacatggtgtgtaacgtgaagaagctgatcaacgagaaaaaggaggatggcaaggtgttttggcagaatctggctggctacaagagacaggaagccctgagaccatacctgagcagcgaggaagatcggaagaagggaaagaaattcgctcggtaccagctgggcgacctgctgctgcacctggaaaagaagcacggcgaggactggggaaaggtgtacgacgaggcctgggagcggattgacaagaaagtggaaggcctgagcaagcacatcaagctggaagaggaacggagaagcgaggacgcccagagcaaggccgccctgaccgactggctgcgggctaaggccagcttcgtgatcgagggcctgaaggaggccgacaaggacgagttctgcagatgcgagctgaagctgcagaagtggtacggggacctgcggggaaagcccttcgccatcgaagccgagaacagcatcctggacatcagcggcttcagcaagcagtacaactgtgccttcatctggcagaaggacggcgtgaagaagctgaacctgtacctgatcatcaactacttcaagggcggcaagctgcggttcaagaagatcaaacctgaagccttcgaagccaacagattctacaccgtgatcaacaaaaagagcggcgagatcgtgcccatggaggtgaacttcaacttcgacgaccccaacctgatcatcctgcctctggcctttggcaagagacagggcagagaattcatctggaacgacctgctgtccctggaaaccggcagcctgaagctggccaacggaagagtgatcgagaagacactgtacaacagaagaacccggcaggatgagcctgccctgttcgtggccctgaccttcgagcggcgggaggtcctggactcctccaatatcaaaccaatgaacctgatcggcgtggcaagaggcgaaaacatccccgccgtgatcgccctgaccgaccccgagggctgcccactgagccggtttaaggatagcctgggaaacccaacccacatcctgagaatcggcgagagctataaggagaagcagcggaccatccaggccaagaaggaggtggagcagcggagagccggcggctacagccggaagtacgccagcaaagccaagaatctggcagacgatatggtgagaaacaccgctagagatctgctgtactacgccgtgacccaggatgccatgctgatcttcgccaacctgagccggggcttcggccggcagggcaagcggaccttcatggccgagagacagtacacacggatggaggactggctgaccgccaagctggcctacgagggcctgagcaagacctacctgtccaagacactggcccagtacacctccaagacatgcagcaactgtgggtttaccatcaccagcgccgactacgacagggtgctggagaagctgaagaagacagcaacaggctggatgaccacaattaacggcaaggagctgaaggtggagggccagattacctactacaacagatacaagagacagaacgtagtcaaggacctgtccgtcgagctggatagactgagcgaagaatctgtgaacaacgacatctcctcctggacaaagggcagaagcggagaagctctgagcctcctgaagaaaagattctcccatagacccgtgcaggagaagttcgtgtgcctgaactgcggcttcgagacacacgcagccgagcaagccgccctgaacatcgccagatcctggctgttcctgcggagccaggagtacaagaaataccagacaaacaagacaaccggcaacaccgataagagagccttcgtcgagacctggcagtccttttaccggaagaagcttaaggaggtgtggaaacctgccgtgcggtctggcggatctggcggaggctccaccagccccaagaaaaagagaaaagtctaagctgccttctgcggggcttgccttctggccatgcccttcttctctcccttgcacctgtacctcttggtctttgaataaagcctgagtaggaaggctagcaaaaaaaaaaaaaaaaaaaaaaaaaaaaaaaaaaaaaaaaaaaaaaaaaaaaaaaaaaaaaaaaaaaaaaaaaaaaaaaa

SEQ ID NO: 9969 - RNA, 8787 nt, synthetic construct
  source 1..8787: mol_type = other RNA
aggaaataagagagaaaagaagagtaagaagaaatataagagccaccatggcccctaagaagaagcgtaaagtgagccggatgaaccacgaccaggagttcgacccccctaaggtgtaccctcccgtccccgccgagaagagaaagcccatccgggtcctgagcctgttcgatggcatcgccaccggtctgctggtgctgaaggacctgggcatccaggtggataggtacattgcctccgaggtgtgcgaggactccatcaccgtgggaatggtgcgtcatcagggcaagatcatgtacgtgggcgacgtgcggagcgtgacacagaagcatatccaggagtggggccctttcgacctggtgatcggcggcagcccttgcaatgacctgagcatcgtgaacccagcccggaagggcctgtacgagggaaccggcagactgttcttcgagttttacagactgctgcacgacgcccggcctaaggaaggcgacgaccggcccttcttttggctgttcgagaatgtggtggccatgggagtcagcgacaagcgggatattagccggttcctggagagcaaccccgtgatgatcgatgccaaggaagtgagcgccgcccaccgggccagatacttctggggcaatctgcctggcatgaacagacccctggccagcaccgtgaacgacaagctggagctgcaggagtgcctggagcacggccggatcgccaagttcagcaaggtgagaaccatcaccacccgaagcaacagcatcaaacaaggcaaggaccagcactttcctgtgttcatgaacgagaaggaggacatcctgtggtgtaccgagatggagagagtgttcgggttcccagtccactacacagatgtcagcaacatgtctagactggccagacagagactgctgggaagaagctggtccgtccctgtgatcagacacctgttcgcccctctgaaggagtacttcgcctgcgtgagcagcggcaacagcaacgccaacagccggggccccagcttctctagcggcctggtgccactgtccctgagagggagccacatgggccccatggagatctacaaaaccgtgagcgcctggaagcggcagcctgtgcgcgtgctgagcctgtttcggaatatcgataaagtcctgaaaagcctgggattcctggagagcggctctggctccggcggtggcaccctgaagtacgtggaggatgtgacaaacgtggtcagacgggatgtggagaagtggggccccttcgatctggtgtacggcagcacccaacccctgggcagctcttgtgaccggtgccctggctggtacatgtttcagttccaccggatcctgcagtacgccctgccgagacaggagtcccagcggccattcttttggattttcatggacaacttgctgctgaccgaggatgaccaggaaactaccactcggttcctgcagaccgaagccgtgaccctgcaggacgtgagaggccgggactaccagaacgccatgcgggtgtggtccaacatccctggactgaaaagcaagcacgcacctctgacccctaaagaagaggagtacctgcaggcccaggtgcggagcagaagcaagctggacgcccctaaggtggatctgctggtgaagaattgcctcctgcccctgagagagtacttcaagtatttcagccagaatagtctgcccctgggaggcagcggcggcggcgaggagctgcccgccgtgttcgaggacgtggccgtgtacttcaccagggaggagtggggcatgctggacaagaggcagaaggagctgtacagggacgtgatgaggctgaactacgagctgctggccagcctgggccccgccgccgccaagcccgacctgatcagcaagctggagaggagggccgccccctggatcaaggaccccaacggccccaagtggggcaagggcggcccccccggcaagggcggcccaagcagcggcgcccctcctcccagcggcggcaggcggcccaagcagcggcgcccctcctcccagcggcggcagcccagccggctccccaacctctaccgaggagggcacctctgagtccgccacccccgagagcggccctggcacctccaccgagcccagcgagggcagcgcacccggcagccctgccggcagccccacctccacagaggagggaaccagcaccgagcccagcgaaggcagcgccccaggcaccagcaccgagcctagtgagcaggagattaaacggatcaacaagatcagaagaagacttgtgaaagacagcaacaccaagaaggccggcaagacaggccccatgaaaaccctgctggttagagtgatgacacccgatctgagagagcggctggaaaacctgagaaagaagcctgaaaatatcccccagcccatcagcaatacatctagagccaacctgaataagctgctgaccgattacaccgaaatgaagaaggcgatcctgcatgtgtactgggaagagttccagaaggaccctgtgggcctgatgagccgggtggcccagcctgccagcaagaagatcgatcagaacaagctgaaacctgagatggacgagaagggcaacctgaccaccgccggctttgcctgctctcagtgtggccagcccctgttcgtgtacaagctggagcaggtgtctgagaagggcaaggcttacaccaactacttcggacggtgcaatgtggccgagcacgaaaagctgatcctgctggcccagctgaagcccgagaaggatagcgacgaagccgtgacatatagcctgggaaagtttgggcagagggccctggatttctacagcattcatgtgaccaaggagtccacccaccccgtgaagcccctggcccagatcgccggaaacagatacgcctccggacctgtgggaaaggccctgagcgacgcatgtatgggcacaatcgcctccttcctgtctaagtaccaggacatcatcatcgaacaccagaaggtggtgaagggcaaccagaagagactggagagcctgcgggagctggccggcaaggaaaacctggaataccctagcgtgaccctgccacctcagcctcacaccaaggagggcgttgatgcctacaacgaagtgatcgcccgggtgcgaatgtgggtgaacctgaacctgtggcagaagctgaagctaagcagagatgatgccaagcctctgctgagactgaagggattcccttcctttcctctggtcgagagacaggccaacgaagtggactggtgggacatggtgtgtaacgtgaagaagctgatcaacgagaaaaaggaggatggcaaggtgttttggcagaatctggctggctacaagagacaggaagccctgagaccatacctgagcagcgaggaagatcggaagaagggaaagaaattcgctcggtaccagctgggcgacctgctgctgcacctggaaaagaagcacggcgaggactggggaaaggtgtacgacgaggcctgggagcggattgacaagaaagtggaaggcctgagcaagcacatcaagctggaagaggaacggagaagcgaggacgcccagagcaaggccgccctgaccgactggctgcgggctaaggccagcttcgtgatcgagggcctgaaggaggccgacaaggacgagttctgcagatgcgagctgaagctgcagaagtggtacggggacctgcggggaaagcccttcgccatcgaagccgagaacagcatcctggacatcagcggcttcagcaagcagtacaactgtgccttcatctggcagaaggacggcgtgaagaagctgaacctgtacctgatcatcaactacttcaagggcggcaagctgcggttcaagaagatcaaacctgaagccttcgaagccaacagattctacaccgtgatcaacaaaaagagcggcgagatcgtgcccatggaggtgaacttcaacttcgacgaccccaacctgatcatcctgcctctggcctttggcaagagacagggcagagaattcatctggaacgacctgctgtccctggaaaccggcagcctgaagctggccaacggaagagtgatcgagaagacactgtacaacagaagaacccggcaggatgagcctgccctgttcgtggccctgaccttcgagcggcgggaggtcctggactcctccaatatcaaaccaatgaacctgatcggcgtggcaagaggcgaaaacatccccgccgtgatcgccctgaccgaccccgagggctgcccactgagccggtttaaggatagcctgggaaacccaacccacatcctgagaatcggcgagagctataaggagaagcagcggaccatccaggccaagaaggaggtggagcagcggagagccggcggctacagccggaagtacgccagcaaagccaagaatctggcagacgatatggtgagaaacaccgctagagatctgctgtactacgccgtgacccaggatgccatgctgatcttcgccaacctgagccggggcttcggccggcagggcaagcggaccttcatggccgagagacagtacacacggatggaggactggctgaccgccaagctggcctacgagggcctgagcaagacctacctgtccaagacactggcccagtacacctccaagacatgcagcaactgtgggtttaccatcaccagcgccgactacgacagggtgctggagaagctgaagaagacagcaacaggctggatgaccacaattaacggcaaggagctgaaggtggagggccagattacctactacaacagatacaagagacagaacgtagtcaaggacctgtccgtcgagctggatagactgagcgaagaatctgtgaacaacgacatctcctcctggacaaagggcagaagcggagaagctctgagcctcctgaagaaaagattctcccatagacccgtgcaggagaagttcgtgtgcctgaactgcggcttcgagacacacgcagccgagcaagccgccctgaacatcgccagatcctggctgttcctgcggagccaggagtacaagaaataccagacaaacaagacaaccggcaacaccgataagagagccttcgtcgagacctggcagtccttttaccggaagaagcttaaggaggtgtggaaacctgccgtgcggtctggcggatctggcggaggctccaccagccccaagaaaaagagaaaagtctaagctgccttctgcggggcttgccttctggccatgcccttcttctctcccttgcacctgtacctcttggtctttgaataaagcctgagtaggaaggctagcaaaaaaaaaaaaaaaaaaaaaaaaaaaaaaaaaaaaaaaaaaaaaaaaaaaaaaaaaaaaaaaaaaaaaaaaaaaaaaaagcccagccggctccccaacctctaccgaggagggcacctctgagtccgccacccccgagagcggccctggcacctccaccgagcccagcgagggcagcgcacccggcagccctgccggcagccccacctccacagaggagggaaccagcaccgagcccagcgaaggcagcgccccaggcaccagcaccgagcctagtgagcaggagattaaacggatcaacaagatcagaagaagacttgtgaaagacagcaacaccaagaaggccggcaagacaggccccatgaaaaccctgctggttagagtgatgacacccgatctgagagagcggctggaaaacctgagaaagaagcctgaaaatatcccccagcccatcagcaatacatctagagccaacctgaataagctgctgaccgattacaccgaaatgaagaaggcgatcctgcatgtgtactgggaagagttccagaaggaccctgtgggcctgatgagccgggtggcccagcctgccagcaagaagatcgatcagaacaagctgaaacctgagatggacgagaagggcaacctgaccaccgccggctttgcctgctctcagtgtggccagcccctgttcgtgtacaagctggagcaggtgtctgagaagggcaaggcttacaccaactacttcggacggtgcaatgtggccgagcacgaaaagctgatcctgctggcccagctgaagcccgagaaggatagcgacgaagccgtgacatatagcctgggaaagtttgggcagagggccctggatttctacagcattcatgtgaccaaggagtccacccaccccgtgaagcccctggcccagatcgccggaaacagatacgcctccggacctgtgggaaaggccctgagcgacgcatgtatgggcacaatcgcctccttcctgtctaagtaccaggacatcatcatcgaacaccagaaggtggtgaagggcaaccagaagagactggagagcctgcgggagctggccggcaaggaaaacctggaataccctagcgtgaccctgccacctcagcctcacaccaaggagggcgttgatgcctacaacgaagtgatcgcccgggtgcgaatgtgggtgaacctgaacctgtggcagaagctgaagctaagcagagatgatgccaagcctctgctgagactgaagggattcccttcctttcctctggtcgagagacaggccaacgaagtggactggtgggacatggtgtgtaacgtgaagaagctgatcaacgagaaaaaggaggatggcaaggtgttttggcagaatctggctggctacaagagacaggaagccctgagaccatacctgagcagcgaggaagatcggaagaagggaaagaaattcgctcggtaccagctgggcgacctgctgctgcacctggaaaagaagcacggcgaggactggggaaaggtgtacgacgaggcctgggagcggattgacaagaaagtggaaggcctgagcaagcacatcaagctggaagaggaacggagaagcgaggacgcccagagcaaggccgccctgaccgactggctgcgggctaaggccagcttcgtgatcgagggcctgaaggaggccgacaaggacgagttctgcagatgcgagctgaagctgcagaagtggtacggggacctgcggggaaagcccttcgccatcgaagccgagaacagcatcctggacatcagcggcttcagcaagcagtacaactgtgccttcatctggcagaaggacggcgtgaagaagctgaacctgtacctgatcatcaactacttcaagggcggcaagctgcggttcaagaagatcaaacctgaagccttcgaagccaacagattctacaccgtgatcaacaaaaagagcggcgagatcgtgcccatggaggtgaacttcaacttcgacgaccccaacctgatcatcctgcctctggcctttggcaagagacagggcagagaattcatctggaacgacctgctgtccctggaaaccggcagcctgaagctggccaacggaagagtgatcgagaagacactgtacaacagaagaacccggcaggatgagcctgccctgttcgtggccctgaccttcgagcggcgggaggtcctggactcctccaatatcaaaccaatgaacctgatcggcgtggcaagaggcgaaaacatccccgccgtgatcgccctgaccgaccccgagggctgcccactgagccggtttaaggatagcctgggaaacccaacccacatcctgagaatcggcgagagctataaggagaagcagcggaccatccaggccaagaaggaggtggagcagcggagagccggcggctacagccggaagtacgccagcaaagccaagaatctggcagacgatatggtgagaaacaccgctagagatctgctgtactacgccgtgacccaggatgccatgctgatcttcgccaacctgagccggggcttcggccggcagggcaagcggaccttcatggccgagagacagtacacacggatggaggactggctgaccgccaagctggcctacgagggcctgagcaagacctacctgtccaagacactggcccagtacacctccaagacatgcagcaactgtgggtttaccatcaccagcgccgactacgacagggtgctggagaagctgaagaagacagcaacaggctggatgaccacaattaacggcaaggagctgaaggtggagggccagattacctactacaacagatacaagagacagaacgtagtcaaggacctgtccgtcgagctggatagactgagcgaagaatctgtgaacaacgacatctcctcctggacaaagggcagaagcggagaagctctgagcctcctgaagaaaagattctcccatagacccgtgcaggagaagttcgtgtgcctgaactgcggcttcgagacacacgcagccgagcaagccgccctgaacatcgccagatcctggctgttcctgcggagccaggagtacaagaaataccagacaaacaagacaaccggcaacaccgataagagagccttcgtcgagacctggcagtccttttaccggaagaagcttaaggaggtgtggaaacctgccgtgcggtctggcggatctggcggaggctccaccagccccaagaaaaagagaaaagtctaagctgccttctgcggggcttgccttctggccatgcccttcttctctcccttgcacctgtacctcttggtctttgaataaagcctgagtaggaaggctagcaaaaaaaaaaaaaaaaaaaaaaaaaaaaaaaaaaaaaaaaaaaaaaaaaaaaaaaaaaaaaaaaaaaaaaaaaaaaaaaa

SEQ ID NO: 9970 - RNA, 8787 nt, synthetic construct
  source 1..8787: mol_type = other RNA
aggaaataagagagaaaagaagagtaagaagaaatataagagccaccatggcccctaagaagaagcgtaaagtgagccggatgaaccacgaccaggagttcgacccccctaaggtgtaccctcccgtccccgccgagaagagaaagcccatccgggtcctgagcctgttcgatggcatcgccaccggtctgctggtgctgaaggacctgggcatccaggtggataggtacattgcctccgaggtgtgcgaggactccatcaccgtgggaatggtgcgtcatcagggcaagatcatgtacgtgggcgacgtgcggagcgtgacacagaagcatatccaggagtggggccctttcgacctggtgatcggcggcagcccttgcaatgacctgagcatcgtgaacccagcccggaagggcctgtacgagggaaccggcagactgttcttcgagttttacagactgctgcacgacgcccggcctaaggaaggcgacgaccggcccttcttttggctgttcgagaatgtggtggccatgggagtcagcgacaagcgggatattagccggttcctggagagcaaccccgtgatgatcgatgccaaggaagtgagcgccgcccaccgggccagatacttctggggcaatctgcctggcatgaacagacccctggccagcaccgtgaacgacaagctggagctgcaggagtgcctggagcacggccggatcgccaagttcagcaaggtgagaaccatcaccacccgaagcaacagcatcaaacaaggcaaggaccagcactttcctgtgttcatgaacgagaaggaggacatcctgtggtgtaccgagatggagagagtgttcgggttcccagtccactacacagatgtcagcaacatgtctagactggccagacagagactgctgggaagaagctggtccgtccctgtgatcagacacctgttcgcccctctgaaggagtacttcgcctgcgtgagcagcggcaacagcaacgccaacagccggggccccagcttctctagcggcctggtgccactgtccctgagagggagccacatgggccccatggagatctacaaaaccgtgagcgcctggaagcggcagcctgtgcgcgtgctgagcctgtttcggaatatcgataaagtcctgaaaagcctgggattcctggagagcggctctggctccggcggtggcaccctgaagtacgtggaggatgtgacaaacgtggtcagacgggatgtggagaagtggggccccttcgatctggtgtacggcagcacccaacccctgggcagctcttgtgaccggtgccctggctggtacatgtttcagttccaccggatcctgcagtacgccctgccgagacaggagtcccagcggccattcttttggattttcatggacaacttgctgctgaccgaggatgaccaggaaactaccactcggttcctgcagaccgaagccgtgaccctgcaggacgtgagaggccgggactaccagaacgccatgcgggtgtggtccaacatccctggactgaaaagcaagcacgcacctctgacccctaaagaagaggagtacctgcaggcccaggtgcggagcagaagcaagctggacgcccctaaggtggatctgctggtgaagaattgcctcctgcccctgagagagtacttcaagtatttcagccagaatagtctgcccctgggaggcagcggcggcggcatggcccacatggccttcagggacgtggccgtggacttcacccaggacgagtggaggctgctgagccccgcccagaggaccctgtacagggaggtgatgctggagaactacagcaacctggtgagcctgggcatcagcttcagcaagcccgagatcatcacccagctggagcagggcaaggagacctggagggaggagaagaagtgcccccccgccacctgccccgccgaccccgagcccgagggcggcccaagcagcggcgcccctcctcccagcggcggcaggcggcccaagcagcggcgcccctcctcccagcggcggcagcccagccggctccccaacctctaccgaggagggcacctctgagtccgccacccccgagagcggccctggcacctccaccgagcccagcgagggcagcgcacccggcagccctgccggcagccccacctccacagaggagggaaccagcaccgagcccagcgaaggcagcgccccaggcaccagcaccgagcctagtgagcaggagattaaacggatcaacaagatcagaagaagacttgtgaaagacagcaacaccaagaaggccggcaagacaggccccatgaaaaccctgctggttagagtgatgacacccgatctgagagagcggctggaaaacctgagaaagaagcctgaaaatatcccccagcccatcagcaatacatctagagccaacctgaataagctgctgaccgattacaccgaaatgaagaaggcgatcctgcatgtgtactgggaagagttccagaaggaccctgtgggcctgatgagccgggtggcccagcctgccagcaagaagatcgatcagaacaagctgaaacctgagatggacgagaagggcaacctgaccaccgccggctttgcctgctctcagtgtggccagcccctgttcgtgtacaagctggagcaggtgtctgagaagggcaaggcttacaccaactacttcggacggtgcaatgtggccgagcacgaaaagctgatcctgctggcccagctgaagcccgagaaggatagcgacgaagccgtgacatatagcctgggaaagtttgggcagagggccctggatttctacagcattcatgtgaccaaggagtccacccaccccgtgaagcccctggcccagatcgccggaaacagatacgcctccggacctgtgggaaaggccctgagcgacgcatgtatgggcacaatcgcctccttcctgtctaagtaccaggacatcatcatcgaacaccagaaggtggtgaagggcaaccagaagagactggagagcctgcgggagctggccggcaaggaaaacctggaataccctagcgtgaccctgccacctcagcctcacaccaaggagggcgttgatgcctacaacgaagtgatcgcccgggtgcgaatgtgggtgaacctgaacctgtggcagaagctgaagctaagcagagatgatgccaagcctctgctgagactgaagggattcccttcctttcctctggtcgagagacaggccaacgaagtggactggtgggacatggtgtgtaacgtgaagaagctgatcaacgagaaaaaggaggatggcaaggtgttttggcagaatctggctggctacaagagacaggaagccctgagaccatacctgagcagcgaggaagatcggaagaagggaaagaaattcgctcggtaccagctgggcgacctgctgctgcacctggaaaagaagcacggcgaggactggggaaaggtgtacgacgaggcctgggagcggattgacaagaaagtggaaggcctgagcaagcacatcaagctggaagaggaacggagaagcgaggacgcccagagcaaggccgccctgaccgactggctgcgggctaaggccagcttcgtgatcgagggcctgaaggaggccgacaaggacgagttctgcagatgcgagctgaagctgcagaagtggtacggggacctgcggggaaagcccttcgccatcgaagccgagaacagcatcctggacatcagcggcttcagcaagcagtacaactgtgccttcatctggcagaaggacggcgtgaagaagctgaacctgtacctgatcatcaactacttcaagggcggcaagctgcggttcaagaagatcaaacctgaagccttcgaagccaacagattctacaccgtgatcaacaaaaagagcggcgagatcgtgcccatggaggtgaacttcaacttcgacgaccccaacctgatcatcctgcctctggcctttggcaagagacagggcagagaattcatctggaacgacctgctgtccctggaaaccggcagcctgaagctggccaacggaagagtgatcgagaagacactgtacaacagaagaacccggcaggatgagcctgccctgttcgtggccctgaccttcgagcggcgggaggtcctggactcctccaatatcaaaccaatgaacctgatcggcgtggcaagaggcgaaaacatccccgccgtgatcgccctgaccgaccccgagggctgcccactgagccggtttaaggatagcctgggaaacccaacccacatcctgagaatcggcgagagctataaggagaagcagcggaccatccaggccaagaaggaggtggagcagcggagagccggcggctacagccggaagtacgccagcaaagccaagaatctggcagacgatatggtgagaaacaccgctagagatctgctgtactacgccgtgacccaggatgccatgctgatcttcgccaacctgagccggggcttcggccggcagggcaagcggaccttcatggccgagagacagtacacacggatggaggactggctgaccgccaagctggcctacgagggcctgagcaagacctacctgtccaagacactggcccagtacacctccaagacatgcagcaactgtgggtttaccatcaccagcgccgactacgacagggtgctggagaagctgaagaagacagcaacaggctggatgaccacaattaacggcaaggagctgaaggtggagggccagattacctactacaacagatacaagagacagaacgtagtcaaggacctgtccgtcgagctggatagactgagcgaagaatctgtgaacaacgacatctcctcctggacaaagggcagaagcggagaagctctgagcctcctgaagaaaagattctcccatagacccgtgcaggagaagttcgtgtgcctgaactgcggcttcgagacacacgcagccgagcaagccgccctgaacatcgccagatcctggctgttcctgcggagccaggagtacaagaaataccagacaaacaagacaaccggcaacaccgataagagagccttcgtcgagacctggcagtccttttaccggaagaagcttaaggaggtgtggaaacctgccgtgcggtctggcggatctggcggaggctccaccagccccaagaaaaagagaaaagtctaagctgccttctgcggggcttgccttctggccatgcccttcttctctcccttgcacctgtacctcttggtctttgaataaagcctgagtaggaaggctagcaaaaaaaaaaaaaaaaaaaaaaaaaaaaaaaaaaaaaaaaaaaaaaaaaaaaaaaaaaaaaaaaaaaaaaaaaaaaaaaagcccagccggctccccaacctctaccgaggagggcacctctgagtccgccacccccgagagcggccctggcacctccaccgagcccagcgagggcagcgcacccggcagccctgccggcagccccacctccacagaggagggaaccagcaccgagcccagcgaaggcagcgccccaggcaccagcaccgagcctagtgagcaggagattaaacggatcaacaagatcagaagaagacttgtgaaagacagcaacaccaagaaggccggcaagacaggccccatgaaaaccctgctggttagagtgatgacacccgatctgagagagcggctggaaaacctgagaaagaagcctgaaaatatcccccagcccatcagcaatacatctagagccaacctgaataagctgctgaccgattacaccgaaatgaagaaggcgatcctgcatgtgtactgggaagagttccagaaggaccctgtgggcctgatgagccgggtggcccagcctgccagcaagaagatcgatcagaacaagctgaaacctgagatggacgagaagggcaacctgaccaccgccggctttgcctgctctcagtgtggccagcccctgttcgtgtacaagctggagcaggtgtctgagaagggcaaggcttacaccaactacttcggacggtgcaatgtggccgagcacgaaaagctgatcctgctggcccagctgaagcccgagaaggatagcgacgaagccgtgacatatagcctgggaaagtttgggcagagggccctggatttctacagcattcatgtgaccaaggagtccacccaccccgtgaagcccctggcccagatcgccggaaacagatacgcctccggacctgtgggaaaggccctgagcgacgcatgtatgggcacaatcgcctccttcctgtctaagtaccaggacatcatcatcgaacaccagaaggtggtgaagggcaaccagaagagactggagagcctgcgggagctggccggcaaggaaaacctggaataccctagcgtgaccctgccacctcagcctcacaccaaggagggcgttgatgcctacaacgaagtgatcgcccgggtgcgaatgtgggtgaacctgaacctgtggcagaagctgaagctaagcagagatgatgccaagcctctgctgagactgaagggattcccttcctttcctctggtcgagagacaggccaacgaagtggactggtgggacatggtgtgtaacgtgaagaagctgatcaacgagaaaaaggaggatggcaaggtgttttggcagaatctggctggctacaagagacaggaagccctgagaccatacctgagcagcgaggaagatcggaagaagggaaagaaattcgctcggtaccagctgggcgacctgctgctgcacctggaaaagaagcacggcgaggactggggaaaggtgtacgacgaggcctgggagcggattgacaagaaagtggaaggcctgagcaagcacatcaagctggaagaggaacggagaagcgaggacgcccagagcaaggccgccctgaccgactggctgcgggctaaggccagcttcgtgatcgagggcctgaaggaggccgacaaggacgagttctgcagatgcgagctgaagctgcagaagtggtacggggacctgcggggaaagcccttcgccatcgaagccgagaacagcatcctggacatcagcggcttcagcaagcagtacaactgtgccttcatctggcagaaggacggcgtgaagaagctgaacctgtacctgatcatcaactacttcaagggcggcaagctgcggttcaagaagatcaaacctgaagccttcgaagccaacagattctacaccgtgatcaacaaaaagagcggcgagatcgtgcccatggaggtgaacttcaacttcgacgaccccaacctgatcatcctgcctctggcctttggcaagagacagggcagagaattcatctggaacgacctgctgtccctggaaaccggcagcctgaagctggccaacggaagagtgatcgagaagacactgtacaacagaagaacccggcaggatgagcctgccctgttcgtggccctgaccttcgagcggcgggaggtcctggactcctccaatatcaaaccaatgaacctgatcggcgtggcaagaggcgaaaacatccccgccgtgatcgccctgaccgaccccgagggctgcccactgagccggtttaaggatagcctgggaaacccaacccacatcctgagaatcggcgagagctataaggagaagcagcggaccatccaggccaagaaggaggtggagcagcggagagccggcggctacagccggaagtacgccagcaaagccaagaatctggcagacgatatggtgagaaacaccgctagagatctgctgtactacgccgtgacccaggatgccatgctgatcttcgccaacctgagccggggcttcggccggcagggcaagcggaccttcatggccgagagacagtacacacggatggaggactggctgaccgccaagctggcctacgagggcctgagcaagacctacctgtccaagacactggcccagtacacctccaagacatgcagcaactgtgggtttaccatcaccagcgccgactacgacagggtgctggagaagctgaagaagacagcaacaggctggatgaccacaattaacggcaaggagctgaaggtggagggccagattacctactacaacagatacaagagacagaacgtagtcaaggacctgtccgtcgagctggatagactgagcgaagaatctgtgaacaacgacatctcctcctggacaaagggcagaagcggagaagctctgagcctcctgaagaaaagattctcccatagacccgtgcaggagaagttcgtgtgcctgaactgcggcttcgagacacacgcagccgagcaagccgccctgaacatcgccagatcctggctgttcctgcggagccaggagtacaagaaataccagacaaacaagacaaccggcaacaccgataagagagccttcgtcgagacctggcagtccttttaccggaagaagcttaaggaggtgtggaaacctgccgtgcggtctggcggatctggcggaggctccaccagccccaagaaaaagagaaaagtctaagctgccttctgcggggcttgccttctggccatgcccttcttctctcccttgcacctgtacctcttggtctttgaataaagcctgagtaggaaggctagcaaaaaaaaaaaaaaaaaaaaaaaaaaaaaaaaaaaaaaaaaaaaaaaaaaaaaaaaaaaaaaaaaaaaaaaaaaaaaaaa

SEQ ID NO: 9971 - RNA, 8787 nt, synthetic construct
  source 1..8787: mol_type = other RNA
aggaaataagagagaaaagaagagtaagaagaaatataagagccaccatggcccctaagaagaagcgtaaagtgagccggatgaaccacgaccaggagttcgacccccctaaggtgtaccctcccgtccccgccgagaagagaaagcccatccgggtcctgagcctgttcgatggcatcgccaccggtctgctggtgctgaaggacctgggcatccaggtggataggtacattgcctccgaggtgtgcgaggactccatcaccgtgggaatggtgcgtcatcagggcaagatcatgtacgtgggcgacgtgcggagcgtgacacagaagcatatccaggagtggggccctttcgacctggtgatcggcggcagcccttgcaatgacctgagcatcgtgaacccagcccggaagggcctgtacgagggaaccggcagactgttcttcgagttttacagactgctgcacgacgcccggcctaaggaaggcgacgaccggcccttcttttggctgttcgagaatgtggtggccatgggagtcagcgacaagcgggatattagccggttcctggagagcaaccccgtgatgatcgatgccaaggaagtgagcgccgcccaccgggccagatacttctggggcaatctgcctggcatgaacagacccctggccagcaccgtgaacgacaagctggagctgcaggagtgcctggagcacggccggatcgccaagttcagcaaggtgagaaccatcaccacccgaagcaacagcatcaaacaaggcaaggaccagcactttcctgtgttcatgaacgagaaggaggacatcctgtggtgtaccgagatggagagagtgttcgggttcccagtccactacacagatgtcagcaacatgtctagactggccagacagagactgctgggaagaagctggtccgtccctgtgatcagacacctgttcgcccctctgaaggagtacttcgcctgcgtgagcagcggcaacagcaacgccaacagccggggccccagcttctctagcggcctggtgccactgtccctgagagggagccacatgggccccatggagatctacaaaaccgtgagcgcctggaagcggcagcctgtgcgcgtgctgagcctgtttcggaatatcgataaagtcctgaaaagcctgggattcctggagagcggctctggctccggcggtggcaccctgaagtacgtggaggatgtgacaaacgtggtcagacgggatgtggagaagtggggccccttcgatctggtgtacggcagcacccaacccctgggcagctcttgtgaccggtgccctggctggtacatgtttcagttccaccggatcctgcagtacgccctgccgagacaggagtcccagcggccattcttttggattttcatggacaacttgctgctgaccgaggatgaccaggaaactaccactcggttcctgcagaccgaagccgtgaccctgcaggacgtgagaggccgggactaccagaacgccatgcgggtgtggtccaacatccctggactgaaaagcaagcacgcacctctgacccctaaagaagaggagtacctgcaggcccaggtgcggagcagaagcaagctggacgcccctaaggtggatctgctggtgaagaattgcctcctgcccctgagagagtacttcaagtatttcagccagaatagtctgcccctgggaggcagcggcggcggcagcctgggcatggtgagcttcgaggacgtggccgtgaccttcagcagggaggagtggcagcagctggacgaggcccagaggaccctgtacagggaggtgatgctggaggcctacagcaacctgaagaccgtgggctgctgctggagcaagcccgaggtgatcatcaggctggagcagggcgtggagccctggaccgtggagggcgtgaccaaccagaggttcagcgacgtgctgaccgtggacggcggcccaagcagcggcgcccctcctcccagcggcggcaggcggcccaagcagcggcgcccctcctcccagcggcggcagcccagccggctccccaacctctaccgaggagggcacctctgagtccgccacccccgagagcggccctggcacctccaccgagcccagcgagggcagcgcacccggcagccctgccggcagccccacctccacagaggagggaaccagcaccgagcccagcgaaggcagcgccccaggcaccagcaccgagcctagtgagcaggagattaaacggatcaacaagatcagaagaagacttgtgaaagacagcaacaccaagaaggccggcaagacaggccccatgaaaaccctgctggttagagtgatgacacccgatctgagagagcggctggaaaacctgagaaagaagcctgaaaatatcccccagcccatcagcaatacatctagagccaacctgaataagctgctgaccgattacaccgaaatgaagaaggcgatcctgcatgtgtactgggaagagttccagaaggaccctgtgggcctgatgagccgggtggcccagcctgccagcaagaagatcgatcagaacaagctgaaacctgagatggacgagaagggcaacctgaccaccgccggctttgcctgctctcagtgtggccagcccctgttcgtgtacaagctggagcaggtgtctgagaagggcaaggcttacaccaactacttcggacggtgcaatgtggccgagcacgaaaagctgatcctgctggcccagctgaagcccgagaaggatagcgacgaagccgtgacatatagcctgggaaagtttgggcagagggccctggatttctacagcattcatgtgaccaaggagtccacccaccccgtgaagcccctggcccagatcgccggaaacagatacgcctccggacctgtgggaaaggccctgagcgacgcatgtatgggcacaatcgcctccttcctgtctaagtaccaggacatcatcatcgaacaccagaaggtggtgaagggcaaccagaagagactggagagcctgcgggagctggccggcaaggaaaacctggaataccctagcgtgaccctgccacctcagcctcacaccaaggagggcgttgatgcctacaacgaagtgatcgcccgggtgcgaatgtgggtgaacctgaacctgtggcagaagctgaagctaagcagagatgatgccaagcctctgctgagactgaagggattcccttcctttcctctggtcgagagacaggccaacgaagtggactggtgggacatggtgtgtaacgtgaagaagctgatcaacgagaaaaaggaggatggcaaggtgttttggcagaatctggctggctacaagagacaggaagccctgagaccatacctgagcagcgaggaagatcggaagaagggaaagaaattcgctcggtaccagctgggcgacctgctgctgcacctggaaaagaagcacggcgaggactggggaaaggtgtacgacgaggcctgggagcggattgacaagaaagtggaaggcctgagcaagcacatcaagctggaagaggaacggagaagcgaggacgcccagagcaaggccgccctgaccgactggctgcgggctaaggccagcttcgtgatcgagggcctgaaggaggccgacaaggacgagttctgcagatgcgagctgaagctgcagaagtggtacggggacctgcggggaaagcccttcgccatcgaagccgagaacagcatcctggacatcagcggcttcagcaagcagtacaactgtgccttcatctggcagaaggacggcgtgaagaagctgaacctgtacctgatcatcaactacttcaagggcggcaagctgcggttcaagaagatcaaacctgaagccttcgaagccaacagattctacaccgtgatcaacaaaaagagcggcgagatcgtgcccatggaggtgaacttcaacttcgacgaccccaacctgatcatcctgcctctggcctttggcaagagacagggcagagaattcatctggaacgacctgctgtccctggaaaccggcagcctgaagctggccaacggaagagtgatcgagaagacactgtacaacagaagaacccggcaggatgagcctgccctgttcgtggccctgaccttcgagcggcgggaggtcctggactcctccaatatcaaaccaatgaacctgatcggcgtggcaagaggcgaaaacatccccgccgtgatcgccctgaccgaccccgagggctgcccactgagccggtttaaggatagcctgggaaacccaacccacatcctgagaatcggcgagagctataaggagaagcagcggaccatccaggccaagaaggaggtggagcagcggagagccggcggctacagccggaagtacgccagcaaagccaagaatctggcagacgatatggtgagaaacaccgctagagatctgctgtactacgccgtgacccaggatgccatgctgatcttcgccaacctgagccggggcttcggccggcagggcaagcggaccttcatggccgagagacagtacacacggatggaggactggctgaccgccaagctggcctacgagggcctgagcaagacctacctgtccaagacactggcccagtacacctccaagacatgcagcaactgtgggtttaccatcaccagcgccgactacgacagggtgctggagaagctgaagaagacagcaacaggctggatgaccacaattaacggcaaggagctgaaggtggagggccagattacctactacaacagatacaagagacagaacgtagtcaaggacctgtccgtcgagctggatagactgagcgaagaatctgtgaacaacgacatctcctcctggacaaagggcagaagcggagaagctctgagcctcctgaagaaaagattctcccatagacccgtgcaggagaagttcgtgtgcctgaactgcggcttcgagacacacgcagccgagcaagccgccctgaacatcgccagatcctggctgttcctgcggagccaggagtacaagaaataccagacaaacaagacaaccggcaacaccgataagagagccttcgtcgagacctggcagtccttttaccggaagaagcttaaggaggtgtggaaacctgccgtgcggtctggcggatctggcggaggctccaccagccccaagaaaaagagaaaagtctaagctgccttctgcggggcttgccttctggccatgcccttcttctctcccttgcacctgtacctcttggtctttgaataaagcctgagtaggaaggctagcaaaaaaaaaaaaaaaaaaaaaaaaaaaaaaaaaaaaaaaaaaaaaaaaaaaaaaaaaaaaaaaaaaaaaaaaaaaaaaaagcccagccggctccccaacctctaccgaggagggcacctctgagtccgccacccccgagagcggccctggcacctccaccgagcccagcgagggcagcgcacccggcagccctgccggcagccccacctccacagaggagggaaccagcaccgagcccagcgaaggcagcgccccaggcaccagcaccgagcctagtgagcaggagattaaacggatcaacaagatcagaagaagacttgtgaaagacagcaacaccaagaaggccggcaagacaggccccatgaaaaccctgctggttagagtgatgacacccgatctgagagagcggctggaaaacctgagaaagaagcctgaaaatatcccccagcccatcagcaatacatctagagccaacctgaataagctgctgaccgattacaccgaaatgaagaaggcgatcctgcatgtgtactgggaagagttccagaaggaccctgtgggcctgatgagccgggtggcccagcctgccagcaagaagatcgatcagaacaagctgaaacctgagatggacgagaagggcaacctgaccaccgccggctttgcctgctctcagtgtggccagcccctgttcgtgtacaagctggagcaggtgtctgagaagggcaaggcttacaccaactacttcggacggtgcaatgtggccgagcacgaaaagctgatcctgctggcccagctgaagcccgagaaggatagcgacgaagccgtgacatatagcctgggaaagtttgggcagagggccctggatttctacagcattcatgtgaccaaggagtccacccaccccgtgaagcccctggcccagatcgccggaaacagatacgcctccggacctgtgggaaaggccctgagcgacgcatgtatgggcacaatcgcctccttcctgtctaagtaccaggacatcatcatcgaacaccagaaggtggtgaagggcaaccagaagagactggagagcctgcgggagctggccggcaaggaaaacctggaataccctagcgtgaccctgccacctcagcctcacaccaaggagggcgttgatgcctacaacgaagtgatcgcccgggtgcgaatgtgggtgaacctgaacctgtggcagaagctgaagctaagcagagatgatgccaagcctctgctgagactgaagggattcccttcctttcctctggtcgagagacaggccaacgaagtggactggtgggacatggtgtgtaacgtgaagaagctgatcaacgagaaaaaggaggatggcaaggtgttttggcagaatctggctggctacaagagacaggaagccctgagaccatacctgagcagcgaggaagatcggaagaagggaaagaaattcgctcggtaccagctgggcgacctgctgctgcacctggaaaagaagcacggcgaggactggggaaaggtgtacgacgaggcctgggagcggattgacaagaaagtggaaggcctgagcaagcacatcaagctggaagaggaacggagaagcgaggacgcccagagcaaggccgccctgaccgactggctgcgggctaaggccagcttcgtgatcgagggcctgaaggaggccgacaaggacgagttctgcagatgcgagctgaagctgcagaagtggtacggggacctgcggggaaagcccttcgccatcgaagccgagaacagcatcctggacatcagcggcttcagcaagcagtacaactgtgccttcatctggcagaaggacggcgtgaagaagctgaacctgtacctgatcatcaactacttcaagggcggcaagctgcggttcaagaagatcaaacctgaagccttcgaagccaacagattctacaccgtgatcaacaaaaagagcggcgagatcgtgcccatggaggtgaacttcaacttcgacgaccccaacctgatcatcctgcctctggcctttggcaagagacagggcagagaattcatctggaacgacctgctgtccctggaaaccggcagcctgaagctggccaacggaagagtgatcgagaagacactgtacaacagaagaacccggcaggatgagcctgccctgttcgtggccctgaccttcgagcggcgggaggtcctggactcctccaatatcaaaccaatgaacctgatcggcgtggcaagaggcgaaaacatccccgccgtgatcgccctgaccgaccccgagggctgcccactgagccggtttaaggatagcctgggaaacccaacccacatcctgagaatcggcgagagctataaggagaagcagcggaccatccaggccaagaaggaggtggagcagcggagagccggcggctacagccggaagtacgccagcaaagccaagaatctggcagacgatatggtgagaaacaccgctagagatctgctgtactacgccgtgacccaggatgccatgctgatcttcgccaacctgagccggggcttcggccggcagggcaagcggaccttcatggccgagagacagtacacacggatggaggactggctgaccgccaagctggcctacgagggcctgagcaagacctacctgtccaagacactggcccagtacacctccaagacatgcagcaactgtgggtttaccatcaccagcgccgactacgacagggtgctggagaagctgaagaagacagcaacaggctggatgaccacaattaacggcaaggagctgaaggtggagggccagattacctactacaacagatacaagagacagaacgtagtcaaggacctgtccgtcgagctggatagactgagcgaagaatctgtgaacaacgacatctcctcctggacaaagggcagaagcggagaagctctgagcctcctgaagaaaagattctcccatagacccgtgcaggagaagttcgtgtgcctgaactgcggcttcgagacacacgcagccgagcaagccgccctgaacatcgccagatcctggctgttcctgcggagccaggagtacaagaaataccagacaaacaagacaaccggcaacaccgataagagagccttcgtcgagacctggcagtccttttaccggaagaagcttaaggaggtgtggaaacctgccgtgcggtctggcggatctggcggaggctccaccagccccaagaaaaagagaaaagtctaagctgccttctgcggggcttgccttctggccatgcccttcttctctcccttgcacctgtacctcttggtctttgaataaagcctgagtaggaaggctagcaaaaaaaaaaaaaaaaaaaaaaaaaaaaaaaaaaaaaaaaaaaaaaaaaaaaaaaaaaaaaaaaaaaaaaaaaaaaaaaa

SEQ ID NO: 9972 - RNA, 8787 nt, synthetic construct
  source 1..8787: mol_type = other RNA
aggaaataagagagaaaagaagagtaagaagaaatataagagccaccatggcccctaagaagaagcgtaaagtgagccggatgaaccacgaccaggagttcgacccccctaaggtgtaccctcccgtccccgccgagaagagaaagcccatccgggtcctgagcctgttcgatggcatcgccaccggtctgctggtgctgaaggacctgggcatccaggtggataggtacattgcctccgaggtgtgcgaggactccatcaccgtgggaatggtgcgtcatcagggcaagatcatgtacgtgggcgacgtgcggagcgtgacacagaagcatatccaggagtggggccctttcgacctggtgatcggcggcagcccttgcaatgacctgagcatcgtgaacccagcccggaagggcctgtacgagggaaccggcagactgttcttcgagttttacagactgctgcacgacgcccggcctaaggaaggcgacgaccggcccttcttttggctgttcgagaatgtggtggccatgggagtcagcgacaagcgggatattagccggttcctggagagcaaccccgtgatgatcgatgccaaggaagtgagcgccgcccaccgggccagatacttctggggcaatctgcctggcatgaacagacccctggccagcaccgtgaacgacaagctggagctgcaggagtgcctggagcacggccggatcgccaagttcagcaaggtgagaaccatcaccacccgaagcaacagcatcaaacaaggcaaggaccagcactttcctgtgttcatgaacgagaaggaggacatcctgtggtgtaccgagatggagagagtgttcgggttcccagtccactacacagatgtcagcaacatgtctagactggccagacagagactgctgggaagaagctggtccgtccctgtgatcagacacctgttcgcccctctgaaggagtacttcgcctgcgtgagcagcggcaacagcaacgccaacagccggggccccagcttctctagcggcctggtgccactgtccctgagagggagccacatgggccccatggagatctacaaaaccgtgagcgcctggaagcggcagcctgtgcgcgtgctgagcctgtttcggaatatcgataaagtcctgaaaagcctgggattcctggagagcggctctggctccggcggtggcaccctgaagtacgtggaggatgtgacaaacgtggtcagacgggatgtggagaagtggggccccttcgatctggtgtacggcagcacccaacccctgggcagctcttgtgaccggtgccctggctggtacatgtttcagttccaccggatcctgcagtacgccctgccgagacaggagtcccagcggccattcttttggattttcatggacaacttgctgctgaccgaggatgaccaggaaactaccactcggttcctgcagaccgaagccgtgaccctgcaggacgtgagaggccgggactaccagaacgccatgcgggtgtggtccaacatccctggactgaaaagcaagcacgcacctctgacccctaaagaagaggagtacctgcaggcccaggtgcggagcagaagcaagctggacgcccctaaggtggatctgctggtgaagaattgcctcctgcccctgagagagtacttcaagtatttcagccagaatagtctgcccctgggaggcagcggcggcggcaagcccggcgtgctgaccttcgccgacgtggccgtgtacttcagcagcgaggagtggggctgcctgaggcccgcccagagggccctgtacagggacgtgatgagggagacctacggccacctgggcgccctgggcttccccggccccaagcccgccctgatcagctggatggagcaggagagcgaggagagcgaggcctggagccccgccgccaaggaccccgaggagggcgagagcctgggcggcggcccaagcagcggcgcccctcctcccagcggcggcaggcggcccaagcagcggcgcccctcctcccagcggcggcagcccagccggctccccaacctctaccgaggagggcacctctgagtccgccacccccgagagcggccctggcacctccaccgagcccagcgagggcagcgcacccggcagccctgccggcagccccacctccacagaggagggaaccagcaccgagcccagcgaaggcagcgccccaggcaccagcaccgagcctagtgagcaggagattaaacggatcaacaagatcagaagaagacttgtgaaagacagcaacaccaagaaggccggcaagacaggccccatgaaaaccctgctggttagagtgatgacacccgatctgagagagcggctggaaaacctgagaaagaagcctgaaaatatcccccagcccatcagcaatacatctagagccaacctgaataagctgctgaccgattacaccgaaatgaagaaggcgatcctgcatgtgtactgggaagagttccagaaggaccctgtgggcctgatgagccgggtggcccagcctgccagcaagaagatcgatcagaacaagctgaaacctgagatggacgagaagggcaacctgaccaccgccggctttgcctgctctcagtgtggccagcccctgttcgtgtacaagctggagcaggtgtctgagaagggcaaggcttacaccaactacttcggacggtgcaatgtggccgagcacgaaaagctgatcctgctggcccagctgaagcccgagaaggatagcgacgaagccgtgacatatagcctgggaaagtttgggcagagggccctggatttctacagcattcatgtgaccaaggagtccacccaccccgtgaagcccctggcccagatcgccggaaacagatacgcctccggacctgtgggaaaggccctgagcgacgcatgtatgggcacaatcgcctccttcctgtctaagtaccaggacatcatcatcgaacaccagaaggtggtgaagggcaaccagaagagactggagagcctgcgggagctggccggcaaggaaaacctggaataccctagcgtgaccctgccacctcagcctcacaccaaggagggcgttgatgcctacaacgaagtgatcgcccgggtgcgaatgtgggtgaacctgaacctgtggcagaagctgaagctaagcagagatgatgccaagcctctgctgagactgaagggattcccttcctttcctctggtcgagagacaggccaacgaagtggactggtgggacatggtgtgtaacgtgaagaagctgatcaacgagaaaaaggaggatggcaaggtgttttggcagaatctggctggctacaagagacaggaagccctgagaccatacctgagcagcgaggaagatcggaagaagggaaagaaattcgctcggtaccagctgggcgacctgctgctgcacctggaaaagaagcacggcgaggactggggaaaggtgtacgacgaggcctgggagcggattgacaagaaagtggaaggcctgagcaagcacatcaagctggaagaggaacggagaagcgaggacgcccagagcaaggccgccctgaccgactggctgcgggctaaggccagcttcgtgatcgagggcctgaaggaggccgacaaggacgagttctgcagatgcgagctgaagctgcagaagtggtacggggacctgcggggaaagcccttcgccatcgaagccgagaacagcatcctggacatcagcggcttcagcaagcagtacaactgtgccttcatctggcagaaggacggcgtgaagaagctgaacctgtacctgatcatcaactacttcaagggcggcaagctgcggttcaagaagatcaaacctgaagccttcgaagccaacagattctacaccgtgatcaacaaaaagagcggcgagatcgtgcccatggaggtgaacttcaacttcgacgaccccaacctgatcatcctgcctctggcctttggcaagagacagggcagagaattcatctggaacgacctgctgtccctggaaaccggcagcctgaagctggccaacggaagagtgatcgagaagacactgtacaacagaagaacccggcaggatgagcctgccctgttcgtggccctgaccttcgagcggcgggaggtcctggactcctccaatatcaaaccaatgaacctgatcggcgtggcaagaggcgaaaacatccccgccgtgatcgccctgaccgaccccgagggctgcccactgagccggtttaaggatagcctgggaaacccaacccacatcctgagaatcggcgagagctataaggagaagcagcggaccatccaggccaagaaggaggtggagcagcggagagccggcggctacagccggaagtacgccagcaaagccaagaatctggcagacgatatggtgagaaacaccgctagagatctgctgtactacgccgtgacccaggatgccatgctgatcttcgccaacctgagccggggcttcggccggcagggcaagcggaccttcatggccgagagacagtacacacggatggaggactggctgaccgccaagctggcctacgagggcctgagcaagacctacctgtccaagacactggcccagtacacctccaagacatgcagcaactgtgggtttaccatcaccagcgccgactacgacagggtgctggagaagctgaagaagacagcaacaggctggatgaccacaattaacggcaaggagctgaaggtggagggccagattacctactacaacagatacaagagacagaacgtagtcaaggacctgtccgtcgagctggatagactgagcgaagaatctgtgaacaacgacatctcctcctggacaaagggcagaagcggagaagctctgagcctcctgaagaaaagattctcccatagacccgtgcaggagaagttcgtgtgcctgaactgcggcttcgagacacacgcagccgagcaagccgccctgaacatcgccagatcctggctgttcctgcggagccaggagtacaagaaataccagacaaacaagacaaccggcaacaccgataagagagccttcgtcgagacctggcagtccttttaccggaagaagcttaaggaggtgtggaaacctgccgtgcggtctggcggatctggcggaggctccaccagccccaagaaaaagagaaaagtctaagctgccttctgcggggcttgccttctggccatgcccttcttctctcccttgcacctgtacctcttggtctttgaataaagcctgagtaggaaggctagcaaaaaaaaaaaaaaaaaaaaaaaaaaaaaaaaaaaaaaaaaaaaaaaaaaaaaaaaaaaaaaaaaaaaaaaaaaaaaaaagcccagccggctccccaacctctaccgaggagggcacctctgagtccgccacccccgagagcggccctggcacctccaccgagcccagcgagggcagcgcacccggcagccctgccggcagccccacctccacagaggagggaaccagcaccgagcccagcgaaggcagcgccccaggcaccagcaccgagcctagtgagcaggagattaaacggatcaacaagatcagaagaagacttgtgaaagacagcaacaccaagaaggccggcaagacaggccccatgaaaaccctgctggttagagtgatgacacccgatctgagagagcggctggaaaacctgagaaagaagcctgaaaatatcccccagcccatcagcaatacatctagagccaacctgaataagctgctgaccgattacaccgaaatgaagaaggcgatcctgcatgtgtactgggaagagttccagaaggaccctgtgggcctgatgagccgggtggcccagcctgccagcaagaagatcgatcagaacaagctgaaacctgagatggacgagaagggcaacctgaccaccgccggctttgcctgctctcagtgtggccagcccctgttcgtgtacaagctggagcaggtgtctgagaagggcaaggcttacaccaactacttcggacggtgcaatgtggccgagcacgaaaagctgatcctgctggcccagctgaagcccgagaaggatagcgacgaagccgtgacatatagcctgggaaagtttgggcagagggccctggatttctacagcattcatgtgaccaaggagtccacccaccccgtgaagcccctggcccagatcgccggaaacagatacgcctccggacctgtgggaaaggccctgagcgacgcatgtatgggcacaatcgcctccttcctgtctaagtaccaggacatcatcatcgaacaccagaaggtggtgaagggcaaccagaagagactggagagcctgcgggagctggccggcaaggaaaacctggaataccctagcgtgaccctgccacctcagcctcacaccaaggagggcgttgatgcctacaacgaagtgatcgcccgggtgcgaatgtgggtgaacctgaacctgtggcagaagctgaagctaagcagagatgatgccaagcctctgctgagactgaagggattcccttcctttcctctggtcgagagacaggccaacgaagtggactggtgggacatggtgtgtaacgtgaagaagctgatcaacgagaaaaaggaggatggcaaggtgttttggcagaatctggctggctacaagagacaggaagccctgagaccatacctgagcagcgaggaagatcggaagaagggaaagaaattcgctcggtaccagctgggcgacctgctgctgcacctggaaaagaagcacggcgaggactggggaaaggtgtacgacgaggcctgggagcggattgacaagaaagtggaaggcctgagcaagcacatcaagctggaagaggaacggagaagcgaggacgcccagagcaaggccgccctgaccgactggctgcgggctaaggccagcttcgtgatcgagggcctgaaggaggccgacaaggacgagttctgcagatgcgagctgaagctgcagaagtggtacggggacctgcggggaaagcccttcgccatcgaagccgagaacagcatcctggacatcagcggcttcagcaagcagtacaactgtgccttcatctggcagaaggacggcgtgaagaagctgaacctgtacctgatcatcaactacttcaagggcggcaagctgcggttcaagaagatcaaacctgaagccttcgaagccaacagattctacaccgtgatcaacaaaaagagcggcgagatcgtgcccatggaggtgaacttcaacttcgacgaccccaacctgatcatcctgcctctggcctttggcaagagacagggcagagaattcatctggaacgacctgctgtccctggaaaccggcagcctgaagctggccaacggaagagtgatcgagaagacactgtacaacagaagaacccggcaggatgagcctgccctgttcgtggccctgaccttcgagcggcgggaggtcctggactcctccaatatcaaaccaatgaacctgatcggcgtggcaagaggcgaaaacatccccgccgtgatcgccctgaccgaccccgagggctgcccactgagccggtttaaggatagcctgggaaacccaacccacatcctgagaatcggcgagagctataaggagaagcagcggaccatccaggccaagaaggaggtggagcagcggagagccggcggctacagccggaagtacgccagcaaagccaagaatctggcagacgatatggtgagaaacaccgctagagatctgctgtactacgccgtgacccaggatgccatgctgatcttcgccaacctgagccggggcttcggccggcagggcaagcggaccttcatggccgagagacagtacacacggatggaggactggctgaccgccaagctggcctacgagggcctgagcaagacctacctgtccaagacactggcccagtacacctccaagacatgcagcaactgtgggtttaccatcaccagcgccgactacgacagggtgctggagaagctgaagaagacagcaacaggctggatgaccacaattaacggcaaggagctgaaggtggagggccagattacctactacaacagatacaagagacagaacgtagtcaaggacctgtccgtcgagctggatagactgagcgaagaatctgtgaacaacgacatctcctcctggacaaagggcagaagcggagaagctctgagcctcctgaagaaaagattctcccatagacccgtgcaggagaagttcgtgtgcctgaactgcggcttcgagacacacgcagccgagcaagccgccctgaacatcgccagatcctggctgttcctgcggagccaggagtacaagaaataccagacaaacaagacaaccggcaacaccgataagagagccttcgtcgagacctggcagtccttttaccggaagaagcttaaggaggtgtggaaacctgccgtgcggtctggcggatctggcggaggctccaccagccccaagaaaaagagaaaagtctaagctgccttctgcggggcttgccttctggccatgcccttcttctctcccttgcacctgtacctcttggtctttgaataaagcctgagtaggaaggctagcaaaaaaaaaaaaaaaaaaaaaaaaaaaaaaaaaaaaaaaaaaaaaaaaaaaaaaaaaaaaaaaaaaaaaaaaaaaaaaaa

SEQ ID NO: 9973 - RNA, 8787 nt, synthetic construct
  source 1..8787: mol_type = other RNA
aggaaataagagagaaaagaagagtaagaagaaatataagagccaccatggcccctaagaagaagcgtaaagtgagccggatgaaccacgaccaggagttcgacccccctaaggtgtaccctcccgtccccgccgagaagagaaagcccatccgggtcctgagcctgttcgatggcatcgccaccggtctgctggtgctgaaggacctgggcatccaggtggataggtacattgcctccgaggtgtgcgaggactccatcaccgtgggaatggtgcgtcatcagggcaagatcatgtacgtgggcgacgtgcggagcgtgacacagaagcatatccaggagtggggccctttcgacctggtgatcggcggcagcccttgcaatgacctgagcatcgtgaacccagcccggaagggcctgtacgagggaaccggcagactgttcttcgagttttacagactgctgcacgacgcccggcctaaggaaggcgacgaccggcccttcttttggctgttcgagaatgtggtggccatgggagtcagcgacaagcgggatattagccggttcctggagagcaaccccgtgatgatcgatgccaaggaagtgagcgccgcccaccgggccagatacttctggggcaatctgcctggcatgaacagacccctggccagcaccgtgaacgacaagctggagctgcaggagtgcctggagcacggccggatcgccaagttcagcaaggtgagaaccatcaccacccgaagcaacagcatcaaacaaggcaaggaccagcactttcctgtgttcatgaacgagaaggaggacatcctgtggtgtaccgagatggagagagtgttcgggttcccagtccactacacagatgtcagcaacatgtctagactggccagacagagactgctgggaagaagctggtccgtccctgtgatcagacacctgttcgcccctctgaaggagtacttcgcctgcgtgagcagcggcaacagcaacgccaacagccggggccccagcttctctagcggcctggtgccactgtccctgagagggagccacatgggccccatggagatctacaaaaccgtgagcgcctggaagcggcagcctgtgcgcgtgctgagcctgtttcggaatatcgataaagtcctgaaaagcctgggattcctggagagcggctctggctccggcggtggcaccctgaagtacgtggaggatgtgacaaacgtggtcagacgggatgtggagaagtggggccccttcgatctggtgtacggcagcacccaacccctgggcagctcttgtgaccggtgccctggctggtacatgtttcagttccaccggatcctgcagtacgccctgccgagacaggagtcccagcggccattcttttggattttcatggacaacttgctgctgaccgaggatgaccaggaaactaccactcggttcctgcagaccgaagccgtgaccctgcaggacgtgagaggccgggactaccagaacgccatgcgggtgtggtccaacatccctggactgaaaagcaagcacgcacctctgacccctaaagaagaggagtacctgcaggcccaggtgcggagcagaagcaagctggacgcccctaaggtggatctgctggtgaagaattgcctcctgcccctgagagagtacttcaagtatttcagccagaatagtctgcccctgggaggcagcggcggcggccaggtgcccgtgaccttcgaggacatcgccgtgtacttcagccaggaggagtgggaggacctggaggagcagcagagggagctgtacaaggacgtgatgaaggagaactacgagaccctgagcagcctgggcaccggcccccccgccgtgacccccgacatcatcagccacatcgagaggggcgaggagccctacatcaggttcgagagcggccccgaggagagggagatcggcaagagcagcggcggcccaagcagcggcgcccctcctcccagcggcggcaggcggcccaagcagcggcgcccctcctcccagcggcggcagcccagccggctccccaacctctaccgaggagggcacctctgagtccgccacccccgagagcggccctggcacctccaccgagcccagcgagggcagcgcacccggcagccctgccggcagccccacctccacagaggagggaaccagcaccgagcccagcgaaggcagcgccccaggcaccagcaccgagcctagtgagcaggagattaaacggatcaacaagatcagaagaagacttgtgaaagacagcaacaccaagaaggccggcaagacaggccccatgaaaaccctgctggttagagtgatgacacccgatctgagagagcggctggaaaacctgagaaagaagcctgaaaatatcccccagcccatcagcaatacatctagagccaacctgaataagctgctgaccgattacaccgaaatgaagaaggcgatcctgcatgtgtactgggaagagttccagaaggaccctgtgggcctgatgagccgggtggcccagcctgccagcaagaagatcgatcagaacaagctgaaacctgagatggacgagaagggcaacctgaccaccgccggctttgcctgctctcagtgtggccagcccctgttcgtgtacaagctggagcaggtgtctgagaagggcaaggcttacaccaactacttcggacggtgcaatgtggccgagcacgaaaagctgatcctgctggcccagctgaagcccgagaaggatagcgacgaagccgtgacatatagcctgggaaagtttgggcagagggccctggatttctacagcattcatgtgaccaaggagtccacccaccccgtgaagcccctggcccagatcgccggaaacagatacgcctccggacctgtgggaaaggccctgagcgacgcatgtatgggcacaatcgcctccttcctgtctaagtaccaggacatcatcatcgaacaccagaaggtggtgaagggcaaccagaagagactggagagcctgcgggagctggccggcaaggaaaacctggaataccctagcgtgaccctgccacctcagcctcacaccaaggagggcgttgatgcctacaacgaagtgatcgcccgggtgcgaatgtgggtgaacctgaacctgtggcagaagctgaagctaagcagagatgatgccaagcctctgctgagactgaagggattcccttcctttcctctggtcgagagacaggccaacgaagtggactggtgggacatggtgtgtaacgtgaagaagctgatcaacgagaaaaaggaggatggcaaggtgttttggcagaatctggctggctacaagagacaggaagccctgagaccatacctgagcagcgaggaagatcggaagaagggaaagaaattcgctcggtaccagctgggcgacctgctgctgcacctggaaaagaagcacggcgaggactggggaaaggtgtacgacgaggcctgggagcggattgacaagaaagtggaaggcctgagcaagcacatcaagctggaagaggaacggagaagcgaggacgcccagagcaaggccgccctgaccgactggctgcgggctaaggccagcttcgtgatcgagggcctgaaggaggccgacaaggacgagttctgcagatgcgagctgaagctgcagaagtggtacggggacctgcggggaaagcccttcgccatcgaagccgagaacagcatcctggacatcagcggcttcagcaagcagtacaactgtgccttcatctggcagaaggacggcgtgaagaagctgaacctgtacctgatcatcaactacttcaagggcggcaagctgcggttcaagaagatcaaacctgaagccttcgaagccaacagattctacaccgtgatcaacaaaaagagcggcgagatcgtgcccatggaggtgaacttcaacttcgacgaccccaacctgatcatcctgcctctggcctttggcaagagacagggcagagaattcatctggaacgacctgctgtccctggaaaccggcagcctgaagctggccaacggaagagtgatcgagaagacactgtacaacagaagaacccggcaggatgagcctgccctgttcgtggccctgaccttcgagcggcgggaggtcctggactcctccaatatcaaaccaatgaacctgatcggcgtggcaagaggcgaaaacatccccgccgtgatcgccctgaccgaccccgagggctgcccactgagccggtttaaggatagcctgggaaacccaacccacatcctgagaatcggcgagagctataaggagaagcagcggaccatccaggccaagaaggaggtggagcagcggagagccggcggctacagccggaagtacgccagcaaagccaagaatctggcagacgatatggtgagaaacaccgctagagatctgctgtactacgccgtgacccaggatgccatgctgatcttcgccaacctgagccggggcttcggccggcagggcaagcggaccttcatggccgagagacagtacacacggatggaggactggctgaccgccaagctggcctacgagggcctgagcaagacctacctgtccaagacactggcccagtacacctccaagacatgcagcaactgtgggtttaccatcaccagcgccgactacgacagggtgctggagaagctgaagaagacagcaacaggctggatgaccacaattaacggcaaggagctgaaggtggagggccagattacctactacaacagatacaagagacagaacgtagtcaaggacctgtccgtcgagctggatagactgagcgaagaatctgtgaacaacgacatctcctcctggacaaagggcagaagcggagaagctctgagcctcctgaagaaaagattctcccatagacccgtgcaggagaagttcgtgtgcctgaactgcggcttcgagacacacgcagccgagcaagccgccctgaacatcgccagatcctggctgttcctgcggagccaggagtacaagaaataccagacaaacaagacaaccggcaacaccgataagagagccttcgtcgagacctggcagtccttttaccggaagaagcttaaggaggtgtggaaacctgccgtgcggtctggcggatctggcggaggctccaccagccccaagaaaaagagaaaagtctaagctgccttctgcggggcttgccttctggccatgcccttcttctctcccttgcacctgtacctcttggtctttgaataaagcctgagtaggaaggctagcaaaaaaaaaaaaaaaaaaaaaaaaaaaaaaaaaaaaaaaaaaaaaaaaaaaaaaaaaaaaaaaaaaaaaaaaaaaaaaaagcccagccggctccccaacctctaccgaggagggcacctctgagtccgccacccccgagagcggccctggcacctccaccgagcccagcgagggcagcgcacccggcagccctgccggcagccccacctccacagaggagggaaccagcaccgagcccagcgaaggcagcgccccaggcaccagcaccgagcctagtgagcaggagattaaacggatcaacaagatcagaagaagacttgtgaaagacagcaacaccaagaaggccggcaagacaggccccatgaaaaccctgctggttagagtgatgacacccgatctgagagagcggctggaaaacctgagaaagaagcctgaaaatatcccccagcccatcagcaatacatctagagccaacctgaataagctgctgaccgattacaccgaaatgaagaaggcgatcctgcatgtgtactgggaagagttccagaaggaccctgtgggcctgatgagccgggtggcccagcctgccagcaagaagatcgatcagaacaagctgaaacctgagatggacgagaagggcaacctgaccaccgccggctttgcctgctctcagtgtggccagcccctgttcgtgtacaagctggagcaggtgtctgagaagggcaaggcttacaccaactacttcggacggtgcaatgtggccgagcacgaaaagctgatcctgctggcccagctgaagcccgagaaggatagcgacgaagccgtgacatatagcctgggaaagtttgggcagagggccctggatttctacagcattcatgtgaccaaggagtccacccaccccgtgaagcccctggcccagatcgccggaaacagatacgcctccggacctgtgggaaaggccctgagcgacgcatgtatgggcacaatcgcctccttcctgtctaagtaccaggacatcatcatcgaacaccagaaggtggtgaagggcaaccagaagagactggagagcctgcgggagctggccggcaaggaaaacctggaataccctagcgtgaccctgccacctcagcctcacaccaaggagggcgttgatgcctacaacgaagtgatcgcccgggtgcgaatgtgggtgaacctgaacctgtggcagaagctgaagctaagcagagatgatgccaagcctctgctgagactgaagggattcccttcctttcctctggtcgagagacaggccaacgaagtggactggtgggacatggtgtgtaacgtgaagaagctgatcaacgagaaaaaggaggatggcaaggtgttttggcagaatctggctggctacaagagacaggaagccctgagaccatacctgagcagcgaggaagatcggaagaagggaaagaaattcgctcggtaccagctgggcgacctgctgctgcacctggaaaagaagcacggcgaggactggggaaaggtgtacgacgaggcctgggagcggattgacaagaaagtggaaggcctgagcaagcacatcaagctggaagaggaacggagaagcgaggacgcccagagcaaggccgccctgaccgactggctgcgggctaaggccagcttcgtgatcgagggcctgaaggaggccgacaaggacgagttctgcagatgcgagctgaagctgcagaagtggtacggggacctgcggggaaagcccttcgccatcgaagccgagaacagcatcctggacatcagcggcttcagcaagcagtacaactgtgccttcatctggcagaaggacggcgtgaagaagctgaacctgtacctgatcatcaactacttcaagggcggcaagctgcggttcaagaagatcaaacctgaagccttcgaagccaacagattctacaccgtgatcaacaaaaagagcggcgagatcgtgcccatggaggtgaacttcaacttcgacgaccccaacctgatcatcctgcctctggcctttggcaagagacagggcagagaattcatctggaacgacctgctgtccctggaaaccggcagcctgaagctggccaacggaagagtgatcgagaagacactgtacaacagaagaacccggcaggatgagcctgccctgttcgtggccctgaccttcgagcggcgggaggtcctggactcctccaatatcaaaccaatgaacctgatcggcgtggcaagaggcgaaaacatccccgccgtgatcgccctgaccgaccccgagggctgcccactgagccggtttaaggatagcctgggaaacccaacccacatcctgagaatcggcgagagctataaggagaagcagcggaccatccaggccaagaaggaggtggagcagcggagagccggcggctacagccggaagtacgccagcaaagccaagaatctggcagacgatatggtgagaaacaccgctagagatctgctgtactacgccgtgacccaggatgccatgctgatcttcgccaacctgagccggggcttcggccggcagggcaagcggaccttcatggccgagagacagtacacacggatggaggactggctgaccgccaagctggcctacgagggcctgagcaagacctacctgtccaagacactggcccagtacacctccaagacatgcagcaactgtgggtttaccatcaccagcgccgactacgacagggtgctggagaagctgaagaagacagcaacaggctggatgaccacaattaacggcaaggagctgaaggtggagggccagattacctactacaacagatacaagagacagaacgtagtcaaggacctgtccgtcgagctggatagactgagcgaagaatctgtgaacaacgacatctcctcctggacaaagggcagaagcggagaagctctgagcctcctgaagaaaagattctcccatagacccgtgcaggagaagttcgtgtgcctgaactgcggcttcgagacacacgcagccgagcaagccgccctgaacatcgccagatcctggctgttcctgcggagccaggagtacaagaaataccagacaaacaagacaaccggcaacaccgataagagagccttcgtcgagacctggcagtccttttaccggaagaagcttaaggaggtgtggaaacctgccgtgcggtctggcggatctggcggaggctccaccagccccaagaaaaagagaaaagtctaagctgccttctgcggggcttgccttctggccatgcccttcttctctcccttgcacctgtacctcttggtctttgaataaagcctgagtaggaaggctagcaaaaaaaaaaaaaaaaaaaaaaaaaaaaaaaaaaaaaaaaaaaaaaaaaaaaaaaaaaaaaaaaaaaaaaaaaaaaaaaa

SEQ ID NO: 9974 - RNA, 8787 nt, synthetic construct
  source 1..8787: mol_type = other RNA
aggaaataagagagaaaagaagagtaagaagaaatataagagccaccatggcccctaagaagaagcgtaaagtgagccggatgaaccacgaccaggagttcgacccccctaaggtgtaccctcccgtccccgccgagaagagaaagcccatccgggtcctgagcctgttcgatggcatcgccaccggtctgctggtgctgaaggacctgggcatccaggtggataggtacattgcctccgaggtgtgcgaggactccatcaccgtgggaatggtgcgtcatcagggcaagatcatgtacgtgggcgacgtgcggagcgtgacacagaagcatatccaggagtggggccctttcgacctggtgatcggcggcagcccttgcaatgacctgagcatcgtgaacccagcccggaagggcctgtacgagggaaccggcagactgttcttcgagttttacagactgctgcacgacgcccggcctaaggaaggcgacgaccggcccttcttttggctgttcgagaatgtggtggccatgggagtcagcgacaagcgggatattagccggttcctggagagcaaccccgtgatgatcgatgccaaggaagtgagcgccgcccaccgggccagatacttctggggcaatctgcctggcatgaacagacccctggccagcaccgtgaacgacaagctggagctgcaggagtgcctggagcacggccggatcgccaagttcagcaaggtgagaaccatcaccacccgaagcaacagcatcaaacaaggcaaggaccagcactttcctgtgttcatgaacgagaaggaggacatcctgtggtgtaccgagatggagagagtgttcgggttcccagtccactacacagatgtcagcaacatgtctagactggccagacagagactgctgggaagaagctggtccgtccctgtgatcagacacctgttcgcccctctgaaggagtacttcgcctgcgtgagcagcggcaacagcaacgccaacagccggggccccagcttctctagcggcctggtgccactgtccctgagagggagccacatgggccccatggagatctacaaaaccgtgagcgcctggaagcggcagcctgtgcgcgtgctgagcctgtttcggaatatcgataaagtcctgaaaagcctgggattcctggagagcggctctggctccggcggtggcaccctgaagtacgtggaggatgtgacaaacgtggtcagacgggatgtggagaagtggggccccttcgatctggtgtacggcagcacccaacccctgggcagctcttgtgaccggtgccctggctggtacatgtttcagttccaccggatcctgcagtacgccctgccgagacaggagtcccagcggccattcttttggattttcatggacaacttgctgctgaccgaggatgaccaggaaactaccactcggttcctgcagaccgaagccgtgaccctgcaggacgtgagaggccgggactaccagaacgccatgcgggtgtggtccaacatccctggactgaaaagcaagcacgcacctctgacccctaaagaagaggagtacctgcaggcccaggtgcggagcagaagcaagctggacgcccctaaggtggatctgctggtgaagaattgcctcctgcccctgagagagtacttcaagtatttcagccagaatagtctgcccctgggaggcagcggcggcggcgaggagcccgtgagcttcgccgaggtggccgtgtacttcagcagggaggagtgggccctgctggaccccgcccagagggccctgtacagggacgtgatgctggagacctaccagtgcgtggccagcatggagagcctgctgcccgcccccaagcccatcgtgatcagcctgctggagggcggcgaggacctgtggatccccgacatgcagagccccgaggacgtggccggcgacctgaggcccggcggcccaagcagcggcgcccctcctcccagcggcggcaggcggcccaagcagcggcgcccctcctcccagcggcggcagcccagccggctccccaacctctaccgaggagggcacctctgagtccgccacccccgagagcggccctggcacctccaccgagcccagcgagggcagcgcacccggcagccctgccggcagccccacctccacagaggagggaaccagcaccgagcccagcgaaggcagcgccccaggcaccagcaccgagcctagtgagcaggagattaaacggatcaacaagatcagaagaagacttgtgaaagacagcaacaccaagaaggccggcaagacaggccccatgaaaaccctgctggttagagtgatgacacccgatctgagagagcggctggaaaacctgagaaagaagcctgaaaatatcccccagcccatcagcaatacatctagagccaacctgaataagctgctgaccgattacaccgaaatgaagaaggcgatcctgcatgtgtactgggaagagttccagaaggaccctgtgggcctgatgagccgggtggcccagcctgccagcaagaagatcgatcagaacaagctgaaacctgagatggacgagaagggcaacctgaccaccgccggctttgcctgctctcagtgtggccagcccctgttcgtgtacaagctggagcaggtgtctgagaagggcaaggcttacaccaactacttcggacggtgcaatgtggccgagcacgaaaagctgatcctgctggcccagctgaagcccgagaaggatagcgacgaagccgtgacatatagcctgggaaagtttgggcagagggccctggatttctacagcattcatgtgaccaaggagtccacccaccccgtgaagcccctggcccagatcgccggaaacagatacgcctccggacctgtgggaaaggccctgagcgacgcatgtatgggcacaatcgcctccttcctgtctaagtaccaggacatcatcatcgaacaccagaaggtggtgaagggcaaccagaagagactggagagcctgcgggagctggccggcaaggaaaacctggaataccctagcgtgaccctgccacctcagcctcacaccaaggagggcgttgatgcctacaacgaagtgatcgcccgggtgcgaatgtgggtgaacctgaacctgtggcagaagctgaagctaagcagagatgatgccaagcctctgctgagactgaagggattcccttcctttcctctggtcgagagacaggccaacgaagtggactggtgggacatggtgtgtaacgtgaagaagctgatcaacgagaaaaaggaggatggcaaggtgttttggcagaatctggctggctacaagagacaggaagccctgagaccatacctgagcagcgaggaagatcggaagaagggaaagaaattcgctcggtaccagctgggcgacctgctgctgcacctggaaaagaagcacggcgaggactggggaaaggtgtacgacgaggcctgggagcggattgacaagaaagtggaaggcctgagcaagcacatcaagctggaagaggaacggagaagcgaggacgcccagagcaaggccgccctgaccgactggctgcgggctaaggccagcttcgtgatcgagggcctgaaggaggccgacaaggacgagttctgcagatgcgagctgaagctgcagaagtggtacggggacctgcggggaaagcccttcgccatcgaagccgagaacagcatcctggacatcagcggcttcagcaagcagtacaactgtgccttcatctggcagaaggacggcgtgaagaagctgaacctgtacctgatcatcaactacttcaagggcggcaagctgcggttcaagaagatcaaacctgaagccttcgaagccaacagattctacaccgtgatcaacaaaaagagcggcgagatcgtgcccatggaggtgaacttcaacttcgacgaccccaacctgatcatcctgcctctggcctttggcaagagacagggcagagaattcatctggaacgacctgctgtccctggaaaccggcagcctgaagctggccaacggaagagtgatcgagaagacactgtacaacagaagaacccggcaggatgagcctgccctgttcgtggccctgaccttcgagcggcgggaggtcctggactcctccaatatcaaaccaatgaacctgatcggcgtggcaagaggcgaaaacatccccgccgtgatcgccctgaccgaccccgagggctgcccactgagccggtttaaggatagcctgggaaacccaacccacatcctgagaatcggcgagagctataaggagaagcagcggaccatccaggccaagaaggaggtggagcagcggagagccggcggctacagccggaagtacgccagcaaagccaagaatctggcagacgatatggtgagaaacaccgctagagatctgctgtactacgccgtgacccaggatgccatgctgatcttcgccaacctgagccggggcttcggccggcagggcaagcggaccttcatggccgagagacagtacacacggatggaggactggctgaccgccaagctggcctacgagggcctgagcaagacctacctgtccaagacactggcccagtacacctccaagacatgcagcaactgtgggtttaccatcaccagcgccgactacgacagggtgctggagaagctgaagaagacagcaacaggctggatgaccacaattaacggcaaggagctgaaggtggagggccagattacctactacaacagatacaagagacagaacgtagtcaaggacctgtccgtcgagctggatagactgagcgaagaatctgtgaacaacgacatctcctcctggacaaagggcagaagcggagaagctctgagcctcctgaagaaaagattctcccatagacccgtgcaggagaagttcgtgtgcctgaactgcggcttcgagacacacgcagccgagcaagccgccctgaacatcgccagatcctggctgttcctgcggagccaggagtacaagaaataccagacaaacaagacaaccggcaacaccgataagagagccttcgtcgagacctggcagtccttttaccggaagaagcttaaggaggtgtggaaacctgccgtgcggtctggcggatctggcggaggctccaccagccccaagaaaaagagaaaagtctaagctgccttctgcggggcttgccttctggccatgcccttcttctctcccttgcacctgtacctcttggtctttgaataaagcctgagtaggaaggctagcaaaaaaaaaaaaaaaaaaaaaaaaaaaaaaaaaaaaaaaaaaaaaaaaaaaaaaaaaaaaaaaaaaaaaaaaaaaaaaaagcccagccggctccccaacctctaccgaggagggcacctctgagtccgccacccccgagagcggccctggcacctccaccgagcccagcgagggcagcgcacccggcagccctgccggcagccccacctccacagaggagggaaccagcaccgagcccagcgaaggcagcgccccaggcaccagcaccgagcctagtgagcaggagattaaacggatcaacaagatcagaagaagacttgtgaaagacagcaacaccaagaaggccggcaagacaggccccatgaaaaccctgctggttagagtgatgacacccgatctgagagagcggctggaaaacctgagaaagaagcctgaaaatatcccccagcccatcagcaatacatctagagccaacctgaataagctgctgaccgattacaccgaaatgaagaaggcgatcctgcatgtgtactgggaagagttccagaaggaccctgtgggcctgatgagccgggtggcccagcctgccagcaagaagatcgatcagaacaagctgaaacctgagatggacgagaagggcaacctgaccaccgccggctttgcctgctctcagtgtggccagcccctgttcgtgtacaagctggagcaggtgtctgagaagggcaaggcttacaccaactacttcggacggtgcaatgtggccgagcacgaaaagctgatcctgctggcccagctgaagcccgagaaggatagcgacgaagccgtgacatatagcctgggaaagtttgggcagagggccctggatttctacagcattcatgtgaccaaggagtccacccaccccgtgaagcccctggcccagatcgccggaaacagatacgcctccggacctgtgggaaaggccctgagcgacgcatgtatgggcacaatcgcctccttcctgtctaagtaccaggacatcatcatcgaacaccagaaggtggtgaagggcaaccagaagagactggagagcctgcgggagctggccggcaaggaaaacctggaataccctagcgtgaccctgccacctcagcctcacaccaaggagggcgttgatgcctacaacgaagtgatcgcccgggtgcgaatgtgggtgaacctgaacctgtggcagaagctgaagctaagcagagatgatgccaagcctctgctgagactgaagggattcccttcctttcctctggtcgagagacaggccaacgaagtggactggtgggacatggtgtgtaacgtgaagaagctgatcaacgagaaaaaggaggatggcaaggtgttttggcagaatctggctggctacaagagacaggaagccctgagaccatacctgagcagcgaggaagatcggaagaagggaaagaaattcgctcggtaccagctgggcgacctgctgctgcacctggaaaagaagcacggcgaggactggggaaaggtgtacgacgaggcctgggagcggattgacaagaaagtggaaggcctgagcaagcacatcaagctggaagaggaacggagaagcgaggacgcccagagcaaggccgccctgaccgactggctgcgggctaaggccagcttcgtgatcgagggcctgaaggaggccgacaaggacgagttctgcagatgcgagctgaagctgcagaagtggtacggggacctgcggggaaagcccttcgccatcgaagccgagaacagcatcctggacatcagcggcttcagcaagcagtacaactgtgccttcatctggcagaaggacggcgtgaagaagctgaacctgtacctgatcatcaactacttcaagggcggcaagctgcggttcaagaagatcaaacctgaagccttcgaagccaacagattctacaccgtgatcaacaaaaagagcggcgagatcgtgcccatggaggtgaacttcaacttcgacgaccccaacctgatcatcctgcctctggcctttggcaagagacagggcagagaattcatctggaacgacctgctgtccctggaaaccggcagcctgaagctggccaacggaagagtgatcgagaagacactgtacaacagaagaacccggcaggatgagcctgccctgttcgtggccctgaccttcgagcggcgggaggtcctggactcctccaatatcaaaccaatgaacctgatcggcgtggcaagaggcgaaaacatccccgccgtgatcgccctgaccgaccccgagggctgcccactgagccggtttaaggatagcctgggaaacccaacccacatcctgagaatcggcgagagctataaggagaagcagcggaccatccaggccaagaaggaggtggagcagcggagagccggcggctacagccggaagtacgccagcaaagccaagaatctggcagacgatatggtgagaaacaccgctagagatctgctgtactacgccgtgacccaggatgccatgctgatcttcgccaacctgagccggggcttcggccggcagggcaagcggaccttcatggccgagagacagtacacacggatggaggactggctgaccgccaagctggcctacgagggcctgagcaagacctacctgtccaagacactggcccagtacacctccaagacatgcagcaactgtgggtttaccatcaccagcgccgactacgacagggtgctggagaagctgaagaagacagcaacaggctggatgaccacaattaacggcaaggagctgaaggtggagggccagattacctactacaacagatacaagagacagaacgtagtcaaggacctgtccgtcgagctggatagactgagcgaagaatctgtgaacaacgacatctcctcctggacaaagggcagaagcggagaagctctgagcctcctgaagaaaagattctcccatagacccgtgcaggagaagttcgtgtgcctgaactgcggcttcgagacacacgcagccgagcaagccgccctgaacatcgccagatcctggctgttcctgcggagccaggagtacaagaaataccagacaaacaagacaaccggcaacaccgataagagagccttcgtcgagacctggcagtccttttaccggaagaagcttaaggaggtgtggaaacctgccgtgcggtctggcggatctggcggaggctccaccagccccaagaaaaagagaaaagtctaagctgccttctgcggggcttgccttctggccatgcccttcttctctcccttgcacctgtacctcttggtctttgaataaagcctgagtaggaaggctagcaaaaaaaaaaaaaaaaaaaaaaaaaaaaaaaaaaaaaaaaaaaaaaaaaaaaaaaaaaaaaaaaaaaaaaaaaaaaaaaa

SEQ ID NO: 9975 - RNA, 8787 nt, synthetic construct
  source 1..8787: mol_type = other RNA
aggaaataagagagaaaagaagagtaagaagaaatataagagccaccatggcccctaagaagaagcgtaaagtgagccggatgaaccacgaccaggagttcgacccccctaaggtgtaccctcccgtccccgccgagaagagaaagcccatccgggtcctgagcctgttcgatggcatcgccaccggtctgctggtgctgaaggacctgggcatccaggtggataggtacattgcctccgaggtgtgcgaggactccatcaccgtgggaatggtgcgtcatcagggcaagatcatgtacgtgggcgacgtgcggagcgtgacacagaagcatatccaggagtggggccctttcgacctggtgatcggcggcagcccttgcaatgacctgagcatcgtgaacccagcccggaagggcctgtacgagggaaccggcagactgttcttcgagttttacagactgctgcacgacgcccggcctaaggaaggcgacgaccggcccttcttttggctgttcgagaatgtggtggccatgggagtcagcgacaagcgggatattagccggttcctggagagcaaccccgtgatgatcgatgccaaggaagtgagcgccgcccaccgggccagatacttctggggcaatctgcctggcatgaacagacccctggccagcaccgtgaacgacaagctggagctgcaggagtgcctggagcacggccggatcgccaagttcagcaaggtgagaaccatcaccacccgaagcaacagcatcaaacaaggcaaggaccagcactttcctgtgttcatgaacgagaaggaggacatcctgtggtgtaccgagatggagagagtgttcgggttcccagtccactacacagatgtcagcaacatgtctagactggccagacagagactgctgggaagaagctggtccgtccctgtgatcagacacctgttcgcccctctgaaggagtacttcgcctgcgtgagcagcggcaacagcaacgccaacagccggggccccagcttctctagcggcctggtgccactgtccctgagagggagccacatgggccccatggagatctacaaaaccgtgagcgcctggaagcggcagcctgtgcgcgtgctgagcctgtttcggaatatcgataaagtcctgaaaagcctgggattcctggagagcggctctggctccggcggtggcaccctgaagtacgtggaggatgtgacaaacgtggtcagacgggatgtggagaagtggggccccttcgatctggtgtacggcagcacccaacccctgggcagctcttgtgaccggtgccctggctggtacatgtttcagttccaccggatcctgcagtacgccctgccgagacaggagtcccagcggccattcttttggattttcatggacaacttgctgctgaccgaggatgaccaggaaactaccactcggttcctgcagaccgaagccgtgaccctgcaggacgtgagaggccgggactaccagaacgccatgcgggtgtggtccaacatccctggactgaaaagcaagcacgcacctctgacccctaaagaagaggagtacctgcaggcccaggtgcggagcagaagcaagctggacgcccctaaggtggatctgctggtgaagaattgcctcctgcccctgagagagtacttcaagtatttcagccagaatagtctgcccctgggaggcagcggcggcggcatgagcctgggcagcgagctgttcagggacgtggccatcgtgttcagccaggaggagtggcagtggctggcccccgcccagagggacctgtacagggacgtgatgctggagacctacagcaacctggtgagcctgggcctggccgtgagcaagcccgacgtgatcagcttcctggagcagggcaaggagccctggatggtggagagggtggtgagcggcggcctgtgccccgtgctggagagcggcggcccaagcagcggcgcccctcctcccagcggcggcaggcggcccaagcagcggcgcccctcctcccagcggcggcagcccagccggctccccaacctctaccgaggagggcacctctgagtccgccacccccgagagcggccctggcacctccaccgagcccagcgagggcagcgcacccggcagccctgccggcagccccacctccacagaggagggaaccagcaccgagcccagcgaaggcagcgccccaggcaccagcaccgagcctagtgagcaggagattaaacggatcaacaagatcagaagaagacttgtgaaagacagcaacaccaagaaggccggcaagacaggccccatgaaaaccctgctggttagagtgatgacacccgatctgagagagcggctggaaaacctgagaaagaagcctgaaaatatcccccagcccatcagcaatacatctagagccaacctgaataagctgctgaccgattacaccgaaatgaagaaggcgatcctgcatgtgtactgggaagagttccagaaggaccctgtgggcctgatgagccgggtggcccagcctgccagcaagaagatcgatcagaacaagctgaaacctgagatggacgagaagggcaacctgaccaccgccggctttgcctgctctcagtgtggccagcccctgttcgtgtacaagctggagcaggtgtctgagaagggcaaggcttacaccaactacttcggacggtgcaatgtggccgagcacgaaaagctgatcctgctggcccagctgaagcccgagaaggatagcgacgaagccgtgacatatagcctgggaaagtttgggcagagggccctggatttctacagcattcatgtgaccaaggagtccacccaccccgtgaagcccctggcccagatcgccggaaacagatacgcctccggacctgtgggaaaggccctgagcgacgcatgtatgggcacaatcgcctccttcctgtctaagtaccaggacatcatcatcgaacaccagaaggtggtgaagggcaaccagaagagactggagagcctgcgggagctggccggcaaggaaaacctggaataccctagcgtgaccctgccacctcagcctcacaccaaggagggcgttgatgcctacaacgaagtgatcgcccgggtgcgaatgtgggtgaacctgaacctgtggcagaagctgaagctaagcagagatgatgccaagcctctgctgagactgaagggattcccttcctttcctctggtcgagagacaggccaacgaagtggactggtgggacatggtgtgtaacgtgaagaagctgatcaacgagaaaaaggaggatggcaaggtgttttggcagaatctggctggctacaagagacaggaagccctgagaccatacctgagcagcgaggaagatcggaagaagggaaagaaattcgctcggtaccagctgggcgacctgctgctgcacctggaaaagaagcacggcgaggactggggaaaggtgtacgacgaggcctgggagcggattgacaagaaagtggaaggcctgagcaagcacatcaagctggaagaggaacggagaagcgaggacgcccagagcaaggccgccctgaccgactggctgcgggctaaggccagcttcgtgatcgagggcctgaaggaggccgacaaggacgagttctgcagatgcgagctgaagctgcagaagtggtacggggacctgcggggaaagcccttcgccatcgaagccgagaacagcatcctggacatcagcggcttcagcaagcagtacaactgtgccttcatctggcagaaggacggcgtgaagaagctgaacctgtacctgatcatcaactacttcaagggcggcaagctgcggttcaagaagatcaaacctgaagccttcgaagccaacagattctacaccgtgatcaacaaaaagagcggcgagatcgtgcccatggaggtgaacttcaacttcgacgaccccaacctgatcatcctgcctctggcctttggcaagagacagggcagagaattcatctggaacgacctgctgtccctggaaaccggcagcctgaagctggccaacggaagagtgatcgagaagacactgtacaacagaagaacccggcaggatgagcctgccctgttcgtggccctgaccttcgagcggcgggaggtcctggactcctccaatatcaaaccaatgaacctgatcggcgtggcaagaggcgaaaacatccccgccgtgatcgccctgaccgaccccgagggctgcccactgagccggtttaaggatagcctgggaaacccaacccacatcctgagaatcggcgagagctataaggagaagcagcggaccatccaggccaagaaggaggtggagcagcggagagccggcggctacagccggaagtacgccagcaaagccaagaatctggcagacgatatggtgagaaacaccgctagagatctgctgtactacgccgtgacccaggatgccatgctgatcttcgccaacctgagccggggcttcggccggcagggcaagcggaccttcatggccgagagacagtacacacggatggaggactggctgaccgccaagctggcctacgagggcctgagcaagacctacctgtccaagacactggcccagtacacctccaagacatgcagcaactgtgggtttaccatcaccagcgccgactacgacagggtgctggagaagctgaagaagacagcaacaggctggatgaccacaattaacggcaaggagctgaaggtggagggccagattacctactacaacagatacaagagacagaacgtagtcaaggacctgtccgtcgagctggatagactgagcgaagaatctgtgaacaacgacatctcctcctggacaaagggcagaagcggagaagctctgagcctcctgaagaaaagattctcccatagacccgtgcaggagaagttcgtgtgcctgaactgcggcttcgagacacacgcagccgagcaagccgccctgaacatcgccagatcctggctgttcctgcggagccaggagtacaagaaataccagacaaacaagacaaccggcaacaccgataagagagccttcgtcgagacctggcagtccttttaccggaagaagcttaaggaggtgtggaaacctgccgtgcggtctggcggatctggcggaggctccaccagccccaagaaaaagagaaaagtctaagctgccttctgcggggcttgccttctggccatgcccttcttctctcccttgcacctgtacctcttggtctttgaataaagcctgagtaggaaggctagcaaaaaaaaaaaaaaaaaaaaaaaaaaaaaaaaaaaaaaaaaaaaaaaaaaaaaaaaaaaaaaaaaaaaaaaaaaaaaaaagcccagccggctccccaacctctaccgaggagggcacctctgagtccgccacccccgagagcggccctggcacctccaccgagcccagcgagggcagcgcacccggcagccctgccggcagccccacctccacagaggagggaaccagcaccgagcccagcgaaggcagcgccccaggcaccagcaccgagcctagtgagcaggagattaaacggatcaacaagatcagaagaagacttgtgaaagacagcaacaccaagaaggccggcaagacaggccccatgaaaaccctgctggttagagtgatgacacccgatctgagagagcggctggaaaacctgagaaagaagcctgaaaatatcccccagcccatcagcaatacatctagagccaacctgaataagctgctgaccgattacaccgaaatgaagaaggcgatcctgcatgtgtactgggaagagttccagaaggaccctgtgggcctgatgagccgggtggcccagcctgccagcaagaagatcgatcagaacaagctgaaacctgagatggacgagaagggcaacctgaccaccgccggctttgcctgctctcagtgtggccagcccctgttcgtgtacaagctggagcaggtgtctgagaagggcaaggcttacaccaactacttcggacggtgcaatgtggccgagcacgaaaagctgatcctgctggcccagctgaagcccgagaaggatagcgacgaagccgtgacatatagcctgggaaagtttgggcagagggccctggatttctacagcattcatgtgaccaaggagtccacccaccccgtgaagcccctggcccagatcgccggaaacagatacgcctccggacctgtgggaaaggccctgagcgacgcatgtatgggcacaatcgcctccttcctgtctaagtaccaggacatcatcatcgaacaccagaaggtggtgaagggcaaccagaagagactggagagcctgcgggagctggccggcaaggaaaacctggaataccctagcgtgaccctgccacctcagcctcacaccaaggagggcgttgatgcctacaacgaagtgatcgcccgggtgcgaatgtgggtgaacctgaacctgtggcagaagctgaagctaagcagagatgatgccaagcctctgctgagactgaagggattcccttcctttcctctggtcgagagacaggccaacgaagtggactggtgggacatggtgtgtaacgtgaagaagctgatcaacgagaaaaaggaggatggcaaggtgttttggcagaatctggctggctacaagagacaggaagccctgagaccatacctgagcagcgaggaagatcggaagaagggaaagaaattcgctcggtaccagctgggcgacctgctgctgcacctggaaaagaagcacggcgaggactggggaaaggtgtacgacgaggcctgggagcggattgacaagaaagtggaaggcctgagcaagcacatcaagctggaagaggaacggagaagcgaggacgcccagagcaaggccgccctgaccgactggctgcgggctaaggccagcttcgtgatcgagggcctgaaggaggccgacaaggacgagttctgcagatgcgagctgaagctgcagaagtggtacggggacctgcggggaaagcccttcgccatcgaagccgagaacagcatcctggacatcagcggcttcagcaagcagtacaactgtgccttcatctggcagaaggacggcgtgaagaagctgaacctgtacctgatcatcaactacttcaagggcggcaagctgcggttcaagaagatcaaacctgaagccttcgaagccaacagattctacaccgtgatcaacaaaaagagcggcgagatcgtgcccatggaggtgaacttcaacttcgacgaccccaacctgatcatcctgcctctggcctttggcaagagacagggcagagaattcatctggaacgacctgctgtccctggaaaccggcagcctgaagctggccaacggaagagtgatcgagaagacactgtacaacagaagaacccggcaggatgagcctgccctgttcgtggccctgaccttcgagcggcgggaggtcctggactcctccaatatcaaaccaatgaacctgatcggcgtggcaagaggcgaaaacatccccgccgtgatcgccctgaccgaccccgagggctgcccactgagccggtttaaggatagcctgggaaacccaacccacatcctgagaatcggcgagagctataaggagaagcagcggaccatccaggccaagaaggaggtggagcagcggagagccggcggctacagccggaagtacgccagcaaagccaagaatctggcagacgatatggtgagaaacaccgctagagatctgctgtactacgccgtgacccaggatgccatgctgatcttcgccaacctgagccggggcttcggccggcagggcaagcggaccttcatggccgagagacagtacacacggatggaggactggctgaccgccaagctggcctacgagggcctgagcaagacctacctgtccaagacactggcccagtacacctccaagacatgcagcaactgtgggtttaccatcaccagcgccgactacgacagggtgctggagaagctgaagaagacagcaacaggctggatgaccacaattaacggcaaggagctgaaggtggagggccagattacctactacaacagatacaagagacagaacgtagtcaaggacctgtccgtcgagctggatagactgagcgaagaatctgtgaacaacgacatctcctcctggacaaagggcagaagcggagaagctctgagcctcctgaagaaaagattctcccatagacccgtgcaggagaagttcgtgtgcctgaactgcggcttcgagacacacgcagccgagcaagccgccctgaacatcgccagatcctggctgttcctgcggagccaggagtacaagaaataccagacaaacaagacaaccggcaacaccgataagagagccttcgtcgagacctggcagtccttttaccggaagaagcttaaggaggtgtggaaacctgccgtgcggtctggcggatctggcggaggctccaccagccccaagaaaaagagaaaagtctaagctgccttctgcggggcttgccttctggccatgcccttcttctctcccttgcacctgtacctcttggtctttgaataaagcctgagtaggaaggctagcaaaaaaaaaaaaaaaaaaaaaaaaaaaaaaaaaaaaaaaaaaaaaaaaaaaaaaaaaaaaaaaaaaaaaaaaaaaaaaaa

SEQ ID NO: 9976 - RNA, 8787 nt, synthetic construct
  source 1..8787: mol_type = other RNA
aggaaataagagagaaaagaagagtaagaagaaatataagagccaccatggcccctaagaagaagcgtaaagtgagccggatgaaccacgaccaggagttcgacccccctaaggtgtaccctcccgtccccgccgagaagagaaagcccatccgggtcctgagcctgttcgatggcatcgccaccggtctgctggtgctgaaggacctgggcatccaggtggataggtacattgcctccgaggtgtgcgaggactccatcaccgtgggaatggtgcgtcatcagggcaagatcatgtacgtgggcgacgtgcggagcgtgacacagaagcatatccaggagtggggccctttcgacctggtgatcggcggcagcccttgcaatgacctgagcatcgtgaacccagcccggaagggcctgtacgagggaaccggcagactgttcttcgagttttacagactgctgcacgacgcccggcctaaggaaggcgacgaccggcccttcttttggctgttcgagaatgtggtggccatgggagtcagcgacaagcgggatattagccggttcctggagagcaaccccgtgatgatcgatgccaaggaagtgagcgccgcccaccgggccagatacttctggggcaatctgcctggcatgaacagacccctggccagcaccgtgaacgacaagctggagctgcaggagtgcctggagcacggccggatcgccaagttcagcaaggtgagaaccatcaccacccgaagcaacagcatcaaacaaggcaaggaccagcactttcctgtgttcatgaacgagaaggaggacatcctgtggtgtaccgagatggagagagtgttcgggttcccagtccactacacagatgtcagcaacatgtctagactggccagacagagactgctgggaagaagctggtccgtccctgtgatcagacacctgttcgcccctctgaaggagtacttcgcctgcgtgagcagcggcaacagcaacgccaacagccggggccccagcttctctagcggcctggtgccactgtccctgagagggagccacatgggccccatggagatctacaaaaccgtgagcgcctggaagcggcagcctgtgcgcgtgctgagcctgtttcggaatatcgataaagtcctgaaaagcctgggattcctggagagcggctctggctccggcggtggcaccctgaagtacgtggaggatgtgacaaacgtggtcagacgggatgtggagaagtggggccccttcgatctggtgtacggcagcacccaacccctgggcagctcttgtgaccggtgccctggctggtacatgtttcagttccaccggatcctgcagtacgccctgccgagacaggagtcccagcggccattcttttggattttcatggacaacttgctgctgaccgaggatgaccaggaaactaccactcggttcctgcagaccgaagccgtgaccctgcaggacgtgagaggccgggactaccagaacgccatgcgggtgtggtccaacatccctggactgaaaagcaagcacgcacctctgacccctaaagaagaggagtacctgcaggcccaggtgcggagcagaagcaagctggacgcccctaaggtggatctgctggtgaagaattgcctcctgcccctgagagagtacttcaagtatttcagccagaatagtctgcccctgggaggcagcggcggcggcagccccgagagcgtggccttcgaggacgtggccgtgtacttcaccaagaaggagtgggccagcctgctgcccgcccagagggccctgtacaaggaggtgatgctggagaactacggcatggtggccagcctggcccccccccccatcagcaagcccgccctgatcagccagctggagcagggcaaggagccctggttcaccaggccccagggcgccctgaacaggagggccaggagggtggtgggcggcccaagcagcggcgcccctcctcccagcggcggcaggcggcccaagcagcggcgcccctcctcccagcggcggcagcccagccggctccccaacctctaccgaggagggcacctctgagtccgccacccccgagagcggccctggcacctccaccgagcccagcgagggcagcgcacccggcagccctgccggcagccccacctccacagaggagggaaccagcaccgagcccagcgaaggcagcgccccaggcaccagcaccgagcctagtgagcaggagattaaacggatcaacaagatcagaagaagacttgtgaaagacagcaacaccaagaaggccggcaagacaggccccatgaaaaccctgctggttagagtgatgacacccgatctgagagagcggctggaaaacctgagaaagaagcctgaaaatatcccccagcccatcagcaatacatctagagccaacctgaataagctgctgaccgattacaccgaaatgaagaaggcgatcctgcatgtgtactgggaagagttccagaaggaccctgtgggcctgatgagccgggtggcccagcctgccagcaagaagatcgatcagaacaagctgaaacctgagatggacgagaagggcaacctgaccaccgccggctttgcctgctctcagtgtggccagcccctgttcgtgtacaagctggagcaggtgtctgagaagggcaaggcttacaccaactacttcggacggtgcaatgtggccgagcacgaaaagctgatcctgctggcccagctgaagcccgagaaggatagcgacgaagccgtgacatatagcctgggaaagtttgggcagagggccctggatttctacagcattcatgtgaccaaggagtccacccaccccgtgaagcccctggcccagatcgccggaaacagatacgcctccggacctgtgggaaaggccctgagcgacgcatgtatgggcacaatcgcctccttcctgtctaagtaccaggacatcatcatcgaacaccagaaggtggtgaagggcaaccagaagagactggagagcctgcgggagctggccggcaaggaaaacctggaataccctagcgtgaccctgccacctcagcctcacaccaaggagggcgttgatgcctacaacgaagtgatcgcccgggtgcgaatgtgggtgaacctgaacctgtggcagaagctgaagctaagcagagatgatgccaagcctctgctgagactgaagggattcccttcctttcctctggtcgagagacaggccaacgaagtggactggtgggacatggtgtgtaacgtgaagaagctgatcaacgagaaaaaggaggatggcaaggtgttttggcagaatctggctggctacaagagacaggaagccctgagaccatacctgagcagcgaggaagatcggaagaagggaaagaaattcgctcggtaccagctgggcgacctgctgctgcacctggaaaagaagcacggcgaggactggggaaaggtgtacgacgaggcctgggagcggattgacaagaaagtggaaggcctgagcaagcacatcaagctggaagaggaacggagaagcgaggacgcccagagcaaggccgccctgaccgactggctgcgggctaaggccagcttcgtgatcgagggcctgaaggaggccgacaaggacgagttctgcagatgcgagctgaagctgcagaagtggtacggggacctgcggggaaagcccttcgccatcgaagccgagaacagcatcctggacatcagcggcttcagcaagcagtacaactgtgccttcatctggcagaaggacggcgtgaagaagctgaacctgtacctgatcatcaactacttcaagggcggcaagctgcggttcaagaagatcaaacctgaagccttcgaagccaacagattctacaccgtgatcaacaaaaagagcggcgagatcgtgcccatggaggtgaacttcaacttcgacgaccccaacctgatcatcctgcctctggcctttggcaagagacagggcagagaattcatctggaacgacctgctgtccctggaaaccggcagcctgaagctggccaacggaagagtgatcgagaagacactgtacaacagaagaacccggcaggatgagcctgccctgttcgtggccctgaccttcgagcggcgggaggtcctggactcctccaatatcaaaccaatgaacctgatcggcgtggcaagaggcgaaaacatccccgccgtgatcgccctgaccgaccccgagggctgcccactgagccggtttaaggatagcctgggaaacccaacccacatcctgagaatcggcgagagctataaggagaagcagcggaccatccaggccaagaaggaggtggagcagcggagagccggcggctacagccggaagtacgccagcaaagccaagaatctggcagacgatatggtgagaaacaccgctagagatctgctgtactacgccgtgacccaggatgccatgctgatcttcgccaacctgagccggggcttcggccggcagggcaagcggaccttcatggccgagagacagtacacacggatggaggactggctgaccgccaagctggcctacgagggcctgagcaagacctacctgtccaagacactggcccagtacacctccaagacatgcagcaactgtgggtttaccatcaccagcgccgactacgacagggtgctggagaagctgaagaagacagcaacaggctggatgaccacaattaacggcaaggagctgaaggtggagggccagattacctactacaacagatacaagagacagaacgtagtcaaggacctgtccgtcgagctggatagactgagcgaagaatctgtgaacaacgacatctcctcctggacaaagggcagaagcggagaagctctgagcctcctgaagaaaagattctcccatagacccgtgcaggagaagttcgtgtgcctgaactgcggcttcgagacacacgcagccgagcaagccgccctgaacatcgccagatcctggctgttcctgcggagccaggagtacaagaaataccagacaaacaagacaaccggcaacaccgataagagagccttcgtcgagacctggcagtccttttaccggaagaagcttaaggaggtgtggaaacctgccgtgcggtctggcggatctggcggaggctccaccagccccaagaaaaagagaaaagtctaagctgccttctgcggggcttgccttctggccatgcccttcttctctcccttgcacctgtacctcttggtctttgaataaagcctgagtaggaaggctagcaaaaaaaaaaaaaaaaaaaaaaaaaaaaaaaaaaaaaaaaaaaaaaaaaaaaaaaaaaaaaaaaaaaaaaaaaaaaaaaagcccagccggctccccaacctctaccgaggagggcacctctgagtccgccacccccgagagcggccctggcacctccaccgagcccagcgagggcagcgcacccggcagccctgccggcagccccacctccacagaggagggaaccagcaccgagcccagcgaaggcagcgccccaggcaccagcaccgagcctagtgagcaggagattaaacggatcaacaagatcagaagaagacttgtgaaagacagcaacaccaagaaggccggcaagacaggccccatgaaaaccctgctggttagagtgatgacacccgatctgagagagcggctggaaaacctgagaaagaagcctgaaaatatcccccagcccatcagcaatacatctagagccaacctgaataagctgctgaccgattacaccgaaatgaagaaggcgatcctgcatgtgtactgggaagagttccagaaggaccctgtgggcctgatgagccgggtggcccagcctgccagcaagaagatcgatcagaacaagctgaaacctgagatggacgagaagggcaacctgaccaccgccggctttgcctgctctcagtgtggccagcccctgttcgtgtacaagctggagcaggtgtctgagaagggcaaggcttacaccaactacttcggacggtgcaatgtggccgagcacgaaaagctgatcctgctggcccagctgaagcccgagaaggatagcgacgaagccgtgacatatagcctgggaaagtttgggcagagggccctggatttctacagcattcatgtgaccaaggagtccacccaccccgtgaagcccctggcccagatcgccggaaacagatacgcctccggacctgtgggaaaggccctgagcgacgcatgtatgggcacaatcgcctccttcctgtctaagtaccaggacatcatcatcgaacaccagaaggtggtgaagggcaaccagaagagactggagagcctgcgggagctggccggcaaggaaaacctggaataccctagcgtgaccctgccacctcagcctcacaccaaggagggcgttgatgcctacaacgaagtgatcgcccgggtgcgaatgtgggtgaacctgaacctgtggcagaagctgaagctaagcagagatgatgccaagcctctgctgagactgaagggattcccttcctttcctctggtcgagagacaggccaacgaagtggactggtgggacatggtgtgtaacgtgaagaagctgatcaacgagaaaaaggaggatggcaaggtgttttggcagaatctggctggctacaagagacaggaagccctgagaccatacctgagcagcgaggaagatcggaagaagggaaagaaattcgctcggtaccagctgggcgacctgctgctgcacctggaaaagaagcacggcgaggactggggaaaggtgtacgacgaggcctgggagcggattgacaagaaagtggaaggcctgagcaagcacatcaagctggaagaggaacggagaagcgaggacgcccagagcaaggccgccctgaccgactggctgcgggctaaggccagcttcgtgatcgagggcctgaaggaggccgacaaggacgagttctgcagatgcgagctgaagctgcagaagtggtacggggacctgcggggaaagcccttcgccatcgaagccgagaacagcatcctggacatcagcggcttcagcaagcagtacaactgtgccttcatctggcagaaggacggcgtgaagaagctgaacctgtacctgatcatcaactacttcaagggcggcaagctgcggttcaagaagatcaaacctgaagccttcgaagccaacagattctacaccgtgatcaacaaaaagagcggcgagatcgtgcccatggaggtgaacttcaacttcgacgaccccaacctgatcatcctgcctctggcctttggcaagagacagggcagagaattcatctggaacgacctgctgtccctggaaaccggcagcctgaagctggccaacggaagagtgatcgagaagacactgtacaacagaagaacccggcaggatgagcctgccctgttcgtggccctgaccttcgagcggcgggaggtcctggactcctccaatatcaaaccaatgaacctgatcggcgtggcaagaggcgaaaacatccccgccgtgatcgccctgaccgaccccgagggctgcccactgagccggtttaaggatagcctgggaaacccaacccacatcctgagaatcggcgagagctataaggagaagcagcggaccatccaggccaagaaggaggtggagcagcggagagccggcggctacagccggaagtacgccagcaaagccaagaatctggcagacgatatggtgagaaacaccgctagagatctgctgtactacgccgtgacccaggatgccatgctgatcttcgccaacctgagccggggcttcggccggcagggcaagcggaccttcatggccgagagacagtacacacggatggaggactggctgaccgccaagctggcctacgagggcctgagcaagacctacctgtccaagacactggcccagtacacctccaagacatgcagcaactgtgggtttaccatcaccagcgccgactacgacagggtgctggagaagctgaagaagacagcaacaggctggatgaccacaattaacggcaaggagctgaaggtggagggccagattacctactacaacagatacaagagacagaacgtagtcaaggacctgtccgtcgagctggatagactgagcgaagaatctgtgaacaacgacatctcctcctggacaaagggcagaagcggagaagctctgagcctcctgaagaaaagattctcccatagacccgtgcaggagaagttcgtgtgcctgaactgcggcttcgagacacacgcagccgagcaagccgccctgaacatcgccagatcctggctgttcctgcggagccaggagtacaagaaataccagacaaacaagacaaccggcaacaccgataagagagccttcgtcgagacctggcagtccttttaccggaagaagcttaaggaggtgtggaaacctgccgtgcggtctggcggatctggcggaggctccaccagccccaagaaaaagagaaaagtctaagctgccttctgcggggcttgccttctggccatgcccttcttctctcccttgcacctgtacctcttggtctttgaataaagcctgagtaggaaggctagcaaaaaaaaaaaaaaaaaaaaaaaaaaaaaaaaaaaaaaaaaaaaaaaaaaaaaaaaaaaaaaaaaaaaaaaaaaaaaaaa

SEQ ID NO: 9977 - RNA, 8787 nt, synthetic construct
  source 1..8787: mol_type = other RNA
aggaaataagagagaaaagaagagtaagaagaaatataagagccaccatggcccctaagaagaagcgtaaagtgagccggatgaaccacgaccaggagttcgacccccctaaggtgtaccctcccgtccccgccgagaagagaaagcccatccgggtcctgagcctgttcgatggcatcgccaccggtctgctggtgctgaaggacctgggcatccaggtggataggtacattgcctccgaggtgtgcgaggactccatcaccgtgggaatggtgcgtcatcagggcaagatcatgtacgtgggcgacgtgcggagcgtgacacagaagcatatccaggagtggggccctttcgacctggtgatcggcggcagcccttgcaatgacctgagcatcgtgaacccagcccggaagggcctgtacgagggaaccggcagactgttcttcgagttttacagactgctgcacgacgcccggcctaaggaaggcgacgaccggcccttcttttggctgttcgagaatgtggtggccatgggagtcagcgacaagcgggatattagccggttcctggagagcaaccccgtgatgatcgatgccaaggaagtgagcgccgcccaccgggccagatacttctggggcaatctgcctggcatgaacagacccctggccagcaccgtgaacgacaagctggagctgcaggagtgcctggagcacggccggatcgccaagttcagcaaggtgagaaccatcaccacccgaagcaacagcatcaaacaaggcaaggaccagcactttcctgtgttcatgaacgagaaggaggacatcctgtggtgtaccgagatggagagagtgttcgggttcccagtccactacacagatgtcagcaacatgtctagactggccagacagagactgctgggaagaagctggtccgtccctgtgatcagacacctgttcgcccctctgaaggagtacttcgcctgcgtgagcagcggcaacagcaacgccaacagccggggccccagcttctctagcggcctggtgccactgtccctgagagggagccacatgggccccatggagatctacaaaaccgtgagcgcctggaagcggcagcctgtgcgcgtgctgagcctgtttcggaatatcgataaagtcctgaaaagcctgggattcctggagagcggctctggctccggcggtggcaccctgaagtacgtggaggatgtgacaaacgtggtcagacgggatgtggagaagtggggccccttcgatctggtgtacggcagcacccaacccctgggcagctcttgtgaccggtgccctggctggtacatgtttcagttccaccggatcctgcagtacgccctgccgagacaggagtcccagcggccattcttttggattttcatggacaacttgctgctgaccgaggatgaccaggaaactaccactcggttcctgcagaccgaagccgtgaccctgcaggacgtgagaggccgggactaccagaacgccatgcgggtgtggtccaacatccctggactgaaaagcaagcacgcacctctgacccctaaagaagaggagtacctgcaggcccaggtgcggagcagaagcaagctggacgcccctaaggtggatctgctggtgaagaattgcctcctgcccctgagagagtacttcaagtatttcagccagaatagtctgcccctgggaggcagcggcggcggcccccaggagcccgtgaccttcgaggacgtggccgtgtacttcacccagaaccagtgggccagcctggaccccatgcagagggccctgtacagggaggtgatgctggagaactacgccagcgtggccagcctggccttccccttccccaagcccgacctggtgagccagctggagaggggcgaggccccctggagccccgacccctgggaggccgaggtgctgaagggcacctgccccggcggcggcggcccaagcagcggcgcccctcctcccagcggcggcaggcggcccaagcagcggcgcccctcctcccagcggcggcagcccagccggctccccaacctctaccgaggagggcacctctgagtccgccacccccgagagcggccctggcacctccaccgagcccagcgagggcagcgcacccggcagccctgccggcagccccacctccacagaggagggaaccagcaccgagcccagcgaaggcagcgccccaggcaccagcaccgagcctagtgagcaggagattaaacggatcaacaagatcagaagaagacttgtgaaagacagcaacaccaagaaggccggcaagacaggccccatgaaaaccctgctggttagagtgatgacacccgatctgagagagcggctggaaaacctgagaaagaagcctgaaaatatcccccagcccatcagcaatacatctagagccaacctgaataagctgctgaccgattacaccgaaatgaagaaggcgatcctgcatgtgtactgggaagagttccagaaggaccctgtgggcctgatgagccgggtggcccagcctgccagcaagaagatcgatcagaacaagctgaaacctgagatggacgagaagggcaacctgaccaccgccggctttgcctgctctcagtgtggccagcccctgttcgtgtacaagctggagcaggtgtctgagaagggcaaggcttacaccaactacttcggacggtgcaatgtggccgagcacgaaaagctgatcctgctggcccagctgaagcccgagaaggatagcgacgaagccgtgacatatagcctgggaaagtttgggcagagggccctggatttctacagcattcatgtgaccaaggagtccacccaccccgtgaagcccctggcccagatcgccggaaacagatacgcctccggacctgtgggaaaggccctgagcgacgcatgtatgggcacaatcgcctccttcctgtctaagtaccaggacatcatcatcgaacaccagaaggtggtgaagggcaaccagaagagactggagagcctgcgggagctggccggcaaggaaaacctggaataccctagcgtgaccctgccacctcagcctcacaccaaggagggcgttgatgcctacaacgaagtgatcgcccgggtgcgaatgtgggtgaacctgaacctgtggcagaagctgaagctaagcagagatgatgccaagcctctgctgagactgaagggattcccttcctttcctctggtcgagagacaggccaacgaagtggactggtgggacatggtgtgtaacgtgaagaagctgatcaacgagaaaaaggaggatggcaaggtgttttggcagaatctggctggctacaagagacaggaagccctgagaccatacctgagcagcgaggaagatcggaagaagggaaagaaattcgctcggtaccagctgggcgacctgctgctgcacctggaaaagaagcacggcgaggactggggaaaggtgtacgacgaggcctgggagcggattgacaagaaagtggaaggcctgagcaagcacatcaagctggaagaggaacggagaagcgaggacgcccagagcaaggccgccctgaccgactggctgcgggctaaggccagcttcgtgatcgagggcctgaaggaggccgacaaggacgagttctgcagatgcgagctgaagctgcagaagtggtacggggacctgcggggaaagcccttcgccatcgaagccgagaacagcatcctggacatcagcggcttcagcaagcagtacaactgtgccttcatctggcagaaggacggcgtgaagaagctgaacctgtacctgatcatcaactacttcaagggcggcaagctgcggttcaagaagatcaaacctgaagccttcgaagccaacagattctacaccgtgatcaacaaaaagagcggcgagatcgtgcccatggaggtgaacttcaacttcgacgaccccaacctgatcatcctgcctctggcctttggcaagagacagggcagagaattcatctggaacgacctgctgtccctggaaaccggcagcctgaagctggccaacggaagagtgatcgagaagacactgtacaacagaagaacccggcaggatgagcctgccctgttcgtggccctgaccttcgagcggcgggaggtcctggactcctccaatatcaaaccaatgaacctgatcggcgtggcaagaggcgaaaacatccccgccgtgatcgccctgaccgaccccgagggctgcccactgagccggtttaaggatagcctgggaaacccaacccacatcctgagaatcggcgagagctataaggagaagcagcggaccatccaggccaagaaggaggtggagcagcggagagccggcggctacagccggaagtacgccagcaaagccaagaatctggcagacgatatggtgagaaacaccgctagagatctgctgtactacgccgtgacccaggatgccatgctgatcttcgccaacctgagccggggcttcggccggcagggcaagcggaccttcatggccgagagacagtacacacggatggaggactggctgaccgccaagctggcctacgagggcctgagcaagacctacctgtccaagacactggcccagtacacctccaagacatgcagcaactgtgggtttaccatcaccagcgccgactacgacagggtgctggagaagctgaagaagacagcaacaggctggatgaccacaattaacggcaaggagctgaaggtggagggccagattacctactacaacagatacaagagacagaacgtagtcaaggacctgtccgtcgagctggatagactgagcgaagaatctgtgaacaacgacatctcctcctggacaaagggcagaagcggagaagctctgagcctcctgaagaaaagattctcccatagacccgtgcaggagaagttcgtgtgcctgaactgcggcttcgagacacacgcagccgagcaagccgccctgaacatcgccagatcctggctgttcctgcggagccaggagtacaagaaataccagacaaacaagacaaccggcaacaccgataagagagccttcgtcgagacctggcagtccttttaccggaagaagcttaaggaggtgtggaaacctgccgtgcggtctggcggatctggcggaggctccaccagccccaagaaaaagagaaaagtctaagctgccttctgcggggcttgccttctggccatgcccttcttctctcccttgcacctgtacctcttggtctttgaataaagcctgagtaggaaggctagcaaaaaaaaaaaaaaaaaaaaaaaaaaaaaaaaaaaaaaaaaaaaaaaaaaaaaaaaaaaaaaaaaaaaaaaaaaaaaaaagcccagccggctccccaacctctaccgaggagggcacctctgagtccgccacccccgagagcggccctggcacctccaccgagcccagcgagggcagcgcacccggcagccctgccggcagccccacctccacagaggagggaaccagcaccgagcccagcgaaggcagcgccccaggcaccagcaccgagcctagtgagcaggagattaaacggatcaacaagatcagaagaagacttgtgaaagacagcaacaccaagaaggccggcaagacaggccccatgaaaaccctgctggttagagtgatgacacccgatctgagagagcggctggaaaacctgagaaagaagcctgaaaatatcccccagcccatcagcaatacatctagagccaacctgaataagctgctgaccgattacaccgaaatgaagaaggcgatcctgcatgtgtactgggaagagttccagaaggaccctgtgggcctgatgagccgggtggcccagcctgccagcaagaagatcgatcagaacaagctgaaacctgagatggacgagaagggcaacctgaccaccgccggctttgcctgctctcagtgtggccagcccctgttcgtgtacaagctggagcaggtgtctgagaagggcaaggcttacaccaactacttcggacggtgcaatgtggccgagcacgaaaagctgatcctgctggcccagctgaagcccgagaaggatagcgacgaagccgtgacatatagcctgggaaagtttgggcagagggccctggatttctacagcattcatgtgaccaaggagtccacccaccccgtgaagcccctggcccagatcgccggaaacagatacgcctccggacctgtgggaaaggccctgagcgacgcatgtatgggcacaatcgcctccttcctgtctaagtaccaggacatcatcatcgaacaccagaaggtggtgaagggcaaccagaagagactggagagcctgcgggagctggccggcaaggaaaacctggaataccctagcgtgaccctgccacctcagcctcacaccaaggagggcgttgatgcctacaacgaagtgatcgcccgggtgcgaatgtgggtgaacctgaacctgtggcagaagctgaagctaagcagagatgatgccaagcctctgctgagactgaagggattcccttcctttcctctggtcgagagacaggccaacgaagtggactggtgggacatggtgtgtaacgtgaagaagctgatcaacgagaaaaaggaggatggcaaggtgttttggcagaatctggctggctacaagagacaggaagccctgagaccatacctgagcagcgaggaagatcggaagaagggaaagaaattcgctcggtaccagctgggcgacctgctgctgcacctggaaaagaagcacggcgaggactggggaaaggtgtacgacgaggcctgggagcggattgacaagaaagtggaaggcctgagcaagcacatcaagctggaagaggaacggagaagcgaggacgcccagagcaaggccgccctgaccgactggctgcgggctaaggccagcttcgtgatcgagggcctgaaggaggccgacaaggacgagttctgcagatgcgagctgaagctgcagaagtggtacggggacctgcggggaaagcccttcgccatcgaagccgagaacagcatcctggacatcagcggcttcagcaagcagtacaactgtgccttcatctggcagaaggacggcgtgaagaagctgaacctgtacctgatcatcaactacttcaagggcggcaagctgcggttcaagaagatcaaacctgaagccttcgaagccaacagattctacaccgtgatcaacaaaaagagcggcgagatcgtgcccatggaggtgaacttcaacttcgacgaccccaacctgatcatcctgcctctggcctttggcaagagacagggcagagaattcatctggaacgacctgctgtccctggaaaccggcagcctgaagctggccaacggaagagtgatcgagaagacactgtacaacagaagaacccggcaggatgagcctgccctgttcgtggccctgaccttcgagcggcgggaggtcctggactcctccaatatcaaaccaatgaacctgatcggcgtggcaagaggcgaaaacatccccgccgtgatcgccctgaccgaccccgagggctgcccactgagccggtttaaggatagcctgggaaacccaacccacatcctgagaatcggcgagagctataaggagaagcagcggaccatccaggccaagaaggaggtggagcagcggagagccggcggctacagccggaagtacgccagcaaagccaagaatctggcagacgatatggtgagaaacaccgctagagatctgctgtactacgccgtgacccaggatgccatgctgatcttcgccaacctgagccggggcttcggccggcagggcaagcggaccttcatggccgagagacagtacacacggatggaggactggctgaccgccaagctggcctacgagggcctgagcaagacctacctgtccaagacactggcccagtacacctccaagacatgcagcaactgtgggtttaccatcaccagcgccgactacgacagggtgctggagaagctgaagaagacagcaacaggctggatgaccacaattaacggcaaggagctgaaggtggagggccagattacctactacaacagatacaagagacagaacgtagtcaaggacctgtccgtcgagctggatagactgagcgaagaatctgtgaacaacgacatctcctcctggacaaagggcagaagcggagaagctctgagcctcctgaagaaaagattctcccatagacccgtgcaggagaagttcgtgtgcctgaactgcggcttcgagacacacgcagccgagcaagccgccctgaacatcgccagatcctggctgttcctgcggagccaggagtacaagaaataccagacaaacaagacaaccggcaacaccgataagagagccttcgtcgagacctggcagtccttttaccggaagaagcttaaggaggtgtggaaacctgccgtgcggtctggcggatctggcggaggctccaccagccccaagaaaaagagaaaagtctaagctgccttctgcggggcttgccttctggccatgcccttcttctctcccttgcacctgtacctcttggtctttgaataaagcctgagtaggaaggctagcaaaaaaaaaaaaaaaaaaaaaaaaaaaaaaaaaaaaaaaaaaaaaaaaaaaaaaaaaaaaaaaaaaaaaaaaaaaaaaaa

SEQ ID NO: 9978 - RNA, 8787 nt, synthetic construct
  source 1..8787: mol_type = other RNA
aggaaataagagagaaaagaagagtaagaagaaatataagagccaccatggcccctaagaagaagcgtaaagtgagccggatgaaccacgaccaggagttcgacccccctaaggtgtaccctcccgtccccgccgagaagagaaagcccatccgggtcctgagcctgttcgatggcatcgccaccggtctgctggtgctgaaggacctgggcatccaggtggataggtacattgcctccgaggtgtgcgaggactccatcaccgtgggaatggtgcgtcatcagggcaagatcatgtacgtgggcgacgtgcggagcgtgacacagaagcatatccaggagtggggccctttcgacctggtgatcggcggcagcccttgcaatgacctgagcatcgtgaacccagcccggaagggcctgtacgagggaaccggcagactgttcttcgagttttacagactgctgcacgacgcccggcctaaggaaggcgacgaccggcccttcttttggctgttcgagaatgtggtggccatgggagtcagcgacaagcgggatattagccggttcctggagagcaaccccgtgatgatcgatgccaaggaagtgagcgccgcccaccgggccagatacttctggggcaatctgcctggcatgaacagacccctggccagcaccgtgaacgacaagctggagctgcaggagtgcctggagcacggccggatcgccaagttcagcaaggtgagaaccatcaccacccgaagcaacagcatcaaacaaggcaaggaccagcactttcctgtgttcatgaacgagaaggaggacatcctgtggtgtaccgagatggagagagtgttcgggttcccagtccactacacagatgtcagcaacatgtctagactggccagacagagactgctgggaagaagctggtccgtccctgtgatcagacacctgttcgcccctctgaaggagtacttcgcctgcgtgagcagcggcaacagcaacgccaacagccggggccccagcttctctagcggcctggtgccactgtccctgagagggagccacatgggccccatggagatctacaaaaccgtgagcgcctggaagcggcagcctgtgcgcgtgctgagcctgtttcggaatatcgataaagtcctgaaaagcctgggattcctggagagcggctctggctccggcggtggcaccctgaagtacgtggaggatgtgacaaacgtggtcagacgggatgtggagaagtggggccccttcgatctggtgtacggcagcacccaacccctgggcagctcttgtgaccggtgccctggctggtacatgtttcagttccaccggatcctgcagtacgccctgccgagacaggagtcccagcggccattcttttggattttcatggacaacttgctgctgaccgaggatgaccaggaaactaccactcggttcctgcagaccgaagccgtgaccctgcaggacgtgagaggccgggactaccagaacgccatgcgggtgtggtccaacatccctggactgaaaagcaagcacgcacctctgacccctaaagaagaggagtacctgcaggcccaggtgcggagcagaagcaagctggacgcccctaaggtggatctgctggtgaagaattgcctcctgcccctgagagagtacttcaagtatttcagccagaatagtctgcccctgggaggcagcggcggcggccccagggtgagcctgaccttcgaggacgtggccgtgctgttcaccagggacgagtggaggaagctgggccccagcgagaggaacctgtaccaggacgtgatgctggagaactacagcaacctggtgagcctgggcctgctgttcagcaagcccaaggtgatcagcctgctgcagcagggcgaggacccctggaaggtggagaaggagagccccggcggccccagcctgggctacaagagcagcggcggcccaagcagcggcgcccctcctcccagcggcggcaggcggcccaagcagcggcgcccctcctcccagcggcggcagcccagccggctccccaacctctaccgaggagggcacctctgagtccgccacccccgagagcggccctggcacctccaccgagcccagcgagggcagcgcacccggcagccctgccggcagccccacctccacagaggagggaaccagcaccgagcccagcgaaggcagcgccccaggcaccagcaccgagcctagtgagcaggagattaaacggatcaacaagatcagaagaagacttgtgaaagacagcaacaccaagaaggccggcaagacaggccccatgaaaaccctgctggttagagtgatgacacccgatctgagagagcggctggaaaacctgagaaagaagcctgaaaatatcccccagcccatcagcaatacatctagagccaacctgaataagctgctgaccgattacaccgaaatgaagaaggcgatcctgcatgtgtactgggaagagttccagaaggaccctgtgggcctgatgagccgggtggcccagcctgccagcaagaagatcgatcagaacaagctgaaacctgagatggacgagaagggcaacctgaccaccgccggctttgcctgctctcagtgtggccagcccctgttcgtgtacaagctggagcaggtgtctgagaagggcaaggcttacaccaactacttcggacggtgcaatgtggccgagcacgaaaagctgatcctgctggcccagctgaagcccgagaaggatagcgacgaagccgtgacatatagcctgggaaagtttgggcagagggccctggatttctacagcattcatgtgaccaaggagtccacccaccccgtgaagcccctggcccagatcgccggaaacagatacgcctccggacctgtgggaaaggccctgagcgacgcatgtatgggcacaatcgcctccttcctgtctaagtaccaggacatcatcatcgaacaccagaaggtggtgaagggcaaccagaagagactggagagcctgcgggagctggccggcaaggaaaacctggaataccctagcgtgaccctgccacctcagcctcacaccaaggagggcgttgatgcctacaacgaagtgatcgcccgggtgcgaatgtgggtgaacctgaacctgtggcagaagctgaagctaagcagagatgatgccaagcctctgctgagactgaagggattcccttcctttcctctggtcgagagacaggccaacgaagtggactggtgggacatggtgtgtaacgtgaagaagctgatcaacgagaaaaaggaggatggcaaggtgttttggcagaatctggctggctacaagagacaggaagccctgagaccatacctgagcagcgaggaagatcggaagaagggaaagaaattcgctcggtaccagctgggcgacctgctgctgcacctggaaaagaagcacggcgaggactggggaaaggtgtacgacgaggcctgggagcggattgacaagaaagtggaaggcctgagcaagcacatcaagctggaagaggaacggagaagcgaggacgcccagagcaaggccgccctgaccgactggctgcgggctaaggccagcttcgtgatcgagggcctgaaggaggccgacaaggacgagttctgcagatgcgagctgaagctgcagaagtggtacggggacctgcggggaaagcccttcgccatcgaagccgagaacagcatcctggacatcagcggcttcagcaagcagtacaactgtgccttcatctggcagaaggacggcgtgaagaagctgaacctgtacctgatcatcaactacttcaagggcggcaagctgcggttcaagaagatcaaacctgaagccttcgaagccaacagattctacaccgtgatcaacaaaaagagcggcgagatcgtgcccatggaggtgaacttcaacttcgacgaccccaacctgatcatcctgcctctggcctttggcaagagacagggcagagaattcatctggaacgacctgctgtccctggaaaccggcagcctgaagctggccaacggaagagtgatcgagaagacactgtacaacagaagaacccggcaggatgagcctgccctgttcgtggccctgaccttcgagcggcgggaggtcctggactcctccaatatcaaaccaatgaacctgatcggcgtggcaagaggcgaaaacatccccgccgtgatcgccctgaccgaccccgagggctgcccactgagccggtttaaggatagcctgggaaacccaacccacatcctgagaatcggcgagagctataaggagaagcagcggaccatccaggccaagaaggaggtggagcagcggagagccggcggctacagccggaagtacgccagcaaagccaagaatctggcagacgatatggtgagaaacaccgctagagatctgctgtactacgccgtgacccaggatgccatgctgatcttcgccaacctgagccggggcttcggccggcagggcaagcggaccttcatggccgagagacagtacacacggatggaggactggctgaccgccaagctggcctacgagggcctgagcaagacctacctgtccaagacactggcccagtacacctccaagacatgcagcaactgtgggtttaccatcaccagcgccgactacgacagggtgctggagaagctgaagaagacagcaacaggctggatgaccacaattaacggcaaggagctgaaggtggagggccagattacctactacaacagatacaagagacagaacgtagtcaaggacctgtccgtcgagctggatagactgagcgaagaatctgtgaacaacgacatctcctcctggacaaagggcagaagcggagaagctctgagcctcctgaagaaaagattctcccatagacccgtgcaggagaagttcgtgtgcctgaactgcggcttcgagacacacgcagccgagcaagccgccctgaacatcgccagatcctggctgttcctgcggagccaggagtacaagaaataccagacaaacaagacaaccggcaacaccgataagagagccttcgtcgagacctggcagtccttttaccggaagaagcttaaggaggtgtggaaacctgccgtgcggtctggcggatctggcggaggctccaccagccccaagaaaaagagaaaagtctaagctgccttctgcggggcttgccttctggccatgcccttcttctctcccttgcacctgtacctcttggtctttgaataaagcctgagtaggaaggctagcaaaaaaaaaaaaaaaaaaaaaaaaaaaaaaaaaaaaaaaaaaaaaaaaaaaaaaaaaaaaaaaaaaaaaaaaaaaaaaaagcccagccggctccccaacctctaccgaggagggcacctctgagtccgccacccccgagagcggccctggcacctccaccgagcccagcgagggcagcgcacccggcagccctgccggcagccccacctccacagaggagggaaccagcaccgagcccagcgaaggcagcgccccaggcaccagcaccgagcctagtgagcaggagattaaacggatcaacaagatcagaagaagacttgtgaaagacagcaacaccaagaaggccggcaagacaggccccatgaaaaccctgctggttagagtgatgacacccgatctgagagagcggctggaaaacctgagaaagaagcctgaaaatatcccccagcccatcagcaatacatctagagccaacctgaataagctgctgaccgattacaccgaaatgaagaaggcgatcctgcatgtgtactgggaagagttccagaaggaccctgtgggcctgatgagccgggtggcccagcctgccagcaagaagatcgatcagaacaagctgaaacctgagatggacgagaagggcaacctgaccaccgccggctttgcctgctctcagtgtggccagcccctgttcgtgtacaagctggagcaggtgtctgagaagggcaaggcttacaccaactacttcggacggtgcaatgtggccgagcacgaaaagctgatcctgctggcccagctgaagcccgagaaggatagcgacgaagccgtgacatatagcctgggaaagtttgggcagagggccctggatttctacagcattcatgtgaccaaggagtccacccaccccgtgaagcccctggcccagatcgccggaaacagatacgcctccggacctgtgggaaaggccctgagcgacgcatgtatgggcacaatcgcctccttcctgtctaagtaccaggacatcatcatcgaacaccagaaggtggtgaagggcaaccagaagagactggagagcctgcgggagctggccggcaaggaaaacctggaataccctagcgtgaccctgccacctcagcctcacaccaaggagggcgttgatgcctacaacgaagtgatcgcccgggtgcgaatgtgggtgaacctgaacctgtggcagaagctgaagctaagcagagatgatgccaagcctctgctgagactgaagggattcccttcctttcctctggtcgagagacaggccaacgaagtggactggtgggacatggtgtgtaacgtgaagaagctgatcaacgagaaaaaggaggatggcaaggtgttttggcagaatctggctggctacaagagacaggaagccctgagaccatacctgagcagcgaggaagatcggaagaagggaaagaaattcgctcggtaccagctgggcgacctgctgctgcacctggaaaagaagcacggcgaggactggggaaaggtgtacgacgaggcctgggagcggattgacaagaaagtggaaggcctgagcaagcacatcaagctggaagaggaacggagaagcgaggacgcccagagcaaggccgccctgaccgactggctgcgggctaaggccagcttcgtgatcgagggcctgaaggaggccgacaaggacgagttctgcagatgcgagctgaagctgcagaagtggtacggggacctgcggggaaagcccttcgccatcgaagccgagaacagcatcctggacatcagcggcttcagcaagcagtacaactgtgccttcatctggcagaaggacggcgtgaagaagctgaacctgtacctgatcatcaactacttcaagggcggcaagctgcggttcaagaagatcaaacctgaagccttcgaagccaacagattctacaccgtgatcaacaaaaagagcggcgagatcgtgcccatggaggtgaacttcaacttcgacgaccccaacctgatcatcctgcctctggcctttggcaagagacagggcagagaattcatctggaacgacctgctgtccctggaaaccggcagcctgaagctggccaacggaagagtgatcgagaagacactgtacaacagaagaacccggcaggatgagcctgccctgttcgtggccctgaccttcgagcggcgggaggtcctggactcctccaatatcaaaccaatgaacctgatcggcgtggcaagaggcgaaaacatccccgccgtgatcgccctgaccgaccccgagggctgcccactgagccggtttaaggatagcctgggaaacccaacccacatcctgagaatcggcgagagctataaggagaagcagcggaccatccaggccaagaaggaggtggagcagcggagagccggcggctacagccggaagtacgccagcaaagccaagaatctggcagacgatatggtgagaaacaccgctagagatctgctgtactacgccgtgacccaggatgccatgctgatcttcgccaacctgagccggggcttcggccggcagggcaagcggaccttcatggccgagagacagtacacacggatggaggactggctgaccgccaagctggcctacgagggcctgagcaagacctacctgtccaagacactggcccagtacacctccaagacatgcagcaactgtgggtttaccatcaccagcgccgactacgacagggtgctggagaagctgaagaagacagcaacaggctggatgaccacaattaacggcaaggagctgaaggtggagggccagattacctactacaacagatacaagagacagaacgtagtcaaggacctgtccgtcgagctggatagactgagcgaagaatctgtgaacaacgacatctcctcctggacaaagggcagaagcggagaagctctgagcctcctgaagaaaagattctcccatagacccgtgcaggagaagttcgtgtgcctgaactgcggcttcgagacacacgcagccgagcaagccgccctgaacatcgccagatcctggctgttcctgcggagccaggagtacaagaaataccagacaaacaagacaaccggcaacaccgataagagagccttcgtcgagacctggcagtccttttaccggaagaagcttaaggaggtgtggaaacctgccgtgcggtctggcggatctggcggaggctccaccagccccaagaaaaagagaaaagtctaagctgccttctgcggggcttgccttctggccatgcccttcttctctcccttgcacctgtacctcttggtctttgaataaagcctgagtaggaaggctagcaaaaaaaaaaaaaaaaaaaaaaaaaaaaaaaaaaaaaaaaaaaaaaaaaaaaaaaaaaaaaaaaaaaaaaaaaaaaaaaa

SEQ ID NO: 9979 - RNA, 8787 nt, synthetic construct
  source 1..8787: mol_type = other RNA
aggaaataagagagaaaagaagagtaagaagaaatataagagccaccatggcccctaagaagaagcgtaaagtgagccggatgaaccacgaccaggagttcgacccccctaaggtgtaccctcccgtccccgccgagaagagaaagcccatccgggtcctgagcctgttcgatggcatcgccaccggtctgctggtgctgaaggacctgggcatccaggtggataggtacattgcctccgaggtgtgcgaggactccatcaccgtgggaatggtgcgtcatcagggcaagatcatgtacgtgggcgacgtgcggagcgtgacacagaagcatatccaggagtggggccctttcgacctggtgatcggcggcagcccttgcaatgacctgagcatcgtgaacccagcccggaagggcctgtacgagggaaccggcagactgttcttcgagttttacagactgctgcacgacgcccggcctaaggaaggcgacgaccggcccttcttttggctgttcgagaatgtggtggccatgggagtcagcgacaagcgggatattagccggttcctggagagcaaccccgtgatgatcgatgccaaggaagtgagcgccgcccaccgggccagatacttctggggcaatctgcctggcatgaacagacccctggccagcaccgtgaacgacaagctggagctgcaggagtgcctggagcacggccggatcgccaagttcagcaaggtgagaaccatcaccacccgaagcaacagcatcaaacaaggcaaggaccagcactttcctgtgttcatgaacgagaaggaggacatcctgtggtgtaccgagatggagagagtgttcgggttcccagtccactacacagatgtcagcaacatgtctagactggccagacagagactgctgggaagaagctggtccgtccctgtgatcagacacctgttcgcccctctgaaggagtacttcgcctgcgtgagcagcggcaacagcaacgccaacagccggggccccagcttctctagcggcctggtgccactgtccctgagagggagccacatgggccccatggagatctacaaaaccgtgagcgcctggaagcggcagcctgtgcgcgtgctgagcctgtttcggaatatcgataaagtcctgaaaagcctgggattcctggagagcggctctggctccggcggtggcaccctgaagtacgtggaggatgtgacaaacgtggtcagacgggatgtggagaagtggggccccttcgatctggtgtacggcagcacccaacccctgggcagctcttgtgaccggtgccctggctggtacatgtttcagttccaccggatcctgcagtacgccctgccgagacaggagtcccagcggccattcttttggattttcatggacaacttgctgctgaccgaggatgaccaggaaactaccactcggttcctgcagaccgaagccgtgaccctgcaggacgtgagaggccgggactaccagaacgccatgcgggtgtggtccaacatccctggactgaaaagcaagcacgcacctctgacccctaaagaagaggagtacctgcaggcccaggtgcggagcagaagcaagctggacgcccctaaggtggatctgctggtgaagaattgcctcctgcccctgagagagtacttcaagtatttcagccagaatagtctgcccctgggaggcagcggcggcggctaccagacccccgtgagcttcaaggacgtggtggtgggcttcacccaggaggagtggcacaggctgagccccgcccagagggccctgtacagggacgtgatgctggagacctacagcaacctggtgagcgtgggctacgagggcaccaagcccgacgtgatcctgaggctggagcaggaggaggccccctggatcggcggcgccgccaggcccggctgccactgctgggaggacatctggcagggcggcccaagcagcggcgcccctcctcccagcggcggcaggcggcccaagcagcggcgcccctcctcccagcggcggcagcccagccggctccccaacctctaccgaggagggcacctctgagtccgccacccccgagagcggccctggcacctccaccgagcccagcgagggcagcgcacccggcagccctgccggcagccccacctccacagaggagggaaccagcaccgagcccagcgaaggcagcgccccaggcaccagcaccgagcctagtgagcaggagattaaacggatcaacaagatcagaagaagacttgtgaaagacagcaacaccaagaaggccggcaagacaggccccatgaaaaccctgctggttagagtgatgacacccgatctgagagagcggctggaaaacctgagaaagaagcctgaaaatatcccccagcccatcagcaatacatctagagccaacctgaataagctgctgaccgattacaccgaaatgaagaaggcgatcctgcatgtgtactgggaagagttccagaaggaccctgtgggcctgatgagccgggtggcccagcctgccagcaagaagatcgatcagaacaagctgaaacctgagatggacgagaagggcaacctgaccaccgccggctttgcctgctctcagtgtggccagcccctgttcgtgtacaagctggagcaggtgtctgagaagggcaaggcttacaccaactacttcggacggtgcaatgtggccgagcacgaaaagctgatcctgctggcccagctgaagcccgagaaggatagcgacgaagccgtgacatatagcctgggaaagtttgggcagagggccctggatttctacagcattcatgtgaccaaggagtccacccaccccgtgaagcccctggcccagatcgccggaaacagatacgcctccggacctgtgggaaaggccctgagcgacgcatgtatgggcacaatcgcctccttcctgtctaagtaccaggacatcatcatcgaacaccagaaggtggtgaagggcaaccagaagagactggagagcctgcgggagctggccggcaaggaaaacctggaataccctagcgtgaccctgccacctcagcctcacaccaaggagggcgttgatgcctacaacgaagtgatcgcccgggtgcgaatgtgggtgaacctgaacctgtggcagaagctgaagctaagcagagatgatgccaagcctctgctgagactgaagggattcccttcctttcctctggtcgagagacaggccaacgaagtggactggtgggacatggtgtgtaacgtgaagaagctgatcaacgagaaaaaggaggatggcaaggtgttttggcagaatctggctggctacaagagacaggaagccctgagaccatacctgagcagcgaggaagatcggaagaagggaaagaaattcgctcggtaccagctgggcgacctgctgctgcacctggaaaagaagcacggcgaggactggggaaaggtgtacgacgaggcctgggagcggattgacaagaaagtggaaggcctgagcaagcacatcaagctggaagaggaacggagaagcgaggacgcccagagcaaggccgccctgaccgactggctgcgggctaaggccagcttcgtgatcgagggcctgaaggaggccgacaaggacgagttctgcagatgcgagctgaagctgcagaagtggtacggggacctgcggggaaagcccttcgccatcgaagccgagaacagcatcctggacatcagcggcttcagcaagcagtacaactgtgccttcatctggcagaaggacggcgtgaagaagctgaacctgtacctgatcatcaactacttcaagggcggcaagctgcggttcaagaagatcaaacctgaagccttcgaagccaacagattctacaccgtgatcaacaaaaagagcggcgagatcgtgcccatggaggtgaacttcaacttcgacgaccccaacctgatcatcctgcctctggcctttggcaagagacagggcagagaattcatctggaacgacctgctgtccctggaaaccggcagcctgaagctggccaacggaagagtgatcgagaagacactgtacaacagaagaacccggcaggatgagcctgccctgttcgtggccctgaccttcgagcggcgggaggtcctggactcctccaatatcaaaccaatgaacctgatcggcgtggcaagaggcgaaaacatccccgccgtgatcgccctgaccgaccccgagggctgcccactgagccggtttaaggatagcctgggaaacccaacccacatcctgagaatcggcgagagctataaggagaagcagcggaccatccaggccaagaaggaggtggagcagcggagagccggcggctacagccggaagtacgccagcaaagccaagaatctggcagacgatatggtgagaaacaccgctagagatctgctgtactacgccgtgacccaggatgccatgctgatcttcgccaacctgagccggggcttcggccggcagggcaagcggaccttcatggccgagagacagtacacacggatggaggactggctgaccgccaagctggcctacgagggcctgagcaagacctacctgtccaagacactggcccagtacacctccaagacatgcagcaactgtgggtttaccatcaccagcgccgactacgacagggtgctggagaagctgaagaagacagcaacaggctggatgaccacaattaacggcaaggagctgaaggtggagggccagattacctactacaacagatacaagagacagaacgtagtcaaggacctgtccgtcgagctggatagactgagcgaagaatctgtgaacaacgacatctcctcctggacaaagggcagaagcggagaagctctgagcctcctgaagaaaagattctcccatagacccgtgcaggagaagttcgtgtgcctgaactgcggcttcgagacacacgcagccgagcaagccgccctgaacatcgccagatcctggctgttcctgcggagccaggagtacaagaaataccagacaaacaagacaaccggcaacaccgataagagagccttcgtcgagacctggcagtccttttaccggaagaagcttaaggaggtgtggaaacctgccgtgcggtctggcggatctggcggaggctccaccagccccaagaaaaagagaaaagtctaagctgccttctgcggggcttgccttctggccatgcccttcttctctcccttgcacctgtacctcttggtctttgaataaagcctgagtaggaaggctagcaaaaaaaaaaaaaaaaaaaaaaaaaaaaaaaaaaaaaaaaaaaaaaaaaaaaaaaaaaaaaaaaaaaaaaaaaaaaaaaagcccagccggctccccaacctctaccgaggagggcacctctgagtccgccacccccgagagcggccctggcacctccaccgagcccagcgagggcagcgcacccggcagccctgccggcagccccacctccacagaggagggaaccagcaccgagcccagcgaaggcagcgccccaggcaccagcaccgagcctagtgagcaggagattaaacggatcaacaagatcagaagaagacttgtgaaagacagcaacaccaagaaggccggcaagacaggccccatgaaaaccctgctggttagagtgatgacacccgatctgagagagcggctggaaaacctgagaaagaagcctgaaaatatcccccagcccatcagcaatacatctagagccaacctgaataagctgctgaccgattacaccgaaatgaagaaggcgatcctgcatgtgtactgggaagagttccagaaggaccctgtgggcctgatgagccgggtggcccagcctgccagcaagaagatcgatcagaacaagctgaaacctgagatggacgagaagggcaacctgaccaccgccggctttgcctgctctcagtgtggccagcccctgttcgtgtacaagctggagcaggtgtctgagaagggcaaggcttacaccaactacttcggacggtgcaatgtggccgagcacgaaaagctgatcctgctggcccagctgaagcccgagaaggatagcgacgaagccgtgacatatagcctgggaaagtttgggcagagggccctggatttctacagcattcatgtgaccaaggagtccacccaccccgtgaagcccctggcccagatcgccggaaacagatacgcctccggacctgtgggaaaggccctgagcgacgcatgtatgggcacaatcgcctccttcctgtctaagtaccaggacatcatcatcgaacaccagaaggtggtgaagggcaaccagaagagactggagagcctgcgggagctggccggcaaggaaaacctggaataccctagcgtgaccctgccacctcagcctcacaccaaggagggcgttgatgcctacaacgaagtgatcgcccgggtgcgaatgtgggtgaacctgaacctgtggcagaagctgaagctaagcagagatgatgccaagcctctgctgagactgaagggattcccttcctttcctctggtcgagagacaggccaacgaagtggactggtgggacatggtgtgtaacgtgaagaagctgatcaacgagaaaaaggaggatggcaaggtgttttggcagaatctggctggctacaagagacaggaagccctgagaccatacctgagcagcgaggaagatcggaagaagggaaagaaattcgctcggtaccagctgggcgacctgctgctgcacctggaaaagaagcacggcgaggactggggaaaggtgtacgacgaggcctgggagcggattgacaagaaagtggaaggcctgagcaagcacatcaagctggaagaggaacggagaagcgaggacgcccagagcaaggccgccctgaccgactggctgcgggctaaggccagcttcgtgatcgagggcctgaaggaggccgacaaggacgagttctgcagatgcgagctgaagctgcagaagtggtacggggacctgcggggaaagcccttcgccatcgaagccgagaacagcatcctggacatcagcggcttcagcaagcagtacaactgtgccttcatctggcagaaggacggcgtgaagaagctgaacctgtacctgatcatcaactacttcaagggcggcaagctgcggttcaagaagatcaaacctgaagccttcgaagccaacagattctacaccgtgatcaacaaaaagagcggcgagatcgtgcccatggaggtgaacttcaacttcgacgaccccaacctgatcatcctgcctctggcctttggcaagagacagggcagagaattcatctggaacgacctgctgtccctggaaaccggcagcctgaagctggccaacggaagagtgatcgagaagacactgtacaacagaagaacccggcaggatgagcctgccctgttcgtggccctgaccttcgagcggcgggaggtcctggactcctccaatatcaaaccaatgaacctgatcggcgtggcaagaggcgaaaacatccccgccgtgatcgccctgaccgaccccgagggctgcccactgagccggtttaaggatagcctgggaaacccaacccacatcctgagaatcggcgagagctataaggagaagcagcggaccatccaggccaagaaggaggtggagcagcggagagccggcggctacagccggaagtacgccagcaaagccaagaatctggcagacgatatggtgagaaacaccgctagagatctgctgtactacgccgtgacccaggatgccatgctgatcttcgccaacctgagccggggcttcggccggcagggcaagcggaccttcatggccgagagacagtacacacggatggaggactggctgaccgccaagctggcctacgagggcctgagcaagacctacctgtccaagacactggcccagtacacctccaagacatgcagcaactgtgggtttaccatcaccagcgccgactacgacagggtgctggagaagctgaagaagacagcaacaggctggatgaccacaattaacggcaaggagctgaaggtggagggccagattacctactacaacagatacaagagacagaacgtagtcaaggacctgtccgtcgagctggatagactgagcgaagaatctgtgaacaacgacatctcctcctggacaaagggcagaagcggagaagctctgagcctcctgaagaaaagattctcccatagacccgtgcaggagaagttcgtgtgcctgaactgcggcttcgagacacacgcagccgagcaagccgccctgaacatcgccagatcctggctgttcctgcggagccaggagtacaagaaataccagacaaacaagacaaccggcaacaccgataagagagccttcgtcgagacctggcagtccttttaccggaagaagcttaaggaggtgtggaaacctgccgtgcggtctggcggatctggcggaggctccaccagccccaagaaaaagagaaaagtctaagctgccttctgcggggcttgccttctggccatgcccttcttctctcccttgcacctgtacctcttggtctttgaataaagcctgagtaggaaggctagcaaaaaaaaaaaaaaaaaaaaaaaaaaaaaaaaaaaaaaaaaaaaaaaaaaaaaaaaaaaaaaaaaaaaaaaaaaaaaaaa

SEQ ID NO: 9980 - RNA, 8787 nt, synthetic construct
  source 1..8787: mol_type = other RNA
aggaaataagagagaaaagaagagtaagaagaaatataagagccaccatggcccctaagaagaagcgtaaagtgagccggatgaaccacgaccaggagttcgacccccctaaggtgtaccctcccgtccccgccgagaagagaaagcccatccgggtcctgagcctgttcgatggcatcgccaccggtctgctggtgctgaaggacctgggcatccaggtggataggtacattgcctccgaggtgtgcgaggactccatcaccgtgggaatggtgcgtcatcagggcaagatcatgtacgtgggcgacgtgcggagcgtgacacagaagcatatccaggagtggggccctttcgacctggtgatcggcggcagcccttgcaatgacctgagcatcgtgaacccagcccggaagggcctgtacgagggaaccggcagactgttcttcgagttttacagactgctgcacgacgcccggcctaaggaaggcgacgaccggcccttcttttggctgttcgagaatgtggtggccatgggagtcagcgacaagcgggatattagccggttcctggagagcaaccccgtgatgatcgatgccaaggaagtgagcgccgcccaccgggccagatacttctggggcaatctgcctggcatgaacagacccctggccagcaccgtgaacgacaagctggagctgcaggagtgcctggagcacggccggatcgccaagttcagcaaggtgagaaccatcaccacccgaagcaacagcatcaaacaaggcaaggaccagcactttcctgtgttcatgaacgagaaggaggacatcctgtggtgtaccgagatggagagagtgttcgggttcccagtccactacacagatgtcagcaacatgtctagactggccagacagagactgctgggaagaagctggtccgtccctgtgatcagacacctgttcgcccctctgaaggagtacttcgcctgcgtgagcagcggcaacagcaacgccaacagccggggccccagcttctctagcggcctggtgccactgtccctgagagggagccacatgggccccatggagatctacaaaaccgtgagcgcctggaagcggcagcctgtgcgcgtgctgagcctgtttcggaatatcgataaagtcctgaaaagcctgggattcctggagagcggctctggctccggcggtggcaccctgaagtacgtggaggatgtgacaaacgtggtcagacgggatgtggagaagtggggccccttcgatctggtgtacggcagcacccaacccctgggcagctcttgtgaccggtgccctggctggtacatgtttcagttccaccggatcctgcagtacgccctgccgagacaggagtcccagcggccattcttttggattttcatggacaacttgctgctgaccgaggatgaccaggaaactaccactcggttcctgcagaccgaagccgtgaccctgcaggacgtgagaggccgggactaccagaacgccatgcgggtgtggtccaacatccctggactgaaaagcaagcacgcacctctgacccctaaagaagaggagtacctgcaggcccaggtgcggagcagaagcaagctggacgcccctaaggtggatctgctggtgaagaattgcctcctgcccctgagagagtacttcaagtatttcagccagaatagtctgcccctgggaggcagcggcggcggcatccagggcagcctgaccttcaaggacgtggccatgaacttcacccaggaggagtggtgcctgctggaccacagccagaaggagctgtacctggaggtgatgctggagaacgtgcagaacctgctgagcgtgggcctgcccgtgcccagggagtactacaccagctacttccagcaggagaaggccccctggctgctggtgcagaagggccccaggaacagcagccccgaggccgagaccaacggcggcccaagcagcggcgcccctcctcccagcggcggcaggcggcccaagcagcggcgcccctcctcccagcggcggcagcccagccggctccccaacctctaccgaggagggcacctctgagtccgccacccccgagagcggccctggcacctccaccgagcccagcgagggcagcgcacccggcagccctgccggcagccccacctccacagaggagggaaccagcaccgagcccagcgaaggcagcgccccaggcaccagcaccgagcctagtgagcaggagattaaacggatcaacaagatcagaagaagacttgtgaaagacagcaacaccaagaaggccggcaagacaggccccatgaaaaccctgctggttagagtgatgacacccgatctgagagagcggctggaaaacctgagaaagaagcctgaaaatatcccccagcccatcagcaatacatctagagccaacctgaataagctgctgaccgattacaccgaaatgaagaaggcgatcctgcatgtgtactgggaagagttccagaaggaccctgtgggcctgatgagccgggtggcccagcctgccagcaagaagatcgatcagaacaagctgaaacctgagatggacgagaagggcaacctgaccaccgccggctttgcctgctctcagtgtggccagcccctgttcgtgtacaagctggagcaggtgtctgagaagggcaaggcttacaccaactacttcggacggtgcaatgtggccgagcacgaaaagctgatcctgctggcccagctgaagcccgagaaggatagcgacgaagccgtgacatatagcctgggaaagtttgggcagagggccctggatttctacagcattcatgtgaccaaggagtccacccaccccgtgaagcccctggcccagatcgccggaaacagatacgcctccggacctgtgggaaaggccctgagcgacgcatgtatgggcacaatcgcctccttcctgtctaagtaccaggacatcatcatcgaacaccagaaggtggtgaagggcaaccagaagagactggagagcctgcgggagctggccggcaaggaaaacctggaataccctagcgtgaccctgccacctcagcctcacaccaaggagggcgttgatgcctacaacgaagtgatcgcccgggtgcgaatgtgggtgaacctgaacctgtggcagaagctgaagctaagcagagatgatgccaagcctctgctgagactgaagggattcccttcctttcctctggtcgagagacaggccaacgaagtggactggtgggacatggtgtgtaacgtgaagaagctgatcaacgagaaaaaggaggatggcaaggtgttttggcagaatctggctggctacaagagacaggaagccctgagaccatacctgagcagcgaggaagatcggaagaagggaaagaaattcgctcggtaccagctgggcgacctgctgctgcacctggaaaagaagcacggcgaggactggggaaaggtgtacgacgaggcctgggagcggattgacaagaaagtggaaggcctgagcaagcacatcaagctggaagaggaacggagaagcgaggacgcccagagcaaggccgccctgaccgactggctgcgggctaaggccagcttcgtgatcgagggcctgaaggaggccgacaaggacgagttctgcagatgcgagctgaagctgcagaagtggtacggggacctgcggggaaagcccttcgccatcgaagccgagaacagcatcctggacatcagcggcttcagcaagcagtacaactgtgccttcatctggcagaaggacggcgtgaagaagctgaacctgtacctgatcatcaactacttcaagggcggcaagctgcggttcaagaagatcaaacctgaagccttcgaagccaacagattctacaccgtgatcaacaaaaagagcggcgagatcgtgcccatggaggtgaacttcaacttcgacgaccccaacctgatcatcctgcctctggcctttggcaagagacagggcagagaattcatctggaacgacctgctgtccctggaaaccggcagcctgaagctggccaacggaagagtgatcgagaagacactgtacaacagaagaacccggcaggatgagcctgccctgttcgtggccctgaccttcgagcggcgggaggtcctggactcctccaatatcaaaccaatgaacctgatcggcgtggcaagaggcgaaaacatccccgccgtgatcgccctgaccgaccccgagggctgcccactgagccggtttaaggatagcctgggaaacccaacccacatcctgagaatcggcgagagctataaggagaagcagcggaccatccaggccaagaaggaggtggagcagcggagagccggcggctacagccggaagtacgccagcaaagccaagaatctggcagacgatatggtgagaaacaccgctagagatctgctgtactacgccgtgacccaggatgccatgctgatcttcgccaacctgagccggggcttcggccggcagggcaagcggaccttcatggccgagagacagtacacacggatggaggactggctgaccgccaagctggcctacgagggcctgagcaagacctacctgtccaagacactggcccagtacacctccaagacatgcagcaactgtgggtttaccatcaccagcgccgactacgacagggtgctggagaagctgaagaagacagcaacaggctggatgaccacaattaacggcaaggagctgaaggtggagggccagattacctactacaacagatacaagagacagaacgtagtcaaggacctgtccgtcgagctggatagactgagcgaagaatctgtgaacaacgacatctcctcctggacaaagggcagaagcggagaagctctgagcctcctgaagaaaagattctcccatagacccgtgcaggagaagttcgtgtgcctgaactgcggcttcgagacacacgcagccgagcaagccgccctgaacatcgccagatcctggctgttcctgcggagccaggagtacaagaaataccagacaaacaagacaaccggcaacaccgataagagagccttcgtcgagacctggcagtccttttaccggaagaagcttaaggaggtgtggaaacctgccgtgcggtctggcggatctggcggaggctccaccagccccaagaaaaagagaaaagtctaagctgccttctgcggggcttgccttctggccatgcccttcttctctcccttgcacctgtacctcttggtctttgaataaagcctgagtaggaaggctagcaaaaaaaaaaaaaaaaaaaaaaaaaaaaaaaaaaaaaaaaaaaaaaaaaaaaaaaaaaaaaaaaaaaaaaaaaaaaaaaagcccagccggctccccaacctctaccgaggagggcacctctgagtccgccacccccgagagcggccctggcacctccaccgagcccagcgagggcagcgcacccggcagccctgccggcagccccacctccacagaggagggaaccagcaccgagcccagcgaaggcagcgccccaggcaccagcaccgagcctagtgagcaggagattaaacggatcaacaagatcagaagaagacttgtgaaagacagcaacaccaagaaggccggcaagacaggccccatgaaaaccctgctggttagagtgatgacacccgatctgagagagcggctggaaaacctgagaaagaagcctgaaaatatcccccagcccatcagcaatacatctagagccaacctgaataagctgctgaccgattacaccgaaatgaagaaggcgatcctgcatgtgtactgggaagagttccagaaggaccctgtgggcctgatgagccgggtggcccagcctgccagcaagaagatcgatcagaacaagctgaaacctgagatggacgagaagggcaacctgaccaccgccggctttgcctgctctcagtgtggccagcccctgttcgtgtacaagctggagcaggtgtctgagaagggcaaggcttacaccaactacttcggacggtgcaatgtggccgagcacgaaaagctgatcctgctggcccagctgaagcccgagaaggatagcgacgaagccgtgacatatagcctgggaaagtttgggcagagggccctggatttctacagcattcatgtgaccaaggagtccacccaccccgtgaagcccctggcccagatcgccggaaacagatacgcctccggacctgtgggaaaggccctgagcgacgcatgtatgggcacaatcgcctccttcctgtctaagtaccaggacatcatcatcgaacaccagaaggtggtgaagggcaaccagaagagactggagagcctgcgggagctggccggcaaggaaaacctggaataccctagcgtgaccctgccacctcagcctcacaccaaggagggcgttgatgcctacaacgaagtgatcgcccgggtgcgaatgtgggtgaacctgaacctgtggcagaagctgaagctaagcagagatgatgccaagcctctgctgagactgaagggattcccttcctttcctctggtcgagagacaggccaacgaagtggactggtgggacatggtgtgtaacgtgaagaagctgatcaacgagaaaaaggaggatggcaaggtgttttggcagaatctggctggctacaagagacaggaagccctgagaccatacctgagcagcgaggaagatcggaagaagggaaagaaattcgctcggtaccagctgggcgacctgctgctgcacctggaaaagaagcacggcgaggactggggaaaggtgtacgacgaggcctgggagcggattgacaagaaagtggaaggcctgagcaagcacatcaagctggaagaggaacggagaagcgaggacgcccagagcaaggccgccctgaccgactggctgcgggctaaggccagcttcgtgatcgagggcctgaaggaggccgacaaggacgagttctgcagatgcgagctgaagctgcagaagtggtacggggacctgcggggaaagcccttcgccatcgaagccgagaacagcatcctggacatcagcggcttcagcaagcagtacaactgtgccttcatctggcagaaggacggcgtgaagaagctgaacctgtacctgatcatcaactacttcaagggcggcaagctgcggttcaagaagatcaaacctgaagccttcgaagccaacagattctacaccgtgatcaacaaaaagagcggcgagatcgtgcccatggaggtgaacttcaacttcgacgaccccaacctgatcatcctgcctctggcctttggcaagagacagggcagagaattcatctggaacgacctgctgtccctggaaaccggcagcctgaagctggccaacggaagagtgatcgagaagacactgtacaacagaagaacccggcaggatgagcctgccctgttcgtggccctgaccttcgagcggcgggaggtcctggactcctccaatatcaaaccaatgaacctgatcggcgtggcaagaggcgaaaacatccccgccgtgatcgccctgaccgaccccgagggctgcccactgagccggtttaaggatagcctgggaaacccaacccacatcctgagaatcggcgagagctataaggagaagcagcggaccatccaggccaagaaggaggtggagcagcggagagccggcggctacagccggaagtacgccagcaaagccaagaatctggcagacgatatggtgagaaacaccgctagagatctgctgtactacgccgtgacccaggatgccatgctgatcttcgccaacctgagccggggcttcggccggcagggcaagcggaccttcatggccgagagacagtacacacggatggaggactggctgaccgccaagctggcctacgagggcctgagcaagacctacctgtccaagacactggcccagtacacctccaagacatgcagcaactgtgggtttaccatcaccagcgccgactacgacagggtgctggagaagctgaagaagacagcaacaggctggatgaccacaattaacggcaaggagctgaaggtggagggccagattacctactacaacagatacaagagacagaacgtagtcaaggacctgtccgtcgagctggatagactgagcgaagaatctgtgaacaacgacatctcctcctggacaaagggcagaagcggagaagctctgagcctcctgaagaaaagattctcccatagacccgtgcaggagaagttcgtgtgcctgaactgcggcttcgagacacacgcagccgagcaagccgccctgaacatcgccagatcctggctgttcctgcggagccaggagtacaagaaataccagacaaacaagacaaccggcaacaccgataagagagccttcgtcgagacctggcagtccttttaccggaagaagcttaaggaggtgtggaaacctgccgtgcggtctggcggatctggcggaggctccaccagccccaagaaaaagagaaaagtctaagctgccttctgcggggcttgccttctggccatgcccttcttctctcccttgcacctgtacctcttggtctttgaataaagcctgagtaggaaggctagcaaaaaaaaaaaaaaaaaaaaaaaaaaaaaaaaaaaaaaaaaaaaaaaaaaaaaaaaaaaaaaaaaaaaaaaaaaaaaaaa

SEQ ID NO: 9981 - RNA, 8787 nt, synthetic construct
  source 1..8787: mol_type = other RNA
aggaaataagagagaaaagaagagtaagaagaaatataagagccaccatggcccctaagaagaagcgtaaagtgagccggatgaaccacgaccaggagttcgacccccctaaggtgtaccctcccgtccccgccgagaagagaaagcccatccgggtcctgagcctgttcgatggcatcgccaccggtctgctggtgctgaaggacctgggcatccaggtggataggtacattgcctccgaggtgtgcgaggactccatcaccgtgggaatggtgcgtcatcagggcaagatcatgtacgtgggcgacgtgcggagcgtgacacagaagcatatccaggagtggggccctttcgacctggtgatcggcggcagcccttgcaatgacctgagcatcgtgaacccagcccggaagggcctgtacgagggaaccggcagactgttcttcgagttttacagactgctgcacgacgcccggcctaaggaaggcgacgaccggcccttcttttggctgttcgagaatgtggtggccatgggagtcagcgacaagcgggatattagccggttcctggagagcaaccccgtgatgatcgatgccaaggaagtgagcgccgcccaccgggccagatacttctggggcaatctgcctggcatgaacagacccctggccagcaccgtgaacgacaagctggagctgcaggagtgcctggagcacggccggatcgccaagttcagcaaggtgagaaccatcaccacccgaagcaacagcatcaaacaaggcaaggaccagcactttcctgtgttcatgaacgagaaggaggacatcctgtggtgtaccgagatggagagagtgttcgggttcccagtccactacacagatgtcagcaacatgtctagactggccagacagagactgctgggaagaagctggtccgtccctgtgatcagacacctgttcgcccctctgaaggagtacttcgcctgcgtgagcagcggcaacagcaacgccaacagccggggccccagcttctctagcggcctggtgccactgtccctgagagggagccacatgggccccatggagatctacaaaaccgtgagcgcctggaagcggcagcctgtgcgcgtgctgagcctgtttcggaatatcgataaagtcctgaaaagcctgggattcctggagagcggctctggctccggcggtggcaccctgaagtacgtggaggatgtgacaaacgtggtcagacgggatgtggagaagtggggccccttcgatctggtgtacggcagcacccaacccctgggcagctcttgtgaccggtgccctggctggtacatgtttcagttccaccggatcctgcagtacgccctgccgagacaggagtcccagcggccattcttttggattttcatggacaacttgctgctgaccgaggatgaccaggaaactaccactcggttcctgcagaccgaagccgtgaccctgcaggacgtgagaggccgggactaccagaacgccatgcgggtgtggtccaacatccctggactgaaaagcaagcacgcacctctgacccctaaagaagaggagtacctgcaggcccaggtgcggagcagaagcaagctggacgcccctaaggtggatctgctggtgaagaattgcctcctgcccctgagagagtacttcaagtatttcagccagaatagtctgcccctgggaggcagcggcggcggcatgagcgtgaccttcgaggacgtggccatgtacttcagccccgccgagtgggtgctgctgggcgaggagcagaagcagctgtacaggcacgtgatgtgggagaactaccagaccctggtgagcctgggcatccagatcagcaagcccgtggtgatcagcagcatcgagaggggcgaggagctgtgggcccagagccccaccgaggacgaggacgaggacatcctgagcggcaccagccccggcggcggcccaagcagcggcgcccctcctcccagcggcggcaggcggcccaagcagcggcgcccctcctcccagcggcggcagcccagccggctccccaacctctaccgaggagggcacctctgagtccgccacccccgagagcggccctggcacctccaccgagcccagcgagggcagcgcacccggcagccctgccggcagccccacctccacagaggagggaaccagcaccgagcccagcgaaggcagcgccccaggcaccagcaccgagcctagtgagcaggagattaaacggatcaacaagatcagaagaagacttgtgaaagacagcaacaccaagaaggccggcaagacaggccccatgaaaaccctgctggttagagtgatgacacccgatctgagagagcggctggaaaacctgagaaagaagcctgaaaatatcccccagcccatcagcaatacatctagagccaacctgaataagctgctgaccgattacaccgaaatgaagaaggcgatcctgcatgtgtactgggaagagttccagaaggaccctgtgggcctgatgagccgggtggcccagcctgccagcaagaagatcgatcagaacaagctgaaacctgagatggacgagaagggcaacctgaccaccgccggctttgcctgctctcagtgtggccagcccctgttcgtgtacaagctggagcaggtgtctgagaagggcaaggcttacaccaactacttcggacggtgcaatgtggccgagcacgaaaagctgatcctgctggcccagctgaagcccgagaaggatagcgacgaagccgtgacatatagcctgggaaagtttgggcagagggccctggatttctacagcattcatgtgaccaaggagtccacccaccccgtgaagcccctggcccagatcgccggaaacagatacgcctccggacctgtgggaaaggccctgagcgacgcatgtatgggcacaatcgcctccttcctgtctaagtaccaggacatcatcatcgaacaccagaaggtggtgaagggcaaccagaagagactggagagcctgcgggagctggccggcaaggaaaacctggaataccctagcgtgaccctgccacctcagcctcacaccaaggagggcgttgatgcctacaacgaagtgatcgcccgggtgcgaatgtgggtgaacctgaacctgtggcagaagctgaagctaagcagagatgatgccaagcctctgctgagactgaagggattcccttcctttcctctggtcgagagacaggccaacgaagtggactggtgggacatggtgtgtaacgtgaagaagctgatcaacgagaaaaaggaggatggcaaggtgttttggcagaatctggctggctacaagagacaggaagccctgagaccatacctgagcagcgaggaagatcggaagaagggaaagaaattcgctcggtaccagctgggcgacctgctgctgcacctggaaaagaagcacggcgaggactggggaaaggtgtacgacgaggcctgggagcggattgacaagaaagtggaaggcctgagcaagcacatcaagctggaagaggaacggagaagcgaggacgcccagagcaaggccgccctgaccgactggctgcgggctaaggccagcttcgtgatcgagggcctgaaggaggccgacaaggacgagttctgcagatgcgagctgaagctgcagaagtggtacggggacctgcggggaaagcccttcgccatcgaagccgagaacagcatcctggacatcagcggcttcagcaagcagtacaactgtgccttcatctggcagaaggacggcgtgaagaagctgaacctgtacctgatcatcaactacttcaagggcggcaagctgcggttcaagaagatcaaacctgaagccttcgaagccaacagattctacaccgtgatcaacaaaaagagcggcgagatcgtgcccatggaggtgaacttcaacttcgacgaccccaacctgatcatcctgcctctggcctttggcaagagacagggcagagaattcatctggaacgacctgctgtccctggaaaccggcagcctgaagctggccaacggaagagtgatcgagaagacactgtacaacagaagaacccggcaggatgagcctgccctgttcgtggccctgaccttcgagcggcgggaggtcctggactcctccaatatcaaaccaatgaacctgatcggcgtggcaagaggcgaaaacatccccgccgtgatcgccctgaccgaccccgagggctgcccactgagccggtttaaggatagcctgggaaacccaacccacatcctgagaatcggcgagagctataaggagaagcagcggaccatccaggccaagaaggaggtggagcagcggagagccggcggctacagccggaagtacgccagcaaagccaagaatctggcagacgatatggtgagaaacaccgctagagatctgctgtactacgccgtgacccaggatgccatgctgatcttcgccaacctgagccggggcttcggccggcagggcaagcggaccttcatggccgagagacagtacacacggatggaggactggctgaccgccaagctggcctacgagggcctgagcaagacctacctgtccaagacactggcccagtacacctccaagacatgcagcaactgtgggtttaccatcaccagcgccgactacgacagggtgctggagaagctgaagaagacagcaacaggctggatgaccacaattaacggcaaggagctgaaggtggagggccagattacctactacaacagatacaagagacagaacgtagtcaaggacctgtccgtcgagctggatagactgagcgaagaatctgtgaacaacgacatctcctcctggacaaagggcagaagcggagaagctctgagcctcctgaagaaaagattctcccatagacccgtgcaggagaagttcgtgtgcctgaactgcggcttcgagacacacgcagccgagcaagccgccctgaacatcgccagatcctggctgttcctgcggagccaggagtacaagaaataccagacaaacaagacaaccggcaacaccgataagagagccttcgtcgagacctggcagtccttttaccggaagaagcttaaggaggtgtggaaacctgccgtgcggtctggcggatctggcggaggctccaccagccccaagaaaaagagaaaagtctaagctgccttctgcggggcttgccttctggccatgcccttcttctctcccttgcacctgtacctcttggtctttgaataaagcctgagtaggaaggctagcaaaaaaaaaaaaaaaaaaaaaaaaaaaaaaaaaaaaaaaaaaaaaaaaaaaaaaaaaaaaaaaaaaaaaaaaaaaaaaaagcccagccggctccccaacctctaccgaggagggcacctctgagtccgccacccccgagagcggccctggcacctccaccgagcccagcgagggcagcgcacccggcagccctgccggcagccccacctccacagaggagggaaccagcaccgagcccagcgaaggcagcgccccaggcaccagcaccgagcctagtgagcaggagattaaacggatcaacaagatcagaagaagacttgtgaaagacagcaacaccaagaaggccggcaagacaggccccatgaaaaccctgctggttagagtgatgacacccgatctgagagagcggctggaaaacctgagaaagaagcctgaaaatatcccccagcccatcagcaatacatctagagccaacctgaataagctgctgaccgattacaccgaaatgaagaaggcgatcctgcatgtgtactgggaagagttccagaaggaccctgtgggcctgatgagccgggtggcccagcctgccagcaagaagatcgatcagaacaagctgaaacctgagatggacgagaagggcaacctgaccaccgccggctttgcctgctctcagtgtggccagcccctgttcgtgtacaagctggagcaggtgtctgagaagggcaaggcttacaccaactacttcggacggtgcaatgtggccgagcacgaaaagctgatcctgctggcccagctgaagcccgagaaggatagcgacgaagccgtgacatatagcctgggaaagtttgggcagagggccctggatttctacagcattcatgtgaccaaggagtccacccaccccgtgaagcccctggcccagatcgccggaaacagatacgcctccggacctgtgggaaaggccctgagcgacgcatgtatgggcacaatcgcctccttcctgtctaagtaccaggacatcatcatcgaacaccagaaggtggtgaagggcaaccagaagagactggagagcctgcgggagctggccggcaaggaaaacctggaataccctagcgtgaccctgccacctcagcctcacaccaaggagggcgttgatgcctacaacgaagtgatcgcccgggtgcgaatgtgggtgaacctgaacctgtggcagaagctgaagctaagcagagatgatgccaagcctctgctgagactgaagggattcccttcctttcctctggtcgagagacaggccaacgaagtggactggtgggacatggtgtgtaacgtgaagaagctgatcaacgagaaaaaggaggatggcaaggtgttttggcagaatctggctggctacaagagacaggaagccctgagaccatacctgagcagcgaggaagatcggaagaagggaaagaaattcgctcggtaccagctgggcgacctgctgctgcacctggaaaagaagcacggcgaggactggggaaaggtgtacgacgaggcctgggagcggattgacaagaaagtggaaggcctgagcaagcacatcaagctggaagaggaacggagaagcgaggacgcccagagcaaggccgccctgaccgactggctgcgggctaaggccagcttcgtgatcgagggcctgaaggaggccgacaaggacgagttctgcagatgcgagctgaagctgcagaagtggtacggggacctgcggggaaagcccttcgccatcgaagccgagaacagcatcctggacatcagcggcttcagcaagcagtacaactgtgccttcatctggcagaaggacggcgtgaagaagctgaacctgtacctgatcatcaactacttcaagggcggcaagctgcggttcaagaagatcaaacctgaagccttcgaagccaacagattctacaccgtgatcaacaaaaagagcggcgagatcgtgcccatggaggtgaacttcaacttcgacgaccccaacctgatcatcctgcctctggcctttggcaagagacagggcagagaattcatctggaacgacctgctgtccctggaaaccggcagcctgaagctggccaacggaagagtgatcgagaagacactgtacaacagaagaacccggcaggatgagcctgccctgttcgtggccctgaccttcgagcggcgggaggtcctggactcctccaatatcaaaccaatgaacctgatcggcgtggcaagaggcgaaaacatccccgccgtgatcgccctgaccgaccccgagggctgcccactgagccggtttaaggatagcctgggaaacccaacccacatcctgagaatcggcgagagctataaggagaagcagcggaccatccaggccaagaaggaggtggagcagcggagagccggcggctacagccggaagtacgccagcaaagccaagaatctggcagacgatatggtgagaaacaccgctagagatctgctgtactacgccgtgacccaggatgccatgctgatcttcgccaacctgagccggggcttcggccggcagggcaagcggaccttcatggccgagagacagtacacacggatggaggactggctgaccgccaagctggcctacgagggcctgagcaagacctacctgtccaagacactggcccagtacacctccaagacatgcagcaactgtgggtttaccatcaccagcgccgactacgacagggtgctggagaagctgaagaagacagcaacaggctggatgaccacaattaacggcaaggagctgaaggtggagggccagattacctactacaacagatacaagagacagaacgtagtcaaggacctgtccgtcgagctggatagactgagcgaagaatctgtgaacaacgacatctcctcctggacaaagggcagaagcggagaagctctgagcctcctgaagaaaagattctcccatagacccgtgcaggagaagttcgtgtgcctgaactgcggcttcgagacacacgcagccgagcaagccgccctgaacatcgccagatcctggctgttcctgcggagccaggagtacaagaaataccagacaaacaagacaaccggcaacaccgataagagagccttcgtcgagacctggcagtccttttaccggaagaagcttaaggaggtgtggaaacctgccgtgcggtctggcggatctggcggaggctccaccagccccaagaaaaagagaaaagtctaagctgccttctgcggggcttgccttctggccatgcccttcttctctcccttgcacctgtacctcttggtctttgaataaagcctgagtaggaaggctagcaaaaaaaaaaaaaaaaaaaaaaaaaaaaaaaaaaaaaaaaaaaaaaaaaaaaaaaaaaaaaaaaaaaaaaaaaaaaaaaa

SEQ ID NO: 9982 - RNA, 8787 nt, synthetic construct
  source 1..8787: mol_type = other RNA
aggaaataagagagaaaagaagagtaagaagaaatataagagccaccatggcccctaagaagaagcgtaaagtgagccggatgaaccacgaccaggagttcgacccccctaaggtgtaccctcccgtccccgccgagaagagaaagcccatccgggtcctgagcctgttcgatggcatcgccaccggtctgctggtgctgaaggacctgggcatccaggtggataggtacattgcctccgaggtgtgcgaggactccatcaccgtgggaatggtgcgtcatcagggcaagatcatgtacgtgggcgacgtgcggagcgtgacacagaagcatatccaggagtggggccctttcgacctggtgatcggcggcagcccttgcaatgacctgagcatcgtgaacccagcccggaagggcctgtacgagggaaccggcagactgttcttcgagttttacagactgctgcacgacgcccggcctaaggaaggcgacgaccggcccttcttttggctgttcgagaatgtggtggccatgggagtcagcgacaagcgggatattagccggttcctggagagcaaccccgtgatgatcgatgccaaggaagtgagcgccgcccaccgggccagatacttctggggcaatctgcctggcatgaacagacccctggccagcaccgtgaacgacaagctggagctgcaggagtgcctggagcacggccggatcgccaagttcagcaaggtgagaaccatcaccacccgaagcaacagcatcaaacaaggcaaggaccagcactttcctgtgttcatgaacgagaaggaggacatcctgtggtgtaccgagatggagagagtgttcgggttcccagtccactacacagatgtcagcaacatgtctagactggccagacagagactgctgggaagaagctggtccgtccctgtgatcagacacctgttcgcccctctgaaggagtacttcgcctgcgtgagcagcggcaacagcaacgccaacagccggggccccagcttctctagcggcctggtgccactgtccctgagagggagccacatgggccccatggagatctacaaaaccgtgagcgcctggaagcggcagcctgtgcgcgtgctgagcctgtttcggaatatcgataaagtcctgaaaagcctgggattcctggagagcggctctggctccggcggtggcaccctgaagtacgtggaggatgtgacaaacgtggtcagacgggatgtggagaagtggggccccttcgatctggtgtacggcagcacccaacccctgggcagctcttgtgaccggtgccctggctggtacatgtttcagttccaccggatcctgcagtacgccctgccgagacaggagtcccagcggccattcttttggattttcatggacaacttgctgctgaccgaggatgaccaggaaactaccactcggttcctgcagaccgaagccgtgaccctgcaggacgtgagaggccgggactaccagaacgccatgcgggtgtggtccaacatccctggactgaaaagcaagcacgcacctctgacccctaaagaagaggagtacctgcaggcccaggtgcggagcagaagcaagctggacgcccctaaggtggatctgctggtgaagaattgcctcctgcccctgagagagtacttcaagtatttcagccagaatagtctgcccctgggaggcagcggcggcggcgagagcgtgaccttcgaggacgtggccgtgtacttcagcgagaacgagtggatcggcctgggccccgcccagagggccctgtacagggacgtgatgctggagaactacggcgccgtggccagcctggccttccccttccccaagcccgccctgatcagccagctggagaggggcgaggccccctggtgcagcgccccccagggcgccctggacggcgagagccccaggggcatcagcagcgagggcggcccaagcagcggcgcccctcctcccagcggcggcaggcggcccaagcagcggcgcccctcctcccagcggcggcagcccagccggctccccaacctctaccgaggagggcacctctgagtccgccacccccgagagcggccctggcacctccaccgagcccagcgagggcagcgcacccggcagccctgccggcagccccacctccacagaggagggaaccagcaccgagcccagcgaaggcagcgccccaggcaccagcaccgagcctagtgagcaggagattaaacggatcaacaagatcagaagaagacttgtgaaagacagcaacaccaagaaggccggcaagacaggccccatgaaaaccctgctggttagagtgatgacacccgatctgagagagcggctggaaaacctgagaaagaagcctgaaaatatcccccagcccatcagcaatacatctagagccaacctgaataagctgctgaccgattacaccgaaatgaagaaggcgatcctgcatgtgtactgggaagagttccagaaggaccctgtgggcctgatgagccgggtggcccagcctgccagcaagaagatcgatcagaacaagctgaaacctgagatggacgagaagggcaacctgaccaccgccggctttgcctgctctcagtgtggccagcccctgttcgtgtacaagctggagcaggtgtctgagaagggcaaggcttacaccaactacttcggacggtgcaatgtggccgagcacgaaaagctgatcctgctggcccagctgaagcccgagaaggatagcgacgaagccgtgacatatagcctgggaaagtttgggcagagggccctggatttctacagcattcatgtgaccaaggagtccacccaccccgtgaagcccctggcccagatcgccggaaacagatacgcctccggacctgtgggaaaggccctgagcgacgcatgtatgggcacaatcgcctccttcctgtctaagtaccaggacatcatcatcgaacaccagaaggtggtgaagggcaaccagaagagactggagagcctgcgggagctggccggcaaggaaaacctggaataccctagcgtgaccctgccacctcagcctcacaccaaggagggcgttgatgcctacaacgaagtgatcgcccgggtgcgaatgtgggtgaacctgaacctgtggcagaagctgaagctaagcagagatgatgccaagcctctgctgagactgaagggattcccttcctttcctctggtcgagagacaggccaacgaagtggactggtgggacatggtgtgtaacgtgaagaagctgatcaacgagaaaaaggaggatggcaaggtgttttggcagaatctggctggctacaagagacaggaagccctgagaccatacctgagcagcgaggaagatcggaagaagggaaagaaattcgctcggtaccagctgggcgacctgctgctgcacctggaaaagaagcacggcgaggactggggaaaggtgtacgacgaggcctgggagcggattgacaagaaagtggaaggcctgagcaagcacatcaagctggaagaggaacggagaagcgaggacgcccagagcaaggccgccctgaccgactggctgcgggctaaggccagcttcgtgatcgagggcctgaaggaggccgacaaggacgagttctgcagatgcgagctgaagctgcagaagtggtacggggacctgcggggaaagcccttcgccatcgaagccgagaacagcatcctggacatcagcggcttcagcaagcagtacaactgtgccttcatctggcagaaggacggcgtgaagaagctgaacctgtacctgatcatcaactacttcaagggcggcaagctgcggttcaagaagatcaaacctgaagccttcgaagccaacagattctacaccgtgatcaacaaaaagagcggcgagatcgtgcccatggaggtgaacttcaacttcgacgaccccaacctgatcatcctgcctctggcctttggcaagagacagggcagagaattcatctggaacgacctgctgtccctggaaaccggcagcctgaagctggccaacggaagagtgatcgagaagacactgtacaacagaagaacccggcaggatgagcctgccctgttcgtggccctgaccttcgagcggcgggaggtcctggactcctccaatatcaaaccaatgaacctgatcggcgtggcaagaggcgaaaacatccccgccgtgatcgccctgaccgaccccgagggctgcccactgagccggtttaaggatagcctgggaaacccaacccacatcctgagaatcggcgagagctataaggagaagcagcggaccatccaggccaagaaggaggtggagcagcggagagccggcggctacagccggaagtacgccagcaaagccaagaatctggcagacgatatggtgagaaacaccgctagagatctgctgtactacgccgtgacccaggatgccatgctgatcttcgccaacctgagccggggcttcggccggcagggcaagcggaccttcatggccgagagacagtacacacggatggaggactggctgaccgccaagctggcctacgagggcctgagcaagacctacctgtccaagacactggcccagtacacctccaagacatgcagcaactgtgggtttaccatcaccagcgccgactacgacagggtgctggagaagctgaagaagacagcaacaggctggatgaccacaattaacggcaaggagctgaaggtggagggccagattacctactacaacagatacaagagacagaacgtagtcaaggacctgtccgtcgagctggatagactgagcgaagaatctgtgaacaacgacatctcctcctggacaaagggcagaagcggagaagctctgagcctcctgaagaaaagattctcccatagacccgtgcaggagaagttcgtgtgcctgaactgcggcttcgagacacacgcagccgagcaagccgccctgaacatcgccagatcctggctgttcctgcggagccaggagtacaagaaataccagacaaacaagacaaccggcaacaccgataagagagccttcgtcgagacctggcagtccttttaccggaagaagcttaaggaggtgtggaaacctgccgtgcggtctggcggatctggcggaggctccaccagccccaagaaaaagagaaaagtctaagctgccttctgcggggcttgccttctggccatgcccttcttctctcccttgcacctgtacctcttggtctttgaataaagcctgagtaggaaggctagcaaaaaaaaaaaaaaaaaaaaaaaaaaaaaaaaaaaaaaaaaaaaaaaaaaaaaaaaaaaaaaaaaaaaaaaaaaaaaaaagcccagccggctccccaacctctaccgaggagggcacctctgagtccgccacccccgagagcggccctggcacctccaccgagcccagcgagggcagcgcacccggcagccctgccggcagccccacctccacagaggagggaaccagcaccgagcccagcgaaggcagcgccccaggcaccagcaccgagcctagtgagcaggagattaaacggatcaacaagatcagaagaagacttgtgaaagacagcaacaccaagaaggccggcaagacaggccccatgaaaaccctgctggttagagtgatgacacccgatctgagagagcggctggaaaacctgagaaagaagcctgaaaatatcccccagcccatcagcaatacatctagagccaacctgaataagctgctgaccgattacaccgaaatgaagaaggcgatcctgcatgtgtactgggaagagttccagaaggaccctgtgggcctgatgagccgggtggcccagcctgccagcaagaagatcgatcagaacaagctgaaacctgagatggacgagaagggcaacctgaccaccgccggctttgcctgctctcagtgtggccagcccctgttcgtgtacaagctggagcaggtgtctgagaagggcaaggcttacaccaactacttcggacggtgcaatgtggccgagcacgaaaagctgatcctgctggcccagctgaagcccgagaaggatagcgacgaagccgtgacatatagcctgggaaagtttgggcagagggccctggatttctacagcattcatgtgaccaaggagtccacccaccccgtgaagcccctggcccagatcgccggaaacagatacgcctccggacctgtgggaaaggccctgagcgacgcatgtatgggcacaatcgcctccttcctgtctaagtaccaggacatcatcatcgaacaccagaaggtggtgaagggcaaccagaagagactggagagcctgcgggagctggccggcaaggaaaacctggaataccctagcgtgaccctgccacctcagcctcacaccaaggagggcgttgatgcctacaacgaagtgatcgcccgggtgcgaatgtgggtgaacctgaacctgtggcagaagctgaagctaagcagagatgatgccaagcctctgctgagactgaagggattcccttcctttcctctggtcgagagacaggccaacgaagtggactggtgggacatggtgtgtaacgtgaagaagctgatcaacgagaaaaaggaggatggcaaggtgttttggcagaatctggctggctacaagagacaggaagccctgagaccatacctgagcagcgaggaagatcggaagaagggaaagaaattcgctcggtaccagctgggcgacctgctgctgcacctggaaaagaagcacggcgaggactggggaaaggtgtacgacgaggcctgggagcggattgacaagaaagtggaaggcctgagcaagcacatcaagctggaagaggaacggagaagcgaggacgcccagagcaaggccgccctgaccgactggctgcgggctaaggccagcttcgtgatcgagggcctgaaggaggccgacaaggacgagttctgcagatgcgagctgaagctgcagaagtggtacggggacctgcggggaaagcccttcgccatcgaagccgagaacagcatcctggacatcagcggcttcagcaagcagtacaactgtgccttcatctggcagaaggacggcgtgaagaagctgaacctgtacctgatcatcaactacttcaagggcggcaagctgcggttcaagaagatcaaacctgaagccttcgaagccaacagattctacaccgtgatcaacaaaaagagcggcgagatcgtgcccatggaggtgaacttcaacttcgacgaccccaacctgatcatcctgcctctggcctttggcaagagacagggcagagaattcatctggaacgacctgctgtccctggaaaccggcagcctgaagctggccaacggaagagtgatcgagaagacactgtacaacagaagaacccggcaggatgagcctgccctgttcgtggccctgaccttcgagcggcgggaggtcctggactcctccaatatcaaaccaatgaacctgatcggcgtggcaagaggcgaaaacatccccgccgtgatcgccctgaccgaccccgagggctgcccactgagccggtttaaggatagcctgggaaacccaacccacatcctgagaatcggcgagagctataaggagaagcagcggaccatccaggccaagaaggaggtggagcagcggagagccggcggctacagccggaagtacgccagcaaagccaagaatctggcagacgatatggtgagaaacaccgctagagatctgctgtactacgccgtgacccaggatgccatgctgatcttcgccaacctgagccggggcttcggccggcagggcaagcggaccttcatggccgagagacagtacacacggatggaggactggctgaccgccaagctggcctacgagggcctgagcaagacctacctgtccaagacactggcccagtacacctccaagacatgcagcaactgtgggtttaccatcaccagcgccgactacgacagggtgctggagaagctgaagaagacagcaacaggctggatgaccacaattaacggcaaggagctgaaggtggagggccagattacctactacaacagatacaagagacagaacgtagtcaaggacctgtccgtcgagctggatagactgagcgaagaatctgtgaacaacgacatctcctcctggacaaagggcagaagcggagaagctctgagcctcctgaagaaaagattctcccatagacccgtgcaggagaagttcgtgtgcctgaactgcggcttcgagacacacgcagccgagcaagccgccctgaacatcgccagatcctggctgttcctgcggagccaggagtacaagaaataccagacaaacaagacaaccggcaacaccgataagagagccttcgtcgagacctggcagtccttttaccggaagaagcttaaggaggtgtggaaacctgccgtgcggtctggcggatctggcggaggctccaccagccccaagaaaaagagaaaagtctaagctgccttctgcggggcttgccttctggccatgcccttcttctctcccttgcacctgtacctcttggtctttgaataaagcctgagtaggaaggctagcaaaaaaaaaaaaaaaaaaaaaaaaaaaaaaaaaaaaaaaaaaaaaaaaaaaaaaaaaaaaaaaaaaaaaaaaaaaaaaaa

SEQ ID NO: 9983 - RNA, 8787 nt, synthetic construct
  source 1..8787: mol_type = other RNA
aggaaataagagagaaaagaagagtaagaagaaatataagagccaccatggcccctaagaagaagcgtaaagtgagccggatgaaccacgaccaggagttcgacccccctaaggtgtaccctcccgtccccgccgagaagagaaagcccatccgggtcctgagcctgttcgatggcatcgccaccggtctgctggtgctgaaggacctgggcatccaggtggataggtacattgcctccgaggtgtgcgaggactccatcaccgtgggaatggtgcgtcatcagggcaagatcatgtacgtgggcgacgtgcggagcgtgacacagaagcatatccaggagtggggccctttcgacctggtgatcggcggcagcccttgcaatgacctgagcatcgtgaacccagcccggaagggcctgtacgagggaaccggcagactgttcttcgagttttacagactgctgcacgacgcccggcctaaggaaggcgacgaccggcccttcttttggctgttcgagaatgtggtggccatgggagtcagcgacaagcgggatattagccggttcctggagagcaaccccgtgatgatcgatgccaaggaagtgagcgccgcccaccgggccagatacttctggggcaatctgcctggcatgaacagacccctggccagcaccgtgaacgacaagctggagctgcaggagtgcctggagcacggccggatcgccaagttcagcaaggtgagaaccatcaccacccgaagcaacagcatcaaacaaggcaaggaccagcactttcctgtgttcatgaacgagaaggaggacatcctgtggtgtaccgagatggagagagtgttcgggttcccagtccactacacagatgtcagcaacatgtctagactggccagacagagactgctgggaagaagctggtccgtccctgtgatcagacacctgttcgcccctctgaaggagtacttcgcctgcgtgagcagcggcaacagcaacgccaacagccggggccccagcttctctagcggcctggtgccactgtccctgagagggagccacatgggccccatggagatctacaaaaccgtgagcgcctggaagcggcagcctgtgcgcgtgctgagcctgtttcggaatatcgataaagtcctgaaaagcctgggattcctggagagcggctctggctccggcggtggcaccctgaagtacgtggaggatgtgacaaacgtggtcagacgggatgtggagaagtggggccccttcgatctggtgtacggcagcacccaacccctgggcagctcttgtgaccggtgccctggctggtacatgtttcagttccaccggatcctgcagtacgccctgccgagacaggagtcccagcggccattcttttggattttcatggacaacttgctgctgaccgaggatgaccaggaaactaccactcggttcctgcagaccgaagccgtgaccctgcaggacgtgagaggccgggactaccagaacgccatgcgggtgtggtccaacatccctggactgaaaagcaagcacgcacctctgacccctaaagaagaggagtacctgcaggcccaggtgcggagcagaagcaagctggacgcccctaaggtggatctgctggtgaagaattgcctcctgcccctgagagagtacttcaagtatttcagccagaatagtctgcccctgggaggcagcggcggcggcgcccaggagctggtgaccttccaggacgtggccgtggacttcacccaggaggagtggggcctgctggaccacccccagaaggagctgtacaaggaggtgatgctggagaacgccaggaacgccctgagcctgggcctgcccgtgcccagggagggcctgatcagccacttcggccagagggaggccccctggatgatggagctggaggaccccaggaccagctaccccgtgagccagaagctgggcggcccaagcagcggcgcccctcctcccagcggcggcaggcggcccaagcagcggcgcccctcctcccagcggcggcagcccagccggctccccaacctctaccgaggagggcacctctgagtccgccacccccgagagcggccctggcacctccaccgagcccagcgagggcagcgcacccggcagccctgccggcagccccacctccacagaggagggaaccagcaccgagcccagcgaaggcagcgccccaggcaccagcaccgagcctagtgagcaggagattaaacggatcaacaagatcagaagaagacttgtgaaagacagcaacaccaagaaggccggcaagacaggccccatgaaaaccctgctggttagagtgatgacacccgatctgagagagcggctggaaaacctgagaaagaagcctgaaaatatcccccagcccatcagcaatacatctagagccaacctgaataagctgctgaccgattacaccgaaatgaagaaggcgatcctgcatgtgtactgggaagagttccagaaggaccctgtgggcctgatgagccgggtggcccagcctgccagcaagaagatcgatcagaacaagctgaaacctgagatggacgagaagggcaacctgaccaccgccggctttgcctgctctcagtgtggccagcccctgttcgtgtacaagctggagcaggtgtctgagaagggcaaggcttacaccaactacttcggacggtgcaatgtggccgagcacgaaaagctgatcctgctggcccagctgaagcccgagaaggatagcgacgaagccgtgacatatagcctgggaaagtttgggcagagggccctggatttctacagcattcatgtgaccaaggagtccacccaccccgtgaagcccctggcccagatcgccggaaacagatacgcctccggacctgtgggaaaggccctgagcgacgcatgtatgggcacaatcgcctccttcctgtctaagtaccaggacatcatcatcgaacaccagaaggtggtgaagggcaaccagaagagactggagagcctgcgggagctggccggcaaggaaaacctggaataccctagcgtgaccctgccacctcagcctcacaccaaggagggcgttgatgcctacaacgaagtgatcgcccgggtgcgaatgtgggtgaacctgaacctgtggcagaagctgaagctaagcagagatgatgccaagcctctgctgagactgaagggattcccttcctttcctctggtcgagagacaggccaacgaagtggactggtgggacatggtgtgtaacgtgaagaagctgatcaacgagaaaaaggaggatggcaaggtgttttggcagaatctggctggctacaagagacaggaagccctgagaccatacctgagcagcgaggaagatcggaagaagggaaagaaattcgctcggtaccagctgggcgacctgctgctgcacctggaaaagaagcacggcgaggactggggaaaggtgtacgacgaggcctgggagcggattgacaagaaagtggaaggcctgagcaagcacatcaagctggaagaggaacggagaagcgaggacgcccagagcaaggccgccctgaccgactggctgcgggctaaggccagcttcgtgatcgagggcctgaaggaggccgacaaggacgagttctgcagatgcgagctgaagctgcagaagtggtacggggacctgcggggaaagcccttcgccatcgaagccgagaacagcatcctggacatcagcggcttcagcaagcagtacaactgtgccttcatctggcagaaggacggcgtgaagaagctgaacctgtacctgatcatcaactacttcaagggcggcaagctgcggttcaagaagatcaaacctgaagccttcgaagccaacagattctacaccgtgatcaacaaaaagagcggcgagatcgtgcccatggaggtgaacttcaacttcgacgaccccaacctgatcatcctgcctctggcctttggcaagagacagggcagagaattcatctggaacgacctgctgtccctggaaaccggcagcctgaagctggccaacggaagagtgatcgagaagacactgtacaacagaagaacccggcaggatgagcctgccctgttcgtggccctgaccttcgagcggcgggaggtcctggactcctccaatatcaaaccaatgaacctgatcggcgtggcaagaggcgaaaacatccccgccgtgatcgccctgaccgaccccgagggctgcccactgagccggtttaaggatagcctgggaaacccaacccacatcctgagaatcggcgagagctataaggagaagcagcggaccatccaggccaagaaggaggtggagcagcggagagccggcggctacagccggaagtacgccagcaaagccaagaatctggcagacgatatggtgagaaacaccgctagagatctgctgtactacgccgtgacccaggatgccatgctgatcttcgccaacctgagccggggcttcggccggcagggcaagcggaccttcatggccgagagacagtacacacggatggaggactggctgaccgccaagctggcctacgagggcctgagcaagacctacctgtccaagacactggcccagtacacctccaagacatgcagcaactgtgggtttaccatcaccagcgccgactacgacagggtgctggagaagctgaagaagacagcaacaggctggatgaccacaattaacggcaaggagctgaaggtggagggccagattacctactacaacagatacaagagacagaacgtagtcaaggacctgtccgtcgagctggatagactgagcgaagaatctgtgaacaacgacatctcctcctggacaaagggcagaagcggagaagctctgagcctcctgaagaaaagattctcccatagacccgtgcaggagaagttcgtgtgcctgaactgcggcttcgagacacacgcagccgagcaagccgccctgaacatcgccagatcctggctgttcctgcggagccaggagtacaagaaataccagacaaacaagacaaccggcaacaccgataagagagccttcgtcgagacctggcagtccttttaccggaagaagcttaaggaggtgtggaaacctgccgtgcggtctggcggatctggcggaggctccaccagccccaagaaaaagagaaaagtctaagctgccttctgcggggcttgccttctggccatgcccttcttctctcccttgcacctgtacctcttggtctttgaataaagcctgagtaggaaggctagcaaaaaaaaaaaaaaaaaaaaaaaaaaaaaaaaaaaaaaaaaaaaaaaaaaaaaaaaaaaaaaaaaaaaaaaaaaaaaaaagcccagccggctccccaacctctaccgaggagggcacctctgagtccgccacccccgagagcggccctggcacctccaccgagcccagcgagggcagcgcacccggcagccctgccggcagccccacctccacagaggagggaaccagcaccgagcccagcgaaggcagcgccccaggcaccagcaccgagcctagtgagcaggagattaaacggatcaacaagatcagaagaagacttgtgaaagacagcaacaccaagaaggccggcaagacaggccccatgaaaaccctgctggttagagtgatgacacccgatctgagagagcggctggaaaacctgagaaagaagcctgaaaatatcccccagcccatcagcaatacatctagagccaacctgaataagctgctgaccgattacaccgaaatgaagaaggcgatcctgcatgtgtactgggaagagttccagaaggaccctgtgggcctgatgagccgggtggcccagcctgccagcaagaagatcgatcagaacaagctgaaacctgagatggacgagaagggcaacctgaccaccgccggctttgcctgctctcagtgtggccagcccctgttcgtgtacaagctggagcaggtgtctgagaagggcaaggcttacaccaactacttcggacggtgcaatgtggccgagcacgaaaagctgatcctgctggcccagctgaagcccgagaaggatagcgacgaagccgtgacatatagcctgggaaagtttgggcagagggccctggatttctacagcattcatgtgaccaaggagtccacccaccccgtgaagcccctggcccagatcgccggaaacagatacgcctccggacctgtgggaaaggccctgagcgacgcatgtatgggcacaatcgcctccttcctgtctaagtaccaggacatcatcatcgaacaccagaaggtggtgaagggcaaccagaagagactggagagcctgcgggagctggccggcaaggaaaacctggaataccctagcgtgaccctgccacctcagcctcacaccaaggagggcgttgatgcctacaacgaagtgatcgcccgggtgcgaatgtgggtgaacctgaacctgtggcagaagctgaagctaagcagagatgatgccaagcctctgctgagactgaagggattcccttcctttcctctggtcgagagacaggccaacgaagtggactggtgggacatggtgtgtaacgtgaagaagctgatcaacgagaaaaaggaggatggcaaggtgttttggcagaatctggctggctacaagagacaggaagccctgagaccatacctgagcagcgaggaagatcggaagaagggaaagaaattcgctcggtaccagctgggcgacctgctgctgcacctggaaaagaagcacggcgaggactggggaaaggtgtacgacgaggcctgggagcggattgacaagaaagtggaaggcctgagcaagcacatcaagctggaagaggaacggagaagcgaggacgcccagagcaaggccgccctgaccgactggctgcgggctaaggccagcttcgtgatcgagggcctgaaggaggccgacaaggacgagttctgcagatgcgagctgaagctgcagaagtggtacggggacctgcggggaaagcccttcgccatcgaagccgagaacagcatcctggacatcagcggcttcagcaagcagtacaactgtgccttcatctggcagaaggacggcgtgaagaagctgaacctgtacctgatcatcaactacttcaagggcggcaagctgcggttcaagaagatcaaacctgaagccttcgaagccaacagattctacaccgtgatcaacaaaaagagcggcgagatcgtgcccatggaggtgaacttcaacttcgacgaccccaacctgatcatcctgcctctggcctttggcaagagacagggcagagaattcatctggaacgacctgctgtccctggaaaccggcagcctgaagctggccaacggaagagtgatcgagaagacactgtacaacagaagaacccggcaggatgagcctgccctgttcgtggccctgaccttcgagcggcgggaggtcctggactcctccaatatcaaaccaatgaacctgatcggcgtggcaagaggcgaaaacatccccgccgtgatcgccctgaccgaccccgagggctgcccactgagccggtttaaggatagcctgggaaacccaacccacatcctgagaatcggcgagagctataaggagaagcagcggaccatccaggccaagaaggaggtggagcagcggagagccggcggctacagccggaagtacgccagcaaagccaagaatctggcagacgatatggtgagaaacaccgctagagatctgctgtactacgccgtgacccaggatgccatgctgatcttcgccaacctgagccggggcttcggccggcagggcaagcggaccttcatggccgagagacagtacacacggatggaggactggctgaccgccaagctggcctacgagggcctgagcaagacctacctgtccaagacactggcccagtacacctccaagacatgcagcaactgtgggtttaccatcaccagcgccgactacgacagggtgctggagaagctgaagaagacagcaacaggctggatgaccacaattaacggcaaggagctgaaggtggagggccagattacctactacaacagatacaagagacagaacgtagtcaaggacctgtccgtcgagctggatagactgagcgaagaatctgtgaacaacgacatctcctcctggacaaagggcagaagcggagaagctctgagcctcctgaagaaaagattctcccatagacccgtgcaggagaagttcgtgtgcctgaactgcggcttcgagacacacgcagccgagcaagccgccctgaacatcgccagatcctggctgttcctgcggagccaggagtacaagaaataccagacaaacaagacaaccggcaacaccgataagagagccttcgtcgagacctggcagtccttttaccggaagaagcttaaggaggtgtggaaacctgccgtgcggtctggcggatctggcggaggctccaccagccccaagaaaaagagaaaagtctaagctgccttctgcggggcttgccttctggccatgcccttcttctctcccttgcacctgtacctcttggtctttgaataaagcctgagtaggaaggctagcaaaaaaaaaaaaaaaaaaaaaaaaaaaaaaaaaaaaaaaaaaaaaaaaaaaaaaaaaaaaaaaaaaaaaaaaaaaaaaaa

SEQ ID NO: 9984 - RNA, 8787 nt, synthetic construct
  source 1..8787: mol_type = other RNA
aggaaataagagagaaaagaagagtaagaagaaatataagagccaccatggcccctaagaagaagcgtaaagtgagccggatgaaccacgaccaggagttcgacccccctaaggtgtaccctcccgtccccgccgagaagagaaagcccatccgggtcctgagcctgttcgatggcatcgccaccggtctgctggtgctgaaggacctgggcatccaggtggataggtacattgcctccgaggtgtgcgaggactccatcaccgtgggaatggtgcgtcatcagggcaagatcatgtacgtgggcgacgtgcggagcgtgacacagaagcatatccaggagtggggccctttcgacctggtgatcggcggcagcccttgcaatgacctgagcatcgtgaacccagcccggaagggcctgtacgagggaaccggcagactgttcttcgagttttacagactgctgcacgacgcccggcctaaggaaggcgacgaccggcccttcttttggctgttcgagaatgtggtggccatgggagtcagcgacaagcgggatattagccggttcctggagagcaaccccgtgatgatcgatgccaaggaagtgagcgccgcccaccgggccagatacttctggggcaatctgcctggcatgaacagacccctggccagcaccgtgaacgacaagctggagctgcaggagtgcctggagcacggccggatcgccaagttcagcaaggtgagaaccatcaccacccgaagcaacagcatcaaacaaggcaaggaccagcactttcctgtgttcatgaacgagaaggaggacatcctgtggtgtaccgagatggagagagtgttcgggttcccagtccactacacagatgtcagcaacatgtctagactggccagacagagactgctgggaagaagctggtccgtccctgtgatcagacacctgttcgcccctctgaaggagtacttcgcctgcgtgagcagcggcaacagcaacgccaacagccggggccccagcttctctagcggcctggtgccactgtccctgagagggagccacatgggccccatggagatctacaaaaccgtgagcgcctggaagcggcagcctgtgcgcgtgctgagcctgtttcggaatatcgataaagtcctgaaaagcctgggattcctggagagcggctctggctccggcggtggcaccctgaagtacgtggaggatgtgacaaacgtggtcagacgggatgtggagaagtggggccccttcgatctggtgtacggcagcacccaacccctgggcagctcttgtgaccggtgccctggctggtacatgtttcagttccaccggatcctgcagtacgccctgccgagacaggagtcccagcggccattcttttggattttcatggacaacttgctgctgaccgaggatgaccaggaaactaccactcggttcctgcagaccgaagccgtgaccctgcaggacgtgagaggccgggactaccagaacgccatgcgggtgtggtccaacatccctggactgaaaagcaagcacgcacctctgacccctaaagaagaggagtacctgcaggcccaggtgcggagcagaagcaagctggacgcccctaaggtggatctgctggtgaagaattgcctcctgcccctgagagagtacttcaagtatttcagccagaatagtctgcccctgggaggcagcggcggcggcagccaggagcccgtgaccttcgccgacgtggccgtggtgttcacccccgaggagtgggtgttcctggacagcacccagaggagcctgtacagggacgtgatgctggagaactacaggaacctggccagcgtggccggcgaccagctgtgcaagcccaacgccctgagctacctggagcagaggggcgagcagtggaccaccgagaggggcgtgatcagcgacacctgccccgagccccagctgggcggcccaagcagcggcgcccctcctcccagcggcggcaggcggcccaagcagcggcgcccctcctcccagcggcggcagcccagccggctccccaacctctaccgaggagggcacctctgagtccgccacccccgagagcggccctggcacctccaccgagcccagcgagggcagcgcacccggcagccctgccggcagccccacctccacagaggagggaaccagcaccgagcccagcgaaggcagcgccccaggcaccagcaccgagcctagtgagcaggagattaaacggatcaacaagatcagaagaagacttgtgaaagacagcaacaccaagaaggccggcaagacaggccccatgaaaaccctgctggttagagtgatgacacccgatctgagagagcggctggaaaacctgagaaagaagcctgaaaatatcccccagcccatcagcaatacatctagagccaacctgaataagctgctgaccgattacaccgaaatgaagaaggcgatcctgcatgtgtactgggaagagttccagaaggaccctgtgggcctgatgagccgggtggcccagcctgccagcaagaagatcgatcagaacaagctgaaacctgagatggacgagaagggcaacctgaccaccgccggctttgcctgctctcagtgtggccagcccctgttcgtgtacaagctggagcaggtgtctgagaagggcaaggcttacaccaactacttcggacggtgcaatgtggccgagcacgaaaagctgatcctgctggcccagctgaagcccgagaaggatagcgacgaagccgtgacatatagcctgggaaagtttgggcagagggccctggatttctacagcattcatgtgaccaaggagtccacccaccccgtgaagcccctggcccagatcgccggaaacagatacgcctccggacctgtgggaaaggccctgagcgacgcatgtatgggcacaatcgcctccttcctgtctaagtaccaggacatcatcatcgaacaccagaaggtggtgaagggcaaccagaagagactggagagcctgcgggagctggccggcaaggaaaacctggaataccctagcgtgaccctgccacctcagcctcacaccaaggagggcgttgatgcctacaacgaagtgatcgcccgggtgcgaatgtgggtgaacctgaacctgtggcagaagctgaagctaagcagagatgatgccaagcctctgctgagactgaagggattcccttcctttcctctggtcgagagacaggccaacgaagtggactggtgggacatggtgtgtaacgtgaagaagctgatcaacgagaaaaaggaggatggcaaggtgttttggcagaatctggctggctacaagagacaggaagccctgagaccatacctgagcagcgaggaagatcggaagaagggaaagaaattcgctcggtaccagctgggcgacctgctgctgcacctggaaaagaagcacggcgaggactggggaaaggtgtacgacgaggcctgggagcggattgacaagaaagtggaaggcctgagcaagcacatcaagctggaagaggaacggagaagcgaggacgcccagagcaaggccgccctgaccgactggctgcgggctaaggccagcttcgtgatcgagggcctgaaggaggccgacaaggacgagttctgcagatgcgagctgaagctgcagaagtggtacggggacctgcggggaaagcccttcgccatcgaagccgagaacagcatcctggacatcagcggcttcagcaagcagtacaactgtgccttcatctggcagaaggacggcgtgaagaagctgaacctgtacctgatcatcaactacttcaagggcggcaagctgcggttcaagaagatcaaacctgaagccttcgaagccaacagattctacaccgtgatcaacaaaaagagcggcgagatcgtgcccatggaggtgaacttcaacttcgacgaccccaacctgatcatcctgcctctggcctttggcaagagacagggcagagaattcatctggaacgacctgctgtccctggaaaccggcagcctgaagctggccaacggaagagtgatcgagaagacactgtacaacagaagaacccggcaggatgagcctgccctgttcgtggccctgaccttcgagcggcgggaggtcctggactcctccaatatcaaaccaatgaacctgatcggcgtggcaagaggcgaaaacatccccgccgtgatcgccctgaccgaccccgagggctgcccactgagccggtttaaggatagcctgggaaacccaacccacatcctgagaatcggcgagagctataaggagaagcagcggaccatccaggccaagaaggaggtggagcagcggagagccggcggctacagccggaagtacgccagcaaagccaagaatctggcagacgatatggtgagaaacaccgctagagatctgctgtactacgccgtgacccaggatgccatgctgatcttcgccaacctgagccggggcttcggccggcagggcaagcggaccttcatggccgagagacagtacacacggatggaggactggctgaccgccaagctggcctacgagggcctgagcaagacctacctgtccaagacactggcccagtacacctccaagacatgcagcaactgtgggtttaccatcaccagcgccgactacgacagggtgctggagaagctgaagaagacagcaacaggctggatgaccacaattaacggcaaggagctgaaggtggagggccagattacctactacaacagatacaagagacagaacgtagtcaaggacctgtccgtcgagctggatagactgagcgaagaatctgtgaacaacgacatctcctcctggacaaagggcagaagcggagaagctctgagcctcctgaagaaaagattctcccatagacccgtgcaggagaagttcgtgtgcctgaactgcggcttcgagacacacgcagccgagcaagccgccctgaacatcgccagatcctggctgttcctgcggagccaggagtacaagaaataccagacaaacaagacaaccggcaacaccgataagagagccttcgtcgagacctggcagtccttttaccggaagaagcttaaggaggtgtggaaacctgccgtgcggtctggcggatctggcggaggctccaccagccccaagaaaaagagaaaagtctaagctgccttctgcggggcttgccttctggccatgcccttcttctctcccttgcacctgtacctcttggtctttgaataaagcctgagtaggaaggctagcaaaaaaaaaaaaaaaaaaaaaaaaaaaaaaaaaaaaaaaaaaaaaaaaaaaaaaaaaaaaaaaaaaaaaaaaaaaaaaaagcccagccggctccccaacctctaccgaggagggcacctctgagtccgccacccccgagagcggccctggcacctccaccgagcccagcgagggcagcgcacccggcagccctgccggcagccccacctccacagaggagggaaccagcaccgagcccagcgaaggcagcgccccaggcaccagcaccgagcctagtgagcaggagattaaacggatcaacaagatcagaagaagacttgtgaaagacagcaacaccaagaaggccggcaagacaggccccatgaaaaccctgctggttagagtgatgacacccgatctgagagagcggctggaaaacctgagaaagaagcctgaaaatatcccccagcccatcagcaatacatctagagccaacctgaataagctgctgaccgattacaccgaaatgaagaaggcgatcctgcatgtgtactgggaagagttccagaaggaccctgtgggcctgatgagccgggtggcccagcctgccagcaagaagatcgatcagaacaagctgaaacctgagatggacgagaagggcaacctgaccaccgccggctttgcctgctctcagtgtggccagcccctgttcgtgtacaagctggagcaggtgtctgagaagggcaaggcttacaccaactacttcggacggtgcaatgtggccgagcacgaaaagctgatcctgctggcccagctgaagcccgagaaggatagcgacgaagccgtgacatatagcctgggaaagtttgggcagagggccctggatttctacagcattcatgtgaccaaggagtccacccaccccgtgaagcccctggcccagatcgccggaaacagatacgcctccggacctgtgggaaaggccctgagcgacgcatgtatgggcacaatcgcctccttcctgtctaagtaccaggacatcatcatcgaacaccagaaggtggtgaagggcaaccagaagagactggagagcctgcgggagctggccggcaaggaaaacctggaataccctagcgtgaccctgccacctcagcctcacaccaaggagggcgttgatgcctacaacgaagtgatcgcccgggtgcgaatgtgggtgaacctgaacctgtggcagaagctgaagctaagcagagatgatgccaagcctctgctgagactgaagggattcccttcctttcctctggtcgagagacaggccaacgaagtggactggtgggacatggtgtgtaacgtgaagaagctgatcaacgagaaaaaggaggatggcaaggtgttttggcagaatctggctggctacaagagacaggaagccctgagaccatacctgagcagcgaggaagatcggaagaagggaaagaaattcgctcggtaccagctgggcgacctgctgctgcacctggaaaagaagcacggcgaggactggggaaaggtgtacgacgaggcctgggagcggattgacaagaaagtggaaggcctgagcaagcacatcaagctggaagaggaacggagaagcgaggacgcccagagcaaggccgccctgaccgactggctgcgggctaaggccagcttcgtgatcgagggcctgaaggaggccgacaaggacgagttctgcagatgcgagctgaagctgcagaagtggtacggggacctgcggggaaagcccttcgccatcgaagccgagaacagcatcctggacatcagcggcttcagcaagcagtacaactgtgccttcatctggcagaaggacggcgtgaagaagctgaacctgtacctgatcatcaactacttcaagggcggcaagctgcggttcaagaagatcaaacctgaagccttcgaagccaacagattctacaccgtgatcaacaaaaagagcggcgagatcgtgcccatggaggtgaacttcaacttcgacgaccccaacctgatcatcctgcctctggcctttggcaagagacagggcagagaattcatctggaacgacctgctgtccctggaaaccggcagcctgaagctggccaacggaagagtgatcgagaagacactgtacaacagaagaacccggcaggatgagcctgccctgttcgtggccctgaccttcgagcggcgggaggtcctggactcctccaatatcaaaccaatgaacctgatcggcgtggcaagaggcgaaaacatccccgccgtgatcgccctgaccgaccccgagggctgcccactgagccggtttaaggatagcctgggaaacccaacccacatcctgagaatcggcgagagctataaggagaagcagcggaccatccaggccaagaaggaggtggagcagcggagagccggcggctacagccggaagtacgccagcaaagccaagaatctggcagacgatatggtgagaaacaccgctagagatctgctgtactacgccgtgacccaggatgccatgctgatcttcgccaacctgagccggggcttcggccggcagggcaagcggaccttcatggccgagagacagtacacacggatggaggactggctgaccgccaagctggcctacgagggcctgagcaagacctacctgtccaagacactggcccagtacacctccaagacatgcagcaactgtgggtttaccatcaccagcgccgactacgacagggtgctggagaagctgaagaagacagcaacaggctggatgaccacaattaacggcaaggagctgaaggtggagggccagattacctactacaacagatacaagagacagaacgtagtcaaggacctgtccgtcgagctggatagactgagcgaagaatctgtgaacaacgacatctcctcctggacaaagggcagaagcggagaagctctgagcctcctgaagaaaagattctcccatagacccgtgcaggagaagttcgtgtgcctgaactgcggcttcgagacacacgcagccgagcaagccgccctgaacatcgccagatcctggctgttcctgcggagccaggagtacaagaaataccagacaaacaagacaaccggcaacaccgataagagagccttcgtcgagacctggcagtccttttaccggaagaagcttaaggaggtgtggaaacctgccgtgcggtctggcggatctggcggaggctccaccagccccaagaaaaagagaaaagtctaagctgccttctgcggggcttgccttctggccatgcccttcttctctcccttgcacctgtacctcttggtctttgaataaagcctgagtaggaaggctagcaaaaaaaaaaaaaaaaaaaaaaaaaaaaaaaaaaaaaaaaaaaaaaaaaaaaaaaaaaaaaaaaaaaaaaaaaaaaaaaa

SEQ ID NO: 9985 - RNA, 8787 nt, synthetic construct
  source 1..8787: mol_type = other RNA
aggaaataagagagaaaagaagagtaagaagaaatataagagccaccatggcccctaagaagaagcgtaaagtgagccggatgaaccacgaccaggagttcgacccccctaaggtgtaccctcccgtccccgccgagaagagaaagcccatccgggtcctgagcctgttcgatggcatcgccaccggtctgctggtgctgaaggacctgggcatccaggtggataggtacattgcctccgaggtgtgcgaggactccatcaccgtgggaatggtgcgtcatcagggcaagatcatgtacgtgggcgacgtgcggagcgtgacacagaagcatatccaggagtggggccctttcgacctggtgatcggcggcagcccttgcaatgacctgagcatcgtgaacccagcccggaagggcctgtacgagggaaccggcagactgttcttcgagttttacagactgctgcacgacgcccggcctaaggaaggcgacgaccggcccttcttttggctgttcgagaatgtggtggccatgggagtcagcgacaagcgggatattagccggttcctggagagcaaccccgtgatgatcgatgccaaggaagtgagcgccgcccaccgggccagatacttctggggcaatctgcctggcatgaacagacccctggccagcaccgtgaacgacaagctggagctgcaggagtgcctggagcacggccggatcgccaagttcagcaaggtgagaaccatcaccacccgaagcaacagcatcaaacaaggcaaggaccagcactttcctgtgttcatgaacgagaaggaggacatcctgtggtgtaccgagatggagagagtgttcgggttcccagtccactacacagatgtcagcaacatgtctagactggccagacagagactgctgggaagaagctggtccgtccctgtgatcagacacctgttcgcccctctgaaggagtacttcgcctgcgtgagcagcggcaacagcaacgccaacagccggggccccagcttctctagcggcctggtgccactgtccctgagagggagccacatgggccccatggagatctacaaaaccgtgagcgcctggaagcggcagcctgtgcgcgtgctgagcctgtttcggaatatcgataaagtcctgaaaagcctgggattcctggagagcggctctggctccggcggtggcaccctgaagtacgtggaggatgtgacaaacgtggtcagacgggatgtggagaagtggggccccttcgatctggtgtacggcagcacccaacccctgggcagctcttgtgaccggtgccctggctggtacatgtttcagttccaccggatcctgcagtacgccctgccgagacaggagtcccagcggccattcttttggattttcatggacaacttgctgctgaccgaggatgaccaggaaactaccactcggttcctgcagaccgaagccgtgaccctgcaggacgtgagaggccgggactaccagaacgccatgcgggtgtggtccaacatccctggactgaaaagcaagcacgcacctctgacccctaaagaagaggagtacctgcaggcccaggtgcggagcagaagcaagctggacgcccctaaggtggatctgctggtgaagaattgcctcctgcccctgagagagtacttcaagtatttcagccagaatagtctgcccctgggaggcagcggcggcggcttcgaggagctggtgaccttcgaggacgtgttcgtggacttcagccccgaggagctgagcagcctgagcgccccccagaggaacctgtacagggaggtgatgctggagaactacaggaacctggtgttcctgggctaccagttcagcaagcccgacatcatcagcaggctggaggtggaggagagccacgccatggagaccgacagcaggcacaccgtgatctgccagggcgaggcccacgacggcggcccaagcagcggcgcccctcctcccagcggcggcaggcggcccaagcagcggcgcccctcctcccagcggcggcagcccagccggctccccaacctctaccgaggagggcacctctgagtccgccacccccgagagcggccctggcacctccaccgagcccagcgagggcagcgcacccggcagccctgccggcagccccacctccacagaggagggaaccagcaccgagcccagcgaaggcagcgccccaggcaccagcaccgagcctagtgagcaggagattaaacggatcaacaagatcagaagaagacttgtgaaagacagcaacaccaagaaggccggcaagacaggccccatgaaaaccctgctggttagagtgatgacacccgatctgagagagcggctggaaaacctgagaaagaagcctgaaaatatcccccagcccatcagcaatacatctagagccaacctgaataagctgctgaccgattacaccgaaatgaagaaggcgatcctgcatgtgtactgggaagagttccagaaggaccctgtgggcctgatgagccgggtggcccagcctgccagcaagaagatcgatcagaacaagctgaaacctgagatggacgagaagggcaacctgaccaccgccggctttgcctgctctcagtgtggccagcccctgttcgtgtacaagctggagcaggtgtctgagaagggcaaggcttacaccaactacttcggacggtgcaatgtggccgagcacgaaaagctgatcctgctggcccagctgaagcccgagaaggatagcgacgaagccgtgacatatagcctgggaaagtttgggcagagggccctggatttctacagcattcatgtgaccaaggagtccacccaccccgtgaagcccctggcccagatcgccggaaacagatacgcctccggacctgtgggaaaggccctgagcgacgcatgtatgggcacaatcgcctccttcctgtctaagtaccaggacatcatcatcgaacaccagaaggtggtgaagggcaaccagaagagactggagagcctgcgggagctggccggcaaggaaaacctggaataccctagcgtgaccctgccacctcagcctcacaccaaggagggcgttgatgcctacaacgaagtgatcgcccgggtgcgaatgtgggtgaacctgaacctgtggcagaagctgaagctaagcagagatgatgccaagcctctgctgagactgaagggattcccttcctttcctctggtcgagagacaggccaacgaagtggactggtgggacatggtgtgtaacgtgaagaagctgatcaacgagaaaaaggaggatggcaaggtgttttggcagaatctggctggctacaagagacaggaagccctgagaccatacctgagcagcgaggaagatcggaagaagggaaagaaattcgctcggtaccagctgggcgacctgctgctgcacctggaaaagaagcacggcgaggactggggaaaggtgtacgacgaggcctgggagcggattgacaagaaagtggaaggcctgagcaagcacatcaagctggaagaggaacggagaagcgaggacgcccagagcaaggccgccctgaccgactggctgcgggctaaggccagcttcgtgatcgagggcctgaaggaggccgacaaggacgagttctgcagatgcgagctgaagctgcagaagtggtacggggacctgcggggaaagcccttcgccatcgaagccgagaacagcatcctggacatcagcggcttcagcaagcagtacaactgtgccttcatctggcagaaggacggcgtgaagaagctgaacctgtacctgatcatcaactacttcaagggcggcaagctgcggttcaagaagatcaaacctgaagccttcgaagccaacagattctacaccgtgatcaacaaaaagagcggcgagatcgtgcccatggaggtgaacttcaacttcgacgaccccaacctgatcatcctgcctctggcctttggcaagagacagggcagagaattcatctggaacgacctgctgtccctggaaaccggcagcctgaagctggccaacggaagagtgatcgagaagacactgtacaacagaagaacccggcaggatgagcctgccctgttcgtggccctgaccttcgagcggcgggaggtcctggactcctccaatatcaaaccaatgaacctgatcggcgtggcaagaggcgaaaacatccccgccgtgatcgccctgaccgaccccgagggctgcccactgagccggtttaaggatagcctgggaaacccaacccacatcctgagaatcggcgagagctataaggagaagcagcggaccatccaggccaagaaggaggtggagcagcggagagccggcggctacagccggaagtacgccagcaaagccaagaatctggcagacgatatggtgagaaacaccgctagagatctgctgtactacgccgtgacccaggatgccatgctgatcttcgccaacctgagccggggcttcggccggcagggcaagcggaccttcatggccgagagacagtacacacggatggaggactggctgaccgccaagctggcctacgagggcctgagcaagacctacctgtccaagacactggcccagtacacctccaagacatgcagcaactgtgggtttaccatcaccagcgccgactacgacagggtgctggagaagctgaagaagacagcaacaggctggatgaccacaattaacggcaaggagctgaaggtggagggccagattacctactacaacagatacaagagacagaacgtagtcaaggacctgtccgtcgagctggatagactgagcgaagaatctgtgaacaacgacatctcctcctggacaaagggcagaagcggagaagctctgagcctcctgaagaaaagattctcccatagacccgtgcaggagaagttcgtgtgcctgaactgcggcttcgagacacacgcagccgagcaagccgccctgaacatcgccagatcctggctgttcctgcggagccaggagtacaagaaataccagacaaacaagacaaccggcaacaccgataagagagccttcgtcgagacctggcagtccttttaccggaagaagcttaaggaggtgtggaaacctgccgtgcggtctggcggatctggcggaggctccaccagccccaagaaaaagagaaaagtctaagctgccttctgcggggcttgccttctggccatgcccttcttctctcccttgcacctgtacctcttggtctttgaataaagcctgagtaggaaggctagcaaaaaaaaaaaaaaaaaaaaaaaaaaaaaaaaaaaaaaaaaaaaaaaaaaaaaaaaaaaaaaaaaaaaaaaaaaaaaaaagcccagccggctccccaacctctaccgaggagggcacctctgagtccgccacccccgagagcggccctggcacctccaccgagcccagcgagggcagcgcacccggcagccctgccggcagccccacctccacagaggagggaaccagcaccgagcccagcgaaggcagcgccccaggcaccagcaccgagcctagtgagcaggagattaaacggatcaacaagatcagaagaagacttgtgaaagacagcaacaccaagaaggccggcaagacaggccccatgaaaaccctgctggttagagtgatgacacccgatctgagagagcggctggaaaacctgagaaagaagcctgaaaatatcccccagcccatcagcaatacatctagagccaacctgaataagctgctgaccgattacaccgaaatgaagaaggcgatcctgcatgtgtactgggaagagttccagaaggaccctgtgggcctgatgagccgggtggcccagcctgccagcaagaagatcgatcagaacaagctgaaacctgagatggacgagaagggcaacctgaccaccgccggctttgcctgctctcagtgtggccagcccctgttcgtgtacaagctggagcaggtgtctgagaagggcaaggcttacaccaactacttcggacggtgcaatgtggccgagcacgaaaagctgatcctgctggcccagctgaagcccgagaaggatagcgacgaagccgtgacatatagcctgggaaagtttgggcagagggccctggatttctacagcattcatgtgaccaaggagtccacccaccccgtgaagcccctggcccagatcgccggaaacagatacgcctccggacctgtgggaaaggccctgagcgacgcatgtatgggcacaatcgcctccttcctgtctaagtaccaggacatcatcatcgaacaccagaaggtggtgaagggcaaccagaagagactggagagcctgcgggagctggccggcaaggaaaacctggaataccctagcgtgaccctgccacctcagcctcacaccaaggagggcgttgatgcctacaacgaagtgatcgcccgggtgcgaatgtgggtgaacctgaacctgtggcagaagctgaagctaagcagagatgatgccaagcctctgctgagactgaagggattcccttcctttcctctggtcgagagacaggccaacgaagtggactggtgggacatggtgtgtaacgtgaagaagctgatcaacgagaaaaaggaggatggcaaggtgttttggcagaatctggctggctacaagagacaggaagccctgagaccatacctgagcagcgaggaagatcggaagaagggaaagaaattcgctcggtaccagctgggcgacctgctgctgcacctggaaaagaagcacggcgaggactggggaaaggtgtacgacgaggcctgggagcggattgacaagaaagtggaaggcctgagcaagcacatcaagctggaagaggaacggagaagcgaggacgcccagagcaaggccgccctgaccgactggctgcgggctaaggccagcttcgtgatcgagggcctgaaggaggccgacaaggacgagttctgcagatgcgagctgaagctgcagaagtggtacggggacctgcggggaaagcccttcgccatcgaagccgagaacagcatcctggacatcagcggcttcagcaagcagtacaactgtgccttcatctggcagaaggacggcgtgaagaagctgaacctgtacctgatcatcaactacttcaagggcggcaagctgcggttcaagaagatcaaacctgaagccttcgaagccaacagattctacaccgtgatcaacaaaaagagcggcgagatcgtgcccatggaggtgaacttcaacttcgacgaccccaacctgatcatcctgcctctggcctttggcaagagacagggcagagaattcatctggaacgacctgctgtccctggaaaccggcagcctgaagctggccaacggaagagtgatcgagaagacactgtacaacagaagaacccggcaggatgagcctgccctgttcgtggccctgaccttcgagcggcgggaggtcctggactcctccaatatcaaaccaatgaacctgatcggcgtggcaagaggcgaaaacatccccgccgtgatcgccctgaccgaccccgagggctgcccactgagccggtttaaggatagcctgggaaacccaacccacatcctgagaatcggcgagagctataaggagaagcagcggaccatccaggccaagaaggaggtggagcagcggagagccggcggctacagccggaagtacgccagcaaagccaagaatctggcagacgatatggtgagaaacaccgctagagatctgctgtactacgccgtgacccaggatgccatgctgatcttcgccaacctgagccggggcttcggccggcagggcaagcggaccttcatggccgagagacagtacacacggatggaggactggctgaccgccaagctggcctacgagggcctgagcaagacctacctgtccaagacactggcccagtacacctccaagacatgcagcaactgtgggtttaccatcaccagcgccgactacgacagggtgctggagaagctgaagaagacagcaacaggctggatgaccacaattaacggcaaggagctgaaggtggagggccagattacctactacaacagatacaagagacagaacgtagtcaaggacctgtccgtcgagctggatagactgagcgaagaatctgtgaacaacgacatctcctcctggacaaagggcagaagcggagaagctctgagcctcctgaagaaaagattctcccatagacccgtgcaggagaagttcgtgtgcctgaactgcggcttcgagacacacgcagccgagcaagccgccctgaacatcgccagatcctggctgttcctgcggagccaggagtacaagaaataccagacaaacaagacaaccggcaacaccgataagagagccttcgtcgagacctggcagtccttttaccggaagaagcttaaggaggtgtggaaacctgccgtgcggtctggcggatctggcggaggctccaccagccccaagaaaaagagaaaagtctaagctgccttctgcggggcttgccttctggccatgcccttcttctctcccttgcacctgtacctcttggtctttgaataaagcctgagtaggaaggctagcaaaaaaaaaaaaaaaaaaaaaaaaaaaaaaaaaaaaaaaaaaaaaaaaaaaaaaaaaaaaaaaaaaaaaaaaaaaaaaaa

SEQ ID NO: 9986 - RNA, 8787 nt, synthetic construct
  source 1..8787: mol_type = other RNA
aggaaataagagagaaaagaagagtaagaagaaatataagagccaccatggcccctaagaagaagcgtaaagtgagccggatgaaccacgaccaggagttcgacccccctaaggtgtaccctcccgtccccgccgagaagagaaagcccatccgggtcctgagcctgttcgatggcatcgccaccggtctgctggtgctgaaggacctgggcatccaggtggataggtacattgcctccgaggtgtgcgaggactccatcaccgtgggaatggtgcgtcatcagggcaagatcatgtacgtgggcgacgtgcggagcgtgacacagaagcatatccaggagtggggccctttcgacctggtgatcggcggcagcccttgcaatgacctgagcatcgtgaacccagcccggaagggcctgtacgagggaaccggcagactgttcttcgagttttacagactgctgcacgacgcccggcctaaggaaggcgacgaccggcccttcttttggctgttcgagaatgtggtggccatgggagtcagcgacaagcgggatattagccggttcctggagagcaaccccgtgatgatcgatgccaaggaagtgagcgccgcccaccgggccagatacttctggggcaatctgcctggcatgaacagacccctggccagcaccgtgaacgacaagctggagctgcaggagtgcctggagcacggccggatcgccaagttcagcaaggtgagaaccatcaccacccgaagcaacagcatcaaacaaggcaaggaccagcactttcctgtgttcatgaacgagaaggaggacatcctgtggtgtaccgagatggagagagtgttcgggttcccagtccactacacagatgtcagcaacatgtctagactggccagacagagactgctgggaagaagctggtccgtccctgtgatcagacacctgttcgcccctctgaaggagtacttcgcctgcgtgagcagcggcaacagcaacgccaacagccggggccccagcttctctagcggcctggtgccactgtccctgagagggagccacatgggccccatggagatctacaaaaccgtgagcgcctggaagcggcagcctgtgcgcgtgctgagcctgtttcggaatatcgataaagtcctgaaaagcctgggattcctggagagcggctctggctccggcggtggcaccctgaagtacgtggaggatgtgacaaacgtggtcagacgggatgtggagaagtggggccccttcgatctggtgtacggcagcacccaacccctgggcagctcttgtgaccggtgccctggctggtacatgtttcagttccaccggatcctgcagtacgccctgccgagacaggagtcccagcggccattcttttggattttcatggacaacttgctgctgaccgaggatgaccaggaaactaccactcggttcctgcagaccgaagccgtgaccctgcaggacgtgagaggccgggactaccagaacgccatgcgggtgtggtccaacatccctggactgaaaagcaagcacgcacctctgacccctaaagaagaggagtacctgcaggcccaggtgcggagcagaagcaagctggacgcccctaaggtggatctgctggtgaagaattgcctcctgcccctgagagagtacttcaagtatttcagccagaatagtctgcccctgggaggcagcggcggcggcatggcccaggagagcgtgatgttcagcgacgtgagcgtggacttcagccaggaggagtgggagtgcctgaacgacgaccagagggacctgtacagggacgtgatgctggagaactacagcaacctggtgagcatggccggccacagcgtgagcaagcccaacgtgatcagctacctggagcagggcaaggagccctggctggtggacagggagctgaccaggggccagtggcccgtgctggagggcggcccaagcagcggcgcccctcctcccagcggcggcaggcggcccaagcagcggcgcccctcctcccagcggcggcagcccagccggctccccaacctctaccgaggagggcacctctgagtccgccacccccgagagcggccctggcacctccaccgagcccagcgagggcagcgcacccggcagccctgccggcagccccacctccacagaggagggaaccagcaccgagcccagcgaaggcagcgccccaggcaccagcaccgagcctagtgagcaggagattaaacggatcaacaagatcagaagaagacttgtgaaagacagcaacaccaagaaggccggcaagacaggccccatgaaaaccctgctggttagagtgatgacacccgatctgagagagcggctggaaaacctgagaaagaagcctgaaaatatcccccagcccatcagcaatacatctagagccaacctgaataagctgctgaccgattacaccgaaatgaagaaggcgatcctgcatgtgtactgggaagagttccagaaggaccctgtgggcctgatgagccgggtggcccagcctgccagcaagaagatcgatcagaacaagctgaaacctgagatggacgagaagggcaacctgaccaccgccggctttgcctgctctcagtgtggccagcccctgttcgtgtacaagctggagcaggtgtctgagaagggcaaggcttacaccaactacttcggacggtgcaatgtggccgagcacgaaaagctgatcctgctggcccagctgaagcccgagaaggatagcgacgaagccgtgacatatagcctgggaaagtttgggcagagggccctggatttctacagcattcatgtgaccaaggagtccacccaccccgtgaagcccctggcccagatcgccggaaacagatacgcctccggacctgtgggaaaggccctgagcgacgcatgtatgggcacaatcgcctccttcctgtctaagtaccaggacatcatcatcgaacaccagaaggtggtgaagggcaaccagaagagactggagagcctgcgggagctggccggcaaggaaaacctggaataccctagcgtgaccctgccacctcagcctcacaccaaggagggcgttgatgcctacaacgaagtgatcgcccgggtgcgaatgtgggtgaacctgaacctgtggcagaagctgaagctaagcagagatgatgccaagcctctgctgagactgaagggattcccttcctttcctctggtcgagagacaggccaacgaagtggactggtgggacatggtgtgtaacgtgaagaagctgatcaacgagaaaaaggaggatggcaaggtgttttggcagaatctggctggctacaagagacaggaagccctgagaccatacctgagcagcgaggaagatcggaagaagggaaagaaattcgctcggtaccagctgggcgacctgctgctgcacctggaaaagaagcacggcgaggactggggaaaggtgtacgacgaggcctgggagcggattgacaagaaagtggaaggcctgagcaagcacatcaagctggaagaggaacggagaagcgaggacgcccagagcaaggccgccctgaccgactggctgcgggctaaggccagcttcgtgatcgagggcctgaaggaggccgacaaggacgagttctgcagatgcgagctgaagctgcagaagtggtacggggacctgcggggaaagcccttcgccatcgaagccgagaacagcatcctggacatcagcggcttcagcaagcagtacaactgtgccttcatctggcagaaggacggcgtgaagaagctgaacctgtacctgatcatcaactacttcaagggcggcaagctgcggttcaagaagatcaaacctgaagccttcgaagccaacagattctacaccgtgatcaacaaaaagagcggcgagatcgtgcccatggaggtgaacttcaacttcgacgaccccaacctgatcatcctgcctctggcctttggcaagagacagggcagagaattcatctggaacgacctgctgtccctggaaaccggcagcctgaagctggccaacggaagagtgatcgagaagacactgtacaacagaagaacccggcaggatgagcctgccctgttcgtggccctgaccttcgagcggcgggaggtcctggactcctccaatatcaaaccaatgaacctgatcggcgtggcaagaggcgaaaacatccccgccgtgatcgccctgaccgaccccgagggctgcccactgagccggtttaaggatagcctgggaaacccaacccacatcctgagaatcggcgagagctataaggagaagcagcggaccatccaggccaagaaggaggtggagcagcggagagccggcggctacagccggaagtacgccagcaaagccaagaatctggcagacgatatggtgagaaacaccgctagagatctgctgtactacgccgtgacccaggatgccatgctgatcttcgccaacctgagccggggcttcggccggcagggcaagcggaccttcatggccgagagacagtacacacggatggaggactggctgaccgccaagctggcctacgagggcctgagcaagacctacctgtccaagacactggcccagtacacctccaagacatgcagcaactgtgggtttaccatcaccagcgccgactacgacagggtgctggagaagctgaagaagacagcaacaggctggatgaccacaattaacggcaaggagctgaaggtggagggccagattacctactacaacagatacaagagacagaacgtagtcaaggacctgtccgtcgagctggatagactgagcgaagaatctgtgaacaacgacatctcctcctggacaaagggcagaagcggagaagctctgagcctcctgaagaaaagattctcccatagacccgtgcaggagaagttcgtgtgcctgaactgcggcttcgagacacacgcagccgagcaagccgccctgaacatcgccagatcctggctgttcctgcggagccaggagtacaagaaataccagacaaacaagacaaccggcaacaccgataagagagccttcgtcgagacctggcagtccttttaccggaagaagcttaaggaggtgtggaaacctgccgtgcggtctggcggatctggcggaggctccaccagccccaagaaaaagagaaaagtctaagctgccttctgcggggcttgccttctggccatgcccttcttctctcccttgcacctgtacctcttggtctttgaataaagcctgagtaggaaggctagcaaaaaaaaaaaaaaaaaaaaaaaaaaaaaaaaaaaaaaaaaaaaaaaaaaaaaaaaaaaaaaaaaaaaaaaaaaaaaaaagcccagccggctccccaacctctaccgaggagggcacctctgagtccgccacccccgagagcggccctggcacctccaccgagcccagcgagggcagcgcacccggcagccctgccggcagccccacctccacagaggagggaaccagcaccgagcccagcgaaggcagcgccccaggcaccagcaccgagcctagtgagcaggagattaaacggatcaacaagatcagaagaagacttgtgaaagacagcaacaccaagaaggccggcaagacaggccccatgaaaaccctgctggttagagtgatgacacccgatctgagagagcggctggaaaacctgagaaagaagcctgaaaatatcccccagcccatcagcaatacatctagagccaacctgaataagctgctgaccgattacaccgaaatgaagaaggcgatcctgcatgtgtactgggaagagttccagaaggaccctgtgggcctgatgagccgggtggcccagcctgccagcaagaagatcgatcagaacaagctgaaacctgagatggacgagaagggcaacctgaccaccgccggctttgcctgctctcagtgtggccagcccctgttcgtgtacaagctggagcaggtgtctgagaagggcaaggcttacaccaactacttcggacggtgcaatgtggccgagcacgaaaagctgatcctgctggcccagctgaagcccgagaaggatagcgacgaagccgtgacatatagcctgggaaagtttgggcagagggccctggatttctacagcattcatgtgaccaaggagtccacccaccccgtgaagcccctggcccagatcgccggaaacagatacgcctccggacctgtgggaaaggccctgagcgacgcatgtatgggcacaatcgcctccttcctgtctaagtaccaggacatcatcatcgaacaccagaaggtggtgaagggcaaccagaagagactggagagcctgcgggagctggccggcaaggaaaacctggaataccctagcgtgaccctgccacctcagcctcacaccaaggagggcgttgatgcctacaacgaagtgatcgcccgggtgcgaatgtgggtgaacctgaacctgtggcagaagctgaagctaagcagagatgatgccaagcctctgctgagactgaagggattcccttcctttcctctggtcgagagacaggccaacgaagtggactggtgggacatggtgtgtaacgtgaagaagctgatcaacgagaaaaaggaggatggcaaggtgttttggcagaatctggctggctacaagagacaggaagccctgagaccatacctgagcagcgaggaagatcggaagaagggaaagaaattcgctcggtaccagctgggcgacctgctgctgcacctggaaaagaagcacggcgaggactggggaaaggtgtacgacgaggcctgggagcggattgacaagaaagtggaaggcctgagcaagcacatcaagctggaagaggaacggagaagcgaggacgcccagagcaaggccgccctgaccgactggctgcgggctaaggccagcttcgtgatcgagggcctgaaggaggccgacaaggacgagttctgcagatgcgagctgaagctgcagaagtggtacggggacctgcggggaaagcccttcgccatcgaagccgagaacagcatcctggacatcagcggcttcagcaagcagtacaactgtgccttcatctggcagaaggacggcgtgaagaagctgaacctgtacctgatcatcaactacttcaagggcggcaagctgcggttcaagaagatcaaacctgaagccttcgaagccaacagattctacaccgtgatcaacaaaaagagcggcgagatcgtgcccatggaggtgaacttcaacttcgacgaccccaacctgatcatcctgcctctggcctttggcaagagacagggcagagaattcatctggaacgacctgctgtccctggaaaccggcagcctgaagctggccaacggaagagtgatcgagaagacactgtacaacagaagaacccggcaggatgagcctgccctgttcgtggccctgaccttcgagcggcgggaggtcctggactcctccaatatcaaaccaatgaacctgatcggcgtggcaagaggcgaaaacatccccgccgtgatcgccctgaccgaccccgagggctgcccactgagccggtttaaggatagcctgggaaacccaacccacatcctgagaatcggcgagagctataaggagaagcagcggaccatccaggccaagaaggaggtggagcagcggagagccggcggctacagccggaagtacgccagcaaagccaagaatctggcagacgatatggtgagaaacaccgctagagatctgctgtactacgccgtgacccaggatgccatgctgatcttcgccaacctgagccggggcttcggccggcagggcaagcggaccttcatggccgagagacagtacacacggatggaggactggctgaccgccaagctggcctacgagggcctgagcaagacctacctgtccaagacactggcccagtacacctccaagacatgcagcaactgtgggtttaccatcaccagcgccgactacgacagggtgctggagaagctgaagaagacagcaacaggctggatgaccacaattaacggcaaggagctgaaggtggagggccagattacctactacaacagatacaagagacagaacgtagtcaaggacctgtccgtcgagctggatagactgagcgaagaatctgtgaacaacgacatctcctcctggacaaagggcagaagcggagaagctctgagcctcctgaagaaaagattctcccatagacccgtgcaggagaagttcgtgtgcctgaactgcggcttcgagacacacgcagccgagcaagccgccctgaacatcgccagatcctggctgttcctgcggagccaggagtacaagaaataccagacaaacaagacaaccggcaacaccgataagagagccttcgtcgagacctggcagtccttttaccggaagaagcttaaggaggtgtggaaacctgccgtgcggtctggcggatctggcggaggctccaccagccccaagaaaaagagaaaagtctaagctgccttctgcggggcttgccttctggccatgcccttcttctctcccttgcacctgtacctcttggtctttgaataaagcctgagtaggaaggctagcaaaaaaaaaaaaaaaaaaaaaaaaaaaaaaaaaaaaaaaaaaaaaaaaaaaaaaaaaaaaaaaaaaaaaaaaaaaaaaaa

SEQ ID NO: 9987 - RNA, 8787 nt, synthetic construct
  source 1..8787: mol_type = other RNA
aggaaataagagagaaaagaagagtaagaagaaatataagagccaccatggcccctaagaagaagcgtaaagtgagccggatgaaccacgaccaggagttcgacccccctaaggtgtaccctcccgtccccgccgagaagagaaagcccatccgggtcctgagcctgttcgatggcatcgccaccggtctgctggtgctgaaggacctgggcatccaggtggataggtacattgcctccgaggtgtgcgaggactccatcaccgtgggaatggtgcgtcatcagggcaagatcatgtacgtgggcgacgtgcggagcgtgacacagaagcatatccaggagtggggccctttcgacctggtgatcggcggcagcccttgcaatgacctgagcatcgtgaacccagcccggaagggcctgtacgagggaaccggcagactgttcttcgagttttacagactgctgcacgacgcccggcctaaggaaggcgacgaccggcccttcttttggctgttcgagaatgtggtggccatgggagtcagcgacaagcgggatattagccggttcctggagagcaaccccgtgatgatcgatgccaaggaagtgagcgccgcccaccgggccagatacttctggggcaatctgcctggcatgaacagacccctggccagcaccgtgaacgacaagctggagctgcaggagtgcctggagcacggccggatcgccaagttcagcaaggtgagaaccatcaccacccgaagcaacagcatcaaacaaggcaaggaccagcactttcctgtgttcatgaacgagaaggaggacatcctgtggtgtaccgagatggagagagtgttcgggttcccagtccactacacagatgtcagcaacatgtctagactggccagacagagactgctgggaagaagctggtccgtccctgtgatcagacacctgttcgcccctctgaaggagtacttcgcctgcgtgagcagcggcaacagcaacgccaacagccggggccccagcttctctagcggcctggtgccactgtccctgagagggagccacatgggccccatggagatctacaaaaccgtgagcgcctggaagcggcagcctgtgcgcgtgctgagcctgtttcggaatatcgataaagtcctgaaaagcctgggattcctggagagcggctctggctccggcggtggcaccctgaagtacgtggaggatgtgacaaacgtggtcagacgggatgtggagaagtggggccccttcgatctggtgtacggcagcacccaacccctgggcagctcttgtgaccggtgccctggctggtacatgtttcagttccaccggatcctgcagtacgccctgccgagacaggagtcccagcggccattcttttggattttcatggacaacttgctgctgaccgaggatgaccaggaaactaccactcggttcctgcagaccgaagccgtgaccctgcaggacgtgagaggccgggactaccagaacgccatgcgggtgtggtccaacatccctggactgaaaagcaagcacgcacctctgacccctaaagaagaggagtacctgcaggcccaggtgcggagcagaagcaagctggacgcccctaaggtggatctgctggtgaagaattgcctcctgcccctgagagagtacttcaagtatttcagccagaatagtctgcccctgggaggcagcggcggcggcagggagaggctggtgagcttcgaggacgtgaccgtggacttcagccaggaggagtggaggaggctggacagcgtgcagaggcacctgtaccaggacgtgatgctggagatctacagccacctgctggccgtgggctaccccgtgcccagccccggcgccatcttcaggatcaagaagaggaaggaggccaggaccggcgaggccaagctgccccacccctgctggtgccaggaggtggagagcggcggcccaagcagcggcgcccctcctcccagcggcggcaggcggcccaagcagcggcgcccctcctcccagcggcggcagcccagccggctccccaacctctaccgaggagggcacctctgagtccgccacccccgagagcggccctggcacctccaccgagcccagcgagggcagcgcacccggcagccctgccggcagccccacctccacagaggagggaaccagcaccgagcccagcgaaggcagcgccccaggcaccagcaccgagcctagtgagcaggagattaaacggatcaacaagatcagaagaagacttgtgaaagacagcaacaccaagaaggccggcaagacaggccccatgaaaaccctgctggttagagtgatgacacccgatctgagagagcggctggaaaacctgagaaagaagcctgaaaatatcccccagcccatcagcaatacatctagagccaacctgaataagctgctgaccgattacaccgaaatgaagaaggcgatcctgcatgtgtactgggaagagttccagaaggaccctgtgggcctgatgagccgggtggcccagcctgccagcaagaagatcgatcagaacaagctgaaacctgagatggacgagaagggcaacctgaccaccgccggctttgcctgctctcagtgtggccagcccctgttcgtgtacaagctggagcaggtgtctgagaagggcaaggcttacaccaactacttcggacggtgcaatgtggccgagcacgaaaagctgatcctgctggcccagctgaagcccgagaaggatagcgacgaagccgtgacatatagcctgggaaagtttgggcagagggccctggatttctacagcattcatgtgaccaaggagtccacccaccccgtgaagcccctggcccagatcgccggaaacagatacgcctccggacctgtgggaaaggccctgagcgacgcatgtatgggcacaatcgcctccttcctgtctaagtaccaggacatcatcatcgaacaccagaaggtggtgaagggcaaccagaagagactggagagcctgcgggagctggccggcaaggaaaacctggaataccctagcgtgaccctgccacctcagcctcacaccaaggagggcgttgatgcctacaacgaagtgatcgcccgggtgcgaatgtgggtgaacctgaacctgtggcagaagctgaagctaagcagagatgatgccaagcctctgctgagactgaagggattcccttcctttcctctggtcgagagacaggccaacgaagtggactggtgggacatggtgtgtaacgtgaagaagctgatcaacgagaaaaaggaggatggcaaggtgttttggcagaatctggctggctacaagagacaggaagccctgagaccatacctgagcagcgaggaagatcggaagaagggaaagaaattcgctcggtaccagctgggcgacctgctgctgcacctggaaaagaagcacggcgaggactggggaaaggtgtacgacgaggcctgggagcggattgacaagaaagtggaaggcctgagcaagcacatcaagctggaagaggaacggagaagcgaggacgcccagagcaaggccgccctgaccgactggctgcgggctaaggccagcttcgtgatcgagggcctgaaggaggccgacaaggacgagttctgcagatgcgagctgaagctgcagaagtggtacggggacctgcggggaaagcccttcgccatcgaagccgagaacagcatcctggacatcagcggcttcagcaagcagtacaactgtgccttcatctggcagaaggacggcgtgaagaagctgaacctgtacctgatcatcaactacttcaagggcggcaagctgcggttcaagaagatcaaacctgaagccttcgaagccaacagattctacaccgtgatcaacaaaaagagcggcgagatcgtgcccatggaggtgaacttcaacttcgacgaccccaacctgatcatcctgcctctggcctttggcaagagacagggcagagaattcatctggaacgacctgctgtccctggaaaccggcagcctgaagctggccaacggaagagtgatcgagaagacactgtacaacagaagaacccggcaggatgagcctgccctgttcgtggccctgaccttcgagcggcgggaggtcctggactcctccaatatcaaaccaatgaacctgatcggcgtggcaagaggcgaaaacatccccgccgtgatcgccctgaccgaccccgagggctgcccactgagccggtttaaggatagcctgggaaacccaacccacatcctgagaatcggcgagagctataaggagaagcagcggaccatccaggccaagaaggaggtggagcagcggagagccggcggctacagccggaagtacgccagcaaagccaagaatctggcagacgatatggtgagaaacaccgctagagatctgctgtactacgccgtgacccaggatgccatgctgatcttcgccaacctgagccggggcttcggccggcagggcaagcggaccttcatggccgagagacagtacacacggatggaggactggctgaccgccaagctggcctacgagggcctgagcaagacctacctgtccaagacactggcccagtacacctccaagacatgcagcaactgtgggtttaccatcaccagcgccgactacgacagggtgctggagaagctgaagaagacagcaacaggctggatgaccacaattaacggcaaggagctgaaggtggagggccagattacctactacaacagatacaagagacagaacgtagtcaaggacctgtccgtcgagctggatagactgagcgaagaatctgtgaacaacgacatctcctcctggacaaagggcagaagcggagaagctctgagcctcctgaagaaaagattctcccatagacccgtgcaggagaagttcgtgtgcctgaactgcggcttcgagacacacgcagccgagcaagccgccctgaacatcgccagatcctggctgttcctgcggagccaggagtacaagaaataccagacaaacaagacaaccggcaacaccgataagagagccttcgtcgagacctggcagtccttttaccggaagaagcttaaggaggtgtggaaacctgccgtgcggtctggcggatctggcggaggctccaccagccccaagaaaaagagaaaagtctaagctgccttctgcggggcttgccttctggccatgcccttcttctctcccttgcacctgtacctcttggtctttgaataaagcctgagtaggaaggctagcaaaaaaaaaaaaaaaaaaaaaaaaaaaaaaaaaaaaaaaaaaaaaaaaaaaaaaaaaaaaaaaaaaaaaaaaaaaaaaaagcccagccggctccccaacctctaccgaggagggcacctctgagtccgccacccccgagagcggccctggcacctccaccgagcccagcgagggcagcgcacccggcagccctgccggcagccccacctccacagaggagggaaccagcaccgagcccagcgaaggcagcgccccaggcaccagcaccgagcctagtgagcaggagattaaacggatcaacaagatcagaagaagacttgtgaaagacagcaacaccaagaaggccggcaagacaggccccatgaaaaccctgctggttagagtgatgacacccgatctgagagagcggctggaaaacctgagaaagaagcctgaaaatatcccccagcccatcagcaatacatctagagccaacctgaataagctgctgaccgattacaccgaaatgaagaaggcgatcctgcatgtgtactgggaagagttccagaaggaccctgtgggcctgatgagccgggtggcccagcctgccagcaagaagatcgatcagaacaagctgaaacctgagatggacgagaagggcaacctgaccaccgccggctttgcctgctctcagtgtggccagcccctgttcgtgtacaagctggagcaggtgtctgagaagggcaaggcttacaccaactacttcggacggtgcaatgtggccgagcacgaaaagctgatcctgctggcccagctgaagcccgagaaggatagcgacgaagccgtgacatatagcctgggaaagtttgggcagagggccctggatttctacagcattcatgtgaccaaggagtccacccaccccgtgaagcccctggcccagatcgccggaaacagatacgcctccggacctgtgggaaaggccctgagcgacgcatgtatgggcacaatcgcctccttcctgtctaagtaccaggacatcatcatcgaacaccagaaggtggtgaagggcaaccagaagagactggagagcctgcgggagctggccggcaaggaaaacctggaataccctagcgtgaccctgccacctcagcctcacaccaaggagggcgttgatgcctacaacgaagtgatcgcccgggtgcgaatgtgggtgaacctgaacctgtggcagaagctgaagctaagcagagatgatgccaagcctctgctgagactgaagggattcccttcctttcctctggtcgagagacaggccaacgaagtggactggtgggacatggtgtgtaacgtgaagaagctgatcaacgagaaaaaggaggatggcaaggtgttttggcagaatctggctggctacaagagacaggaagccctgagaccatacctgagcagcgaggaagatcggaagaagggaaagaaattcgctcggtaccagctgggcgacctgctgctgcacctggaaaagaagcacggcgaggactggggaaaggtgtacgacgaggcctgggagcggattgacaagaaagtggaaggcctgagcaagcacatcaagctggaagaggaacggagaagcgaggacgcccagagcaaggccgccctgaccgactggctgcgggctaaggccagcttcgtgatcgagggcctgaaggaggccgacaaggacgagttctgcagatgcgagctgaagctgcagaagtggtacggggacctgcggggaaagcccttcgccatcgaagccgagaacagcatcctggacatcagcggcttcagcaagcagtacaactgtgccttcatctggcagaaggacggcgtgaagaagctgaacctgtacctgatcatcaactacttcaagggcggcaagctgcggttcaagaagatcaaacctgaagccttcgaagccaacagattctacaccgtgatcaacaaaaagagcggcgagatcgtgcccatggaggtgaacttcaacttcgacgaccccaacctgatcatcctgcctctggcctttggcaagagacagggcagagaattcatctggaacgacctgctgtccctggaaaccggcagcctgaagctggccaacggaagagtgatcgagaagacactgtacaacagaagaacccggcaggatgagcctgccctgttcgtggccctgaccttcgagcggcgggaggtcctggactcctccaatatcaaaccaatgaacctgatcggcgtggcaagaggcgaaaacatccccgccgtgatcgccctgaccgaccccgagggctgcccactgagccggtttaaggatagcctgggaaacccaacccacatcctgagaatcggcgagagctataaggagaagcagcggaccatccaggccaagaaggaggtggagcagcggagagccggcggctacagccggaagtacgccagcaaagccaagaatctggcagacgatatggtgagaaacaccgctagagatctgctgtactacgccgtgacccaggatgccatgctgatcttcgccaacctgagccggggcttcggccggcagggcaagcggaccttcatggccgagagacagtacacacggatggaggactggctgaccgccaagctggcctacgagggcctgagcaagacctacctgtccaagacactggcccagtacacctccaagacatgcagcaactgtgggtttaccatcaccagcgccgactacgacagggtgctggagaagctgaagaagacagcaacaggctggatgaccacaattaacggcaaggagctgaaggtggagggccagattacctactacaacagatacaagagacagaacgtagtcaaggacctgtccgtcgagctggatagactgagcgaagaatctgtgaacaacgacatctcctcctggacaaagggcagaagcggagaagctctgagcctcctgaagaaaagattctcccatagacccgtgcaggagaagttcgtgtgcctgaactgcggcttcgagacacacgcagccgagcaagccgccctgaacatcgccagatcctggctgttcctgcggagccaggagtacaagaaataccagacaaacaagacaaccggcaacaccgataagagagccttcgtcgagacctggcagtccttttaccggaagaagcttaaggaggtgtggaaacctgccgtgcggtctggcggatctggcggaggctccaccagccccaagaaaaagagaaaagtctaagctgccttctgcggggcttgccttctggccatgcccttcttctctcccttgcacctgtacctcttggtctttgaataaagcctgagtaggaaggctagcaaaaaaaaaaaaaaaaaaaaaaaaaaaaaaaaaaaaaaaaaaaaaaaaaaaaaaaaaaaaaaaaaaaaaaaaaaaaaaaa

SEQ ID NO: 9988 - RNA, 8787 nt, synthetic construct
  source 1..8787: mol_type = other RNA
aggaaataagagagaaaagaagagtaagaagaaatataagagccaccatggcccctaagaagaagcgtaaagtgagccggatgaaccacgaccaggagttcgacccccctaaggtgtaccctcccgtccccgccgagaagagaaagcccatccgggtcctgagcctgttcgatggcatcgccaccggtctgctggtgctgaaggacctgggcatccaggtggataggtacattgcctccgaggtgtgcgaggactccatcaccgtgggaatggtgcgtcatcagggcaagatcatgtacgtgggcgacgtgcggagcgtgacacagaagcatatccaggagtggggccctttcgacctggtgatcggcggcagcccttgcaatgacctgagcatcgtgaacccagcccggaagggcctgtacgagggaaccggcagactgttcttcgagttttacagactgctgcacgacgcccggcctaaggaaggcgacgaccggcccttcttttggctgttcgagaatgtggtggccatgggagtcagcgacaagcgggatattagccggttcctggagagcaaccccgtgatgatcgatgccaaggaagtgagcgccgcccaccgggccagatacttctggggcaatctgcctggcatgaacagacccctggccagcaccgtgaacgacaagctggagctgcaggagtgcctggagcacggccggatcgccaagttcagcaaggtgagaaccatcaccacccgaagcaacagcatcaaacaaggcaaggaccagcactttcctgtgttcatgaacgagaaggaggacatcctgtggtgtaccgagatggagagagtgttcgggttcccagtccactacacagatgtcagcaacatgtctagactggccagacagagactgctgggaagaagctggtccgtccctgtgatcagacacctgttcgcccctctgaaggagtacttcgcctgcgtgagcagcggcaacagcaacgccaacagccggggccccagcttctctagcggcctggtgccactgtccctgagagggagccacatgggccccatggagatctacaaaaccgtgagcgcctggaagcggcagcctgtgcgcgtgctgagcctgtttcggaatatcgataaagtcctgaaaagcctgggattcctggagagcggctctggctccggcggtggcaccctgaagtacgtggaggatgtgacaaacgtggtcagacgggatgtggagaagtggggccccttcgatctggtgtacggcagcacccaacccctgggcagctcttgtgaccggtgccctggctggtacatgtttcagttccaccggatcctgcagtacgccctgccgagacaggagtcccagcggccattcttttggattttcatggacaacttgctgctgaccgaggatgaccaggaaactaccactcggttcctgcagaccgaagccgtgaccctgcaggacgtgagaggccgggactaccagaacgccatgcgggtgtggtccaacatccctggactgaaaagcaagcacgcacctctgacccctaaagaagaggagtacctgcaggcccaggtgcggagcagaagcaagctggacgcccctaaggtggatctgctggtgaagaattgcctcctgcccctgagagagtacttcaagtatttcagccagaatagtctgcccctgggaggcagcggcggcggcgcctgggaggtggtgaccttccaggacgtggccgtggacttcaccagggaggagtggaggctgctgagccccccccagaaggagctgtacaaggaggtgatgctggagaacgtgaggaacctgctgagcgtgggcctgcccgccccccccgacgacgtggtgagctacctggagcagagggagggccccagcatgctggaccaggaggacctgaggacctgcggccccgagggcgagatcaggggcggcccaagcagcggcgcccctcctcccagcggcggcaggcggcccaagcagcggcgcccctcctcccagcggcggcagcccagccggctccccaacctctaccgaggagggcacctctgagtccgccacccccgagagcggccctggcacctccaccgagcccagcgagggcagcgcacccggcagccctgccggcagccccacctccacagaggagggaaccagcaccgagcccagcgaaggcagcgccccaggcaccagcaccgagcctagtgagcaggagattaaacggatcaacaagatcagaagaagacttgtgaaagacagcaacaccaagaaggccggcaagacaggccccatgaaaaccctgctggttagagtgatgacacccgatctgagagagcggctggaaaacctgagaaagaagcctgaaaatatcccccagcccatcagcaatacatctagagccaacctgaataagctgctgaccgattacaccgaaatgaagaaggcgatcctgcatgtgtactgggaagagttccagaaggaccctgtgggcctgatgagccgggtggcccagcctgccagcaagaagatcgatcagaacaagctgaaacctgagatggacgagaagggcaacctgaccaccgccggctttgcctgctctcagtgtggccagcccctgttcgtgtacaagctggagcaggtgtctgagaagggcaaggcttacaccaactacttcggacggtgcaatgtggccgagcacgaaaagctgatcctgctggcccagctgaagcccgagaaggatagcgacgaagccgtgacatatagcctgggaaagtttgggcagagggccctggatttctacagcattcatgtgaccaaggagtccacccaccccgtgaagcccctggcccagatcgccggaaacagatacgcctccggacctgtgggaaaggccctgagcgacgcatgtatgggcacaatcgcctccttcctgtctaagtaccaggacatcatcatcgaacaccagaaggtggtgaagggcaaccagaagagactggagagcctgcgggagctggccggcaaggaaaacctggaataccctagcgtgaccctgccacctcagcctcacaccaaggagggcgttgatgcctacaacgaagtgatcgcccgggtgcgaatgtgggtgaacctgaacctgtggcagaagctgaagctaagcagagatgatgccaagcctctgctgagactgaagggattcccttcctttcctctggtcgagagacaggccaacgaagtggactggtgggacatggtgtgtaacgtgaagaagctgatcaacgagaaaaaggaggatggcaaggtgttttggcagaatctggctggctacaagagacaggaagccctgagaccatacctgagcagcgaggaagatcggaagaagggaaagaaattcgctcggtaccagctgggcgacctgctgctgcacctggaaaagaagcacggcgaggactggggaaaggtgtacgacgaggcctgggagcggattgacaagaaagtggaaggcctgagcaagcacatcaagctggaagaggaacggagaagcgaggacgcccagagcaaggccgccctgaccgactggctgcgggctaaggccagcttcgtgatcgagggcctgaaggaggccgacaaggacgagttctgcagatgcgagctgaagctgcagaagtggtacggggacctgcggggaaagcccttcgccatcgaagccgagaacagcatcctggacatcagcggcttcagcaagcagtacaactgtgccttcatctggcagaaggacggcgtgaagaagctgaacctgtacctgatcatcaactacttcaagggcggcaagctgcggttcaagaagatcaaacctgaagccttcgaagccaacagattctacaccgtgatcaacaaaaagagcggcgagatcgtgcccatggaggtgaacttcaacttcgacgaccccaacctgatcatcctgcctctggcctttggcaagagacagggcagagaattcatctggaacgacctgctgtccctggaaaccggcagcctgaagctggccaacggaagagtgatcgagaagacactgtacaacagaagaacccggcaggatgagcctgccctgttcgtggccctgaccttcgagcggcgggaggtcctggactcctccaatatcaaaccaatgaacctgatcggcgtggcaagaggcgaaaacatccccgccgtgatcgccctgaccgaccccgagggctgcccactgagccggtttaaggatagcctgggaaacccaacccacatcctgagaatcggcgagagctataaggagaagcagcggaccatccaggccaagaaggaggtggagcagcggagagccggcggctacagccggaagtacgccagcaaagccaagaatctggcagacgatatggtgagaaacaccgctagagatctgctgtactacgccgtgacccaggatgccatgctgatcttcgccaacctgagccggggcttcggccggcagggcaagcggaccttcatggccgagagacagtacacacggatggaggactggctgaccgccaagctggcctacgagggcctgagcaagacctacctgtccaagacactggcccagtacacctccaagacatgcagcaactgtgggtttaccatcaccagcgccgactacgacagggtgctggagaagctgaagaagacagcaacaggctggatgaccacaattaacggcaaggagctgaaggtggagggccagattacctactacaacagatacaagagacagaacgtagtcaaggacctgtccgtcgagctggatagactgagcgaagaatctgtgaacaacgacatctcctcctggacaaagggcagaagcggagaagctctgagcctcctgaagaaaagattctcccatagacccgtgcaggagaagttcgtgtgcctgaactgcggcttcgagacacacgcagccgagcaagccgccctgaacatcgccagatcctggctgttcctgcggagccaggagtacaagaaataccagacaaacaagacaaccggcaacaccgataagagagccttcgtcgagacctggcagtccttttaccggaagaagcttaaggaggtgtggaaacctgccgtgcggtctggcggatctggcggaggctccaccagccccaagaaaaagagaaaagtctaagctgccttctgcggggcttgccttctggccatgcccttcttctctcccttgcacctgtacctcttggtctttgaataaagcctgagtaggaaggctagcaaaaaaaaaaaaaaaaaaaaaaaaaaaaaaaaaaaaaaaaaaaaaaaaaaaaaaaaaaaaaaaaaaaaaaaaaaaaaaaagcccagccggctccccaacctctaccgaggagggcacctctgagtccgccacccccgagagcggccctggcacctccaccgagcccagcgagggcagcgcacccggcagccctgccggcagccccacctccacagaggagggaaccagcaccgagcccagcgaaggcagcgccccaggcaccagcaccgagcctagtgagcaggagattaaacggatcaacaagatcagaagaagacttgtgaaagacagcaacaccaagaaggccggcaagacaggccccatgaaaaccctgctggttagagtgatgacacccgatctgagagagcggctggaaaacctgagaaagaagcctgaaaatatcccccagcccatcagcaatacatctagagccaacctgaataagctgctgaccgattacaccgaaatgaagaaggcgatcctgcatgtgtactgggaagagttccagaaggaccctgtgggcctgatgagccgggtggcccagcctgccagcaagaagatcgatcagaacaagctgaaacctgagatggacgagaagggcaacctgaccaccgccggctttgcctgctctcagtgtggccagcccctgttcgtgtacaagctggagcaggtgtctgagaagggcaaggcttacaccaactacttcggacggtgcaatgtggccgagcacgaaaagctgatcctgctggcccagctgaagcccgagaaggatagcgacgaagccgtgacatatagcctgggaaagtttgggcagagggccctggatttctacagcattcatgtgaccaaggagtccacccaccccgtgaagcccctggcccagatcgccggaaacagatacgcctccggacctgtgggaaaggccctgagcgacgcatgtatgggcacaatcgcctccttcctgtctaagtaccaggacatcatcatcgaacaccagaaggtggtgaagggcaaccagaagagactggagagcctgcgggagctggccggcaaggaaaacctggaataccctagcgtgaccctgccacctcagcctcacaccaaggagggcgttgatgcctacaacgaagtgatcgcccgggtgcgaatgtgggtgaacctgaacctgtggcagaagctgaagctaagcagagatgatgccaagcctctgctgagactgaagggattcccttcctttcctctggtcgagagacaggccaacgaagtggactggtgggacatggtgtgtaacgtgaagaagctgatcaacgagaaaaaggaggatggcaaggtgttttggcagaatctggctggctacaagagacaggaagccctgagaccatacctgagcagcgaggaagatcggaagaagggaaagaaattcgctcggtaccagctgggcgacctgctgctgcacctggaaaagaagcacggcgaggactggggaaaggtgtacgacgaggcctgggagcggattgacaagaaagtggaaggcctgagcaagcacatcaagctggaagaggaacggagaagcgaggacgcccagagcaaggccgccctgaccgactggctgcgggctaaggccagcttcgtgatcgagggcctgaaggaggccgacaaggacgagttctgcagatgcgagctgaagctgcagaagtggtacggggacctgcggggaaagcccttcgccatcgaagccgagaacagcatcctggacatcagcggcttcagcaagcagtacaactgtgccttcatctggcagaaggacggcgtgaagaagctgaacctgtacctgatcatcaactacttcaagggcggcaagctgcggttcaagaagatcaaacctgaagccttcgaagccaacagattctacaccgtgatcaacaaaaagagcggcgagatcgtgcccatggaggtgaacttcaacttcgacgaccccaacctgatcatcctgcctctggcctttggcaagagacagggcagagaattcatctggaacgacctgctgtccctggaaaccggcagcctgaagctggccaacggaagagtgatcgagaagacactgtacaacagaagaacccggcaggatgagcctgccctgttcgtggccctgaccttcgagcggcgggaggtcctggactcctccaatatcaaaccaatgaacctgatcggcgtggcaagaggcgaaaacatccccgccgtgatcgccctgaccgaccccgagggctgcccactgagccggtttaaggatagcctgggaaacccaacccacatcctgagaatcggcgagagctataaggagaagcagcggaccatccaggccaagaaggaggtggagcagcggagagccggcggctacagccggaagtacgccagcaaagccaagaatctggcagacgatatggtgagaaacaccgctagagatctgctgtactacgccgtgacccaggatgccatgctgatcttcgccaacctgagccggggcttcggccggcagggcaagcggaccttcatggccgagagacagtacacacggatggaggactggctgaccgccaagctggcctacgagggcctgagcaagacctacctgtccaagacactggcccagtacacctccaagacatgcagcaactgtgggtttaccatcaccagcgccgactacgacagggtgctggagaagctgaagaagacagcaacaggctggatgaccacaattaacggcaaggagctgaaggtggagggccagattacctactacaacagatacaagagacagaacgtagtcaaggacctgtccgtcgagctggatagactgagcgaagaatctgtgaacaacgacatctcctcctggacaaagggcagaagcggagaagctctgagcctcctgaagaaaagattctcccatagacccgtgcaggagaagttcgtgtgcctgaactgcggcttcgagacacacgcagccgagcaagccgccctgaacatcgccagatcctggctgttcctgcggagccaggagtacaagaaataccagacaaacaagacaaccggcaacaccgataagagagccttcgtcgagacctggcagtccttttaccggaagaagcttaaggaggtgtggaaacctgccgtgcggtctggcggatctggcggaggctccaccagccccaagaaaaagagaaaagtctaagctgccttctgcggggcttgccttctggccatgcccttcttctctcccttgcacctgtacctcttggtctttgaataaagcctgagtaggaaggctagcaaaaaaaaaaaaaaaaaaaaaaaaaaaaaaaaaaaaaaaaaaaaaaaaaaaaaaaaaaaaaaaaaaaaaaaaaaaaaaaa

SEQ ID NO: 9989 - RNA, 8787 nt, synthetic construct
  source 1..8787: mol_type = other RNA
aggaaataagagagaaaagaagagtaagaagaaatataagagccaccatggcccctaagaagaagcgtaaagtgagccggatgaaccacgaccaggagttcgacccccctaaggtgtaccctcccgtccccgccgagaagagaaagcccatccgggtcctgagcctgttcgatggcatcgccaccggtctgctggtgctgaaggacctgggcatccaggtggataggtacattgcctccgaggtgtgcgaggactccatcaccgtgggaatggtgcgtcatcagggcaagatcatgtacgtgggcgacgtgcggagcgtgacacagaagcatatccaggagtggggccctttcgacctggtgatcggcggcagcccttgcaatgacctgagcatcgtgaacccagcccggaagggcctgtacgagggaaccggcagactgttcttcgagttttacagactgctgcacgacgcccggcctaaggaaggcgacgaccggcccttcttttggctgttcgagaatgtggtggccatgggagtcagcgacaagcgggatattagccggttcctggagagcaaccccgtgatgatcgatgccaaggaagtgagcgccgcccaccgggccagatacttctggggcaatctgcctggcatgaacagacccctggccagcaccgtgaacgacaagctggagctgcaggagtgcctggagcacggccggatcgccaagttcagcaaggtgagaaccatcaccacccgaagcaacagcatcaaacaaggcaaggaccagcactttcctgtgttcatgaacgagaaggaggacatcctgtggtgtaccgagatggagagagtgttcgggttcccagtccactacacagatgtcagcaacatgtctagactggccagacagagactgctgggaagaagctggtccgtccctgtgatcagacacctgttcgcccctctgaaggagtacttcgcctgcgtgagcagcggcaacagcaacgccaacagccggggccccagcttctctagcggcctggtgccactgtccctgagagggagccacatgggccccatggagatctacaaaaccgtgagcgcctggaagcggcagcctgtgcgcgtgctgagcctgtttcggaatatcgataaagtcctgaaaagcctgggattcctggagagcggctctggctccggcggtggcaccctgaagtacgtggaggatgtgacaaacgtggtcagacgggatgtggagaagtggggccccttcgatctggtgtacggcagcacccaacccctgggcagctcttgtgaccggtgccctggctggtacatgtttcagttccaccggatcctgcagtacgccctgccgagacaggagtcccagcggccattcttttggattttcatggacaacttgctgctgaccgaggatgaccaggaaactaccactcggttcctgcagaccgaagccgtgaccctgcaggacgtgagaggccgggactaccagaacgccatgcgggtgtggtccaacatccctggactgaaaagcaagcacgcacctctgacccctaaagaagaggagtacctgcaggcccaggtgcggagcagaagcaagctggacgcccctaaggtggatctgctggtgaagaattgcctcctgcccctgagagagtacttcaagtatttcagccagaatagtctgcccctgggaggcagcggcggcggccccaagggcctgctgaccttcagggacgtggccatcgagttcagccaggaggagtggggctgcctgaaccacacccagagggagctgtacagggacgtgatgctggagaactacggcaacctgctgttcctgggcctgatcgtgagcaagcccgacctggtgagcttcctggagcagaagaaggagccctggagcgtgaagaggaagaagagggtgaccatccaccccgcccagaggttcggcggcggcccaagcagcggcgcccctcctcccagcggcggcaggcggcccaagcagcggcgcccctcctcccagcggcggcagcccagccggctccccaacctctaccgaggagggcacctctgagtccgccacccccgagagcggccctggcacctccaccgagcccagcgagggcagcgcacccggcagccctgccggcagccccacctccacagaggagggaaccagcaccgagcccagcgaaggcagcgccccaggcaccagcaccgagcctagtgagcaggagattaaacggatcaacaagatcagaagaagacttgtgaaagacagcaacaccaagaaggccggcaagacaggccccatgaaaaccctgctggttagagtgatgacacccgatctgagagagcggctggaaaacctgagaaagaagcctgaaaatatcccccagcccatcagcaatacatctagagccaacctgaataagctgctgaccgattacaccgaaatgaagaaggcgatcctgcatgtgtactgggaagagttccagaaggaccctgtgggcctgatgagccgggtggcccagcctgccagcaagaagatcgatcagaacaagctgaaacctgagatggacgagaagggcaacctgaccaccgccggctttgcctgctctcagtgtggccagcccctgttcgtgtacaagctggagcaggtgtctgagaagggcaaggcttacaccaactacttcggacggtgcaatgtggccgagcacgaaaagctgatcctgctggcccagctgaagcccgagaaggatagcgacgaagccgtgacatatagcctgggaaagtttgggcagagggccctggatttctacagcattcatgtgaccaaggagtccacccaccccgtgaagcccctggcccagatcgccggaaacagatacgcctccggacctgtgggaaaggccctgagcgacgcatgtatgggcacaatcgcctccttcctgtctaagtaccaggacatcatcatcgaacaccagaaggtggtgaagggcaaccagaagagactggagagcctgcgggagctggccggcaaggaaaacctggaataccctagcgtgaccctgccacctcagcctcacaccaaggagggcgttgatgcctacaacgaagtgatcgcccgggtgcgaatgtgggtgaacctgaacctgtggcagaagctgaagctaagcagagatgatgccaagcctctgctgagactgaagggattcccttcctttcctctggtcgagagacaggccaacgaagtggactggtgggacatggtgtgtaacgtgaagaagctgatcaacgagaaaaaggaggatggcaaggtgttttggcagaatctggctggctacaagagacaggaagccctgagaccatacctgagcagcgaggaagatcggaagaagggaaagaaattcgctcggtaccagctgggcgacctgctgctgcacctggaaaagaagcacggcgaggactggggaaaggtgtacgacgaggcctgggagcggattgacaagaaagtggaaggcctgagcaagcacatcaagctggaagaggaacggagaagcgaggacgcccagagcaaggccgccctgaccgactggctgcgggctaaggccagcttcgtgatcgagggcctgaaggaggccgacaaggacgagttctgcagatgcgagctgaagctgcagaagtggtacggggacctgcggggaaagcccttcgccatcgaagccgagaacagcatcctggacatcagcggcttcagcaagcagtacaactgtgccttcatctggcagaaggacggcgtgaagaagctgaacctgtacctgatcatcaactacttcaagggcggcaagctgcggttcaagaagatcaaacctgaagccttcgaagccaacagattctacaccgtgatcaacaaaaagagcggcgagatcgtgcccatggaggtgaacttcaacttcgacgaccccaacctgatcatcctgcctctggcctttggcaagagacagggcagagaattcatctggaacgacctgctgtccctggaaaccggcagcctgaagctggccaacggaagagtgatcgagaagacactgtacaacagaagaacccggcaggatgagcctgccctgttcgtggccctgaccttcgagcggcgggaggtcctggactcctccaatatcaaaccaatgaacctgatcggcgtggcaagaggcgaaaacatccccgccgtgatcgccctgaccgaccccgagggctgcccactgagccggtttaaggatagcctgggaaacccaacccacatcctgagaatcggcgagagctataaggagaagcagcggaccatccaggccaagaaggaggtggagcagcggagagccggcggctacagccggaagtacgccagcaaagccaagaatctggcagacgatatggtgagaaacaccgctagagatctgctgtactacgccgtgacccaggatgccatgctgatcttcgccaacctgagccggggcttcggccggcagggcaagcggaccttcatggccgagagacagtacacacggatggaggactggctgaccgccaagctggcctacgagggcctgagcaagacctacctgtccaagacactggcccagtacacctccaagacatgcagcaactgtgggtttaccatcaccagcgccgactacgacagggtgctggagaagctgaagaagacagcaacaggctggatgaccacaattaacggcaaggagctgaaggtggagggccagattacctactacaacagatacaagagacagaacgtagtcaaggacctgtccgtcgagctggatagactgagcgaagaatctgtgaacaacgacatctcctcctggacaaagggcagaagcggagaagctctgagcctcctgaagaaaagattctcccatagacccgtgcaggagaagttcgtgtgcctgaactgcggcttcgagacacacgcagccgagcaagccgccctgaacatcgccagatcctggctgttcctgcggagccaggagtacaagaaataccagacaaacaagacaaccggcaacaccgataagagagccttcgtcgagacctggcagtccttttaccggaagaagcttaaggaggtgtggaaacctgccgtgcggtctggcggatctggcggaggctccaccagccccaagaaaaagagaaaagtctaagctgccttctgcggggcttgccttctggccatgcccttcttctctcccttgcacctgtacctcttggtctttgaataaagcctgagtaggaaggctagcaaaaaaaaaaaaaaaaaaaaaaaaaaaaaaaaaaaaaaaaaaaaaaaaaaaaaaaaaaaaaaaaaaaaaaaaaaaaaaaagcccagccggctccccaacctctaccgaggagggcacctctgagtccgccacccccgagagcggccctggcacctccaccgagcccagcgagggcagcgcacccggcagccctgccggcagccccacctccacagaggagggaaccagcaccgagcccagcgaaggcagcgccccaggcaccagcaccgagcctagtgagcaggagattaaacggatcaacaagatcagaagaagacttgtgaaagacagcaacaccaagaaggccggcaagacaggccccatgaaaaccctgctggttagagtgatgacacccgatctgagagagcggctggaaaacctgagaaagaagcctgaaaatatcccccagcccatcagcaatacatctagagccaacctgaataagctgctgaccgattacaccgaaatgaagaaggcgatcctgcatgtgtactgggaagagttccagaaggaccctgtgggcctgatgagccgggtggcccagcctgccagcaagaagatcgatcagaacaagctgaaacctgagatggacgagaagggcaacctgaccaccgccggctttgcctgctctcagtgtggccagcccctgttcgtgtacaagctggagcaggtgtctgagaagggcaaggcttacaccaactacttcggacggtgcaatgtggccgagcacgaaaagctgatcctgctggcccagctgaagcccgagaaggatagcgacgaagccgtgacatatagcctgggaaagtttgggcagagggccctggatttctacagcattcatgtgaccaaggagtccacccaccccgtgaagcccctggcccagatcgccggaaacagatacgcctccggacctgtgggaaaggccctgagcgacgcatgtatgggcacaatcgcctccttcctgtctaagtaccaggacatcatcatcgaacaccagaaggtggtgaagggcaaccagaagagactggagagcctgcgggagctggccggcaaggaaaacctggaataccctagcgtgaccctgccacctcagcctcacaccaaggagggcgttgatgcctacaacgaagtgatcgcccgggtgcgaatgtgggtgaacctgaacctgtggcagaagctgaagctaagcagagatgatgccaagcctctgctgagactgaagggattcccttcctttcctctggtcgagagacaggccaacgaagtggactggtgggacatggtgtgtaacgtgaagaagctgatcaacgagaaaaaggaggatggcaaggtgttttggcagaatctggctggctacaagagacaggaagccctgagaccatacctgagcagcgaggaagatcggaagaagggaaagaaattcgctcggtaccagctgggcgacctgctgctgcacctggaaaagaagcacggcgaggactggggaaaggtgtacgacgaggcctgggagcggattgacaagaaagtggaaggcctgagcaagcacatcaagctggaagaggaacggagaagcgaggacgcccagagcaaggccgccctgaccgactggctgcgggctaaggccagcttcgtgatcgagggcctgaaggaggccgacaaggacgagttctgcagatgcgagctgaagctgcagaagtggtacggggacctgcggggaaagcccttcgccatcgaagccgagaacagcatcctggacatcagcggcttcagcaagcagtacaactgtgccttcatctggcagaaggacggcgtgaagaagctgaacctgtacctgatcatcaactacttcaagggcggcaagctgcggttcaagaagatcaaacctgaagccttcgaagccaacagattctacaccgtgatcaacaaaaagagcggcgagatcgtgcccatggaggtgaacttcaacttcgacgaccccaacctgatcatcctgcctctggcctttggcaagagacagggcagagaattcatctggaacgacctgctgtccctggaaaccggcagcctgaagctggccaacggaagagtgatcgagaagacactgtacaacagaagaacccggcaggatgagcctgccctgttcgtggccctgaccttcgagcggcgggaggtcctggactcctccaatatcaaaccaatgaacctgatcggcgtggcaagaggcgaaaacatccccgccgtgatcgccctgaccgaccccgagggctgcccactgagccggtttaaggatagcctgggaaacccaacccacatcctgagaatcggcgagagctataaggagaagcagcggaccatccaggccaagaaggaggtggagcagcggagagccggcggctacagccggaagtacgccagcaaagccaagaatctggcagacgatatggtgagaaacaccgctagagatctgctgtactacgccgtgacccaggatgccatgctgatcttcgccaacctgagccggggcttcggccggcagggcaagcggaccttcatggccgagagacagtacacacggatggaggactggctgaccgccaagctggcctacgagggcctgagcaagacctacctgtccaagacactggcccagtacacctccaagacatgcagcaactgtgggtttaccatcaccagcgccgactacgacagggtgctggagaagctgaagaagacagcaacaggctggatgaccacaattaacggcaaggagctgaaggtggagggccagattacctactacaacagatacaagagacagaacgtagtcaaggacctgtccgtcgagctggatagactgagcgaagaatctgtgaacaacgacatctcctcctggacaaagggcagaagcggagaagctctgagcctcctgaagaaaagattctcccatagacccgtgcaggagaagttcgtgtgcctgaactgcggcttcgagacacacgcagccgagcaagccgccctgaacatcgccagatcctggctgttcctgcggagccaggagtacaagaaataccagacaaacaagacaaccggcaacaccgataagagagccttcgtcgagacctggcagtccttttaccggaagaagcttaaggaggtgtggaaacctgccgtgcggtctggcggatctggcggaggctccaccagccccaagaaaaagagaaaagtctaagctgccttctgcggggcttgccttctggccatgcccttcttctctcccttgcacctgtacctcttggtctttgaataaagcctgagtaggaaggctagcaaaaaaaaaaaaaaaaaaaaaaaaaaaaaaaaaaaaaaaaaaaaaaaaaaaaaaaaaaaaaaaaaaaaaaaaaaaaaaaa

SEQ ID NO: 9990 - RNA, 8787 nt, synthetic construct
  source 1..8787: mol_type = other RNA
aggaaataagagagaaaagaagagtaagaagaaatataagagccaccatggcccctaagaagaagcgtaaagtgagccggatgaaccacgaccaggagttcgacccccctaaggtgtaccctcccgtccccgccgagaagagaaagcccatccgggtcctgagcctgttcgatggcatcgccaccggtctgctggtgctgaaggacctgggcatccaggtggataggtacattgcctccgaggtgtgcgaggactccatcaccgtgggaatggtgcgtcatcagggcaagatcatgtacgtgggcgacgtgcggagcgtgacacagaagcatatccaggagtggggccctttcgacctggtgatcggcggcagcccttgcaatgacctgagcatcgtgaacccagcccggaagggcctgtacgagggaaccggcagactgttcttcgagttttacagactgctgcacgacgcccggcctaaggaaggcgacgaccggcccttcttttggctgttcgagaatgtggtggccatgggagtcagcgacaagcgggatattagccggttcctggagagcaaccccgtgatgatcgatgccaaggaagtgagcgccgcccaccgggccagatacttctggggcaatctgcctggcatgaacagacccctggccagcaccgtgaacgacaagctggagctgcaggagtgcctggagcacggccggatcgccaagttcagcaaggtgagaaccatcaccacccgaagcaacagcatcaaacaaggcaaggaccagcactttcctgtgttcatgaacgagaaggaggacatcctgtggtgtaccgagatggagagagtgttcgggttcccagtccactacacagatgtcagcaacatgtctagactggccagacagagactgctgggaagaagctggtccgtccctgtgatcagacacctgttcgcccctctgaaggagtacttcgcctgcgtgagcagcggcaacagcaacgccaacagccggggccccagcttctctagcggcctggtgccactgtccctgagagggagccacatgggccccatggagatctacaaaaccgtgagcgcctggaagcggcagcctgtgcgcgtgctgagcctgtttcggaatatcgataaagtcctgaaaagcctgggattcctggagagcggctctggctccggcggtggcaccctgaagtacgtggaggatgtgacaaacgtggtcagacgggatgtggagaagtggggccccttcgatctggtgtacggcagcacccaacccctgggcagctcttgtgaccggtgccctggctggtacatgtttcagttccaccggatcctgcagtacgccctgccgagacaggagtcccagcggccattcttttggattttcatggacaacttgctgctgaccgaggatgaccaggaaactaccactcggttcctgcagaccgaagccgtgaccctgcaggacgtgagaggccgggactaccagaacgccatgcgggtgtggtccaacatccctggactgaaaagcaagcacgcacctctgacccctaaagaagaggagtacctgcaggcccaggtgcggagcagaagcaagctggacgcccctaaggtggatctgctggtgaagaattgcctcctgcccctgagagagtacttcaagtatttcagccagaatagtctgcccctgggaggcagcggcggcggcccccaggagagcgtgaccttcaaggacatcgccgtggacttcacccaggaggagtgggccctgctggacaccagccagaggaagctgtacagggacgtgatgctggagaacatcagccacctggtgagcgtgggctaccacctgtgcaagagcgacgtgatcagccagctggagcagggcgtggagctgtggagggagggcaggggcttcccccagggcctgaaccccgacaggaagagcggcggcggcccaagcagcggcgcccctcctcccagcggcggcaggcggcccaagcagcggcgcccctcctcccagcggcggcagcccagccggctccccaacctctaccgaggagggcacctctgagtccgccacccccgagagcggccctggcacctccaccgagcccagcgagggcagcgcacccggcagccctgccggcagccccacctccacagaggagggaaccagcaccgagcccagcgaaggcagcgccccaggcaccagcaccgagcctagtgagcaggagattaaacggatcaacaagatcagaagaagacttgtgaaagacagcaacaccaagaaggccggcaagacaggccccatgaaaaccctgctggttagagtgatgacacccgatctgagagagcggctggaaaacctgagaaagaagcctgaaaatatcccccagcccatcagcaatacatctagagccaacctgaataagctgctgaccgattacaccgaaatgaagaaggcgatcctgcatgtgtactgggaagagttccagaaggaccctgtgggcctgatgagccgggtggcccagcctgccagcaagaagatcgatcagaacaagctgaaacctgagatggacgagaagggcaacctgaccaccgccggctttgcctgctctcagtgtggccagcccctgttcgtgtacaagctggagcaggtgtctgagaagggcaaggcttacaccaactacttcggacggtgcaatgtggccgagcacgaaaagctgatcctgctggcccagctgaagcccgagaaggatagcgacgaagccgtgacatatagcctgggaaagtttgggcagagggccctggatttctacagcattcatgtgaccaaggagtccacccaccccgtgaagcccctggcccagatcgccggaaacagatacgcctccggacctgtgggaaaggccctgagcgacgcatgtatgggcacaatcgcctccttcctgtctaagtaccaggacatcatcatcgaacaccagaaggtggtgaagggcaaccagaagagactggagagcctgcgggagctggccggcaaggaaaacctggaataccctagcgtgaccctgccacctcagcctcacaccaaggagggcgttgatgcctacaacgaagtgatcgcccgggtgcgaatgtgggtgaacctgaacctgtggcagaagctgaagctaagcagagatgatgccaagcctctgctgagactgaagggattcccttcctttcctctggtcgagagacaggccaacgaagtggactggtgggacatggtgtgtaacgtgaagaagctgatcaacgagaaaaaggaggatggcaaggtgttttggcagaatctggctggctacaagagacaggaagccctgagaccatacctgagcagcgaggaagatcggaagaagggaaagaaattcgctcggtaccagctgggcgacctgctgctgcacctggaaaagaagcacggcgaggactggggaaaggtgtacgacgaggcctgggagcggattgacaagaaagtggaaggcctgagcaagcacatcaagctggaagaggaacggagaagcgaggacgcccagagcaaggccgccctgaccgactggctgcgggctaaggccagcttcgtgatcgagggcctgaaggaggccgacaaggacgagttctgcagatgcgagctgaagctgcagaagtggtacggggacctgcggggaaagcccttcgccatcgaagccgagaacagcatcctggacatcagcggcttcagcaagcagtacaactgtgccttcatctggcagaaggacggcgtgaagaagctgaacctgtacctgatcatcaactacttcaagggcggcaagctgcggttcaagaagatcaaacctgaagccttcgaagccaacagattctacaccgtgatcaacaaaaagagcggcgagatcgtgcccatggaggtgaacttcaacttcgacgaccccaacctgatcatcctgcctctggcctttggcaagagacagggcagagaattcatctggaacgacctgctgtccctggaaaccggcagcctgaagctggccaacggaagagtgatcgagaagacactgtacaacagaagaacccggcaggatgagcctgccctgttcgtggccctgaccttcgagcggcgggaggtcctggactcctccaatatcaaaccaatgaacctgatcggcgtggcaagaggcgaaaacatccccgccgtgatcgccctgaccgaccccgagggctgcccactgagccggtttaaggatagcctgggaaacccaacccacatcctgagaatcggcgagagctataaggagaagcagcggaccatccaggccaagaaggaggtggagcagcggagagccggcggctacagccggaagtacgccagcaaagccaagaatctggcagacgatatggtgagaaacaccgctagagatctgctgtactacgccgtgacccaggatgccatgctgatcttcgccaacctgagccggggcttcggccggcagggcaagcggaccttcatggccgagagacagtacacacggatggaggactggctgaccgccaagctggcctacgagggcctgagcaagacctacctgtccaagacactggcccagtacacctccaagacatgcagcaactgtgggtttaccatcaccagcgccgactacgacagggtgctggagaagctgaagaagacagcaacaggctggatgaccacaattaacggcaaggagctgaaggtggagggccagattacctactacaacagatacaagagacagaacgtagtcaaggacctgtccgtcgagctggatagactgagcgaagaatctgtgaacaacgacatctcctcctggacaaagggcagaagcggagaagctctgagcctcctgaagaaaagattctcccatagacccgtgcaggagaagttcgtgtgcctgaactgcggcttcgagacacacgcagccgagcaagccgccctgaacatcgccagatcctggctgttcctgcggagccaggagtacaagaaataccagacaaacaagacaaccggcaacaccgataagagagccttcgtcgagacctggcagtccttttaccggaagaagcttaaggaggtgtggaaacctgccgtgcggtctggcggatctggcggaggctccaccagccccaagaaaaagagaaaagtctaagctgccttctgcggggcttgccttctggccatgcccttcttctctcccttgcacctgtacctcttggtctttgaataaagcctgagtaggaaggctagcaaaaaaaaaaaaaaaaaaaaaaaaaaaaaaaaaaaaaaaaaaaaaaaaaaaaaaaaaaaaaaaaaaaaaaaaaaaaaaaagcccagccggctccccaacctctaccgaggagggcacctctgagtccgccacccccgagagcggccctggcacctccaccgagcccagcgagggcagcgcacccggcagccctgccggcagccccacctccacagaggagggaaccagcaccgagcccagcgaaggcagcgccccaggcaccagcaccgagcctagtgagcaggagattaaacggatcaacaagatcagaagaagacttgtgaaagacagcaacaccaagaaggccggcaagacaggccccatgaaaaccctgctggttagagtgatgacacccgatctgagagagcggctggaaaacctgagaaagaagcctgaaaatatcccccagcccatcagcaatacatctagagccaacctgaataagctgctgaccgattacaccgaaatgaagaaggcgatcctgcatgtgtactgggaagagttccagaaggaccctgtgggcctgatgagccgggtggcccagcctgccagcaagaagatcgatcagaacaagctgaaacctgagatggacgagaagggcaacctgaccaccgccggctttgcctgctctcagtgtggccagcccctgttcgtgtacaagctggagcaggtgtctgagaagggcaaggcttacaccaactacttcggacggtgcaatgtggccgagcacgaaaagctgatcctgctggcccagctgaagcccgagaaggatagcgacgaagccgtgacatatagcctgggaaagtttgggcagagggccctggatttctacagcattcatgtgaccaaggagtccacccaccccgtgaagcccctggcccagatcgccggaaacagatacgcctccggacctgtgggaaaggccctgagcgacgcatgtatgggcacaatcgcctccttcctgtctaagtaccaggacatcatcatcgaacaccagaaggtggtgaagggcaaccagaagagactggagagcctgcgggagctggccggcaaggaaaacctggaataccctagcgtgaccctgccacctcagcctcacaccaaggagggcgttgatgcctacaacgaagtgatcgcccgggtgcgaatgtgggtgaacctgaacctgtggcagaagctgaagctaagcagagatgatgccaagcctctgctgagactgaagggattcccttcctttcctctggtcgagagacaggccaacgaagtggactggtgggacatggtgtgtaacgtgaagaagctgatcaacgagaaaaaggaggatggcaaggtgttttggcagaatctggctggctacaagagacaggaagccctgagaccatacctgagcagcgaggaagatcggaagaagggaaagaaattcgctcggtaccagctgggcgacctgctgctgcacctggaaaagaagcacggcgaggactggggaaaggtgtacgacgaggcctgggagcggattgacaagaaagtggaaggcctgagcaagcacatcaagctggaagaggaacggagaagcgaggacgcccagagcaaggccgccctgaccgactggctgcgggctaaggccagcttcgtgatcgagggcctgaaggaggccgacaaggacgagttctgcagatgcgagctgaagctgcagaagtggtacggggacctgcggggaaagcccttcgccatcgaagccgagaacagcatcctggacatcagcggcttcagcaagcagtacaactgtgccttcatctggcagaaggacggcgtgaagaagctgaacctgtacctgatcatcaactacttcaagggcggcaagctgcggttcaagaagatcaaacctgaagccttcgaagccaacagattctacaccgtgatcaacaaaaagagcggcgagatcgtgcccatggaggtgaacttcaacttcgacgaccccaacctgatcatcctgcctctggcctttggcaagagacagggcagagaattcatctggaacgacctgctgtccctggaaaccggcagcctgaagctggccaacggaagagtgatcgagaagacactgtacaacagaagaacccggcaggatgagcctgccctgttcgtggccctgaccttcgagcggcgggaggtcctggactcctccaatatcaaaccaatgaacctgatcggcgtggcaagaggcgaaaacatccccgccgtgatcgccctgaccgaccccgagggctgcccactgagccggtttaaggatagcctgggaaacccaacccacatcctgagaatcggcgagagctataaggagaagcagcggaccatccaggccaagaaggaggtggagcagcggagagccggcggctacagccggaagtacgccagcaaagccaagaatctggcagacgatatggtgagaaacaccgctagagatctgctgtactacgccgtgacccaggatgccatgctgatcttcgccaacctgagccggggcttcggccggcagggcaagcggaccttcatggccgagagacagtacacacggatggaggactggctgaccgccaagctggcctacgagggcctgagcaagacctacctgtccaagacactggcccagtacacctccaagacatgcagcaactgtgggtttaccatcaccagcgccgactacgacagggtgctggagaagctgaagaagacagcaacaggctggatgaccacaattaacggcaaggagctgaaggtggagggccagattacctactacaacagatacaagagacagaacgtagtcaaggacctgtccgtcgagctggatagactgagcgaagaatctgtgaacaacgacatctcctcctggacaaagggcagaagcggagaagctctgagcctcctgaagaaaagattctcccatagacccgtgcaggagaagttcgtgtgcctgaactgcggcttcgagacacacgcagccgagcaagccgccctgaacatcgccagatcctggctgttcctgcggagccaggagtacaagaaataccagacaaacaagacaaccggcaacaccgataagagagccttcgtcgagacctggcagtccttttaccggaagaagcttaaggaggtgtggaaacctgccgtgcggtctggcggatctggcggaggctccaccagccccaagaaaaagagaaaagtctaagctgccttctgcggggcttgccttctggccatgcccttcttctctcccttgcacctgtacctcttggtctttgaataaagcctgagtaggaaggctagcaaaaaaaaaaaaaaaaaaaaaaaaaaaaaaaaaaaaaaaaaaaaaaaaaaaaaaaaaaaaaaaaaaaaaaaaaaaaaaaa

SEQ ID NO: 9991 - RNA, 8787 nt, synthetic construct
  source 1..8787: mol_type = other RNA
aggaaataagagagaaaagaagagtaagaagaaatataagagccaccatggcccctaagaagaagcgtaaagtgagccggatgaaccacgaccaggagttcgacccccctaaggtgtaccctcccgtccccgccgagaagagaaagcccatccgggtcctgagcctgttcgatggcatcgccaccggtctgctggtgctgaaggacctgggcatccaggtggataggtacattgcctccgaggtgtgcgaggactccatcaccgtgggaatggtgcgtcatcagggcaagatcatgtacgtgggcgacgtgcggagcgtgacacagaagcatatccaggagtggggccctttcgacctggtgatcggcggcagcccttgcaatgacctgagcatcgtgaacccagcccggaagggcctgtacgagggaaccggcagactgttcttcgagttttacagactgctgcacgacgcccggcctaaggaaggcgacgaccggcccttcttttggctgttcgagaatgtggtggccatgggagtcagcgacaagcgggatattagccggttcctggagagcaaccccgtgatgatcgatgccaaggaagtgagcgccgcccaccgggccagatacttctggggcaatctgcctggcatgaacagacccctggccagcaccgtgaacgacaagctggagctgcaggagtgcctggagcacggccggatcgccaagttcagcaaggtgagaaccatcaccacccgaagcaacagcatcaaacaaggcaaggaccagcactttcctgtgttcatgaacgagaaggaggacatcctgtggtgtaccgagatggagagagtgttcgggttcccagtccactacacagatgtcagcaacatgtctagactggccagacagagactgctgggaagaagctggtccgtccctgtgatcagacacctgttcgcccctctgaaggagtacttcgcctgcgtgagcagcggcaacagcaacgccaacagccggggccccagcttctctagcggcctggtgccactgtccctgagagggagccacatgggccccatggagatctacaaaaccgtgagcgcctggaagcggcagcctgtgcgcgtgctgagcctgtttcggaatatcgataaagtcctgaaaagcctgggattcctggagagcggctctggctccggcggtggcaccctgaagtacgtggaggatgtgacaaacgtggtcagacgggatgtggagaagtggggccccttcgatctggtgtacggcagcacccaacccctgggcagctcttgtgaccggtgccctggctggtacatgtttcagttccaccggatcctgcagtacgccctgccgagacaggagtcccagcggccattcttttggattttcatggacaacttgctgctgaccgaggatgaccaggaaactaccactcggttcctgcagaccgaagccgtgaccctgcaggacgtgagaggccgggactaccagaacgccatgcgggtgtggtccaacatccctggactgaaaagcaagcacgcacctctgacccctaaagaagaggagtacctgcaggcccaggtgcggagcagaagcaagctggacgcccctaaggtggatctgctggtgaagaattgcctcctgcccctgagagagtacttcaagtatttcagccagaatagtctgcccctgggaggcagcggcggcggcagcaagggcagcctgatgttcagggacgtgagcatcgacttcagccaggaggagtgggagtgcctggacagcggccagatgaacctgtacaaggaggtgatgctggagaacttcagcaacctggtgagcgtgggcctgagcagcagcaagcccgccgtgatcagcctgctggagcagggcagggagccctggatggtggacagggagctgaccaggggcctgtgcagcgacctggagagcatgggcggcccaagcagcggcgcccctcctcccagcggcggcaggcggcccaagcagcggcgcccctcctcccagcggcggcagcccagccggctccccaacctctaccgaggagggcacctctgagtccgccacccccgagagcggccctggcacctccaccgagcccagcgagggcagcgcacccggcagccctgccggcagccccacctccacagaggagggaaccagcaccgagcccagcgaaggcagcgccccaggcaccagcaccgagcctagtgagcaggagattaaacggatcaacaagatcagaagaagacttgtgaaagacagcaacaccaagaaggccggcaagacaggccccatgaaaaccctgctggttagagtgatgacacccgatctgagagagcggctggaaaacctgagaaagaagcctgaaaatatcccccagcccatcagcaatacatctagagccaacctgaataagctgctgaccgattacaccgaaatgaagaaggcgatcctgcatgtgtactgggaagagttccagaaggaccctgtgggcctgatgagccgggtggcccagcctgccagcaagaagatcgatcagaacaagctgaaacctgagatggacgagaagggcaacctgaccaccgccggctttgcctgctctcagtgtggccagcccctgttcgtgtacaagctggagcaggtgtctgagaagggcaaggcttacaccaactacttcggacggtgcaatgtggccgagcacgaaaagctgatcctgctggcccagctgaagcccgagaaggatagcgacgaagccgtgacatatagcctgggaaagtttgggcagagggccctggatttctacagcattcatgtgaccaaggagtccacccaccccgtgaagcccctggcccagatcgccggaaacagatacgcctccggacctgtgggaaaggccctgagcgacgcatgtatgggcacaatcgcctccttcctgtctaagtaccaggacatcatcatcgaacaccagaaggtggtgaagggcaaccagaagagactggagagcctgcgggagctggccggcaaggaaaacctggaataccctagcgtgaccctgccacctcagcctcacaccaaggagggcgttgatgcctacaacgaagtgatcgcccgggtgcgaatgtgggtgaacctgaacctgtggcagaagctgaagctaagcagagatgatgccaagcctctgctgagactgaagggattcccttcctttcctctggtcgagagacaggccaacgaagtggactggtgggacatggtgtgtaacgtgaagaagctgatcaacgagaaaaaggaggatggcaaggtgttttggcagaatctggctggctacaagagacaggaagccctgagaccatacctgagcagcgaggaagatcggaagaagggaaagaaattcgctcggtaccagctgggcgacctgctgctgcacctggaaaagaagcacggcgaggactggggaaaggtgtacgacgaggcctgggagcggattgacaagaaagtggaaggcctgagcaagcacatcaagctggaagaggaacggagaagcgaggacgcccagagcaaggccgccctgaccgactggctgcgggctaaggccagcttcgtgatcgagggcctgaaggaggccgacaaggacgagttctgcagatgcgagctgaagctgcagaagtggtacggggacctgcggggaaagcccttcgccatcgaagccgagaacagcatcctggacatcagcggcttcagcaagcagtacaactgtgccttcatctggcagaaggacggcgtgaagaagctgaacctgtacctgatcatcaactacttcaagggcggcaagctgcggttcaagaagatcaaacctgaagccttcgaagccaacagattctacaccgtgatcaacaaaaagagcggcgagatcgtgcccatggaggtgaacttcaacttcgacgaccccaacctgatcatcctgcctctggcctttggcaagagacagggcagagaattcatctggaacgacctgctgtccctggaaaccggcagcctgaagctggccaacggaagagtgatcgagaagacactgtacaacagaagaacccggcaggatgagcctgccctgttcgtggccctgaccttcgagcggcgggaggtcctggactcctccaatatcaaaccaatgaacctgatcggcgtggcaagaggcgaaaacatccccgccgtgatcgccctgaccgaccccgagggctgcccactgagccggtttaaggatagcctgggaaacccaacccacatcctgagaatcggcgagagctataaggagaagcagcggaccatccaggccaagaaggaggtggagcagcggagagccggcggctacagccggaagtacgccagcaaagccaagaatctggcagacgatatggtgagaaacaccgctagagatctgctgtactacgccgtgacccaggatgccatgctgatcttcgccaacctgagccggggcttcggccggcagggcaagcggaccttcatggccgagagacagtacacacggatggaggactggctgaccgccaagctggcctacgagggcctgagcaagacctacctgtccaagacactggcccagtacacctccaagacatgcagcaactgtgggtttaccatcaccagcgccgactacgacagggtgctggagaagctgaagaagacagcaacaggctggatgaccacaattaacggcaaggagctgaaggtggagggccagattacctactacaacagatacaagagacagaacgtagtcaaggacctgtccgtcgagctggatagactgagcgaagaatctgtgaacaacgacatctcctcctggacaaagggcagaagcggagaagctctgagcctcctgaagaaaagattctcccatagacccgtgcaggagaagttcgtgtgcctgaactgcggcttcgagacacacgcagccgagcaagccgccctgaacatcgccagatcctggctgttcctgcggagccaggagtacaagaaataccagacaaacaagacaaccggcaacaccgataagagagccttcgtcgagacctggcagtccttttaccggaagaagcttaaggaggtgtggaaacctgccgtgcggtctggcggatctggcggaggctccaccagccccaagaaaaagagaaaagtctaagctgccttctgcggggcttgccttctggccatgcccttcttctctcccttgcacctgtacctcttggtctttgaataaagcctgagtaggaaggctagcaaaaaaaaaaaaaaaaaaaaaaaaaaaaaaaaaaaaaaaaaaaaaaaaaaaaaaaaaaaaaaaaaaaaaaaaaaaaaaaagcccagccggctccccaacctctaccgaggagggcacctctgagtccgccacccccgagagcggccctggcacctccaccgagcccagcgagggcagcgcacccggcagccctgccggcagccccacctccacagaggagggaaccagcaccgagcccagcgaaggcagcgccccaggcaccagcaccgagcctagtgagcaggagattaaacggatcaacaagatcagaagaagacttgtgaaagacagcaacaccaagaaggccggcaagacaggccccatgaaaaccctgctggttagagtgatgacacccgatctgagagagcggctggaaaacctgagaaagaagcctgaaaatatcccccagcccatcagcaatacatctagagccaacctgaataagctgctgaccgattacaccgaaatgaagaaggcgatcctgcatgtgtactgggaagagttccagaaggaccctgtgggcctgatgagccgggtggcccagcctgccagcaagaagatcgatcagaacaagctgaaacctgagatggacgagaagggcaacctgaccaccgccggctttgcctgctctcagtgtggccagcccctgttcgtgtacaagctggagcaggtgtctgagaagggcaaggcttacaccaactacttcggacggtgcaatgtggccgagcacgaaaagctgatcctgctggcccagctgaagcccgagaaggatagcgacgaagccgtgacatatagcctgggaaagtttgggcagagggccctggatttctacagcattcatgtgaccaaggagtccacccaccccgtgaagcccctggcccagatcgccggaaacagatacgcctccggacctgtgggaaaggccctgagcgacgcatgtatgggcacaatcgcctccttcctgtctaagtaccaggacatcatcatcgaacaccagaaggtggtgaagggcaaccagaagagactggagagcctgcgggagctggccggcaaggaaaacctggaataccctagcgtgaccctgccacctcagcctcacaccaaggagggcgttgatgcctacaacgaagtgatcgcccgggtgcgaatgtgggtgaacctgaacctgtggcagaagctgaagctaagcagagatgatgccaagcctctgctgagactgaagggattcccttcctttcctctggtcgagagacaggccaacgaagtggactggtgggacatggtgtgtaacgtgaagaagctgatcaacgagaaaaaggaggatggcaaggtgttttggcagaatctggctggctacaagagacaggaagccctgagaccatacctgagcagcgaggaagatcggaagaagggaaagaaattcgctcggtaccagctgggcgacctgctgctgcacctggaaaagaagcacggcgaggactggggaaaggtgtacgacgaggcctgggagcggattgacaagaaagtggaaggcctgagcaagcacatcaagctggaagaggaacggagaagcgaggacgcccagagcaaggccgccctgaccgactggctgcgggctaaggccagcttcgtgatcgagggcctgaaggaggccgacaaggacgagttctgcagatgcgagctgaagctgcagaagtggtacggggacctgcggggaaagcccttcgccatcgaagccgagaacagcatcctggacatcagcggcttcagcaagcagtacaactgtgccttcatctggcagaaggacggcgtgaagaagctgaacctgtacctgatcatcaactacttcaagggcggcaagctgcggttcaagaagatcaaacctgaagccttcgaagccaacagattctacaccgtgatcaacaaaaagagcggcgagatcgtgcccatggaggtgaacttcaacttcgacgaccccaacctgatcatcctgcctctggcctttggcaagagacagggcagagaattcatctggaacgacctgctgtccctggaaaccggcagcctgaagctggccaacggaagagtgatcgagaagacactgtacaacagaagaacccggcaggatgagcctgccctgttcgtggccctgaccttcgagcggcgggaggtcctggactcctccaatatcaaaccaatgaacctgatcggcgtggcaagaggcgaaaacatccccgccgtgatcgccctgaccgaccccgagggctgcccactgagccggtttaaggatagcctgggaaacccaacccacatcctgagaatcggcgagagctataaggagaagcagcggaccatccaggccaagaaggaggtggagcagcggagagccggcggctacagccggaagtacgccagcaaagccaagaatctggcagacgatatggtgagaaacaccgctagagatctgctgtactacgccgtgacccaggatgccatgctgatcttcgccaacctgagccggggcttcggccggcagggcaagcggaccttcatggccgagagacagtacacacggatggaggactggctgaccgccaagctggcctacgagggcctgagcaagacctacctgtccaagacactggcccagtacacctccaagacatgcagcaactgtgggtttaccatcaccagcgccgactacgacagggtgctggagaagctgaagaagacagcaacaggctggatgaccacaattaacggcaaggagctgaaggtggagggccagattacctactacaacagatacaagagacagaacgtagtcaaggacctgtccgtcgagctggatagactgagcgaagaatctgtgaacaacgacatctcctcctggacaaagggcagaagcggagaagctctgagcctcctgaagaaaagattctcccatagacccgtgcaggagaagttcgtgtgcctgaactgcggcttcgagacacacgcagccgagcaagccgccctgaacatcgccagatcctggctgttcctgcggagccaggagtacaagaaataccagacaaacaagacaaccggcaacaccgataagagagccttcgtcgagacctggcagtccttttaccggaagaagcttaaggaggtgtggaaacctgccgtgcggtctggcggatctggcggaggctccaccagccccaagaaaaagagaaaagtctaagctgccttctgcggggcttgccttctggccatgcccttcttctctcccttgcacctgtacctcttggtctttgaataaagcctgagtaggaaggctagcaaaaaaaaaaaaaaaaaaaaaaaaaaaaaaaaaaaaaaaaaaaaaaaaaaaaaaaaaaaaaaaaaaaaaaaaaaaaaaaa

SEQ ID NO: 9992 - RNA, 8787 nt, synthetic construct
  source 1..8787: mol_type = other RNA
aggaaataagagagaaaagaagagtaagaagaaatataagagccaccatggcccctaagaagaagcgtaaagtgagccggatgaaccacgaccaggagttcgacccccctaaggtgtaccctcccgtccccgccgagaagagaaagcccatccgggtcctgagcctgttcgatggcatcgccaccggtctgctggtgctgaaggacctgggcatccaggtggataggtacattgcctccgaggtgtgcgaggactccatcaccgtgggaatggtgcgtcatcagggcaagatcatgtacgtgggcgacgtgcggagcgtgacacagaagcatatccaggagtggggccctttcgacctggtgatcggcggcagcccttgcaatgacctgagcatcgtgaacccagcccggaagggcctgtacgagggaaccggcagactgttcttcgagttttacagactgctgcacgacgcccggcctaaggaaggcgacgaccggcccttcttttggctgttcgagaatgtggtggccatgggagtcagcgacaagcgggatattagccggttcctggagagcaaccccgtgatgatcgatgccaaggaagtgagcgccgcccaccgggccagatacttctggggcaatctgcctggcatgaacagacccctggccagcaccgtgaacgacaagctggagctgcaggagtgcctggagcacggccggatcgccaagttcagcaaggtgagaaccatcaccacccgaagcaacagcatcaaacaaggcaaggaccagcactttcctgtgttcatgaacgagaaggaggacatcctgtggtgtaccgagatggagagagtgttcgggttcccagtccactacacagatgtcagcaacatgtctagactggccagacagagactgctgggaagaagctggtccgtccctgtgatcagacacctgttcgcccctctgaaggagtacttcgcctgcgtgagcagcggcaacagcaacgccaacagccggggccccagcttctctagcggcctggtgccactgtccctgagagggagccacatgggccccatggagatctacaaaaccgtgagcgcctggaagcggcagcctgtgcgcgtgctgagcctgtttcggaatatcgataaagtcctgaaaagcctgggattcctggagagcggctctggctccggcggtggcaccctgaagtacgtggaggatgtgacaaacgtggtcagacgggatgtggagaagtggggccccttcgatctggtgtacggcagcacccaacccctgggcagctcttgtgaccggtgccctggctggtacatgtttcagttccaccggatcctgcagtacgccctgccgagacaggagtcccagcggccattcttttggattttcatggacaacttgctgctgaccgaggatgaccaggaaactaccactcggttcctgcagaccgaagccgtgaccctgcaggacgtgagaggccgggactaccagaacgccatgcgggtgtggtccaacatccctggactgaaaagcaagcacgcacctctgacccctaaagaagaggagtacctgcaggcccaggtgcggagcagaagcaagctggacgcccctaaggtggatctgctggtgaagaattgcctcctgcccctgagagagtacttcaagtatttcagccagaatagtctgcccctgggaggcagcggcggcggccagaccgacctggtgaccttcgacagcgtggccgtggagttcacccaggaggagtggaccctgctggaccccacccagaggaacctgtacagggacgtgatgctggagaactacaagaacctgagcagcgtgggctaccagctgttcaagcccagcctgatcagctggctggaggaggaggaggagctgagcaccctgcccagggtgctgcaggagtggaagatgtgcctgaagaccaagggcggcggcccaagcagcggcgcccctcctcccagcggcggcaggcggcccaagcagcggcgcccctcctcccagcggcggcagcccagccggctccccaacctctaccgaggagggcacctctgagtccgccacccccgagagcggccctggcacctccaccgagcccagcgagggcagcgcacccggcagccctgccggcagccccacctccacagaggagggaaccagcaccgagcccagcgaaggcagcgccccaggcaccagcaccgagcctagtgagcaggagattaaacggatcaacaagatcagaagaagacttgtgaaagacagcaacaccaagaaggccggcaagacaggccccatgaaaaccctgctggttagagtgatgacacccgatctgagagagcggctggaaaacctgagaaagaagcctgaaaatatcccccagcccatcagcaatacatctagagccaacctgaataagctgctgaccgattacaccgaaatgaagaaggcgatcctgcatgtgtactgggaagagttccagaaggaccctgtgggcctgatgagccgggtggcccagcctgccagcaagaagatcgatcagaacaagctgaaacctgagatggacgagaagggcaacctgaccaccgccggctttgcctgctctcagtgtggccagcccctgttcgtgtacaagctggagcaggtgtctgagaagggcaaggcttacaccaactacttcggacggtgcaatgtggccgagcacgaaaagctgatcctgctggcccagctgaagcccgagaaggatagcgacgaagccgtgacatatagcctgggaaagtttgggcagagggccctggatttctacagcattcatgtgaccaaggagtccacccaccccgtgaagcccctggcccagatcgccggaaacagatacgcctccggacctgtgggaaaggccctgagcgacgcatgtatgggcacaatcgcctccttcctgtctaagtaccaggacatcatcatcgaacaccagaaggtggtgaagggcaaccagaagagactggagagcctgcgggagctggccggcaaggaaaacctggaataccctagcgtgaccctgccacctcagcctcacaccaaggagggcgttgatgcctacaacgaagtgatcgcccgggtgcgaatgtgggtgaacctgaacctgtggcagaagctgaagctaagcagagatgatgccaagcctctgctgagactgaagggattcccttcctttcctctggtcgagagacaggccaacgaagtggactggtgggacatggtgtgtaacgtgaagaagctgatcaacgagaaaaaggaggatggcaaggtgttttggcagaatctggctggctacaagagacaggaagccctgagaccatacctgagcagcgaggaagatcggaagaagggaaagaaattcgctcggtaccagctgggcgacctgctgctgcacctggaaaagaagcacggcgaggactggggaaaggtgtacgacgaggcctgggagcggattgacaagaaagtggaaggcctgagcaagcacatcaagctggaagaggaacggagaagcgaggacgcccagagcaaggccgccctgaccgactggctgcgggctaaggccagcttcgtgatcgagggcctgaaggaggccgacaaggacgagttctgcagatgcgagctgaagctgcagaagtggtacggggacctgcggggaaagcccttcgccatcgaagccgagaacagcatcctggacatcagcggcttcagcaagcagtacaactgtgccttcatctggcagaaggacggcgtgaagaagctgaacctgtacctgatcatcaactacttcaagggcggcaagctgcggttcaagaagatcaaacctgaagccttcgaagccaacagattctacaccgtgatcaacaaaaagagcggcgagatcgtgcccatggaggtgaacttcaacttcgacgaccccaacctgatcatcctgcctctggcctttggcaagagacagggcagagaattcatctggaacgacctgctgtccctggaaaccggcagcctgaagctggccaacggaagagtgatcgagaagacactgtacaacagaagaacccggcaggatgagcctgccctgttcgtggccctgaccttcgagcggcgggaggtcctggactcctccaatatcaaaccaatgaacctgatcggcgtggcaagaggcgaaaacatccccgccgtgatcgccctgaccgaccccgagggctgcccactgagccggtttaaggatagcctgggaaacccaacccacatcctgagaatcggcgagagctataaggagaagcagcggaccatccaggccaagaaggaggtggagcagcggagagccggcggctacagccggaagtacgccagcaaagccaagaatctggcagacgatatggtgagaaacaccgctagagatctgctgtactacgccgtgacccaggatgccatgctgatcttcgccaacctgagccggggcttcggccggcagggcaagcggaccttcatggccgagagacagtacacacggatggaggactggctgaccgccaagctggcctacgagggcctgagcaagacctacctgtccaagacactggcccagtacacctccaagacatgcagcaactgtgggtttaccatcaccagcgccgactacgacagggtgctggagaagctgaagaagacagcaacaggctggatgaccacaattaacggcaaggagctgaaggtggagggccagattacctactacaacagatacaagagacagaacgtagtcaaggacctgtccgtcgagctggatagactgagcgaagaatctgtgaacaacgacatctcctcctggacaaagggcagaagcggagaagctctgagcctcctgaagaaaagattctcccatagacccgtgcaggagaagttcgtgtgcctgaactgcggcttcgagacacacgcagccgagcaagccgccctgaacatcgccagatcctggctgttcctgcggagccaggagtacaagaaataccagacaaacaagacaaccggcaacaccgataagagagccttcgtcgagacctggcagtccttttaccggaagaagcttaaggaggtgtggaaacctgccgtgcggtctggcggatctggcggaggctccaccagccccaagaaaaagagaaaagtctaagctgccttctgcggggcttgccttctggccatgcccttcttctctcccttgcacctgtacctcttggtctttgaataaagcctgagtaggaaggctagcaaaaaaaaaaaaaaaaaaaaaaaaaaaaaaaaaaaaaaaaaaaaaaaaaaaaaaaaaaaaaaaaaaaaaaaaaaaaaaaagcccagccggctccccaacctctaccgaggagggcacctctgagtccgccacccccgagagcggccctggcacctccaccgagcccagcgagggcagcgcacccggcagccctgccggcagccccacctccacagaggagggaaccagcaccgagcccagcgaaggcagcgccccaggcaccagcaccgagcctagtgagcaggagattaaacggatcaacaagatcagaagaagacttgtgaaagacagcaacaccaagaaggccggcaagacaggccccatgaaaaccctgctggttagagtgatgacacccgatctgagagagcggctggaaaacctgagaaagaagcctgaaaatatcccccagcccatcagcaatacatctagagccaacctgaataagctgctgaccgattacaccgaaatgaagaaggcgatcctgcatgtgtactgggaagagttccagaaggaccctgtgggcctgatgagccgggtggcccagcctgccagcaagaagatcgatcagaacaagctgaaacctgagatggacgagaagggcaacctgaccaccgccggctttgcctgctctcagtgtggccagcccctgttcgtgtacaagctggagcaggtgtctgagaagggcaaggcttacaccaactacttcggacggtgcaatgtggccgagcacgaaaagctgatcctgctggcccagctgaagcccgagaaggatagcgacgaagccgtgacatatagcctgggaaagtttgggcagagggccctggatttctacagcattcatgtgaccaaggagtccacccaccccgtgaagcccctggcccagatcgccggaaacagatacgcctccggacctgtgggaaaggccctgagcgacgcatgtatgggcacaatcgcctccttcctgtctaagtaccaggacatcatcatcgaacaccagaaggtggtgaagggcaaccagaagagactggagagcctgcgggagctggccggcaaggaaaacctggaataccctagcgtgaccctgccacctcagcctcacaccaaggagggcgttgatgcctacaacgaagtgatcgcccgggtgcgaatgtgggtgaacctgaacctgtggcagaagctgaagctaagcagagatgatgccaagcctctgctgagactgaagggattcccttcctttcctctggtcgagagacaggccaacgaagtggactggtgggacatggtgtgtaacgtgaagaagctgatcaacgagaaaaaggaggatggcaaggtgttttggcagaatctggctggctacaagagacaggaagccctgagaccatacctgagcagcgaggaagatcggaagaagggaaagaaattcgctcggtaccagctgggcgacctgctgctgcacctggaaaagaagcacggcgaggactggggaaaggtgtacgacgaggcctgggagcggattgacaagaaagtggaaggcctgagcaagcacatcaagctggaagaggaacggagaagcgaggacgcccagagcaaggccgccctgaccgactggctgcgggctaaggccagcttcgtgatcgagggcctgaaggaggccgacaaggacgagttctgcagatgcgagctgaagctgcagaagtggtacggggacctgcggggaaagcccttcgccatcgaagccgagaacagcatcctggacatcagcggcttcagcaagcagtacaactgtgccttcatctggcagaaggacggcgtgaagaagctgaacctgtacctgatcatcaactacttcaagggcggcaagctgcggttcaagaagatcaaacctgaagccttcgaagccaacagattctacaccgtgatcaacaaaaagagcggcgagatcgtgcccatggaggtgaacttcaacttcgacgaccccaacctgatcatcctgcctctggcctttggcaagagacagggcagagaattcatctggaacgacctgctgtccctggaaaccggcagcctgaagctggccaacggaagagtgatcgagaagacactgtacaacagaagaacccggcaggatgagcctgccctgttcgtggccctgaccttcgagcggcgggaggtcctggactcctccaatatcaaaccaatgaacctgatcggcgtggcaagaggcgaaaacatccccgccgtgatcgccctgaccgaccccgagggctgcccactgagccggtttaaggatagcctgggaaacccaacccacatcctgagaatcggcgagagctataaggagaagcagcggaccatccaggccaagaaggaggtggagcagcggagagccggcggctacagccggaagtacgccagcaaagccaagaatctggcagacgatatggtgagaaacaccgctagagatctgctgtactacgccgtgacccaggatgccatgctgatcttcgccaacctgagccggggcttcggccggcagggcaagcggaccttcatggccgagagacagtacacacggatggaggactggctgaccgccaagctggcctacgagggcctgagcaagacctacctgtccaagacactggcccagtacacctccaagacatgcagcaactgtgggtttaccatcaccagcgccgactacgacagggtgctggagaagctgaagaagacagcaacaggctggatgaccacaattaacggcaaggagctgaaggtggagggccagattacctactacaacagatacaagagacagaacgtagtcaaggacctgtccgtcgagctggatagactgagcgaagaatctgtgaacaacgacatctcctcctggacaaagggcagaagcggagaagctctgagcctcctgaagaaaagattctcccatagacccgtgcaggagaagttcgtgtgcctgaactgcggcttcgagacacacgcagccgagcaagccgccctgaacatcgccagatcctggctgttcctgcggagccaggagtacaagaaataccagacaaacaagacaaccggcaacaccgataagagagccttcgtcgagacctggcagtccttttaccggaagaagcttaaggaggtgtggaaacctgccgtgcggtctggcggatctggcggaggctccaccagccccaagaaaaagagaaaagtctaagctgccttctgcggggcttgccttctggccatgcccttcttctctcccttgcacctgtacctcttggtctttgaataaagcctgagtaggaaggctagcaaaaaaaaaaaaaaaaaaaaaaaaaaaaaaaaaaaaaaaaaaaaaaaaaaaaaaaaaaaaaaaaaaaaaaaaaaaaaaaa

SEQ ID NO: 9993 - RNA, 8787 nt, synthetic construct
  source 1..8787: mol_type = other RNA
aggaaataagagagaaaagaagagtaagaagaaatataagagccaccatggcccctaagaagaagcgtaaagtgagccggatgaaccacgaccaggagttcgacccccctaaggtgtaccctcccgtccccgccgagaagagaaagcccatccgggtcctgagcctgttcgatggcatcgccaccggtctgctggtgctgaaggacctgggcatccaggtggataggtacattgcctccgaggtgtgcgaggactccatcaccgtgggaatggtgcgtcatcagggcaagatcatgtacgtgggcgacgtgcggagcgtgacacagaagcatatccaggagtggggccctttcgacctggtgatcggcggcagcccttgcaatgacctgagcatcgtgaacccagcccggaagggcctgtacgagggaaccggcagactgttcttcgagttttacagactgctgcacgacgcccggcctaaggaaggcgacgaccggcccttcttttggctgttcgagaatgtggtggccatgggagtcagcgacaagcgggatattagccggttcctggagagcaaccccgtgatgatcgatgccaaggaagtgagcgccgcccaccgggccagatacttctggggcaatctgcctggcatgaacagacccctggccagcaccgtgaacgacaagctggagctgcaggagtgcctggagcacggccggatcgccaagttcagcaaggtgagaaccatcaccacccgaagcaacagcatcaaacaaggcaaggaccagcactttcctgtgttcatgaacgagaaggaggacatcctgtggtgtaccgagatggagagagtgttcgggttcccagtccactacacagatgtcagcaacatgtctagactggccagacagagactgctgggaagaagctggtccgtccctgtgatcagacacctgttcgcccctctgaaggagtacttcgcctgcgtgagcagcggcaacagcaacgccaacagccggggccccagcttctctagcggcctggtgccactgtccctgagagggagccacatgggccccatggagatctacaaaaccgtgagcgcctggaagcggcagcctgtgcgcgtgctgagcctgtttcggaatatcgataaagtcctgaaaagcctgggattcctggagagcggctctggctccggcggtggcaccctgaagtacgtggaggatgtgacaaacgtggtcagacgggatgtggagaagtggggccccttcgatctggtgtacggcagcacccaacccctgggcagctcttgtgaccggtgccctggctggtacatgtttcagttccaccggatcctgcagtacgccctgccgagacaggagtcccagcggccattcttttggattttcatggacaacttgctgctgaccgaggatgaccaggaaactaccactcggttcctgcagaccgaagccgtgaccctgcaggacgtgagaggccgggactaccagaacgccatgcgggtgtggtccaacatccctggactgaaaagcaagcacgcacctctgacccctaaagaagaggagtacctgcaggcccaggtgcggagcagaagcaagctggacgcccctaaggtggatctgctggtgaagaattgcctcctgcccctgagagagtacttcaagtatttcagccagaatagtctgcccctgggaggcagcggcggcggcatggtgaccttcgaggacgtggccgtgcacttcaccaagaccgagtggaccggcctgagccccgcccagagggccctgtacaggagcgtgatgctggagaacttcggcaacctgaccgccctgggctaccccgtgcccaagcccgccctgatcagcctgctggagggcggcgacatggcctggggcctggaggcccaggacgacgcccccgccgagaggaccaagaacatctgcaaggtgatcggcggcccaagcagcggcgcccctcctcccagcggcggcaggcggcccaagcagcggcgcccctcctcccagcggcggcagcccagccggctccccaacctctaccgaggagggcacctctgagtccgccacccccgagagcggccctggcacctccaccgagcccagcgagggcagcgcacccggcagccctgccggcagccccacctccacagaggagggaaccagcaccgagcccagcgaaggcagcgccccaggcaccagcaccgagcctagtgagcaggagattaaacggatcaacaagatcagaagaagacttgtgaaagacagcaacaccaagaaggccggcaagacaggccccatgaaaaccctgctggttagagtgatgacacccgatctgagagagcggctggaaaacctgagaaagaagcctgaaaatatcccccagcccatcagcaatacatctagagccaacctgaataagctgctgaccgattacaccgaaatgaagaaggcgatcctgcatgtgtactgggaagagttccagaaggaccctgtgggcctgatgagccgggtggcccagcctgccagcaagaagatcgatcagaacaagctgaaacctgagatggacgagaagggcaacctgaccaccgccggctttgcctgctctcagtgtggccagcccctgttcgtgtacaagctggagcaggtgtctgagaagggcaaggcttacaccaactacttcggacggtgcaatgtggccgagcacgaaaagctgatcctgctggcccagctgaagcccgagaaggatagcgacgaagccgtgacatatagcctgggaaagtttgggcagagggccctggatttctacagcattcatgtgaccaaggagtccacccaccccgtgaagcccctggcccagatcgccggaaacagatacgcctccggacctgtgggaaaggccctgagcgacgcatgtatgggcacaatcgcctccttcctgtctaagtaccaggacatcatcatcgaacaccagaaggtggtgaagggcaaccagaagagactggagagcctgcgggagctggccggcaaggaaaacctggaataccctagcgtgaccctgccacctcagcctcacaccaaggagggcgttgatgcctacaacgaagtgatcgcccgggtgcgaatgtgggtgaacctgaacctgtggcagaagctgaagctaagcagagatgatgccaagcctctgctgagactgaagggattcccttcctttcctctggtcgagagacaggccaacgaagtggactggtgggacatggtgtgtaacgtgaagaagctgatcaacgagaaaaaggaggatggcaaggtgttttggcagaatctggctggctacaagagacaggaagccctgagaccatacctgagcagcgaggaagatcggaagaagggaaagaaattcgctcggtaccagctgggcgacctgctgctgcacctggaaaagaagcacggcgaggactggggaaaggtgtacgacgaggcctgggagcggattgacaagaaagtggaaggcctgagcaagcacatcaagctggaagaggaacggagaagcgaggacgcccagagcaaggccgccctgaccgactggctgcgggctaaggccagcttcgtgatcgagggcctgaaggaggccgacaaggacgagttctgcagatgcgagctgaagctgcagaagtggtacggggacctgcggggaaagcccttcgccatcgaagccgagaacagcatcctggacatcagcggcttcagcaagcagtacaactgtgccttcatctggcagaaggacggcgtgaagaagctgaacctgtacctgatcatcaactacttcaagggcggcaagctgcggttcaagaagatcaaacctgaagccttcgaagccaacagattctacaccgtgatcaacaaaaagagcggcgagatcgtgcccatggaggtgaacttcaacttcgacgaccccaacctgatcatcctgcctctggcctttggcaagagacagggcagagaattcatctggaacgacctgctgtccctggaaaccggcagcctgaagctggccaacggaagagtgatcgagaagacactgtacaacagaagaacccggcaggatgagcctgccctgttcgtggccctgaccttcgagcggcgggaggtcctggactcctccaatatcaaaccaatgaacctgatcggcgtggcaagaggcgaaaacatccccgccgtgatcgccctgaccgaccccgagggctgcccactgagccggtttaaggatagcctgggaaacccaacccacatcctgagaatcggcgagagctataaggagaagcagcggaccatccaggccaagaaggaggtggagcagcggagagccggcggctacagccggaagtacgccagcaaagccaagaatctggcagacgatatggtgagaaacaccgctagagatctgctgtactacgccgtgacccaggatgccatgctgatcttcgccaacctgagccggggcttcggccggcagggcaagcggaccttcatggccgagagacagtacacacggatggaggactggctgaccgccaagctggcctacgagggcctgagcaagacctacctgtccaagacactggcccagtacacctccaagacatgcagcaactgtgggtttaccatcaccagcgccgactacgacagggtgctggagaagctgaagaagacagcaacaggctggatgaccacaattaacggcaaggagctgaaggtggagggccagattacctactacaacagatacaagagacagaacgtagtcaaggacctgtccgtcgagctggatagactgagcgaagaatctgtgaacaacgacatctcctcctggacaaagggcagaagcggagaagctctgagcctcctgaagaaaagattctcccatagacccgtgcaggagaagttcgtgtgcctgaactgcggcttcgagacacacgcagccgagcaagccgccctgaacatcgccagatcctggctgttcctgcggagccaggagtacaagaaataccagacaaacaagacaaccggcaacaccgataagagagccttcgtcgagacctggcagtccttttaccggaagaagcttaaggaggtgtggaaacctgccgtgcggtctggcggatctggcggaggctccaccagccccaagaaaaagagaaaagtctaagctgccttctgcggggcttgccttctggccatgcccttcttctctcccttgcacctgtacctcttggtctttgaataaagcctgagtaggaaggctagcaaaaaaaaaaaaaaaaaaaaaaaaaaaaaaaaaaaaaaaaaaaaaaaaaaaaaaaaaaaaaaaaaaaaaaaaaaaaaaaagcccagccggctccccaacctctaccgaggagggcacctctgagtccgccacccccgagagcggccctggcacctccaccgagcccagcgagggcagcgcacccggcagccctgccggcagccccacctccacagaggagggaaccagcaccgagcccagcgaaggcagcgccccaggcaccagcaccgagcctagtgagcaggagattaaacggatcaacaagatcagaagaagacttgtgaaagacagcaacaccaagaaggccggcaagacaggccccatgaaaaccctgctggttagagtgatgacacccgatctgagagagcggctggaaaacctgagaaagaagcctgaaaatatcccccagcccatcagcaatacatctagagccaacctgaataagctgctgaccgattacaccgaaatgaagaaggcgatcctgcatgtgtactgggaagagttccagaaggaccctgtgggcctgatgagccgggtggcccagcctgccagcaagaagatcgatcagaacaagctgaaacctgagatggacgagaagggcaacctgaccaccgccggctttgcctgctctcagtgtggccagcccctgttcgtgtacaagctggagcaggtgtctgagaagggcaaggcttacaccaactacttcggacggtgcaatgtggccgagcacgaaaagctgatcctgctggcccagctgaagcccgagaaggatagcgacgaagccgtgacatatagcctgggaaagtttgggcagagggccctggatttctacagcattcatgtgaccaaggagtccacccaccccgtgaagcccctggcccagatcgccggaaacagatacgcctccggacctgtgggaaaggccctgagcgacgcatgtatgggcacaatcgcctccttcctgtctaagtaccaggacatcatcatcgaacaccagaaggtggtgaagggcaaccagaagagactggagagcctgcgggagctggccggcaaggaaaacctggaataccctagcgtgaccctgccacctcagcctcacaccaaggagggcgttgatgcctacaacgaagtgatcgcccgggtgcgaatgtgggtgaacctgaacctgtggcagaagctgaagctaagcagagatgatgccaagcctctgctgagactgaagggattcccttcctttcctctggtcgagagacaggccaacgaagtggactggtgggacatggtgtgtaacgtgaagaagctgatcaacgagaaaaaggaggatggcaaggtgttttggcagaatctggctggctacaagagacaggaagccctgagaccatacctgagcagcgaggaagatcggaagaagggaaagaaattcgctcggtaccagctgggcgacctgctgctgcacctggaaaagaagcacggcgaggactggggaaaggtgtacgacgaggcctgggagcggattgacaagaaagtggaaggcctgagcaagcacatcaagctggaagaggaacggagaagcgaggacgcccagagcaaggccgccctgaccgactggctgcgggctaaggccagcttcgtgatcgagggcctgaaggaggccgacaaggacgagttctgcagatgcgagctgaagctgcagaagtggtacggggacctgcggggaaagcccttcgccatcgaagccgagaacagcatcctggacatcagcggcttcagcaagcagtacaactgtgccttcatctggcagaaggacggcgtgaagaagctgaacctgtacctgatcatcaactacttcaagggcggcaagctgcggttcaagaagatcaaacctgaagccttcgaagccaacagattctacaccgtgatcaacaaaaagagcggcgagatcgtgcccatggaggtgaacttcaacttcgacgaccccaacctgatcatcctgcctctggcctttggcaagagacagggcagagaattcatctggaacgacctgctgtccctggaaaccggcagcctgaagctggccaacggaagagtgatcgagaagacactgtacaacagaagaacccggcaggatgagcctgccctgttcgtggccctgaccttcgagcggcgggaggtcctggactcctccaatatcaaaccaatgaacctgatcggcgtggcaagaggcgaaaacatccccgccgtgatcgccctgaccgaccccgagggctgcccactgagccggtttaaggatagcctgggaaacccaacccacatcctgagaatcggcgagagctataaggagaagcagcggaccatccaggccaagaaggaggtggagcagcggagagccggcggctacagccggaagtacgccagcaaagccaagaatctggcagacgatatggtgagaaacaccgctagagatctgctgtactacgccgtgacccaggatgccatgctgatcttcgccaacctgagccggggcttcggccggcagggcaagcggaccttcatggccgagagacagtacacacggatggaggactggctgaccgccaagctggcctacgagggcctgagcaagacctacctgtccaagacactggcccagtacacctccaagacatgcagcaactgtgggtttaccatcaccagcgccgactacgacagggtgctggagaagctgaagaagacagcaacaggctggatgaccacaattaacggcaaggagctgaaggtggagggccagattacctactacaacagatacaagagacagaacgtagtcaaggacctgtccgtcgagctggatagactgagcgaagaatctgtgaacaacgacatctcctcctggacaaagggcagaagcggagaagctctgagcctcctgaagaaaagattctcccatagacccgtgcaggagaagttcgtgtgcctgaactgcggcttcgagacacacgcagccgagcaagccgccctgaacatcgccagatcctggctgttcctgcggagccaggagtacaagaaataccagacaaacaagacaaccggcaacaccgataagagagccttcgtcgagacctggcagtccttttaccggaagaagcttaaggaggtgtggaaacctgccgtgcggtctggcggatctggcggaggctccaccagccccaagaaaaagagaaaagtctaagctgccttctgcggggcttgccttctggccatgcccttcttctctcccttgcacctgtacctcttggtctttgaataaagcctgagtaggaaggctagcaaaaaaaaaaaaaaaaaaaaaaaaaaaaaaaaaaaaaaaaaaaaaaaaaaaaaaaaaaaaaaaaaaaaaaaaaaaaaaaa

SEQ ID NO: 9994 - RNA, 8787 nt, synthetic construct
  source 1..8787: mol_type = other RNA
aggaaataagagagaaaagaagagtaagaagaaatataagagccaccatggcccctaagaagaagcgtaaagtgagccggatgaaccacgaccaggagttcgacccccctaaggtgtaccctcccgtccccgccgagaagagaaagcccatccgggtcctgagcctgttcgatggcatcgccaccggtctgctggtgctgaaggacctgggcatccaggtggataggtacattgcctccgaggtgtgcgaggactccatcaccgtgggaatggtgcgtcatcagggcaagatcatgtacgtgggcgacgtgcggagcgtgacacagaagcatatccaggagtggggccctttcgacctggtgatcggcggcagcccttgcaatgacctgagcatcgtgaacccagcccggaagggcctgtacgagggaaccggcagactgttcttcgagttttacagactgctgcacgacgcccggcctaaggaaggcgacgaccggcccttcttttggctgttcgagaatgtggtggccatgggagtcagcgacaagcgggatattagccggttcctggagagcaaccccgtgatgatcgatgccaaggaagtgagcgccgcccaccgggccagatacttctggggcaatctgcctggcatgaacagacccctggccagcaccgtgaacgacaagctggagctgcaggagtgcctggagcacggccggatcgccaagttcagcaaggtgagaaccatcaccacccgaagcaacagcatcaaacaaggcaaggaccagcactttcctgtgttcatgaacgagaaggaggacatcctgtggtgtaccgagatggagagagtgttcgggttcccagtccactacacagatgtcagcaacatgtctagactggccagacagagactgctgggaagaagctggtccgtccctgtgatcagacacctgttcgcccctctgaaggagtacttcgcctgcgtgagcagcggcaacagcaacgccaacagccggggccccagcttctctagcggcctggtgccactgtccctgagagggagccacatgggccccatggagatctacaaaaccgtgagcgcctggaagcggcagcctgtgcgcgtgctgagcctgtttcggaatatcgataaagtcctgaaaagcctgggattcctggagagcggctctggctccggcggtggcaccctgaagtacgtggaggatgtgacaaacgtggtcagacgggatgtggagaagtggggccccttcgatctggtgtacggcagcacccaacccctgggcagctcttgtgaccggtgccctggctggtacatgtttcagttccaccggatcctgcagtacgccctgccgagacaggagtcccagcggccattcttttggattttcatggacaacttgctgctgaccgaggatgaccaggaaactaccactcggttcctgcagaccgaagccgtgaccctgcaggacgtgagaggccgggactaccagaacgccatgcgggtgtggtccaacatccctggactgaaaagcaagcacgcacctctgacccctaaagaagaggagtacctgcaggcccaggtgcggagcagaagcaagctggacgcccctaaggtggatctgctggtgaagaattgcctcctgcccctgagagagtacttcaagtatttcagccagaatagtctgcccctgggaggcagcggcggcggcagccaggtgagcgtgaccttcgaggacgtggccgtgctgttcaccagggacgagtggaggaagctggcccccagccagaggaacctgtaccaggacgtgatgctggagaactacagcaacctggtgagcctgggcctgcccttcagcaagcccgaggtgatcagcctgctgcagcagggcgaggacccctggaaggtggagaaggagagccccggcggcagcagcctgggcgagtggagcagcggcggcccaagcagcggcgcccctcctcccagcggcggcaggcggcccaagcagcggcgcccctcctcccagcggcggcagcccagccggctccccaacctctaccgaggagggcacctctgagtccgccacccccgagagcggccctggcacctccaccgagcccagcgagggcagcgcacccggcagccctgccggcagccccacctccacagaggagggaaccagcaccgagcccagcgaaggcagcgccccaggcaccagcaccgagcctagtgagcaggagattaaacggatcaacaagatcagaagaagacttgtgaaagacagcaacaccaagaaggccggcaagacaggccccatgaaaaccctgctggttagagtgatgacacccgatctgagagagcggctggaaaacctgagaaagaagcctgaaaatatcccccagcccatcagcaatacatctagagccaacctgaataagctgctgaccgattacaccgaaatgaagaaggcgatcctgcatgtgtactgggaagagttccagaaggaccctgtgggcctgatgagccgggtggcccagcctgccagcaagaagatcgatcagaacaagctgaaacctgagatggacgagaagggcaacctgaccaccgccggctttgcctgctctcagtgtggccagcccctgttcgtgtacaagctggagcaggtgtctgagaagggcaaggcttacaccaactacttcggacggtgcaatgtggccgagcacgaaaagctgatcctgctggcccagctgaagcccgagaaggatagcgacgaagccgtgacatatagcctgggaaagtttgggcagagggccctggatttctacagcattcatgtgaccaaggagtccacccaccccgtgaagcccctggcccagatcgccggaaacagatacgcctccggacctgtgggaaaggccctgagcgacgcatgtatgggcacaatcgcctccttcctgtctaagtaccaggacatcatcatcgaacaccagaaggtggtgaagggcaaccagaagagactggagagcctgcgggagctggccggcaaggaaaacctggaataccctagcgtgaccctgccacctcagcctcacaccaaggagggcgttgatgcctacaacgaagtgatcgcccgggtgcgaatgtgggtgaacctgaacctgtggcagaagctgaagctaagcagagatgatgccaagcctctgctgagactgaagggattcccttcctttcctctggtcgagagacaggccaacgaagtggactggtgggacatggtgtgtaacgtgaagaagctgatcaacgagaaaaaggaggatggcaaggtgttttggcagaatctggctggctacaagagacaggaagccctgagaccatacctgagcagcgaggaagatcggaagaagggaaagaaattcgctcggtaccagctgggcgacctgctgctgcacctggaaaagaagcacggcgaggactggggaaaggtgtacgacgaggcctgggagcggattgacaagaaagtggaaggcctgagcaagcacatcaagctggaagaggaacggagaagcgaggacgcccagagcaaggccgccctgaccgactggctgcgggctaaggccagcttcgtgatcgagggcctgaaggaggccgacaaggacgagttctgcagatgcgagctgaagctgcagaagtggtacggggacctgcggggaaagcccttcgccatcgaagccgagaacagcatcctggacatcagcggcttcagcaagcagtacaactgtgccttcatctggcagaaggacggcgtgaagaagctgaacctgtacctgatcatcaactacttcaagggcggcaagctgcggttcaagaagatcaaacctgaagccttcgaagccaacagattctacaccgtgatcaacaaaaagagcggcgagatcgtgcccatggaggtgaacttcaacttcgacgaccccaacctgatcatcctgcctctggcctttggcaagagacagggcagagaattcatctggaacgacctgctgtccctggaaaccggcagcctgaagctggccaacggaagagtgatcgagaagacactgtacaacagaagaacccggcaggatgagcctgccctgttcgtggccctgaccttcgagcggcgggaggtcctggactcctccaatatcaaaccaatgaacctgatcggcgtggcaagaggcgaaaacatccccgccgtgatcgccctgaccgaccccgagggctgcccactgagccggtttaaggatagcctgggaaacccaacccacatcctgagaatcggcgagagctataaggagaagcagcggaccatccaggccaagaaggaggtggagcagcggagagccggcggctacagccggaagtacgccagcaaagccaagaatctggcagacgatatggtgagaaacaccgctagagatctgctgtactacgccgtgacccaggatgccatgctgatcttcgccaacctgagccggggcttcggccggcagggcaagcggaccttcatggccgagagacagtacacacggatggaggactggctgaccgccaagctggcctacgagggcctgagcaagacctacctgtccaagacactggcccagtacacctccaagacatgcagcaactgtgggtttaccatcaccagcgccgactacgacagggtgctggagaagctgaagaagacagcaacaggctggatgaccacaattaacggcaaggagctgaaggtggagggccagattacctactacaacagatacaagagacagaacgtagtcaaggacctgtccgtcgagctggatagactgagcgaagaatctgtgaacaacgacatctcctcctggacaaagggcagaagcggagaagctctgagcctcctgaagaaaagattctcccatagacccgtgcaggagaagttcgtgtgcctgaactgcggcttcgagacacacgcagccgagcaagccgccctgaacatcgccagatcctggctgttcctgcggagccaggagtacaagaaataccagacaaacaagacaaccggcaacaccgataagagagccttcgtcgagacctggcagtccttttaccggaagaagcttaaggaggtgtggaaacctgccgtgcggtctggcggatctggcggaggctccaccagccccaagaaaaagagaaaagtctaagctgccttctgcggggcttgccttctggccatgcccttcttctctcccttgcacctgtacctcttggtctttgaataaagcctgagtaggaaggctagcaaaaaaaaaaaaaaaaaaaaaaaaaaaaaaaaaaaaaaaaaaaaaaaaaaaaaaaaaaaaaaaaaaaaaaaaaaaaaaaagcccagccggctccccaacctctaccgaggagggcacctctgagtccgccacccccgagagcggccctggcacctccaccgagcccagcgagggcagcgcacccggcagccctgccggcagccccacctccacagaggagggaaccagcaccgagcccagcgaaggcagcgccccaggcaccagcaccgagcctagtgagcaggagattaaacggatcaacaagatcagaagaagacttgtgaaagacagcaacaccaagaaggccggcaagacaggccccatgaaaaccctgctggttagagtgatgacacccgatctgagagagcggctggaaaacctgagaaagaagcctgaaaatatcccccagcccatcagcaatacatctagagccaacctgaataagctgctgaccgattacaccgaaatgaagaaggcgatcctgcatgtgtactgggaagagttccagaaggaccctgtgggcctgatgagccgggtggcccagcctgccagcaagaagatcgatcagaacaagctgaaacctgagatggacgagaagggcaacctgaccaccgccggctttgcctgctctcagtgtggccagcccctgttcgtgtacaagctggagcaggtgtctgagaagggcaaggcttacaccaactacttcggacggtgcaatgtggccgagcacgaaaagctgatcctgctggcccagctgaagcccgagaaggatagcgacgaagccgtgacatatagcctgggaaagtttgggcagagggccctggatttctacagcattcatgtgaccaaggagtccacccaccccgtgaagcccctggcccagatcgccggaaacagatacgcctccggacctgtgggaaaggccctgagcgacgcatgtatgggcacaatcgcctccttcctgtctaagtaccaggacatcatcatcgaacaccagaaggtggtgaagggcaaccagaagagactggagagcctgcgggagctggccggcaaggaaaacctggaataccctagcgtgaccctgccacctcagcctcacaccaaggagggcgttgatgcctacaacgaagtgatcgcccgggtgcgaatgtgggtgaacctgaacctgtggcagaagctgaagctaagcagagatgatgccaagcctctgctgagactgaagggattcccttcctttcctctggtcgagagacaggccaacgaagtggactggtgggacatggtgtgtaacgtgaagaagctgatcaacgagaaaaaggaggatggcaaggtgttttggcagaatctggctggctacaagagacaggaagccctgagaccatacctgagcagcgaggaagatcggaagaagggaaagaaattcgctcggtaccagctgggcgacctgctgctgcacctggaaaagaagcacggcgaggactggggaaaggtgtacgacgaggcctgggagcggattgacaagaaagtggaaggcctgagcaagcacatcaagctggaagaggaacggagaagcgaggacgcccagagcaaggccgccctgaccgactggctgcgggctaaggccagcttcgtgatcgagggcctgaaggaggccgacaaggacgagttctgcagatgcgagctgaagctgcagaagtggtacggggacctgcggggaaagcccttcgccatcgaagccgagaacagcatcctggacatcagcggcttcagcaagcagtacaactgtgccttcatctggcagaaggacggcgtgaagaagctgaacctgtacctgatcatcaactacttcaagggcggcaagctgcggttcaagaagatcaaacctgaagccttcgaagccaacagattctacaccgtgatcaacaaaaagagcggcgagatcgtgcccatggaggtgaacttcaacttcgacgaccccaacctgatcatcctgcctctggcctttggcaagagacagggcagagaattcatctggaacgacctgctgtccctggaaaccggcagcctgaagctggccaacggaagagtgatcgagaagacactgtacaacagaagaacccggcaggatgagcctgccctgttcgtggccctgaccttcgagcggcgggaggtcctggactcctccaatatcaaaccaatgaacctgatcggcgtggcaagaggcgaaaacatccccgccgtgatcgccctgaccgaccccgagggctgcccactgagccggtttaaggatagcctgggaaacccaacccacatcctgagaatcggcgagagctataaggagaagcagcggaccatccaggccaagaaggaggtggagcagcggagagccggcggctacagccggaagtacgccagcaaagccaagaatctggcagacgatatggtgagaaacaccgctagagatctgctgtactacgccgtgacccaggatgccatgctgatcttcgccaacctgagccggggcttcggccggcagggcaagcggaccttcatggccgagagacagtacacacggatggaggactggctgaccgccaagctggcctacgagggcctgagcaagacctacctgtccaagacactggcccagtacacctccaagacatgcagcaactgtgggtttaccatcaccagcgccgactacgacagggtgctggagaagctgaagaagacagcaacaggctggatgaccacaattaacggcaaggagctgaaggtggagggccagattacctactacaacagatacaagagacagaacgtagtcaaggacctgtccgtcgagctggatagactgagcgaagaatctgtgaacaacgacatctcctcctggacaaagggcagaagcggagaagctctgagcctcctgaagaaaagattctcccatagacccgtgcaggagaagttcgtgtgcctgaactgcggcttcgagacacacgcagccgagcaagccgccctgaacatcgccagatcctggctgttcctgcggagccaggagtacaagaaataccagacaaacaagacaaccggcaacaccgataagagagccttcgtcgagacctggcagtccttttaccggaagaagcttaaggaggtgtggaaacctgccgtgcggtctggcggatctggcggaggctccaccagccccaagaaaaagagaaaagtctaagctgccttctgcggggcttgccttctggccatgcccttcttctctcccttgcacctgtacctcttggtctttgaataaagcctgagtaggaaggctagcaaaaaaaaaaaaaaaaaaaaaaaaaaaaaaaaaaaaaaaaaaaaaaaaaaaaaaaaaaaaaaaaaaaaaaaaaaaaaaaa

SEQ ID NO: 9995 - RNA, 8787 nt, synthetic construct
  source 1..8787: mol_type = other RNA
aggaaataagagagaaaagaagagtaagaagaaatataagagccaccatggcccctaagaagaagcgtaaagtgagccggatgaaccacgaccaggagttcgacccccctaaggtgtaccctcccgtccccgccgagaagagaaagcccatccgggtcctgagcctgttcgatggcatcgccaccggtctgctggtgctgaaggacctgggcatccaggtggataggtacattgcctccgaggtgtgcgaggactccatcaccgtgggaatggtgcgtcatcagggcaagatcatgtacgtgggcgacgtgcggagcgtgacacagaagcatatccaggagtggggccctttcgacctggtgatcggcggcagcccttgcaatgacctgagcatcgtgaacccagcccggaagggcctgtacgagggaaccggcagactgttcttcgagttttacagactgctgcacgacgcccggcctaaggaaggcgacgaccggcccttcttttggctgttcgagaatgtggtggccatgggagtcagcgacaagcgggatattagccggttcctggagagcaaccccgtgatgatcgatgccaaggaagtgagcgccgcccaccgggccagatacttctggggcaatctgcctggcatgaacagacccctggccagcaccgtgaacgacaagctggagctgcaggagtgcctggagcacggccggatcgccaagttcagcaaggtgagaaccatcaccacccgaagcaacagcatcaaacaaggcaaggaccagcactttcctgtgttcatgaacgagaaggaggacatcctgtggtgtaccgagatggagagagtgttcgggttcccagtccactacacagatgtcagcaacatgtctagactggccagacagagactgctgggaagaagctggtccgtccctgtgatcagacacctgttcgcccctctgaaggagtacttcgcctgcgtgagcagcggcaacagcaacgccaacagccggggccccagcttctctagcggcctggtgccactgtccctgagagggagccacatgggccccatggagatctacaaaaccgtgagcgcctggaagcggcagcctgtgcgcgtgctgagcctgtttcggaatatcgataaagtcctgaaaagcctgggattcctggagagcggctctggctccggcggtggcaccctgaagtacgtggaggatgtgacaaacgtggtcagacgggatgtggagaagtggggccccttcgatctggtgtacggcagcacccaacccctgggcagctcttgtgaccggtgccctggctggtacatgtttcagttccaccggatcctgcagtacgccctgccgagacaggagtcccagcggccattcttttggattttcatggacaacttgctgctgaccgaggatgaccaggaaactaccactcggttcctgcagaccgaagccgtgaccctgcaggacgtgagaggccgggactaccagaacgccatgcgggtgtggtccaacatccctggactgaaaagcaagcacgcacctctgacccctaaagaagaggagtacctgcaggcccaggtgcggagcagaagcaagctggacgcccctaaggtggatctgctggtgaagaattgcctcctgcccctgagagagtacttcaagtatttcagccagaatagtctgcccctgggaggcagcggcggcggcaggcaggagagggtgaccttcggcgacgtggccgtggacttcaccctggacgagtgggtgtgcctggacagcgcccagaaggccctgtacagggacgtgatgctggagaactacggccacctggtgtgcctgggcctggccggcgccaagcccgccgtgatccagaggctggagaggggcgaggccgcctggtgccccggcgtgcccggcagcaggctgcccgactgggagaccaggctggagggcggcccaagcagcggcgcccctcctcccagcggcggcaggcggcccaagcagcggcgcccctcctcccagcggcggcagcccagccggctccccaacctctaccgaggagggcacctctgagtccgccacccccgagagcggccctggcacctccaccgagcccagcgagggcagcgcacccggcagccctgccggcagccccacctccacagaggagggaaccagcaccgagcccagcgaaggcagcgccccaggcaccagcaccgagcctagtgagcaggagattaaacggatcaacaagatcagaagaagacttgtgaaagacagcaacaccaagaaggccggcaagacaggccccatgaaaaccctgctggttagagtgatgacacccgatctgagagagcggctggaaaacctgagaaagaagcctgaaaatatcccccagcccatcagcaatacatctagagccaacctgaataagctgctgaccgattacaccgaaatgaagaaggcgatcctgcatgtgtactgggaagagttccagaaggaccctgtgggcctgatgagccgggtggcccagcctgccagcaagaagatcgatcagaacaagctgaaacctgagatggacgagaagggcaacctgaccaccgccggctttgcctgctctcagtgtggccagcccctgttcgtgtacaagctggagcaggtgtctgagaagggcaaggcttacaccaactacttcggacggtgcaatgtggccgagcacgaaaagctgatcctgctggcccagctgaagcccgagaaggatagcgacgaagccgtgacatatagcctgggaaagtttgggcagagggccctggatttctacagcattcatgtgaccaaggagtccacccaccccgtgaagcccctggcccagatcgccggaaacagatacgcctccggacctgtgggaaaggccctgagcgacgcatgtatgggcacaatcgcctccttcctgtctaagtaccaggacatcatcatcgaacaccagaaggtggtgaagggcaaccagaagagactggagagcctgcgggagctggccggcaaggaaaacctggaataccctagcgtgaccctgccacctcagcctcacaccaaggagggcgttgatgcctacaacgaagtgatcgcccgggtgcgaatgtgggtgaacctgaacctgtggcagaagctgaagctaagcagagatgatgccaagcctctgctgagactgaagggattcccttcctttcctctggtcgagagacaggccaacgaagtggactggtgggacatggtgtgtaacgtgaagaagctgatcaacgagaaaaaggaggatggcaaggtgttttggcagaatctggctggctacaagagacaggaagccctgagaccatacctgagcagcgaggaagatcggaagaagggaaagaaattcgctcggtaccagctgggcgacctgctgctgcacctggaaaagaagcacggcgaggactggggaaaggtgtacgacgaggcctgggagcggattgacaagaaagtggaaggcctgagcaagcacatcaagctggaagaggaacggagaagcgaggacgcccagagcaaggccgccctgaccgactggctgcgggctaaggccagcttcgtgatcgagggcctgaaggaggccgacaaggacgagttctgcagatgcgagctgaagctgcagaagtggtacggggacctgcggggaaagcccttcgccatcgaagccgagaacagcatcctggacatcagcggcttcagcaagcagtacaactgtgccttcatctggcagaaggacggcgtgaagaagctgaacctgtacctgatcatcaactacttcaagggcggcaagctgcggttcaagaagatcaaacctgaagccttcgaagccaacagattctacaccgtgatcaacaaaaagagcggcgagatcgtgcccatggaggtgaacttcaacttcgacgaccccaacctgatcatcctgcctctggcctttggcaagagacagggcagagaattcatctggaacgacctgctgtccctggaaaccggcagcctgaagctggccaacggaagagtgatcgagaagacactgtacaacagaagaacccggcaggatgagcctgccctgttcgtggccctgaccttcgagcggcgggaggtcctggactcctccaatatcaaaccaatgaacctgatcggcgtggcaagaggcgaaaacatccccgccgtgatcgccctgaccgaccccgagggctgcccactgagccggtttaaggatagcctgggaaacccaacccacatcctgagaatcggcgagagctataaggagaagcagcggaccatccaggccaagaaggaggtggagcagcggagagccggcggctacagccggaagtacgccagcaaagccaagaatctggcagacgatatggtgagaaacaccgctagagatctgctgtactacgccgtgacccaggatgccatgctgatcttcgccaacctgagccggggcttcggccggcagggcaagcggaccttcatggccgagagacagtacacacggatggaggactggctgaccgccaagctggcctacgagggcctgagcaagacctacctgtccaagacactggcccagtacacctccaagacatgcagcaactgtgggtttaccatcaccagcgccgactacgacagggtgctggagaagctgaagaagacagcaacaggctggatgaccacaattaacggcaaggagctgaaggtggagggccagattacctactacaacagatacaagagacagaacgtagtcaaggacctgtccgtcgagctggatagactgagcgaagaatctgtgaacaacgacatctcctcctggacaaagggcagaagcggagaagctctgagcctcctgaagaaaagattctcccatagacccgtgcaggagaagttcgtgtgcctgaactgcggcttcgagacacacgcagccgagcaagccgccctgaacatcgccagatcctggctgttcctgcggagccaggagtacaagaaataccagacaaacaagacaaccggcaacaccgataagagagccttcgtcgagacctggcagtccttttaccggaagaagcttaaggaggtgtggaaacctgccgtgcggtctggcggatctggcggaggctccaccagccccaagaaaaagagaaaagtctaagctgccttctgcggggcttgccttctggccatgcccttcttctctcccttgcacctgtacctcttggtctttgaataaagcctgagtaggaaggctagcaaaaaaaaaaaaaaaaaaaaaaaaaaaaaaaaaaaaaaaaaaaaaaaaaaaaaaaaaaaaaaaaaaaaaaaaaaaaaaaagcccagccggctccccaacctctaccgaggagggcacctctgagtccgccacccccgagagcggccctggcacctccaccgagcccagcgagggcagcgcacccggcagccctgccggcagccccacctccacagaggagggaaccagcaccgagcccagcgaaggcagcgccccaggcaccagcaccgagcctagtgagcaggagattaaacggatcaacaagatcagaagaagacttgtgaaagacagcaacaccaagaaggccggcaagacaggccccatgaaaaccctgctggttagagtgatgacacccgatctgagagagcggctggaaaacctgagaaagaagcctgaaaatatcccccagcccatcagcaatacatctagagccaacctgaataagctgctgaccgattacaccgaaatgaagaaggcgatcctgcatgtgtactgggaagagttccagaaggaccctgtgggcctgatgagccgggtggcccagcctgccagcaagaagatcgatcagaacaagctgaaacctgagatggacgagaagggcaacctgaccaccgccggctttgcctgctctcagtgtggccagcccctgttcgtgtacaagctggagcaggtgtctgagaagggcaaggcttacaccaactacttcggacggtgcaatgtggccgagcacgaaaagctgatcctgctggcccagctgaagcccgagaaggatagcgacgaagccgtgacatatagcctgggaaagtttgggcagagggccctggatttctacagcattcatgtgaccaaggagtccacccaccccgtgaagcccctggcccagatcgccggaaacagatacgcctccggacctgtgggaaaggccctgagcgacgcatgtatgggcacaatcgcctccttcctgtctaagtaccaggacatcatcatcgaacaccagaaggtggtgaagggcaaccagaagagactggagagcctgcgggagctggccggcaaggaaaacctggaataccctagcgtgaccctgccacctcagcctcacaccaaggagggcgttgatgcctacaacgaagtgatcgcccgggtgcgaatgtgggtgaacctgaacctgtggcagaagctgaagctaagcagagatgatgccaagcctctgctgagactgaagggattcccttcctttcctctggtcgagagacaggccaacgaagtggactggtgggacatggtgtgtaacgtgaagaagctgatcaacgagaaaaaggaggatggcaaggtgttttggcagaatctggctggctacaagagacaggaagccctgagaccatacctgagcagcgaggaagatcggaagaagggaaagaaattcgctcggtaccagctgggcgacctgctgctgcacctggaaaagaagcacggcgaggactggggaaaggtgtacgacgaggcctgggagcggattgacaagaaagtggaaggcctgagcaagcacatcaagctggaagaggaacggagaagcgaggacgcccagagcaaggccgccctgaccgactggctgcgggctaaggccagcttcgtgatcgagggcctgaaggaggccgacaaggacgagttctgcagatgcgagctgaagctgcagaagtggtacggggacctgcggggaaagcccttcgccatcgaagccgagaacagcatcctggacatcagcggcttcagcaagcagtacaactgtgccttcatctggcagaaggacggcgtgaagaagctgaacctgtacctgatcatcaactacttcaagggcggcaagctgcggttcaagaagatcaaacctgaagccttcgaagccaacagattctacaccgtgatcaacaaaaagagcggcgagatcgtgcccatggaggtgaacttcaacttcgacgaccccaacctgatcatcctgcctctggcctttggcaagagacagggcagagaattcatctggaacgacctgctgtccctggaaaccggcagcctgaagctggccaacggaagagtgatcgagaagacactgtacaacagaagaacccggcaggatgagcctgccctgttcgtggccctgaccttcgagcggcgggaggtcctggactcctccaatatcaaaccaatgaacctgatcggcgtggcaagaggcgaaaacatccccgccgtgatcgccctgaccgaccccgagggctgcccactgagccggtttaaggatagcctgggaaacccaacccacatcctgagaatcggcgagagctataaggagaagcagcggaccatccaggccaagaaggaggtggagcagcggagagccggcggctacagccggaagtacgccagcaaagccaagaatctggcagacgatatggtgagaaacaccgctagagatctgctgtactacgccgtgacccaggatgccatgctgatcttcgccaacctgagccggggcttcggccggcagggcaagcggaccttcatggccgagagacagtacacacggatggaggactggctgaccgccaagctggcctacgagggcctgagcaagacctacctgtccaagacactggcccagtacacctccaagacatgcagcaactgtgggtttaccatcaccagcgccgactacgacagggtgctggagaagctgaagaagacagcaacaggctggatgaccacaattaacggcaaggagctgaaggtggagggccagattacctactacaacagatacaagagacagaacgtagtcaaggacctgtccgtcgagctggatagactgagcgaagaatctgtgaacaacgacatctcctcctggacaaagggcagaagcggagaagctctgagcctcctgaagaaaagattctcccatagacccgtgcaggagaagttcgtgtgcctgaactgcggcttcgagacacacgcagccgagcaagccgccctgaacatcgccagatcctggctgttcctgcggagccaggagtacaagaaataccagacaaacaagacaaccggcaacaccgataagagagccttcgtcgagacctggcagtccttttaccggaagaagcttaaggaggtgtggaaacctgccgtgcggtctggcggatctggcggaggctccaccagccccaagaaaaagagaaaagtctaagctgccttctgcggggcttgccttctggccatgcccttcttctctcccttgcacctgtacctcttggtctttgaataaagcctgagtaggaaggctagcaaaaaaaaaaaaaaaaaaaaaaaaaaaaaaaaaaaaaaaaaaaaaaaaaaaaaaaaaaaaaaaaaaaaaaaaaaaaaaaa

SEQ ID NO: 9996 - RNA, 8787 nt, synthetic construct
  source 1..8787: mol_type = other RNA
aggaaataagagagaaaagaagagtaagaagaaatataagagccaccatggcccctaagaagaagcgtaaagtgagccggatgaaccacgaccaggagttcgacccccctaaggtgtaccctcccgtccccgccgagaagagaaagcccatccgggtcctgagcctgttcgatggcatcgccaccggtctgctggtgctgaaggacctgggcatccaggtggataggtacattgcctccgaggtgtgcgaggactccatcaccgtgggaatggtgcgtcatcagggcaagatcatgtacgtgggcgacgtgcggagcgtgacacagaagcatatccaggagtggggccctttcgacctggtgatcggcggcagcccttgcaatgacctgagcatcgtgaacccagcccggaagggcctgtacgagggaaccggcagactgttcttcgagttttacagactgctgcacgacgcccggcctaaggaaggcgacgaccggcccttcttttggctgttcgagaatgtggtggccatgggagtcagcgacaagcgggatattagccggttcctggagagcaaccccgtgatgatcgatgccaaggaagtgagcgccgcccaccgggccagatacttctggggcaatctgcctggcatgaacagacccctggccagcaccgtgaacgacaagctggagctgcaggagtgcctggagcacggccggatcgccaagttcagcaaggtgagaaccatcaccacccgaagcaacagcatcaaacaaggcaaggaccagcactttcctgtgttcatgaacgagaaggaggacatcctgtggtgtaccgagatggagagagtgttcgggttcccagtccactacacagatgtcagcaacatgtctagactggccagacagagactgctgggaagaagctggtccgtccctgtgatcagacacctgttcgcccctctgaaggagtacttcgcctgcgtgagcagcggcaacagcaacgccaacagccggggccccagcttctctagcggcctggtgccactgtccctgagagggagccacatgggccccatggagatctacaaaaccgtgagcgcctggaagcggcagcctgtgcgcgtgctgagcctgtttcggaatatcgataaagtcctgaaaagcctgggattcctggagagcggctctggctccggcggtggcaccctgaagtacgtggaggatgtgacaaacgtggtcagacgggatgtggagaagtggggccccttcgatctggtgtacggcagcacccaacccctgggcagctcttgtgaccggtgccctggctggtacatgtttcagttccaccggatcctgcagtacgccctgccgagacaggagtcccagcggccattcttttggattttcatggacaacttgctgctgaccgaggatgaccaggaaactaccactcggttcctgcagaccgaagccgtgaccctgcaggacgtgagaggccgggactaccagaacgccatgcgggtgtggtccaacatccctggactgaaaagcaagcacgcacctctgacccctaaagaagaggagtacctgcaggcccaggtgcggagcagaagcaagctggacgcccctaaggtggatctgctggtgaagaattgcctcctgcccctgagagagtacttcaagtatttcagccagaatagtctgcccctgggaggcagcggcggcggcagcgccgccagcgtgaccttcagggacgtggccgtggacttcagcagggaggagtggagcaggctggacgccgcccagagggccctgtacagggacgtgatgtgggagacctacgagaacctggtgagcaccggcatccccgtgagcaggctggacgtgatcagcctgctggccaagcaggaggcccagtggacccccgaggaggtgcccggctggaccagccccgacagcttcagcgaggagggcggcccaagcagcggcgcccctcctcccagcggcggcaggcggcccaagcagcggcgcccctcctcccagcggcggcagcccagccggctccccaacctctaccgaggagggcacctctgagtccgccacccccgagagcggccctggcacctccaccgagcccagcgagggcagcgcacccggcagccctgccggcagccccacctccacagaggagggaaccagcaccgagcccagcgaaggcagcgccccaggcaccagcaccgagcctagtgagcaggagattaaacggatcaacaagatcagaagaagacttgtgaaagacagcaacaccaagaaggccggcaagacaggccccatgaaaaccctgctggttagagtgatgacacccgatctgagagagcggctggaaaacctgagaaagaagcctgaaaatatcccccagcccatcagcaatacatctagagccaacctgaataagctgctgaccgattacaccgaaatgaagaaggcgatcctgcatgtgtactgggaagagttccagaaggaccctgtgggcctgatgagccgggtggcccagcctgccagcaagaagatcgatcagaacaagctgaaacctgagatggacgagaagggcaacctgaccaccgccggctttgcctgctctcagtgtggccagcccctgttcgtgtacaagctggagcaggtgtctgagaagggcaaggcttacaccaactacttcggacggtgcaatgtggccgagcacgaaaagctgatcctgctggcccagctgaagcccgagaaggatagcgacgaagccgtgacatatagcctgggaaagtttgggcagagggccctggatttctacagcattcatgtgaccaaggagtccacccaccccgtgaagcccctggcccagatcgccggaaacagatacgcctccggacctgtgggaaaggccctgagcgacgcatgtatgggcacaatcgcctccttcctgtctaagtaccaggacatcatcatcgaacaccagaaggtggtgaagggcaaccagaagagactggagagcctgcgggagctggccggcaaggaaaacctggaataccctagcgtgaccctgccacctcagcctcacaccaaggagggcgttgatgcctacaacgaagtgatcgcccgggtgcgaatgtgggtgaacctgaacctgtggcagaagctgaagctaagcagagatgatgccaagcctctgctgagactgaagggattcccttcctttcctctggtcgagagacaggccaacgaagtggactggtgggacatggtgtgtaacgtgaagaagctgatcaacgagaaaaaggaggatggcaaggtgttttggcagaatctggctggctacaagagacaggaagccctgagaccatacctgagcagcgaggaagatcggaagaagggaaagaaattcgctcggtaccagctgggcgacctgctgctgcacctggaaaagaagcacggcgaggactggggaaaggtgtacgacgaggcctgggagcggattgacaagaaagtggaaggcctgagcaagcacatcaagctggaagaggaacggagaagcgaggacgcccagagcaaggccgccctgaccgactggctgcgggctaaggccagcttcgtgatcgagggcctgaaggaggccgacaaggacgagttctgcagatgcgagctgaagctgcagaagtggtacggggacctgcggggaaagcccttcgccatcgaagccgagaacagcatcctggacatcagcggcttcagcaagcagtacaactgtgccttcatctggcagaaggacggcgtgaagaagctgaacctgtacctgatcatcaactacttcaagggcggcaagctgcggttcaagaagatcaaacctgaagccttcgaagccaacagattctacaccgtgatcaacaaaaagagcggcgagatcgtgcccatggaggtgaacttcaacttcgacgaccccaacctgatcatcctgcctctggcctttggcaagagacagggcagagaattcatctggaacgacctgctgtccctggaaaccggcagcctgaagctggccaacggaagagtgatcgagaagacactgtacaacagaagaacccggcaggatgagcctgccctgttcgtggccctgaccttcgagcggcgggaggtcctggactcctccaatatcaaaccaatgaacctgatcggcgtggcaagaggcgaaaacatccccgccgtgatcgccctgaccgaccccgagggctgcccactgagccggtttaaggatagcctgggaaacccaacccacatcctgagaatcggcgagagctataaggagaagcagcggaccatccaggccaagaaggaggtggagcagcggagagccggcggctacagccggaagtacgccagcaaagccaagaatctggcagacgatatggtgagaaacaccgctagagatctgctgtactacgccgtgacccaggatgccatgctgatcttcgccaacctgagccggggcttcggccggcagggcaagcggaccttcatggccgagagacagtacacacggatggaggactggctgaccgccaagctggcctacgagggcctgagcaagacctacctgtccaagacactggcccagtacacctccaagacatgcagcaactgtgggtttaccatcaccagcgccgactacgacagggtgctggagaagctgaagaagacagcaacaggctggatgaccacaattaacggcaaggagctgaaggtggagggccagattacctactacaacagatacaagagacagaacgtagtcaaggacctgtccgtcgagctggatagactgagcgaagaatctgtgaacaacgacatctcctcctggacaaagggcagaagcggagaagctctgagcctcctgaagaaaagattctcccatagacccgtgcaggagaagttcgtgtgcctgaactgcggcttcgagacacacgcagccgagcaagccgccctgaacatcgccagatcctggctgttcctgcggagccaggagtacaagaaataccagacaaacaagacaaccggcaacaccgataagagagccttcgtcgagacctggcagtccttttaccggaagaagcttaaggaggtgtggaaacctgccgtgcggtctggcggatctggcggaggctccaccagccccaagaaaaagagaaaagtctaagctgccttctgcggggcttgccttctggccatgcccttcttctctcccttgcacctgtacctcttggtctttgaataaagcctgagtaggaaggctagcaaaaaaaaaaaaaaaaaaaaaaaaaaaaaaaaaaaaaaaaaaaaaaaaaaaaaaaaaaaaaaaaaaaaaaaaaaaaaaaagcccagccggctccccaacctctaccgaggagggcacctctgagtccgccacccccgagagcggccctggcacctccaccgagcccagcgagggcagcgcacccggcagccctgccggcagccccacctccacagaggagggaaccagcaccgagcccagcgaaggcagcgccccaggcaccagcaccgagcctagtgagcaggagattaaacggatcaacaagatcagaagaagacttgtgaaagacagcaacaccaagaaggccggcaagacaggccccatgaaaaccctgctggttagagtgatgacacccgatctgagagagcggctggaaaacctgagaaagaagcctgaaaatatcccccagcccatcagcaatacatctagagccaacctgaataagctgctgaccgattacaccgaaatgaagaaggcgatcctgcatgtgtactgggaagagttccagaaggaccctgtgggcctgatgagccgggtggcccagcctgccagcaagaagatcgatcagaacaagctgaaacctgagatggacgagaagggcaacctgaccaccgccggctttgcctgctctcagtgtggccagcccctgttcgtgtacaagctggagcaggtgtctgagaagggcaaggcttacaccaactacttcggacggtgcaatgtggccgagcacgaaaagctgatcctgctggcccagctgaagcccgagaaggatagcgacgaagccgtgacatatagcctgggaaagtttgggcagagggccctggatttctacagcattcatgtgaccaaggagtccacccaccccgtgaagcccctggcccagatcgccggaaacagatacgcctccggacctgtgggaaaggccctgagcgacgcatgtatgggcacaatcgcctccttcctgtctaagtaccaggacatcatcatcgaacaccagaaggtggtgaagggcaaccagaagagactggagagcctgcgggagctggccggcaaggaaaacctggaataccctagcgtgaccctgccacctcagcctcacaccaaggagggcgttgatgcctacaacgaagtgatcgcccgggtgcgaatgtgggtgaacctgaacctgtggcagaagctgaagctaagcagagatgatgccaagcctctgctgagactgaagggattcccttcctttcctctggtcgagagacaggccaacgaagtggactggtgggacatggtgtgtaacgtgaagaagctgatcaacgagaaaaaggaggatggcaaggtgttttggcagaatctggctggctacaagagacaggaagccctgagaccatacctgagcagcgaggaagatcggaagaagggaaagaaattcgctcggtaccagctgggcgacctgctgctgcacctggaaaagaagcacggcgaggactggggaaaggtgtacgacgaggcctgggagcggattgacaagaaagtggaaggcctgagcaagcacatcaagctggaagaggaacggagaagcgaggacgcccagagcaaggccgccctgaccgactggctgcgggctaaggccagcttcgtgatcgagggcctgaaggaggccgacaaggacgagttctgcagatgcgagctgaagctgcagaagtggtacggggacctgcggggaaagcccttcgccatcgaagccgagaacagcatcctggacatcagcggcttcagcaagcagtacaactgtgccttcatctggcagaaggacggcgtgaagaagctgaacctgtacctgatcatcaactacttcaagggcggcaagctgcggttcaagaagatcaaacctgaagccttcgaagccaacagattctacaccgtgatcaacaaaaagagcggcgagatcgtgcccatggaggtgaacttcaacttcgacgaccccaacctgatcatcctgcctctggcctttggcaagagacagggcagagaattcatctggaacgacctgctgtccctggaaaccggcagcctgaagctggccaacggaagagtgatcgagaagacactgtacaacagaagaacccggcaggatgagcctgccctgttcgtggccctgaccttcgagcggcgggaggtcctggactcctccaatatcaaaccaatgaacctgatcggcgtggcaagaggcgaaaacatccccgccgtgatcgccctgaccgaccccgagggctgcccactgagccggtttaaggatagcctgggaaacccaacccacatcctgagaatcggcgagagctataaggagaagcagcggaccatccaggccaagaaggaggtggagcagcggagagccggcggctacagccggaagtacgccagcaaagccaagaatctggcagacgatatggtgagaaacaccgctagagatctgctgtactacgccgtgacccaggatgccatgctgatcttcgccaacctgagccggggcttcggccggcagggcaagcggaccttcatggccgagagacagtacacacggatggaggactggctgaccgccaagctggcctacgagggcctgagcaagacctacctgtccaagacactggcccagtacacctccaagacatgcagcaactgtgggtttaccatcaccagcgccgactacgacagggtgctggagaagctgaagaagacagcaacaggctggatgaccacaattaacggcaaggagctgaaggtggagggccagattacctactacaacagatacaagagacagaacgtagtcaaggacctgtccgtcgagctggatagactgagcgaagaatctgtgaacaacgacatctcctcctggacaaagggcagaagcggagaagctctgagcctcctgaagaaaagattctcccatagacccgtgcaggagaagttcgtgtgcctgaactgcggcttcgagacacacgcagccgagcaagccgccctgaacatcgccagatcctggctgttcctgcggagccaggagtacaagaaataccagacaaacaagacaaccggcaacaccgataagagagccttcgtcgagacctggcagtccttttaccggaagaagcttaaggaggtgtggaaacctgccgtgcggtctggcggatctggcggaggctccaccagccccaagaaaaagagaaaagtctaagctgccttctgcggggcttgccttctggccatgcccttcttctctcccttgcacctgtacctcttggtctttgaataaagcctgagtaggaaggctagcaaaaaaaaaaaaaaaaaaaaaaaaaaaaaaaaaaaaaaaaaaaaaaaaaaaaaaaaaaaaaaaaaaaaaaaaaaaaaaaa

SEQ ID NO: 9997 - RNA, 8787 nt, synthetic construct
  source 1..8787: mol_type = other RNA
aggaaataagagagaaaagaagagtaagaagaaatataagagccaccatggcccctaagaagaagcgtaaagtgagccggatgaaccacgaccaggagttcgacccccctaaggtgtaccctcccgtccccgccgagaagagaaagcccatccgggtcctgagcctgttcgatggcatcgccaccggtctgctggtgctgaaggacctgggcatccaggtggataggtacattgcctccgaggtgtgcgaggactccatcaccgtgggaatggtgcgtcatcagggcaagatcatgtacgtgggcgacgtgcggagcgtgacacagaagcatatccaggagtggggccctttcgacctggtgatcggcggcagcccttgcaatgacctgagcatcgtgaacccagcccggaagggcctgtacgagggaaccggcagactgttcttcgagttttacagactgctgcacgacgcccggcctaaggaaggcgacgaccggcccttcttttggctgttcgagaatgtggtggccatgggagtcagcgacaagcgggatattagccggttcctggagagcaaccccgtgatgatcgatgccaaggaagtgagcgccgcccaccgggccagatacttctggggcaatctgcctggcatgaacagacccctggccagcaccgtgaacgacaagctggagctgcaggagtgcctggagcacggccggatcgccaagttcagcaaggtgagaaccatcaccacccgaagcaacagcatcaaacaaggcaaggaccagcactttcctgtgttcatgaacgagaaggaggacatcctgtggtgtaccgagatggagagagtgttcgggttcccagtccactacacagatgtcagcaacatgtctagactggccagacagagactgctgggaagaagctggtccgtccctgtgatcagacacctgttcgcccctctgaaggagtacttcgcctgcgtgagcagcggcaacagcaacgccaacagccggggccccagcttctctagcggcctggtgccactgtccctgagagggagccacatgggccccatggagatctacaaaaccgtgagcgcctggaagcggcagcctgtgcgcgtgctgagcctgtttcggaatatcgataaagtcctgaaaagcctgggattcctggagagcggctctggctccggcggtggcaccctgaagtacgtggaggatgtgacaaacgtggtcagacgggatgtggagaagtggggccccttcgatctggtgtacggcagcacccaacccctgggcagctcttgtgaccggtgccctggctggtacatgtttcagttccaccggatcctgcagtacgccctgccgagacaggagtcccagcggccattcttttggattttcatggacaacttgctgctgaccgaggatgaccaggaaactaccactcggttcctgcagaccgaagccgtgaccctgcaggacgtgagaggccgggactaccagaacgccatgcgggtgtggtccaacatccctggactgaaaagcaagcacgcacctctgacccctaaagaagaggagtacctgcaggcccaggtgcggagcagaagcaagctggacgcccctaaggtggatctgctggtgaagaattgcctcctgcccctgagagagtacttcaagtatttcagccagaatagtctgcccctgggaggcagcggcggcggcccccaggtgctggtgagcttcgaggacgtggccgtgttcctgagcagggaggagtggggctgcctgggccccgcccagaggggcctgtacagggacgtgatgctggagacctacaggaacctgatcagcctgggcttccaggacagcaagcccgacgtgatcagcaagctggaggagggcgaggagccctgggccccctacagccccaggatcgaggagggctggatccagagccacggcagcggcggcccaagcagcggcgcccctcctcccagcggcggcaggcggcccaagcagcggcgcccctcctcccagcggcggcagcccagccggctccccaacctctaccgaggagggcacctctgagtccgccacccccgagagcggccctggcacctccaccgagcccagcgagggcagcgcacccggcagccctgccggcagccccacctccacagaggagggaaccagcaccgagcccagcgaaggcagcgccccaggcaccagcaccgagcctagtgagcaggagattaaacggatcaacaagatcagaagaagacttgtgaaagacagcaacaccaagaaggccggcaagacaggccccatgaaaaccctgctggttagagtgatgacacccgatctgagagagcggctggaaaacctgagaaagaagcctgaaaatatcccccagcccatcagcaatacatctagagccaacctgaataagctgctgaccgattacaccgaaatgaagaaggcgatcctgcatgtgtactgggaagagttccagaaggaccctgtgggcctgatgagccgggtggcccagcctgccagcaagaagatcgatcagaacaagctgaaacctgagatggacgagaagggcaacctgaccaccgccggctttgcctgctctcagtgtggccagcccctgttcgtgtacaagctggagcaggtgtctgagaagggcaaggcttacaccaactacttcggacggtgcaatgtggccgagcacgaaaagctgatcctgctggcccagctgaagcccgagaaggatagcgacgaagccgtgacatatagcctgggaaagtttgggcagagggccctggatttctacagcattcatgtgaccaaggagtccacccaccccgtgaagcccctggcccagatcgccggaaacagatacgcctccggacctgtgggaaaggccctgagcgacgcatgtatgggcacaatcgcctccttcctgtctaagtaccaggacatcatcatcgaacaccagaaggtggtgaagggcaaccagaagagactggagagcctgcgggagctggccggcaaggaaaacctggaataccctagcgtgaccctgccacctcagcctcacaccaaggagggcgttgatgcctacaacgaagtgatcgcccgggtgcgaatgtgggtgaacctgaacctgtggcagaagctgaagctaagcagagatgatgccaagcctctgctgagactgaagggattcccttcctttcctctggtcgagagacaggccaacgaagtggactggtgggacatggtgtgtaacgtgaagaagctgatcaacgagaaaaaggaggatggcaaggtgttttggcagaatctggctggctacaagagacaggaagccctgagaccatacctgagcagcgaggaagatcggaagaagggaaagaaattcgctcggtaccagctgggcgacctgctgctgcacctggaaaagaagcacggcgaggactggggaaaggtgtacgacgaggcctgggagcggattgacaagaaagtggaaggcctgagcaagcacatcaagctggaagaggaacggagaagcgaggacgcccagagcaaggccgccctgaccgactggctgcgggctaaggccagcttcgtgatcgagggcctgaaggaggccgacaaggacgagttctgcagatgcgagctgaagctgcagaagtggtacggggacctgcggggaaagcccttcgccatcgaagccgagaacagcatcctggacatcagcggcttcagcaagcagtacaactgtgccttcatctggcagaaggacggcgtgaagaagctgaacctgtacctgatcatcaactacttcaagggcggcaagctgcggttcaagaagatcaaacctgaagccttcgaagccaacagattctacaccgtgatcaacaaaaagagcggcgagatcgtgcccatggaggtgaacttcaacttcgacgaccccaacctgatcatcctgcctctggcctttggcaagagacagggcagagaattcatctggaacgacctgctgtccctggaaaccggcagcctgaagctggccaacggaagagtgatcgagaagacactgtacaacagaagaacccggcaggatgagcctgccctgttcgtggccctgaccttcgagcggcgggaggtcctggactcctccaatatcaaaccaatgaacctgatcggcgtggcaagaggcgaaaacatccccgccgtgatcgccctgaccgaccccgagggctgcccactgagccggtttaaggatagcctgggaaacccaacccacatcctgagaatcggcgagagctataaggagaagcagcggaccatccaggccaagaaggaggtggagcagcggagagccggcggctacagccggaagtacgccagcaaagccaagaatctggcagacgatatggtgagaaacaccgctagagatctgctgtactacgccgtgacccaggatgccatgctgatcttcgccaacctgagccggggcttcggccggcagggcaagcggaccttcatggccgagagacagtacacacggatggaggactggctgaccgccaagctggcctacgagggcctgagcaagacctacctgtccaagacactggcccagtacacctccaagacatgcagcaactgtgggtttaccatcaccagcgccgactacgacagggtgctggagaagctgaagaagacagcaacaggctggatgaccacaattaacggcaaggagctgaaggtggagggccagattacctactacaacagatacaagagacagaacgtagtcaaggacctgtccgtcgagctggatagactgagcgaagaatctgtgaacaacgacatctcctcctggacaaagggcagaagcggagaagctctgagcctcctgaagaaaagattctcccatagacccgtgcaggagaagttcgtgtgcctgaactgcggcttcgagacacacgcagccgagcaagccgccctgaacatcgccagatcctggctgttcctgcggagccaggagtacaagaaataccagacaaacaagacaaccggcaacaccgataagagagccttcgtcgagacctggcagtccttttaccggaagaagcttaaggaggtgtggaaacctgccgtgcggtctggcggatctggcggaggctccaccagccccaagaaaaagagaaaagtctaagctgccttctgcggggcttgccttctggccatgcccttcttctctcccttgcacctgtacctcttggtctttgaataaagcctgagtaggaaggctagcaaaaaaaaaaaaaaaaaaaaaaaaaaaaaaaaaaaaaaaaaaaaaaaaaaaaaaaaaaaaaaaaaaaaaaaaaaaaaaaagcccagccggctccccaacctctaccgaggagggcacctctgagtccgccacccccgagagcggccctggcacctccaccgagcccagcgagggcagcgcacccggcagccctgccggcagccccacctccacagaggagggaaccagcaccgagcccagcgaaggcagcgccccaggcaccagcaccgagcctagtgagcaggagattaaacggatcaacaagatcagaagaagacttgtgaaagacagcaacaccaagaaggccggcaagacaggccccatgaaaaccctgctggttagagtgatgacacccgatctgagagagcggctggaaaacctgagaaagaagcctgaaaatatcccccagcccatcagcaatacatctagagccaacctgaataagctgctgaccgattacaccgaaatgaagaaggcgatcctgcatgtgtactgggaagagttccagaaggaccctgtgggcctgatgagccgggtggcccagcctgccagcaagaagatcgatcagaacaagctgaaacctgagatggacgagaagggcaacctgaccaccgccggctttgcctgctctcagtgtggccagcccctgttcgtgtacaagctggagcaggtgtctgagaagggcaaggcttacaccaactacttcggacggtgcaatgtggccgagcacgaaaagctgatcctgctggcccagctgaagcccgagaaggatagcgacgaagccgtgacatatagcctgggaaagtttgggcagagggccctggatttctacagcattcatgtgaccaaggagtccacccaccccgtgaagcccctggcccagatcgccggaaacagatacgcctccggacctgtgggaaaggccctgagcgacgcatgtatgggcacaatcgcctccttcctgtctaagtaccaggacatcatcatcgaacaccagaaggtggtgaagggcaaccagaagagactggagagcctgcgggagctggccggcaaggaaaacctggaataccctagcgtgaccctgccacctcagcctcacaccaaggagggcgttgatgcctacaacgaagtgatcgcccgggtgcgaatgtgggtgaacctgaacctgtggcagaagctgaagctaagcagagatgatgccaagcctctgctgagactgaagggattcccttcctttcctctggtcgagagacaggccaacgaagtggactggtgggacatggtgtgtaacgtgaagaagctgatcaacgagaaaaaggaggatggcaaggtgttttggcagaatctggctggctacaagagacaggaagccctgagaccatacctgagcagcgaggaagatcggaagaagggaaagaaattcgctcggtaccagctgggcgacctgctgctgcacctggaaaagaagcacggcgaggactggggaaaggtgtacgacgaggcctgggagcggattgacaagaaagtggaaggcctgagcaagcacatcaagctggaagaggaacggagaagcgaggacgcccagagcaaggccgccctgaccgactggctgcgggctaaggccagcttcgtgatcgagggcctgaaggaggccgacaaggacgagttctgcagatgcgagctgaagctgcagaagtggtacggggacctgcggggaaagcccttcgccatcgaagccgagaacagcatcctggacatcagcggcttcagcaagcagtacaactgtgccttcatctggcagaaggacggcgtgaagaagctgaacctgtacctgatcatcaactacttcaagggcggcaagctgcggttcaagaagatcaaacctgaagccttcgaagccaacagattctacaccgtgatcaacaaaaagagcggcgagatcgtgcccatggaggtgaacttcaacttcgacgaccccaacctgatcatcctgcctctggcctttggcaagagacagggcagagaattcatctggaacgacctgctgtccctggaaaccggcagcctgaagctggccaacggaagagtgatcgagaagacactgtacaacagaagaacccggcaggatgagcctgccctgttcgtggccctgaccttcgagcggcgggaggtcctggactcctccaatatcaaaccaatgaacctgatcggcgtggcaagaggcgaaaacatccccgccgtgatcgccctgaccgaccccgagggctgcccactgagccggtttaaggatagcctgggaaacccaacccacatcctgagaatcggcgagagctataaggagaagcagcggaccatccaggccaagaaggaggtggagcagcggagagccggcggctacagccggaagtacgccagcaaagccaagaatctggcagacgatatggtgagaaacaccgctagagatctgctgtactacgccgtgacccaggatgccatgctgatcttcgccaacctgagccggggcttcggccggcagggcaagcggaccttcatggccgagagacagtacacacggatggaggactggctgaccgccaagctggcctacgagggcctgagcaagacctacctgtccaagacactggcccagtacacctccaagacatgcagcaactgtgggtttaccatcaccagcgccgactacgacagggtgctggagaagctgaagaagacagcaacaggctggatgaccacaattaacggcaaggagctgaaggtggagggccagattacctactacaacagatacaagagacagaacgtagtcaaggacctgtccgtcgagctggatagactgagcgaagaatctgtgaacaacgacatctcctcctggacaaagggcagaagcggagaagctctgagcctcctgaagaaaagattctcccatagacccgtgcaggagaagttcgtgtgcctgaactgcggcttcgagacacacgcagccgagcaagccgccctgaacatcgccagatcctggctgttcctgcggagccaggagtacaagaaataccagacaaacaagacaaccggcaacaccgataagagagccttcgtcgagacctggcagtccttttaccggaagaagcttaaggaggtgtggaaacctgccgtgcggtctggcggatctggcggaggctccaccagccccaagaaaaagagaaaagtctaagctgccttctgcggggcttgccttctggccatgcccttcttctctcccttgcacctgtacctcttggtctttgaataaagcctgagtaggaaggctagcaaaaaaaaaaaaaaaaaaaaaaaaaaaaaaaaaaaaaaaaaaaaaaaaaaaaaaaaaaaaaaaaaaaaaaaaaaaaaaaa

SEQ ID NO: 9998 - RNA, 8787 nt, synthetic construct
  source 1..8787: mol_type = other RNA
aggaaataagagagaaaagaagagtaagaagaaatataagagccaccatggcccctaagaagaagcgtaaagtgagccggatgaaccacgaccaggagttcgacccccctaaggtgtaccctcccgtccccgccgagaagagaaagcccatccgggtcctgagcctgttcgatggcatcgccaccggtctgctggtgctgaaggacctgggcatccaggtggataggtacattgcctccgaggtgtgcgaggactccatcaccgtgggaatggtgcgtcatcagggcaagatcatgtacgtgggcgacgtgcggagcgtgacacagaagcatatccaggagtggggccctttcgacctggtgatcggcggcagcccttgcaatgacctgagcatcgtgaacccagcccggaagggcctgtacgagggaaccggcagactgttcttcgagttttacagactgctgcacgacgcccggcctaaggaaggcgacgaccggcccttcttttggctgttcgagaatgtggtggccatgggagtcagcgacaagcgggatattagccggttcctggagagcaaccccgtgatgatcgatgccaaggaagtgagcgccgcccaccgggccagatacttctggggcaatctgcctggcatgaacagacccctggccagcaccgtgaacgacaagctggagctgcaggagtgcctggagcacggccggatcgccaagttcagcaaggtgagaaccatcaccacccgaagcaacagcatcaaacaaggcaaggaccagcactttcctgtgttcatgaacgagaaggaggacatcctgtggtgtaccgagatggagagagtgttcgggttcccagtccactacacagatgtcagcaacatgtctagactggccagacagagactgctgggaagaagctggtccgtccctgtgatcagacacctgttcgcccctctgaaggagtacttcgcctgcgtgagcagcggcaacagcaacgccaacagccggggccccagcttctctagcggcctggtgccactgtccctgagagggagccacatgggccccatggagatctacaaaaccgtgagcgcctggaagcggcagcctgtgcgcgtgctgagcctgtttcggaatatcgataaagtcctgaaaagcctgggattcctggagagcggctctggctccggcggtggcaccctgaagtacgtggaggatgtgacaaacgtggtcagacgggatgtggagaagtggggccccttcgatctggtgtacggcagcacccaacccctgggcagctcttgtgaccggtgccctggctggtacatgtttcagttccaccggatcctgcagtacgccctgccgagacaggagtcccagcggccattcttttggattttcatggacaacttgctgctgaccgaggatgaccaggaaactaccactcggttcctgcagaccgaagccgtgaccctgcaggacgtgagaggccgggactaccagaacgccatgcgggtgtggtccaacatccctggactgaaaagcaagcacgcacctctgacccctaaagaagaggagtacctgcaggcccaggtgcggagcagaagcaagctggacgcccctaaggtggatctgctggtgaagaattgcctcctgcccctgagagagtacttcaagtatttcagccagaatagtctgcccctgggaggcagcggcggcggcatgaacggcatgacctacgacgacgtgcacgtgaacttcaccggcgaggagtgggccctgctgagccccagccagaagaggctgtacaaggacgtgatgctggagacctacaggaacctgaccgccatcggctacagctgggaggacaggaacatcgaggagcacttccagaggagcaggaggcacggcaggcacgagaggagccacaccggcgagaaccccagcgtgtacacccagtgcaacggcggcccaagcagcggcgcccctcctcccagcggcggcaggcggcccaagcagcggcgcccctcctcccagcggcggcagcccagccggctccccaacctctaccgaggagggcacctctgagtccgccacccccgagagcggccctggcacctccaccgagcccagcgagggcagcgcacccggcagccctgccggcagccccacctccacagaggagggaaccagcaccgagcccagcgaaggcagcgccccaggcaccagcaccgagcctagtgagcaggagattaaacggatcaacaagatcagaagaagacttgtgaaagacagcaacaccaagaaggccggcaagacaggccccatgaaaaccctgctggttagagtgatgacacccgatctgagagagcggctggaaaacctgagaaagaagcctgaaaatatcccccagcccatcagcaatacatctagagccaacctgaataagctgctgaccgattacaccgaaatgaagaaggcgatcctgcatgtgtactgggaagagttccagaaggaccctgtgggcctgatgagccgggtggcccagcctgccagcaagaagatcgatcagaacaagctgaaacctgagatggacgagaagggcaacctgaccaccgccggctttgcctgctctcagtgtggccagcccctgttcgtgtacaagctggagcaggtgtctgagaagggcaaggcttacaccaactacttcggacggtgcaatgtggccgagcacgaaaagctgatcctgctggcccagctgaagcccgagaaggatagcgacgaagccgtgacatatagcctgggaaagtttgggcagagggccctggatttctacagcattcatgtgaccaaggagtccacccaccccgtgaagcccctggcccagatcgccggaaacagatacgcctccggacctgtgggaaaggccctgagcgacgcatgtatgggcacaatcgcctccttcctgtctaagtaccaggacatcatcatcgaacaccagaaggtggtgaagggcaaccagaagagactggagagcctgcgggagctggccggcaaggaaaacctggaataccctagcgtgaccctgccacctcagcctcacaccaaggagggcgttgatgcctacaacgaagtgatcgcccgggtgcgaatgtgggtgaacctgaacctgtggcagaagctgaagctaagcagagatgatgccaagcctctgctgagactgaagggattcccttcctttcctctggtcgagagacaggccaacgaagtggactggtgggacatggtgtgtaacgtgaagaagctgatcaacgagaaaaaggaggatggcaaggtgttttggcagaatctggctggctacaagagacaggaagccctgagaccatacctgagcagcgaggaagatcggaagaagggaaagaaattcgctcggtaccagctgggcgacctgctgctgcacctggaaaagaagcacggcgaggactggggaaaggtgtacgacgaggcctgggagcggattgacaagaaagtggaaggcctgagcaagcacatcaagctggaagaggaacggagaagcgaggacgcccagagcaaggccgccctgaccgactggctgcgggctaaggccagcttcgtgatcgagggcctgaaggaggccgacaaggacgagttctgcagatgcgagctgaagctgcagaagtggtacggggacctgcggggaaagcccttcgccatcgaagccgagaacagcatcctggacatcagcggcttcagcaagcagtacaactgtgccttcatctggcagaaggacggcgtgaagaagctgaacctgtacctgatcatcaactacttcaagggcggcaagctgcggttcaagaagatcaaacctgaagccttcgaagccaacagattctacaccgtgatcaacaaaaagagcggcgagatcgtgcccatggaggtgaacttcaacttcgacgaccccaacctgatcatcctgcctctggcctttggcaagagacagggcagagaattcatctggaacgacctgctgtccctggaaaccggcagcctgaagctggccaacggaagagtgatcgagaagacactgtacaacagaagaacccggcaggatgagcctgccctgttcgtggccctgaccttcgagcggcgggaggtcctggactcctccaatatcaaaccaatgaacctgatcggcgtggcaagaggcgaaaacatccccgccgtgatcgccctgaccgaccccgagggctgcccactgagccggtttaaggatagcctgggaaacccaacccacatcctgagaatcggcgagagctataaggagaagcagcggaccatccaggccaagaaggaggtggagcagcggagagccggcggctacagccggaagtacgccagcaaagccaagaatctggcagacgatatggtgagaaacaccgctagagatctgctgtactacgccgtgacccaggatgccatgctgatcttcgccaacctgagccggggcttcggccggcagggcaagcggaccttcatggccgagagacagtacacacggatggaggactggctgaccgccaagctggcctacgagggcctgagcaagacctacctgtccaagacactggcccagtacacctccaagacatgcagcaactgtgggtttaccatcaccagcgccgactacgacagggtgctggagaagctgaagaagacagcaacaggctggatgaccacaattaacggcaaggagctgaaggtggagggccagattacctactacaacagatacaagagacagaacgtagtcaaggacctgtccgtcgagctggatagactgagcgaagaatctgtgaacaacgacatctcctcctggacaaagggcagaagcggagaagctctgagcctcctgaagaaaagattctcccatagacccgtgcaggagaagttcgtgtgcctgaactgcggcttcgagacacacgcagccgagcaagccgccctgaacatcgccagatcctggctgttcctgcggagccaggagtacaagaaataccagacaaacaagacaaccggcaacaccgataagagagccttcgtcgagacctggcagtccttttaccggaagaagcttaaggaggtgtggaaacctgccgtgcggtctggcggatctggcggaggctccaccagccccaagaaaaagagaaaagtctaagctgccttctgcggggcttgccttctggccatgcccttcttctctcccttgcacctgtacctcttggtctttgaataaagcctgagtaggaaggctagcaaaaaaaaaaaaaaaaaaaaaaaaaaaaaaaaaaaaaaaaaaaaaaaaaaaaaaaaaaaaaaaaaaaaaaaaaaaaaaaagcccagccggctccccaacctctaccgaggagggcacctctgagtccgccacccccgagagcggccctggcacctccaccgagcccagcgagggcagcgcacccggcagccctgccggcagccccacctccacagaggagggaaccagcaccgagcccagcgaaggcagcgccccaggcaccagcaccgagcctagtgagcaggagattaaacggatcaacaagatcagaagaagacttgtgaaagacagcaacaccaagaaggccggcaagacaggccccatgaaaaccctgctggttagagtgatgacacccgatctgagagagcggctggaaaacctgagaaagaagcctgaaaatatcccccagcccatcagcaatacatctagagccaacctgaataagctgctgaccgattacaccgaaatgaagaaggcgatcctgcatgtgtactgggaagagttccagaaggaccctgtgggcctgatgagccgggtggcccagcctgccagcaagaagatcgatcagaacaagctgaaacctgagatggacgagaagggcaacctgaccaccgccggctttgcctgctctcagtgtggccagcccctgttcgtgtacaagctggagcaggtgtctgagaagggcaaggcttacaccaactacttcggacggtgcaatgtggccgagcacgaaaagctgatcctgctggcccagctgaagcccgagaaggatagcgacgaagccgtgacatatagcctgggaaagtttgggcagagggccctggatttctacagcattcatgtgaccaaggagtccacccaccccgtgaagcccctggcccagatcgccggaaacagatacgcctccggacctgtgggaaaggccctgagcgacgcatgtatgggcacaatcgcctccttcctgtctaagtaccaggacatcatcatcgaacaccagaaggtggtgaagggcaaccagaagagactggagagcctgcgggagctggccggcaaggaaaacctggaataccctagcgtgaccctgccacctcagcctcacaccaaggagggcgttgatgcctacaacgaagtgatcgcccgggtgcgaatgtgggtgaacctgaacctgtggcagaagctgaagctaagcagagatgatgccaagcctctgctgagactgaagggattcccttcctttcctctggtcgagagacaggccaacgaagtggactggtgggacatggtgtgtaacgtgaagaagctgatcaacgagaaaaaggaggatggcaaggtgttttggcagaatctggctggctacaagagacaggaagccctgagaccatacctgagcagcgaggaagatcggaagaagggaaagaaattcgctcggtaccagctgggcgacctgctgctgcacctggaaaagaagcacggcgaggactggggaaaggtgtacgacgaggcctgggagcggattgacaagaaagtggaaggcctgagcaagcacatcaagctggaagaggaacggagaagcgaggacgcccagagcaaggccgccctgaccgactggctgcgggctaaggccagcttcgtgatcgagggcctgaaggaggccgacaaggacgagttctgcagatgcgagctgaagctgcagaagtggtacggggacctgcggggaaagcccttcgccatcgaagccgagaacagcatcctggacatcagcggcttcagcaagcagtacaactgtgccttcatctggcagaaggacggcgtgaagaagctgaacctgtacctgatcatcaactacttcaagggcggcaagctgcggttcaagaagatcaaacctgaagccttcgaagccaacagattctacaccgtgatcaacaaaaagagcggcgagatcgtgcccatggaggtgaacttcaacttcgacgaccccaacctgatcatcctgcctctggcctttggcaagagacagggcagagaattcatctggaacgacctgctgtccctggaaaccggcagcctgaagctggccaacggaagagtgatcgagaagacactgtacaacagaagaacccggcaggatgagcctgccctgttcgtggccctgaccttcgagcggcgggaggtcctggactcctccaatatcaaaccaatgaacctgatcggcgtggcaagaggcgaaaacatccccgccgtgatcgccctgaccgaccccgagggctgcccactgagccggtttaaggatagcctgggaaacccaacccacatcctgagaatcggcgagagctataaggagaagcagcggaccatccaggccaagaaggaggtggagcagcggagagccggcggctacagccggaagtacgccagcaaagccaagaatctggcagacgatatggtgagaaacaccgctagagatctgctgtactacgccgtgacccaggatgccatgctgatcttcgccaacctgagccggggcttcggccggcagggcaagcggaccttcatggccgagagacagtacacacggatggaggactggctgaccgccaagctggcctacgagggcctgagcaagacctacctgtccaagacactggcccagtacacctccaagacatgcagcaactgtgggtttaccatcaccagcgccgactacgacagggtgctggagaagctgaagaagacagcaacaggctggatgaccacaattaacggcaaggagctgaaggtggagggccagattacctactacaacagatacaagagacagaacgtagtcaaggacctgtccgtcgagctggatagactgagcgaagaatctgtgaacaacgacatctcctcctggacaaagggcagaagcggagaagctctgagcctcctgaagaaaagattctcccatagacccgtgcaggagaagttcgtgtgcctgaactgcggcttcgagacacacgcagccgagcaagccgccctgaacatcgccagatcctggctgttcctgcggagccaggagtacaagaaataccagacaaacaagacaaccggcaacaccgataagagagccttcgtcgagacctggcagtccttttaccggaagaagcttaaggaggtgtggaaacctgccgtgcggtctggcggatctggcggaggctccaccagccccaagaaaaagagaaaagtctaagctgccttctgcggggcttgccttctggccatgcccttcttctctcccttgcacctgtacctcttggtctttgaataaagcctgagtaggaaggctagcaaaaaaaaaaaaaaaaaaaaaaaaaaaaaaaaaaaaaaaaaaaaaaaaaaaaaaaaaaaaaaaaaaaaaaaaaaaaaaaa

SEQ ID NO: 9999 - RNA, 8787 nt, synthetic construct
  source 1..8787: mol_type = other RNA
aggaaataagagagaaaagaagagtaagaagaaatataagagccaccatggcccctaagaagaagcgtaaagtgagccggatgaaccacgaccaggagttcgacccccctaaggtgtaccctcccgtccccgccgagaagagaaagcccatccgggtcctgagcctgttcgatggcatcgccaccggtctgctggtgctgaaggacctgggcatccaggtggataggtacattgcctccgaggtgtgcgaggactccatcaccgtgggaatggtgcgtcatcagggcaagatcatgtacgtgggcgacgtgcggagcgtgacacagaagcatatccaggagtggggccctttcgacctggtgatcggcggcagcccttgcaatgacctgagcatcgtgaacccagcccggaagggcctgtacgagggaaccggcagactgttcttcgagttttacagactgctgcacgacgcccggcctaaggaaggcgacgaccggcccttcttttggctgttcgagaatgtggtggccatgggagtcagcgacaagcgggatattagccggttcctggagagcaaccccgtgatgatcgatgccaaggaagtgagcgccgcccaccgggccagatacttctggggcaatctgcctggcatgaacagacccctggccagcaccgtgaacgacaagctggagctgcaggagtgcctggagcacggccggatcgccaagttcagcaaggtgagaaccatcaccacccgaagcaacagcatcaaacaaggcaaggaccagcactttcctgtgttcatgaacgagaaggaggacatcctgtggtgtaccgagatggagagagtgttcgggttcccagtccactacacagatgtcagcaacatgtctagactggccagacagagactgctgggaagaagctggtccgtccctgtgatcagacacctgttcgcccctctgaaggagtacttcgcctgcgtgagcagcggcaacagcaacgccaacagccggggccccagcttctctagcggcctggtgccactgtccctgagagggagccacatgggccccatggagatctacaaaaccgtgagcgcctggaagcggcagcctgtgcgcgtgctgagcctgtttcggaatatcgataaagtcctgaaaagcctgggattcctggagagcggctctggctccggcggtggcaccctgaagtacgtggaggatgtgacaaacgtggtcagacgggatgtggagaagtggggccccttcgatctggtgtacggcagcacccaacccctgggcagctcttgtgaccggtgccctggctggtacatgtttcagttccaccggatcctgcagtacgccctgccgagacaggagtcccagcggccattcttttggattttcatggacaacttgctgctgaccgaggatgaccaggaaactaccactcggttcctgcagaccgaagccgtgaccctgcaggacgtgagaggccgggactaccagaacgccatgcgggtgtggtccaacatccctggactgaaaagcaagcacgcacctctgacccctaaagaagaggagtacctgcaggcccaggtgcggagcagaagcaagctggacgcccctaaggtggatctgctggtgaagaattgcctcctgcccctgagagagtacttcaagtatttcagccagaatagtctgcccctgggaggcagcggcggcggcgcccaggagagcgtgaccttcgaggacgtggccgtgaacttcaccgacagggagtggcagtgcctgacctacgcccagaggcacctgtacaaggacgtgatgctggagaactacggcaacatggtgagcgtgggcttcctgttccccaagccccccctgatcagccacctggagaggggcgtggagccctgcgtgcaggacccccaggacagggagagcctgagctgcagctgcctggtgagcggcggcccaagcagcggcgcccctcctcccagcggcggcaggcggcccaagcagcggcgcccctcctcccagcggcggcagcccagccggctccccaacctctaccgaggagggcacctctgagtccgccacccccgagagcggccctggcacctccaccgagcccagcgagggcagcgcacccggcagccctgccggcagccccacctccacagaggagggaaccagcaccgagcccagcgaaggcagcgccccaggcaccagcaccgagcctagtgagcaggagattaaacggatcaacaagatcagaagaagacttgtgaaagacagcaacaccaagaaggccggcaagacaggccccatgaaaaccctgctggttagagtgatgacacccgatctgagagagcggctggaaaacctgagaaagaagcctgaaaatatcccccagcccatcagcaatacatctagagccaacctgaataagctgctgaccgattacaccgaaatgaagaaggcgatcctgcatgtgtactgggaagagttccagaaggaccctgtgggcctgatgagccgggtggcccagcctgccagcaagaagatcgatcagaacaagctgaaacctgagatggacgagaagggcaacctgaccaccgccggctttgcctgctctcagtgtggccagcccctgttcgtgtacaagctggagcaggtgtctgagaagggcaaggcttacaccaactacttcggacggtgcaatgtggccgagcacgaaaagctgatcctgctggcccagctgaagcccgagaaggatagcgacgaagccgtgacatatagcctgggaaagtttgggcagagggccctggatttctacagcattcatgtgaccaaggagtccacccaccccgtgaagcccctggcccagatcgccggaaacagatacgcctccggacctgtgggaaaggccctgagcgacgcatgtatgggcacaatcgcctccttcctgtctaagtaccaggacatcatcatcgaacaccagaaggtggtgaagggcaaccagaagagactggagagcctgcgggagctggccggcaaggaaaacctggaataccctagcgtgaccctgccacctcagcctcacaccaaggagggcgttgatgcctacaacgaagtgatcgcccgggtgcgaatgtgggtgaacctgaacctgtggcagaagctgaagctaagcagagatgatgccaagcctctgctgagactgaagggattcccttcctttcctctggtcgagagacaggccaacgaagtggactggtgggacatggtgtgtaacgtgaagaagctgatcaacgagaaaaaggaggatggcaaggtgttttggcagaatctggctggctacaagagacaggaagccctgagaccatacctgagcagcgaggaagatcggaagaagggaaagaaattcgctcggtaccagctgggcgacctgctgctgcacctggaaaagaagcacggcgaggactggggaaaggtgtacgacgaggcctgggagcggattgacaagaaagtggaaggcctgagcaagcacatcaagctggaagaggaacggagaagcgaggacgcccagagcaaggccgccctgaccgactggctgcgggctaaggccagcttcgtgatcgagggcctgaaggaggccgacaaggacgagttctgcagatgcgagctgaagctgcagaagtggtacggggacctgcggggaaagcccttcgccatcgaagccgagaacagcatcctggacatcagcggcttcagcaagcagtacaactgtgccttcatctggcagaaggacggcgtgaagaagctgaacctgtacctgatcatcaactacttcaagggcggcaagctgcggttcaagaagatcaaacctgaagccttcgaagccaacagattctacaccgtgatcaacaaaaagagcggcgagatcgtgcccatggaggtgaacttcaacttcgacgaccccaacctgatcatcctgcctctggcctttggcaagagacagggcagagaattcatctggaacgacctgctgtccctggaaaccggcagcctgaagctggccaacggaagagtgatcgagaagacactgtacaacagaagaacccggcaggatgagcctgccctgttcgtggccctgaccttcgagcggcgggaggtcctggactcctccaatatcaaaccaatgaacctgatcggcgtggcaagaggcgaaaacatccccgccgtgatcgccctgaccgaccccgagggctgcccactgagccggtttaaggatagcctgggaaacccaacccacatcctgagaatcggcgagagctataaggagaagcagcggaccatccaggccaagaaggaggtggagcagcggagagccggcggctacagccggaagtacgccagcaaagccaagaatctggcagacgatatggtgagaaacaccgctagagatctgctgtactacgccgtgacccaggatgccatgctgatcttcgccaacctgagccggggcttcggccggcagggcaagcggaccttcatggccgagagacagtacacacggatggaggactggctgaccgccaagctggcctacgagggcctgagcaagacctacctgtccaagacactggcccagtacacctccaagacatgcagcaactgtgggtttaccatcaccagcgccgactacgacagggtgctggagaagctgaagaagacagcaacaggctggatgaccacaattaacggcaaggagctgaaggtggagggccagattacctactacaacagatacaagagacagaacgtagtcaaggacctgtccgtcgagctggatagactgagcgaagaatctgtgaacaacgacatctcctcctggacaaagggcagaagcggagaagctctgagcctcctgaagaaaagattctcccatagacccgtgcaggagaagttcgtgtgcctgaactgcggcttcgagacacacgcagccgagcaagccgccctgaacatcgccagatcctggctgttcctgcggagccaggagtacaagaaataccagacaaacaagacaaccggcaacaccgataagagagccttcgtcgagacctggcagtccttttaccggaagaagcttaaggaggtgtggaaacctgccgtgcggtctggcggatctggcggaggctccaccagccccaagaaaaagagaaaagtctaagctgccttctgcggggcttgccttctggccatgcccttcttctctcccttgcacctgtacctcttggtctttgaataaagcctgagtaggaaggctagcaaaaaaaaaaaaaaaaaaaaaaaaaaaaaaaaaaaaaaaaaaaaaaaaaaaaaaaaaaaaaaaaaaaaaaaaaaaaaaaagcccagccggctccccaacctctaccgaggagggcacctctgagtccgccacccccgagagcggccctggcacctccaccgagcccagcgagggcagcgcacccggcagccctgccggcagccccacctccacagaggagggaaccagcaccgagcccagcgaaggcagcgccccaggcaccagcaccgagcctagtgagcaggagattaaacggatcaacaagatcagaagaagacttgtgaaagacagcaacaccaagaaggccggcaagacaggccccatgaaaaccctgctggttagagtgatgacacccgatctgagagagcggctggaaaacctgagaaagaagcctgaaaatatcccccagcccatcagcaatacatctagagccaacctgaataagctgctgaccgattacaccgaaatgaagaaggcgatcctgcatgtgtactgggaagagttccagaaggaccctgtgggcctgatgagccgggtggcccagcctgccagcaagaagatcgatcagaacaagctgaaacctgagatggacgagaagggcaacctgaccaccgccggctttgcctgctctcagtgtggccagcccctgttcgtgtacaagctggagcaggtgtctgagaagggcaaggcttacaccaactacttcggacggtgcaatgtggccgagcacgaaaagctgatcctgctggcccagctgaagcccgagaaggatagcgacgaagccgtgacatatagcctgggaaagtttgggcagagggccctggatttctacagcattcatgtgaccaaggagtccacccaccccgtgaagcccctggcccagatcgccggaaacagatacgcctccggacctgtgggaaaggccctgagcgacgcatgtatgggcacaatcgcctccttcctgtctaagtaccaggacatcatcatcgaacaccagaaggtggtgaagggcaaccagaagagactggagagcctgcgggagctggccggcaaggaaaacctggaataccctagcgtgaccctgccacctcagcctcacaccaaggagggcgttgatgcctacaacgaagtgatcgcccgggtgcgaatgtgggtgaacctgaacctgtggcagaagctgaagctaagcagagatgatgccaagcctctgctgagactgaagggattcccttcctttcctctggtcgagagacaggccaacgaagtggactggtgggacatggtgtgtaacgtgaagaagctgatcaacgagaaaaaggaggatggcaaggtgttttggcagaatctggctggctacaagagacaggaagccctgagaccatacctgagcagcgaggaagatcggaagaagggaaagaaattcgctcggtaccagctgggcgacctgctgctgcacctggaaaagaagcacggcgaggactggggaaaggtgtacgacgaggcctgggagcggattgacaagaaagtggaaggcctgagcaagcacatcaagctggaagaggaacggagaagcgaggacgcccagagcaaggccgccctgaccgactggctgcgggctaaggccagcttcgtgatcgagggcctgaaggaggccgacaaggacgagttctgcagatgcgagctgaagctgcagaagtggtacggggacctgcggggaaagcccttcgccatcgaagccgagaacagcatcctggacatcagcggcttcagcaagcagtacaactgtgccttcatctggcagaaggacggcgtgaagaagctgaacctgtacctgatcatcaactacttcaagggcggcaagctgcggttcaagaagatcaaacctgaagccttcgaagccaacagattctacaccgtgatcaacaaaaagagcggcgagatcgtgcccatggaggtgaacttcaacttcgacgaccccaacctgatcatcctgcctctggcctttggcaagagacagggcagagaattcatctggaacgacctgctgtccctggaaaccggcagcctgaagctggccaacggaagagtgatcgagaagacactgtacaacagaagaacccggcaggatgagcctgccctgttcgtggccctgaccttcgagcggcgggaggtcctggactcctccaatatcaaaccaatgaacctgatcggcgtggcaagaggcgaaaacatccccgccgtgatcgccctgaccgaccccgagggctgcccactgagccggtttaaggatagcctgggaaacccaacccacatcctgagaatcggcgagagctataaggagaagcagcggaccatccaggccaagaaggaggtggagcagcggagagccggcggctacagccggaagtacgccagcaaagccaagaatctggcagacgatatggtgagaaacaccgctagagatctgctgtactacgccgtgacccaggatgccatgctgatcttcgccaacctgagccggggcttcggccggcagggcaagcggaccttcatggccgagagacagtacacacggatggaggactggctgaccgccaagctggcctacgagggcctgagcaagacctacctgtccaagacactggcccagtacacctccaagacatgcagcaactgtgggtttaccatcaccagcgccgactacgacagggtgctggagaagctgaagaagacagcaacaggctggatgaccacaattaacggcaaggagctgaaggtggagggccagattacctactacaacagatacaagagacagaacgtagtcaaggacctgtccgtcgagctggatagactgagcgaagaatctgtgaacaacgacatctcctcctggacaaagggcagaagcggagaagctctgagcctcctgaagaaaagattctcccatagacccgtgcaggagaagttcgtgtgcctgaactgcggcttcgagacacacgcagccgagcaagccgccctgaacatcgccagatcctggctgttcctgcggagccaggagtacaagaaataccagacaaacaagacaaccggcaacaccgataagagagccttcgtcgagacctggcagtccttttaccggaagaagcttaaggaggtgtggaaacctgccgtgcggtctggcggatctggcggaggctccaccagccccaagaaaaagagaaaagtctaagctgccttctgcggggcttgccttctggccatgcccttcttctctcccttgcacctgtacctcttggtctttgaataaagcctgagtaggaaggctagcaaaaaaaaaaaaaaaaaaaaaaaaaaaaaaaaaaaaaaaaaaaaaaaaaaaaaaaaaaaaaaaaaaaaaaaaaaaaaaaa

SEQ ID NO: 10000 - RNA, 8787 nt, synthetic construct
  source 1..8787: mol_type = other RNA
aggaaataagagagaaaagaagagtaagaagaaatataagagccaccatggcccctaagaagaagcgtaaagtgagccggatgaaccacgaccaggagttcgacccccctaaggtgtaccctcccgtccccgccgagaagagaaagcccatccgggtcctgagcctgttcgatggcatcgccaccggtctgctggtgctgaaggacctgggcatccaggtggataggtacattgcctccgaggtgtgcgaggactccatcaccgtgggaatggtgcgtcatcagggcaagatcatgtacgtgggcgacgtgcggagcgtgacacagaagcatatccaggagtggggccctttcgacctggtgatcggcggcagcccttgcaatgacctgagcatcgtgaacccagcccggaagggcctgtacgagggaaccggcagactgttcttcgagttttacagactgctgcacgacgcccggcctaaggaaggcgacgaccggcccttcttttggctgttcgagaatgtggtggccatgggagtcagcgacaagcgggatattagccggttcctggagagcaaccccgtgatgatcgatgccaaggaagtgagcgccgcccaccgggccagatacttctggggcaatctgcctggcatgaacagacccctggccagcaccgtgaacgacaagctggagctgcaggagtgcctggagcacggccggatcgccaagttcagcaaggtgagaaccatcaccacccgaagcaacagcatcaaacaaggcaaggaccagcactttcctgtgttcatgaacgagaaggaggacatcctgtggtgtaccgagatggagagagtgttcgggttcccagtccactacacagatgtcagcaacatgtctagactggccagacagagactgctgggaagaagctggtccgtccctgtgatcagacacctgttcgcccctctgaaggagtacttcgcctgcgtgagcagcggcaacagcaacgccaacagccggggccccagcttctctagcggcctggtgccactgtccctgagagggagccacatgggccccatggagatctacaaaaccgtgagcgcctggaagcggcagcctgtgcgcgtgctgagcctgtttcggaatatcgataaagtcctgaaaagcctgggattcctggagagcggctctggctccggcggtggcaccctgaagtacgtggaggatgtgacaaacgtggtcagacgggatgtggagaagtggggccccttcgatctggtgtacggcagcacccaacccctgggcagctcttgtgaccggtgccctggctggtacatgtttcagttccaccggatcctgcagtacgccctgccgagacaggagtcccagcggccattcttttggattttcatggacaacttgctgctgaccgaggatgaccaggaaactaccactcggttcctgcagaccgaagccgtgaccctgcaggacgtgagaggccgggactaccagaacgccatgcgggtgtggtccaacatccctggactgaaaagcaagcacgcacctctgacccctaaagaagaggagtacctgcaggcccaggtgcggagcagaagcaagctggacgcccctaaggtggatctgctggtgaagaattgcctcctgcccctgagagagtacttcaagtatttcagccagaatagtctgcccctgggaggcagcggcggcggcagccagagcctggtgaccttcggcgacgtggccatcaacttcagccaggaggagtgggagtggctgaacagcgcccagaggaacctgtacaggagcgtgatgctggagaactacaggaacctggtgagcctgggcctgtgcgtgagcaagcccgacatgatcagcagcctggagcagaggaaggagccctggatggtgaagaggaagctgaccaggggcaggtgccccgacctgaaggccgtgggcggcccaagcagcggcgcccctcctcccagcggcggcaggcggcccaagcagcggcgcccctcctcccagcggcggcagcccagccggctccccaacctctaccgaggagggcacctctgagtccgccacccccgagagcggccctggcacctccaccgagcccagcgagggcagcgcacccggcagccctgccggcagccccacctccacagaggagggaaccagcaccgagcccagcgaaggcagcgccccaggcaccagcaccgagcctagtgagcaggagattaaacggatcaacaagatcagaagaagacttgtgaaagacagcaacaccaagaaggccggcaagacaggccccatgaaaaccctgctggttagagtgatgacacccgatctgagagagcggctggaaaacctgagaaagaagcctgaaaatatcccccagcccatcagcaatacatctagagccaacctgaataagctgctgaccgattacaccgaaatgaagaaggcgatcctgcatgtgtactgggaagagttccagaaggaccctgtgggcctgatgagccgggtggcccagcctgccagcaagaagatcgatcagaacaagctgaaacctgagatggacgagaagggcaacctgaccaccgccggctttgcctgctctcagtgtggccagcccctgttcgtgtacaagctggagcaggtgtctgagaagggcaaggcttacaccaactacttcggacggtgcaatgtggccgagcacgaaaagctgatcctgctggcccagctgaagcccgagaaggatagcgacgaagccgtgacatatagcctgggaaagtttgggcagagggccctggatttctacagcattcatgtgaccaaggagtccacccaccccgtgaagcccctggcccagatcgccggaaacagatacgcctccggacctgtgggaaaggccctgagcgacgcatgtatgggcacaatcgcctccttcctgtctaagtaccaggacatcatcatcgaacaccagaaggtggtgaagggcaaccagaagagactggagagcctgcgggagctggccggcaaggaaaacctggaataccctagcgtgaccctgccacctcagcctcacaccaaggagggcgttgatgcctacaacgaagtgatcgcccgggtgcgaatgtgggtgaacctgaacctgtggcagaagctgaagctaagcagagatgatgccaagcctctgctgagactgaagggattcccttcctttcctctggtcgagagacaggccaacgaagtggactggtgggacatggtgtgtaacgtgaagaagctgatcaacgagaaaaaggaggatggcaaggtgttttggcagaatctggctggctacaagagacaggaagccctgagaccatacctgagcagcgaggaagatcggaagaagggaaagaaattcgctcggtaccagctgggcgacctgctgctgcacctggaaaagaagcacggcgaggactggggaaaggtgtacgacgaggcctgggagcggattgacaagaaagtggaaggcctgagcaagcacatcaagctggaagaggaacggagaagcgaggacgcccagagcaaggccgccctgaccgactggctgcgggctaaggccagcttcgtgatcgagggcctgaaggaggccgacaaggacgagttctgcagatgcgagctgaagctgcagaagtggtacggggacctgcggggaaagcccttcgccatcgaagccgagaacagcatcctggacatcagcggcttcagcaagcagtacaactgtgccttcatctggcagaaggacggcgtgaagaagctgaacctgtacctgatcatcaactacttcaagggcggcaagctgcggttcaagaagatcaaacctgaagccttcgaagccaacagattctacaccgtgatcaacaaaaagagcggcgagatcgtgcccatggaggtgaacttcaacttcgacgaccccaacctgatcatcctgcctctggcctttggcaagagacagggcagagaattcatctggaacgacctgctgtccctggaaaccggcagcctgaagctggccaacggaagagtgatcgagaagacactgtacaacagaagaacccggcaggatgagcctgccctgttcgtggccctgaccttcgagcggcgggaggtcctggactcctccaatatcaaaccaatgaacctgatcggcgtggcaagaggcgaaaacatccccgccgtgatcgccctgaccgaccccgagggctgcccactgagccggtttaaggatagcctgggaaacccaacccacatcctgagaatcggcgagagctataaggagaagcagcggaccatccaggccaagaaggaggtggagcagcggagagccggcggctacagccggaagtacgccagcaaagccaagaatctggcagacgatatggtgagaaacaccgctagagatctgctgtactacgccgtgacccaggatgccatgctgatcttcgccaacctgagccggggcttcggccggcagggcaagcggaccttcatggccgagagacagtacacacggatggaggactggctgaccgccaagctggcctacgagggcctgagcaagacctacctgtccaagacactggcccagtacacctccaagacatgcagcaactgtgggtttaccatcaccagcgccgactacgacagggtgctggagaagctgaagaagacagcaacaggctggatgaccacaattaacggcaaggagctgaaggtggagggccagattacctactacaacagatacaagagacagaacgtagtcaaggacctgtccgtcgagctggatagactgagcgaagaatctgtgaacaacgacatctcctcctggacaaagggcagaagcggagaagctctgagcctcctgaagaaaagattctcccatagacccgtgcaggagaagttcgtgtgcctgaactgcggcttcgagacacacgcagccgagcaagccgccctgaacatcgccagatcctggctgttcctgcggagccaggagtacaagaaataccagacaaacaagacaaccggcaacaccgataagagagccttcgtcgagacctggcagtccttttaccggaagaagcttaaggaggtgtggaaacctgccgtgcggtctggcggatctggcggaggctccaccagccccaagaaaaagagaaaagtctaagctgccttctgcggggcttgccttctggccatgcccttcttctctcccttgcacctgtacctcttggtctttgaataaagcctgagtaggaaggctagcaaaaaaaaaaaaaaaaaaaaaaaaaaaaaaaaaaaaaaaaaaaaaaaaaaaaaaaaaaaaaaaaaaaaaaaaaaaaaaaagcccagccggctccccaacctctaccgaggagggcacctctgagtccgccacccccgagagcggccctggcacctccaccgagcccagcgagggcagcgcacccggcagccctgccggcagccccacctccacagaggagggaaccagcaccgagcccagcgaaggcagcgccccaggcaccagcaccgagcctagtgagcaggagattaaacggatcaacaagatcagaagaagacttgtgaaagacagcaacaccaagaaggccggcaagacaggccccatgaaaaccctgctggttagagtgatgacacccgatctgagagagcggctggaaaacctgagaaagaagcctgaaaatatcccccagcccatcagcaatacatctagagccaacctgaataagctgctgaccgattacaccgaaatgaagaaggcgatcctgcatgtgtactgggaagagttccagaaggaccctgtgggcctgatgagccgggtggcccagcctgccagcaagaagatcgatcagaacaagctgaaacctgagatggacgagaagggcaacctgaccaccgccggctttgcctgctctcagtgtggccagcccctgttcgtgtacaagctggagcaggtgtctgagaagggcaaggcttacaccaactacttcggacggtgcaatgtggccgagcacgaaaagctgatcctgctggcccagctgaagcccgagaaggatagcgacgaagccgtgacatatagcctgggaaagtttgggcagagggccctggatttctacagcattcatgtgaccaaggagtccacccaccccgtgaagcccctggcccagatcgccggaaacagatacgcctccggacctgtgggaaaggccctgagcgacgcatgtatgggcacaatcgcctccttcctgtctaagtaccaggacatcatcatcgaacaccagaaggtggtgaagggcaaccagaagagactggagagcctgcgggagctggccggcaaggaaaacctggaataccctagcgtgaccctgccacctcagcctcacaccaaggagggcgttgatgcctacaacgaagtgatcgcccgggtgcgaatgtgggtgaacctgaacctgtggcagaagctgaagctaagcagagatgatgccaagcctctgctgagactgaagggattcccttcctttcctctggtcgagagacaggccaacgaagtggactggtgggacatggtgtgtaacgtgaagaagctgatcaacgagaaaaaggaggatggcaaggtgttttggcagaatctggctggctacaagagacaggaagccctgagaccatacctgagcagcgaggaagatcggaagaagggaaagaaattcgctcggtaccagctgggcgacctgctgctgcacctggaaaagaagcacggcgaggactggggaaaggtgtacgacgaggcctgggagcggattgacaagaaagtggaaggcctgagcaagcacatcaagctggaagaggaacggagaagcgaggacgcccagagcaaggccgccctgaccgactggctgcgggctaaggccagcttcgtgatcgagggcctgaaggaggccgacaaggacgagttctgcagatgcgagctgaagctgcagaagtggtacggggacctgcggggaaagcccttcgccatcgaagccgagaacagcatcctggacatcagcggcttcagcaagcagtacaactgtgccttcatctggcagaaggacggcgtgaagaagctgaacctgtacctgatcatcaactacttcaagggcggcaagctgcggttcaagaagatcaaacctgaagccttcgaagccaacagattctacaccgtgatcaacaaaaagagcggcgagatcgtgcccatggaggtgaacttcaacttcgacgaccccaacctgatcatcctgcctctggcctttggcaagagacagggcagagaattcatctggaacgacctgctgtccctggaaaccggcagcctgaagctggccaacggaagagtgatcgagaagacactgtacaacagaagaacccggcaggatgagcctgccctgttcgtggccctgaccttcgagcggcgggaggtcctggactcctccaatatcaaaccaatgaacctgatcggcgtggcaagaggcgaaaacatccccgccgtgatcgccctgaccgaccccgagggctgcccactgagccggtttaaggatagcctgggaaacccaacccacatcctgagaatcggcgagagctataaggagaagcagcggaccatccaggccaagaaggaggtggagcagcggagagccggcggctacagccggaagtacgccagcaaagccaagaatctggcagacgatatggtgagaaacaccgctagagatctgctgtactacgccgtgacccaggatgccatgctgatcttcgccaacctgagccggggcttcggccggcagggcaagcggaccttcatggccgagagacagtacacacggatggaggactggctgaccgccaagctggcctacgagggcctgagcaagacctacctgtccaagacactggcccagtacacctccaagacatgcagcaactgtgggtttaccatcaccagcgccgactacgacagggtgctggagaagctgaagaagacagcaacaggctggatgaccacaattaacggcaaggagctgaaggtggagggccagattacctactacaacagatacaagagacagaacgtagtcaaggacctgtccgtcgagctggatagactgagcgaagaatctgtgaacaacgacatctcctcctggacaaagggcagaagcggagaagctctgagcctcctgaagaaaagattctcccatagacccgtgcaggagaagttcgtgtgcctgaactgcggcttcgagacacacgcagccgagcaagccgccctgaacatcgccagatcctggctgttcctgcggagccaggagtacaagaaataccagacaaacaagacaaccggcaacaccgataagagagccttcgtcgagacctggcagtccttttaccggaagaagcttaaggaggtgtggaaacctgccgtgcggtctggcggatctggcggaggctccaccagccccaagaaaaagagaaaagtctaagctgccttctgcggggcttgccttctggccatgcccttcttctctcccttgcacctgtacctcttggtctttgaataaagcctgagtaggaaggctagcaaaaaaaaaaaaaaaaaaaaaaaaaaaaaaaaaaaaaaaaaaaaaaaaaaaaaaaaaaaaaaaaaaaaaaaaaaaaaaaa

SEQ ID NO: 10001 - RNA, 8787 nt, synthetic construct
  source 1..8787: mol_type = other RNA
aggaaataagagagaaaagaagagtaagaagaaatataagagccaccatggcccctaagaagaagcgtaaagtgagccggatgaaccacgaccaggagttcgacccccctaaggtgtaccctcccgtccccgccgagaagagaaagcccatccgggtcctgagcctgttcgatggcatcgccaccggtctgctggtgctgaaggacctgggcatccaggtggataggtacattgcctccgaggtgtgcgaggactccatcaccgtgggaatggtgcgtcatcagggcaagatcatgtacgtgggcgacgtgcggagcgtgacacagaagcatatccaggagtggggccctttcgacctggtgatcggcggcagcccttgcaatgacctgagcatcgtgaacccagcccggaagggcctgtacgagggaaccggcagactgttcttcgagttttacagactgctgcacgacgcccggcctaaggaaggcgacgaccggcccttcttttggctgttcgagaatgtggtggccatgggagtcagcgacaagcgggatattagccggttcctggagagcaaccccgtgatgatcgatgccaaggaagtgagcgccgcccaccgggccagatacttctggggcaatctgcctggcatgaacagacccctggccagcaccgtgaacgacaagctggagctgcaggagtgcctggagcacggccggatcgccaagttcagcaaggtgagaaccatcaccacccgaagcaacagcatcaaacaaggcaaggaccagcactttcctgtgttcatgaacgagaaggaggacatcctgtggtgtaccgagatggagagagtgttcgggttcccagtccactacacagatgtcagcaacatgtctagactggccagacagagactgctgggaagaagctggtccgtccctgtgatcagacacctgttcgcccctctgaaggagtacttcgcctgcgtgagcagcggcaacagcaacgccaacagccggggccccagcttctctagcggcctggtgccactgtccctgagagggagccacatgggccccatggagatctacaaaaccgtgagcgcctggaagcggcagcctgtgcgcgtgctgagcctgtttcggaatatcgataaagtcctgaaaagcctgggattcctggagagcggctctggctccggcggtggcaccctgaagtacgtggaggatgtgacaaacgtggtcagacgggatgtggagaagtggggccccttcgatctggtgtacggcagcacccaacccctgggcagctcttgtgaccggtgccctggctggtacatgtttcagttccaccggatcctgcagtacgccctgccgagacaggagtcccagcggccattcttttggattttcatggacaacttgctgctgaccgaggatgaccaggaaactaccactcggttcctgcagaccgaagccgtgaccctgcaggacgtgagaggccgggactaccagaacgccatgcgggtgtggtccaacatccctggactgaaaagcaagcacgcacctctgacccctaaagaagaggagtacctgcaggcccaggtgcggagcagaagcaagctggacgcccctaaggtggatctgctggtgaagaattgcctcctgcccctgagagagtacttcaagtatttcagccagaatagtctgcccctgggaggcagcggcggcggcttccagggcagcgtgaccttcagggacgtggccatcgacttcagccaggaggagtgggagtggctgcagcccgcccagagggacctgtacaggcacgtgatgctggagaactacggccacctggtgagcctgggcctgaacatcagcaagccccacgtggtgagcctgctggagcagggcagggacccctggcccgacaacggcgccgtgggcggcggcctgttcagcgagagcaagggcgagggcggcccaagcagcggcgcccctcctcccagcggcggcaggcggcccaagcagcggcgcccctcctcccagcggcggcagcccagccggctccccaacctctaccgaggagggcacctctgagtccgccacccccgagagcggccctggcacctccaccgagcccagcgagggcagcgcacccggcagccctgccggcagccccacctccacagaggagggaaccagcaccgagcccagcgaaggcagcgccccaggcaccagcaccgagcctagtgagcaggagattaaacggatcaacaagatcagaagaagacttgtgaaagacagcaacaccaagaaggccggcaagacaggccccatgaaaaccctgctggttagagtgatgacacccgatctgagagagcggctggaaaacctgagaaagaagcctgaaaatatcccccagcccatcagcaatacatctagagccaacctgaataagctgctgaccgattacaccgaaatgaagaaggcgatcctgcatgtgtactgggaagagttccagaaggaccctgtgggcctgatgagccgggtggcccagcctgccagcaagaagatcgatcagaacaagctgaaacctgagatggacgagaagggcaacctgaccaccgccggctttgcctgctctcagtgtggccagcccctgttcgtgtacaagctggagcaggtgtctgagaagggcaaggcttacaccaactacttcggacggtgcaatgtggccgagcacgaaaagctgatcctgctggcccagctgaagcccgagaaggatagcgacgaagccgtgacatatagcctgggaaagtttgggcagagggccctggatttctacagcattcatgtgaccaaggagtccacccaccccgtgaagcccctggcccagatcgccggaaacagatacgcctccggacctgtgggaaaggccctgagcgacgcatgtatgggcacaatcgcctccttcctgtctaagtaccaggacatcatcatcgaacaccagaaggtggtgaagggcaaccagaagagactggagagcctgcgggagctggccggcaaggaaaacctggaataccctagcgtgaccctgccacctcagcctcacaccaaggagggcgttgatgcctacaacgaagtgatcgcccgggtgcgaatgtgggtgaacctgaacctgtggcagaagctgaagctaagcagagatgatgccaagcctctgctgagactgaagggattcccttcctttcctctggtcgagagacaggccaacgaagtggactggtgggacatggtgtgtaacgtgaagaagctgatcaacgagaaaaaggaggatggcaaggtgttttggcagaatctggctggctacaagagacaggaagccctgagaccatacctgagcagcgaggaagatcggaagaagggaaagaaattcgctcggtaccagctgggcgacctgctgctgcacctggaaaagaagcacggcgaggactggggaaaggtgtacgacgaggcctgggagcggattgacaagaaagtggaaggcctgagcaagcacatcaagctggaagaggaacggagaagcgaggacgcccagagcaaggccgccctgaccgactggctgcgggctaaggccagcttcgtgatcgagggcctgaaggaggccgacaaggacgagttctgcagatgcgagctgaagctgcagaagtggtacggggacctgcggggaaagcccttcgccatcgaagccgagaacagcatcctggacatcagcggcttcagcaagcagtacaactgtgccttcatctggcagaaggacggcgtgaagaagctgaacctgtacctgatcatcaactacttcaagggcggcaagctgcggttcaagaagatcaaacctgaagccttcgaagccaacagattctacaccgtgatcaacaaaaagagcggcgagatcgtgcccatggaggtgaacttcaacttcgacgaccccaacctgatcatcctgcctctggcctttggcaagagacagggcagagaattcatctggaacgacctgctgtccctggaaaccggcagcctgaagctggccaacggaagagtgatcgagaagacactgtacaacagaagaacccggcaggatgagcctgccctgttcgtggccctgaccttcgagcggcgggaggtcctggactcctccaatatcaaaccaatgaacctgatcggcgtggcaagaggcgaaaacatccccgccgtgatcgccctgaccgaccccgagggctgcccactgagccggtttaaggatagcctgggaaacccaacccacatcctgagaatcggcgagagctataaggagaagcagcggaccatccaggccaagaaggaggtggagcagcggagagccggcggctacagccggaagtacgccagcaaagccaagaatctggcagacgatatggtgagaaacaccgctagagatctgctgtactacgccgtgacccaggatgccatgctgatcttcgccaacctgagccggggcttcggccggcagggcaagcggaccttcatggccgagagacagtacacacggatggaggactggctgaccgccaagctggcctacgagggcctgagcaagacctacctgtccaagacactggcccagtacacctccaagacatgcagcaactgtgggtttaccatcaccagcgccgactacgacagggtgctggagaagctgaagaagacagcaacaggctggatgaccacaattaacggcaaggagctgaaggtggagggccagattacctactacaacagatacaagagacagaacgtagtcaaggacctgtccgtcgagctggatagactgagcgaagaatctgtgaacaacgacatctcctcctggacaaagggcagaagcggagaagctctgagcctcctgaagaaaagattctcccatagacccgtgcaggagaagttcgtgtgcctgaactgcggcttcgagacacacgcagccgagcaagccgccctgaacatcgccagatcctggctgttcctgcggagccaggagtacaagaaataccagacaaacaagacaaccggcaacaccgataagagagccttcgtcgagacctggcagtccttttaccggaagaagcttaaggaggtgtggaaacctgccgtgcggtctggcggatctggcggaggctccaccagccccaagaaaaagagaaaagtctaagctgccttctgcggggcttgccttctggccatgcccttcttctctcccttgcacctgtacctcttggtctttgaataaagcctgagtaggaaggctagcaaaaaaaaaaaaaaaaaaaaaaaaaaaaaaaaaaaaaaaaaaaaaaaaaaaaaaaaaaaaaaaaaaaaaaaaaaaaaaaagcccagccggctccccaacctctaccgaggagggcacctctgagtccgccacccccgagagcggccctggcacctccaccgagcccagcgagggcagcgcacccggcagccctgccggcagccccacctccacagaggagggaaccagcaccgagcccagcgaaggcagcgccccaggcaccagcaccgagcctagtgagcaggagattaaacggatcaacaagatcagaagaagacttgtgaaagacagcaacaccaagaaggccggcaagacaggccccatgaaaaccctgctggttagagtgatgacacccgatctgagagagcggctggaaaacctgagaaagaagcctgaaaatatcccccagcccatcagcaatacatctagagccaacctgaataagctgctgaccgattacaccgaaatgaagaaggcgatcctgcatgtgtactgggaagagttccagaaggaccctgtgggcctgatgagccgggtggcccagcctgccagcaagaagatcgatcagaacaagctgaaacctgagatggacgagaagggcaacctgaccaccgccggctttgcctgctctcagtgtggccagcccctgttcgtgtacaagctggagcaggtgtctgagaagggcaaggcttacaccaactacttcggacggtgcaatgtggccgagcacgaaaagctgatcctgctggcccagctgaagcccgagaaggatagcgacgaagccgtgacatatagcctgggaaagtttgggcagagggccctggatttctacagcattcatgtgaccaaggagtccacccaccccgtgaagcccctggcccagatcgccggaaacagatacgcctccggacctgtgggaaaggccctgagcgacgcatgtatgggcacaatcgcctccttcctgtctaagtaccaggacatcatcatcgaacaccagaaggtggtgaagggcaaccagaagagactggagagcctgcgggagctggccggcaaggaaaacctggaataccctagcgtgaccctgccacctcagcctcacaccaaggagggcgttgatgcctacaacgaagtgatcgcccgggtgcgaatgtgggtgaacctgaacctgtggcagaagctgaagctaagcagagatgatgccaagcctctgctgagactgaagggattcccttcctttcctctggtcgagagacaggccaacgaagtggactggtgggacatggtgtgtaacgtgaagaagctgatcaacgagaaaaaggaggatggcaaggtgttttggcagaatctggctggctacaagagacaggaagccctgagaccatacctgagcagcgaggaagatcggaagaagggaaagaaattcgctcggtaccagctgggcgacctgctgctgcacctggaaaagaagcacggcgaggactggggaaaggtgtacgacgaggcctgggagcggattgacaagaaagtggaaggcctgagcaagcacatcaagctggaagaggaacggagaagcgaggacgcccagagcaaggccgccctgaccgactggctgcgggctaaggccagcttcgtgatcgagggcctgaaggaggccgacaaggacgagttctgcagatgcgagctgaagctgcagaagtggtacggggacctgcggggaaagcccttcgccatcgaagccgagaacagcatcctggacatcagcggcttcagcaagcagtacaactgtgccttcatctggcagaaggacggcgtgaagaagctgaacctgtacctgatcatcaactacttcaagggcggcaagctgcggttcaagaagatcaaacctgaagccttcgaagccaacagattctacaccgtgatcaacaaaaagagcggcgagatcgtgcccatggaggtgaacttcaacttcgacgaccccaacctgatcatcctgcctctggcctttggcaagagacagggcagagaattcatctggaacgacctgctgtccctggaaaccggcagcctgaagctggccaacggaagagtgatcgagaagacactgtacaacagaagaacccggcaggatgagcctgccctgttcgtggccctgaccttcgagcggcgggaggtcctggactcctccaatatcaaaccaatgaacctgatcggcgtggcaagaggcgaaaacatccccgccgtgatcgccctgaccgaccccgagggctgcccactgagccggtttaaggatagcctgggaaacccaacccacatcctgagaatcggcgagagctataaggagaagcagcggaccatccaggccaagaaggaggtggagcagcggagagccggcggctacagccggaagtacgccagcaaagccaagaatctggcagacgatatggtgagaaacaccgctagagatctgctgtactacgccgtgacccaggatgccatgctgatcttcgccaacctgagccggggcttcggccggcagggcaagcggaccttcatggccgagagacagtacacacggatggaggactggctgaccgccaagctggcctacgagggcctgagcaagacctacctgtccaagacactggcccagtacacctccaagacatgcagcaactgtgggtttaccatcaccagcgccgactacgacagggtgctggagaagctgaagaagacagcaacaggctggatgaccacaattaacggcaaggagctgaaggtggagggccagattacctactacaacagatacaagagacagaacgtagtcaaggacctgtccgtcgagctggatagactgagcgaagaatctgtgaacaacgacatctcctcctggacaaagggcagaagcggagaagctctgagcctcctgaagaaaagattctcccatagacccgtgcaggagaagttcgtgtgcctgaactgcggcttcgagacacacgcagccgagcaagccgccctgaacatcgccagatcctggctgttcctgcggagccaggagtacaagaaataccagacaaacaagacaaccggcaacaccgataagagagccttcgtcgagacctggcagtccttttaccggaagaagcttaaggaggtgtggaaacctgccgtgcggtctggcggatctggcggaggctccaccagccccaagaaaaagagaaaagtctaagctgccttctgcggggcttgccttctggccatgcccttcttctctcccttgcacctgtacctcttggtctttgaataaagcctgagtaggaaggctagcaaaaaaaaaaaaaaaaaaaaaaaaaaaaaaaaaaaaaaaaaaaaaaaaaaaaaaaaaaaaaaaaaaaaaaaaaaaaaaaa

SEQ ID NO: 10002 - RNA, 8787 nt, synthetic construct
  source 1..8787: mol_type = other RNA
aggaaataagagagaaaagaagagtaagaagaaatataagagccaccatggcccctaagaagaagcgtaaagtgagccggatgaaccacgaccaggagttcgacccccctaaggtgtaccctcccgtccccgccgagaagagaaagcccatccgggtcctgagcctgttcgatggcatcgccaccggtctgctggtgctgaaggacctgggcatccaggtggataggtacattgcctccgaggtgtgcgaggactccatcaccgtgggaatggtgcgtcatcagggcaagatcatgtacgtgggcgacgtgcggagcgtgacacagaagcatatccaggagtggggccctttcgacctggtgatcggcggcagcccttgcaatgacctgagcatcgtgaacccagcccggaagggcctgtacgagggaaccggcagactgttcttcgagttttacagactgctgcacgacgcccggcctaaggaaggcgacgaccggcccttcttttggctgttcgagaatgtggtggccatgggagtcagcgacaagcgggatattagccggttcctggagagcaaccccgtgatgatcgatgccaaggaagtgagcgccgcccaccgggccagatacttctggggcaatctgcctggcatgaacagacccctggccagcaccgtgaacgacaagctggagctgcaggagtgcctggagcacggccggatcgccaagttcagcaaggtgagaaccatcaccacccgaagcaacagcatcaaacaaggcaaggaccagcactttcctgtgttcatgaacgagaaggaggacatcctgtggtgtaccgagatggagagagtgttcgggttcccagtccactacacagatgtcagcaacatgtctagactggccagacagagactgctgggaagaagctggtccgtccctgtgatcagacacctgttcgcccctctgaaggagtacttcgcctgcgtgagcagcggcaacagcaacgccaacagccggggccccagcttctctagcggcctggtgccactgtccctgagagggagccacatgggccccatggagatctacaaaaccgtgagcgcctggaagcggcagcctgtgcgcgtgctgagcctgtttcggaatatcgataaagtcctgaaaagcctgggattcctggagagcggctctggctccggcggtggcaccctgaagtacgtggaggatgtgacaaacgtggtcagacgggatgtggagaagtggggccccttcgatctggtgtacggcagcacccaacccctgggcagctcttgtgaccggtgccctggctggtacatgtttcagttccaccggatcctgcagtacgccctgccgagacaggagtcccagcggccattcttttggattttcatggacaacttgctgctgaccgaggatgaccaggaaactaccactcggttcctgcagaccgaagccgtgaccctgcaggacgtgagaggccgggactaccagaacgccatgcgggtgtggtccaacatccctggactgaaaagcaagcacgcacctctgacccctaaagaagaggagtacctgcaggcccaggtgcggagcagaagcaagctggacgcccctaaggtggatctgctggtgaagaattgcctcctgcccctgagagagtacttcaagtatttcagccagaatagtctgcccctgggaggcagcggcggcggcatggacagcgtgaccatcgaggacgtggccgtggacttcaccctggaggagtgggccctgctggaccccagccagaggaagctgtacagggacgtgatgcaggagaccctgaggaacctggccgccgtgggcgccaagagggagtaccacgacatcgaggaccagtacaagaaccagggcaggaagctgaggaccttcatggtggagaggttctgcaagagcaaggacatcagcctgtgcggcggcggcccaagcagcggcgcccctcctcccagcggcggcaggcggcccaagcagcggcgcccctcctcccagcggcggcagcccagccggctccccaacctctaccgaggagggcacctctgagtccgccacccccgagagcggccctggcacctccaccgagcccagcgagggcagcgcacccggcagccctgccggcagccccacctccacagaggagggaaccagcaccgagcccagcgaaggcagcgccccaggcaccagcaccgagcctagtgagcaggagattaaacggatcaacaagatcagaagaagacttgtgaaagacagcaacaccaagaaggccggcaagacaggccccatgaaaaccctgctggttagagtgatgacacccgatctgagagagcggctggaaaacctgagaaagaagcctgaaaatatcccccagcccatcagcaatacatctagagccaacctgaataagctgctgaccgattacaccgaaatgaagaaggcgatcctgcatgtgtactgggaagagttccagaaggaccctgtgggcctgatgagccgggtggcccagcctgccagcaagaagatcgatcagaacaagctgaaacctgagatggacgagaagggcaacctgaccaccgccggctttgcctgctctcagtgtggccagcccctgttcgtgtacaagctggagcaggtgtctgagaagggcaaggcttacaccaactacttcggacggtgcaatgtggccgagcacgaaaagctgatcctgctggcccagctgaagcccgagaaggatagcgacgaagccgtgacatatagcctgggaaagtttgggcagagggccctggatttctacagcattcatgtgaccaaggagtccacccaccccgtgaagcccctggcccagatcgccggaaacagatacgcctccggacctgtgggaaaggccctgagcgacgcatgtatgggcacaatcgcctccttcctgtctaagtaccaggacatcatcatcgaacaccagaaggtggtgaagggcaaccagaagagactggagagcctgcgggagctggccggcaaggaaaacctggaataccctagcgtgaccctgccacctcagcctcacaccaaggagggcgttgatgcctacaacgaagtgatcgcccgggtgcgaatgtgggtgaacctgaacctgtggcagaagctgaagctaagcagagatgatgccaagcctctgctgagactgaagggattcccttcctttcctctggtcgagagacaggccaacgaagtggactggtgggacatggtgtgtaacgtgaagaagctgatcaacgagaaaaaggaggatggcaaggtgttttggcagaatctggctggctacaagagacaggaagccctgagaccatacctgagcagcgaggaagatcggaagaagggaaagaaattcgctcggtaccagctgggcgacctgctgctgcacctggaaaagaagcacggcgaggactggggaaaggtgtacgacgaggcctgggagcggattgacaagaaagtggaaggcctgagcaagcacatcaagctggaagaggaacggagaagcgaggacgcccagagcaaggccgccctgaccgactggctgcgggctaaggccagcttcgtgatcgagggcctgaaggaggccgacaaggacgagttctgcagatgcgagctgaagctgcagaagtggtacggggacctgcggggaaagcccttcgccatcgaagccgagaacagcatcctggacatcagcggcttcagcaagcagtacaactgtgccttcatctggcagaaggacggcgtgaagaagctgaacctgtacctgatcatcaactacttcaagggcggcaagctgcggttcaagaagatcaaacctgaagccttcgaagccaacagattctacaccgtgatcaacaaaaagagcggcgagatcgtgcccatggaggtgaacttcaacttcgacgaccccaacctgatcatcctgcctctggcctttggcaagagacagggcagagaattcatctggaacgacctgctgtccctggaaaccggcagcctgaagctggccaacggaagagtgatcgagaagacactgtacaacagaagaacccggcaggatgagcctgccctgttcgtggccctgaccttcgagcggcgggaggtcctggactcctccaatatcaaaccaatgaacctgatcggcgtggcaagaggcgaaaacatccccgccgtgatcgccctgaccgaccccgagggctgcccactgagccggtttaaggatagcctgggaaacccaacccacatcctgagaatcggcgagagctataaggagaagcagcggaccatccaggccaagaaggaggtggagcagcggagagccggcggctacagccggaagtacgccagcaaagccaagaatctggcagacgatatggtgagaaacaccgctagagatctgctgtactacgccgtgacccaggatgccatgctgatcttcgccaacctgagccggggcttcggccggcagggcaagcggaccttcatggccgagagacagtacacacggatggaggactggctgaccgccaagctggcctacgagggcctgagcaagacctacctgtccaagacactggcccagtacacctccaagacatgcagcaactgtgggtttaccatcaccagcgccgactacgacagggtgctggagaagctgaagaagacagcaacaggctggatgaccacaattaacggcaaggagctgaaggtggagggccagattacctactacaacagatacaagagacagaacgtagtcaaggacctgtccgtcgagctggatagactgagcgaagaatctgtgaacaacgacatctcctcctggacaaagggcagaagcggagaagctctgagcctcctgaagaaaagattctcccatagacccgtgcaggagaagttcgtgtgcctgaactgcggcttcgagacacacgcagccgagcaagccgccctgaacatcgccagatcctggctgttcctgcggagccaggagtacaagaaataccagacaaacaagacaaccggcaacaccgataagagagccttcgtcgagacctggcagtccttttaccggaagaagcttaaggaggtgtggaaacctgccgtgcggtctggcggatctggcggaggctccaccagccccaagaaaaagagaaaagtctaagctgccttctgcggggcttgccttctggccatgcccttcttctctcccttgcacctgtacctcttggtctttgaataaagcctgagtaggaaggctagcaaaaaaaaaaaaaaaaaaaaaaaaaaaaaaaaaaaaaaaaaaaaaaaaaaaaaaaaaaaaaaaaaaaaaaaaaaaaaaaagcccagccggctccccaacctctaccgaggagggcacctctgagtccgccacccccgagagcggccctggcacctccaccgagcccagcgagggcagcgcacccggcagccctgccggcagccccacctccacagaggagggaaccagcaccgagcccagcgaaggcagcgccccaggcaccagcaccgagcctagtgagcaggagattaaacggatcaacaagatcagaagaagacttgtgaaagacagcaacaccaagaaggccggcaagacaggccccatgaaaaccctgctggttagagtgatgacacccgatctgagagagcggctggaaaacctgagaaagaagcctgaaaatatcccccagcccatcagcaatacatctagagccaacctgaataagctgctgaccgattacaccgaaatgaagaaggcgatcctgcatgtgtactgggaagagttccagaaggaccctgtgggcctgatgagccgggtggcccagcctgccagcaagaagatcgatcagaacaagctgaaacctgagatggacgagaagggcaacctgaccaccgccggctttgcctgctctcagtgtggccagcccctgttcgtgtacaagctggagcaggtgtctgagaagggcaaggcttacaccaactacttcggacggtgcaatgtggccgagcacgaaaagctgatcctgctggcccagctgaagcccgagaaggatagcgacgaagccgtgacatatagcctgggaaagtttgggcagagggccctggatttctacagcattcatgtgaccaaggagtccacccaccccgtgaagcccctggcccagatcgccggaaacagatacgcctccggacctgtgggaaaggccctgagcgacgcatgtatgggcacaatcgcctccttcctgtctaagtaccaggacatcatcatcgaacaccagaaggtggtgaagggcaaccagaagagactggagagcctgcgggagctggccggcaaggaaaacctggaataccctagcgtgaccctgccacctcagcctcacaccaaggagggcgttgatgcctacaacgaagtgatcgcccgggtgcgaatgtgggtgaacctgaacctgtggcagaagctgaagctaagcagagatgatgccaagcctctgctgagactgaagggattcccttcctttcctctggtcgagagacaggccaacgaagtggactggtgggacatggtgtgtaacgtgaagaagctgatcaacgagaaaaaggaggatggcaaggtgttttggcagaatctggctggctacaagagacaggaagccctgagaccatacctgagcagcgaggaagatcggaagaagggaaagaaattcgctcggtaccagctgggcgacctgctgctgcacctggaaaagaagcacggcgaggactggggaaaggtgtacgacgaggcctgggagcggattgacaagaaagtggaaggcctgagcaagcacatcaagctggaagaggaacggagaagcgaggacgcccagagcaaggccgccctgaccgactggctgcgggctaaggccagcttcgtgatcgagggcctgaaggaggccgacaaggacgagttctgcagatgcgagctgaagctgcagaagtggtacggggacctgcggggaaagcccttcgccatcgaagccgagaacagcatcctggacatcagcggcttcagcaagcagtacaactgtgccttcatctggcagaaggacggcgtgaagaagctgaacctgtacctgatcatcaactacttcaagggcggcaagctgcggttcaagaagatcaaacctgaagccttcgaagccaacagattctacaccgtgatcaacaaaaagagcggcgagatcgtgcccatggaggtgaacttcaacttcgacgaccccaacctgatcatcctgcctctggcctttggcaagagacagggcagagaattcatctggaacgacctgctgtccctggaaaccggcagcctgaagctggccaacggaagagtgatcgagaagacactgtacaacagaagaacccggcaggatgagcctgccctgttcgtggccctgaccttcgagcggcgggaggtcctggactcctccaatatcaaaccaatgaacctgatcggcgtggcaagaggcgaaaacatccccgccgtgatcgccctgaccgaccccgagggctgcccactgagccggtttaaggatagcctgggaaacccaacccacatcctgagaatcggcgagagctataaggagaagcagcggaccatccaggccaagaaggaggtggagcagcggagagccggcggctacagccggaagtacgccagcaaagccaagaatctggcagacgatatggtgagaaacaccgctagagatctgctgtactacgccgtgacccaggatgccatgctgatcttcgccaacctgagccggggcttcggccggcagggcaagcggaccttcatggccgagagacagtacacacggatggaggactggctgaccgccaagctggcctacgagggcctgagcaagacctacctgtccaagacactggcccagtacacctccaagacatgcagcaactgtgggtttaccatcaccagcgccgactacgacagggtgctggagaagctgaagaagacagcaacaggctggatgaccacaattaacggcaaggagctgaaggtggagggccagattacctactacaacagatacaagagacagaacgtagtcaaggacctgtccgtcgagctggatagactgagcgaagaatctgtgaacaacgacatctcctcctggacaaagggcagaagcggagaagctctgagcctcctgaagaaaagattctcccatagacccgtgcaggagaagttcgtgtgcctgaactgcggcttcgagacacacgcagccgagcaagccgccctgaacatcgccagatcctggctgttcctgcggagccaggagtacaagaaataccagacaaacaagacaaccggcaacaccgataagagagccttcgtcgagacctggcagtccttttaccggaagaagcttaaggaggtgtggaaacctgccgtgcggtctggcggatctggcggaggctccaccagccccaagaaaaagagaaaagtctaagctgccttctgcggggcttgccttctggccatgcccttcttctctcccttgcacctgtacctcttggtctttgaataaagcctgagtaggaaggctagcaaaaaaaaaaaaaaaaaaaaaaaaaaaaaaaaaaaaaaaaaaaaaaaaaaaaaaaaaaaaaaaaaaaaaaaaaaaaaaaa

SEQ ID NO: 10003 - RNA, 8787 nt, synthetic construct
  source 1..8787: mol_type = other RNA
aggaaataagagagaaaagaagagtaagaagaaatataagagccaccatggcccctaagaagaagcgtaaagtgagccggatgaaccacgaccaggagttcgacccccctaaggtgtaccctcccgtccccgccgagaagagaaagcccatccgggtcctgagcctgttcgatggcatcgccaccggtctgctggtgctgaaggacctgggcatccaggtggataggtacattgcctccgaggtgtgcgaggactccatcaccgtgggaatggtgcgtcatcagggcaagatcatgtacgtgggcgacgtgcggagcgtgacacagaagcatatccaggagtggggccctttcgacctggtgatcggcggcagcccttgcaatgacctgagcatcgtgaacccagcccggaagggcctgtacgagggaaccggcagactgttcttcgagttttacagactgctgcacgacgcccggcctaaggaaggcgacgaccggcccttcttttggctgttcgagaatgtggtggccatgggagtcagcgacaagcgggatattagccggttcctggagagcaaccccgtgatgatcgatgccaaggaagtgagcgccgcccaccgggccagatacttctggggcaatctgcctggcatgaacagacccctggccagcaccgtgaacgacaagctggagctgcaggagtgcctggagcacggccggatcgccaagttcagcaaggtgagaaccatcaccacccgaagcaacagcatcaaacaaggcaaggaccagcactttcctgtgttcatgaacgagaaggaggacatcctgtggtgtaccgagatggagagagtgttcgggttcccagtccactacacagatgtcagcaacatgtctagactggccagacagagactgctgggaagaagctggtccgtccctgtgatcagacacctgttcgcccctctgaaggagtacttcgcctgcgtgagcagcggcaacagcaacgccaacagccggggccccagcttctctagcggcctggtgccactgtccctgagagggagccacatgggccccatggagatctacaaaaccgtgagcgcctggaagcggcagcctgtgcgcgtgctgagcctgtttcggaatatcgataaagtcctgaaaagcctgggattcctggagagcggctctggctccggcggtggcaccctgaagtacgtggaggatgtgacaaacgtggtcagacgggatgtggagaagtggggccccttcgatctggtgtacggcagcacccaacccctgggcagctcttgtgaccggtgccctggctggtacatgtttcagttccaccggatcctgcagtacgccctgccgagacaggagtcccagcggccattcttttggattttcatggacaacttgctgctgaccgaggatgaccaggaaactaccactcggttcctgcagaccgaagccgtgaccctgcaggacgtgagaggccgggactaccagaacgccatgcgggtgtggtccaacatccctggactgaaaagcaagcacgcacctctgacccctaaagaagaggagtacctgcaggcccaggtgcggagcagaagcaagctggacgcccctaaggtggatctgctggtgaagaattgcctcctgcccctgagagagtacttcaagtatttcagccagaatagtctgcccctgggaggcagcggcggcggcatgggccccctgaccttcaccgacgtggccatcgagttcagcctggaggagtggcagtgcctggacaccgcccagcagaacctgtacaggaacgtgatgctggagaactacaggaacctggtgttcctgggcatcgccgtgagcaagcccgacctgatcacctgcctggagaaggagaaggagccctgcaagatgaagaggcacgagatggtggacgagccccccgacggcgtgagcctgctgggcggcccaagcagcggcgcccctcctcccagcggcggcaggcggcccaagcagcggcgcccctcctcccagcggcggcagcccagccggctccccaacctctaccgaggagggcacctctgagtccgccacccccgagagcggccctggcacctccaccgagcccagcgagggcagcgcacccggcagccctgccggcagccccacctccacagaggagggaaccagcaccgagcccagcgaaggcagcgccccaggcaccagcaccgagcctagtgagcaggagattaaacggatcaacaagatcagaagaagacttgtgaaagacagcaacaccaagaaggccggcaagacaggccccatgaaaaccctgctggttagagtgatgacacccgatctgagagagcggctggaaaacctgagaaagaagcctgaaaatatcccccagcccatcagcaatacatctagagccaacctgaataagctgctgaccgattacaccgaaatgaagaaggcgatcctgcatgtgtactgggaagagttccagaaggaccctgtgggcctgatgagccgggtggcccagcctgccagcaagaagatcgatcagaacaagctgaaacctgagatggacgagaagggcaacctgaccaccgccggctttgcctgctctcagtgtggccagcccctgttcgtgtacaagctggagcaggtgtctgagaagggcaaggcttacaccaactacttcggacggtgcaatgtggccgagcacgaaaagctgatcctgctggcccagctgaagcccgagaaggatagcgacgaagccgtgacatatagcctgggaaagtttgggcagagggccctggatttctacagcattcatgtgaccaaggagtccacccaccccgtgaagcccctggcccagatcgccggaaacagatacgcctccggacctgtgggaaaggccctgagcgacgcatgtatgggcacaatcgcctccttcctgtctaagtaccaggacatcatcatcgaacaccagaaggtggtgaagggcaaccagaagagactggagagcctgcgggagctggccggcaaggaaaacctggaataccctagcgtgaccctgccacctcagcctcacaccaaggagggcgttgatgcctacaacgaagtgatcgcccgggtgcgaatgtgggtgaacctgaacctgtggcagaagctgaagctaagcagagatgatgccaagcctctgctgagactgaagggattcccttcctttcctctggtcgagagacaggccaacgaagtggactggtgggacatggtgtgtaacgtgaagaagctgatcaacgagaaaaaggaggatggcaaggtgttttggcagaatctggctggctacaagagacaggaagccctgagaccatacctgagcagcgaggaagatcggaagaagggaaagaaattcgctcggtaccagctgggcgacctgctgctgcacctggaaaagaagcacggcgaggactggggaaaggtgtacgacgaggcctgggagcggattgacaagaaagtggaaggcctgagcaagcacatcaagctggaagaggaacggagaagcgaggacgcccagagcaaggccgccctgaccgactggctgcgggctaaggccagcttcgtgatcgagggcctgaaggaggccgacaaggacgagttctgcagatgcgagctgaagctgcagaagtggtacggggacctgcggggaaagcccttcgccatcgaagccgagaacagcatcctggacatcagcggcttcagcaagcagtacaactgtgccttcatctggcagaaggacggcgtgaagaagctgaacctgtacctgatcatcaactacttcaagggcggcaagctgcggttcaagaagatcaaacctgaagccttcgaagccaacagattctacaccgtgatcaacaaaaagagcggcgagatcgtgcccatggaggtgaacttcaacttcgacgaccccaacctgatcatcctgcctctggcctttggcaagagacagggcagagaattcatctggaacgacctgctgtccctggaaaccggcagcctgaagctggccaacggaagagtgatcgagaagacactgtacaacagaagaacccggcaggatgagcctgccctgttcgtggccctgaccttcgagcggcgggaggtcctggactcctccaatatcaaaccaatgaacctgatcggcgtggcaagaggcgaaaacatccccgccgtgatcgccctgaccgaccccgagggctgcccactgagccggtttaaggatagcctgggaaacccaacccacatcctgagaatcggcgagagctataaggagaagcagcggaccatccaggccaagaaggaggtggagcagcggagagccggcggctacagccggaagtacgccagcaaagccaagaatctggcagacgatatggtgagaaacaccgctagagatctgctgtactacgccgtgacccaggatgccatgctgatcttcgccaacctgagccggggcttcggccggcagggcaagcggaccttcatggccgagagacagtacacacggatggaggactggctgaccgccaagctggcctacgagggcctgagcaagacctacctgtccaagacactggcccagtacacctccaagacatgcagcaactgtgggtttaccatcaccagcgccgactacgacagggtgctggagaagctgaagaagacagcaacaggctggatgaccacaattaacggcaaggagctgaaggtggagggccagattacctactacaacagatacaagagacagaacgtagtcaaggacctgtccgtcgagctggatagactgagcgaagaatctgtgaacaacgacatctcctcctggacaaagggcagaagcggagaagctctgagcctcctgaagaaaagattctcccatagacccgtgcaggagaagttcgtgtgcctgaactgcggcttcgagacacacgcagccgagcaagccgccctgaacatcgccagatcctggctgttcctgcggagccaggagtacaagaaataccagacaaacaagacaaccggcaacaccgataagagagccttcgtcgagacctggcagtccttttaccggaagaagcttaaggaggtgtggaaacctgccgtgcggtctggcggatctggcggaggctccaccagccccaagaaaaagagaaaagtctaagctgccttctgcggggcttgccttctggccatgcccttcttctctcccttgcacctgtacctcttggtctttgaataaagcctgagtaggaaggctagcaaaaaaaaaaaaaaaaaaaaaaaaaaaaaaaaaaaaaaaaaaaaaaaaaaaaaaaaaaaaaaaaaaaaaaaaaaaaaaaagcccagccggctccccaacctctaccgaggagggcacctctgagtccgccacccccgagagcggccctggcacctccaccgagcccagcgagggcagcgcacccggcagccctgccggcagccccacctccacagaggagggaaccagcaccgagcccagcgaaggcagcgccccaggcaccagcaccgagcctagtgagcaggagattaaacggatcaacaagatcagaagaagacttgtgaaagacagcaacaccaagaaggccggcaagacaggccccatgaaaaccctgctggttagagtgatgacacccgatctgagagagcggctggaaaacctgagaaagaagcctgaaaatatcccccagcccatcagcaatacatctagagccaacctgaataagctgctgaccgattacaccgaaatgaagaaggcgatcctgcatgtgtactgggaagagttccagaaggaccctgtgggcctgatgagccgggtggcccagcctgccagcaagaagatcgatcagaacaagctgaaacctgagatggacgagaagggcaacctgaccaccgccggctttgcctgctctcagtgtggccagcccctgttcgtgtacaagctggagcaggtgtctgagaagggcaaggcttacaccaactacttcggacggtgcaatgtggccgagcacgaaaagctgatcctgctggcccagctgaagcccgagaaggatagcgacgaagccgtgacatatagcctgggaaagtttgggcagagggccctggatttctacagcattcatgtgaccaaggagtccacccaccccgtgaagcccctggcccagatcgccggaaacagatacgcctccggacctgtgggaaaggccctgagcgacgcatgtatgggcacaatcgcctccttcctgtctaagtaccaggacatcatcatcgaacaccagaaggtggtgaagggcaaccagaagagactggagagcctgcgggagctggccggcaaggaaaacctggaataccctagcgtgaccctgccacctcagcctcacaccaaggagggcgttgatgcctacaacgaagtgatcgcccgggtgcgaatgtgggtgaacctgaacctgtggcagaagctgaagctaagcagagatgatgccaagcctctgctgagactgaagggattcccttcctttcctctggtcgagagacaggccaacgaagtggactggtgggacatggtgtgtaacgtgaagaagctgatcaacgagaaaaaggaggatggcaaggtgttttggcagaatctggctggctacaagagacaggaagccctgagaccatacctgagcagcgaggaagatcggaagaagggaaagaaattcgctcggtaccagctgggcgacctgctgctgcacctggaaaagaagcacggcgaggactggggaaaggtgtacgacgaggcctgggagcggattgacaagaaagtggaaggcctgagcaagcacatcaagctggaagaggaacggagaagcgaggacgcccagagcaaggccgccctgaccgactggctgcgggctaaggccagcttcgtgatcgagggcctgaaggaggccgacaaggacgagttctgcagatgcgagctgaagctgcagaagtggtacggggacctgcggggaaagcccttcgccatcgaagccgagaacagcatcctggacatcagcggcttcagcaagcagtacaactgtgccttcatctggcagaaggacggcgtgaagaagctgaacctgtacctgatcatcaactacttcaagggcggcaagctgcggttcaagaagatcaaacctgaagccttcgaagccaacagattctacaccgtgatcaacaaaaagagcggcgagatcgtgcccatggaggtgaacttcaacttcgacgaccccaacctgatcatcctgcctctggcctttggcaagagacagggcagagaattcatctggaacgacctgctgtccctggaaaccggcagcctgaagctggccaacggaagagtgatcgagaagacactgtacaacagaagaacccggcaggatgagcctgccctgttcgtggccctgaccttcgagcggcgggaggtcctggactcctccaatatcaaaccaatgaacctgatcggcgtggcaagaggcgaaaacatccccgccgtgatcgccctgaccgaccccgagggctgcccactgagccggtttaaggatagcctgggaaacccaacccacatcctgagaatcggcgagagctataaggagaagcagcggaccatccaggccaagaaggaggtggagcagcggagagccggcggctacagccggaagtacgccagcaaagccaagaatctggcagacgatatggtgagaaacaccgctagagatctgctgtactacgccgtgacccaggatgccatgctgatcttcgccaacctgagccggggcttcggccggcagggcaagcggaccttcatggccgagagacagtacacacggatggaggactggctgaccgccaagctggcctacgagggcctgagcaagacctacctgtccaagacactggcccagtacacctccaagacatgcagcaactgtgggtttaccatcaccagcgccgactacgacagggtgctggagaagctgaagaagacagcaacaggctggatgaccacaattaacggcaaggagctgaaggtggagggccagattacctactacaacagatacaagagacagaacgtagtcaaggacctgtccgtcgagctggatagactgagcgaagaatctgtgaacaacgacatctcctcctggacaaagggcagaagcggagaagctctgagcctcctgaagaaaagattctcccatagacccgtgcaggagaagttcgtgtgcctgaactgcggcttcgagacacacgcagccgagcaagccgccctgaacatcgccagatcctggctgttcctgcggagccaggagtacaagaaataccagacaaacaagacaaccggcaacaccgataagagagccttcgtcgagacctggcagtccttttaccggaagaagcttaaggaggtgtggaaacctgccgtgcggtctggcggatctggcggaggctccaccagccccaagaaaaagagaaaagtctaagctgccttctgcggggcttgccttctggccatgcccttcttctctcccttgcacctgtacctcttggtctttgaataaagcctgagtaggaaggctagcaaaaaaaaaaaaaaaaaaaaaaaaaaaaaaaaaaaaaaaaaaaaaaaaaaaaaaaaaaaaaaaaaaaaaaaaaaaaaaaa

SEQ ID NO: 10004 - RNA, 8787 nt, synthetic construct
  source 1..8787: mol_type = other RNA
aggaaataagagagaaaagaagagtaagaagaaatataagagccaccatggcccctaagaagaagcgtaaagtgagccggatgaaccacgaccaggagttcgacccccctaaggtgtaccctcccgtccccgccgagaagagaaagcccatccgggtcctgagcctgttcgatggcatcgccaccggtctgctggtgctgaaggacctgggcatccaggtggataggtacattgcctccgaggtgtgcgaggactccatcaccgtgggaatggtgcgtcatcagggcaagatcatgtacgtgggcgacgtgcggagcgtgacacagaagcatatccaggagtggggccctttcgacctggtgatcggcggcagcccttgcaatgacctgagcatcgtgaacccagcccggaagggcctgtacgagggaaccggcagactgttcttcgagttttacagactgctgcacgacgcccggcctaaggaaggcgacgaccggcccttcttttggctgttcgagaatgtggtggccatgggagtcagcgacaagcgggatattagccggttcctggagagcaaccccgtgatgatcgatgccaaggaagtgagcgccgcccaccgggccagatacttctggggcaatctgcctggcatgaacagacccctggccagcaccgtgaacgacaagctggagctgcaggagtgcctggagcacggccggatcgccaagttcagcaaggtgagaaccatcaccacccgaagcaacagcatcaaacaaggcaaggaccagcactttcctgtgttcatgaacgagaaggaggacatcctgtggtgtaccgagatggagagagtgttcgggttcccagtccactacacagatgtcagcaacatgtctagactggccagacagagactgctgggaagaagctggtccgtccctgtgatcagacacctgttcgcccctctgaaggagtacttcgcctgcgtgagcagcggcaacagcaacgccaacagccggggccccagcttctctagcggcctggtgccactgtccctgagagggagccacatgggccccatggagatctacaaaaccgtgagcgcctggaagcggcagcctgtgcgcgtgctgagcctgtttcggaatatcgataaagtcctgaaaagcctgggattcctggagagcggctctggctccggcggtggcaccctgaagtacgtggaggatgtgacaaacgtggtcagacgggatgtggagaagtggggccccttcgatctggtgtacggcagcacccaacccctgggcagctcttgtgaccggtgccctggctggtacatgtttcagttccaccggatcctgcagtacgccctgccgagacaggagtcccagcggccattcttttggattttcatggacaacttgctgctgaccgaggatgaccaggaaactaccactcggttcctgcagaccgaagccgtgaccctgcaggacgtgagaggccgggactaccagaacgccatgcgggtgtggtccaacatccctggactgaaaagcaagcacgcacctctgacccctaaagaagaggagtacctgcaggcccaggtgcggagcagaagcaagctggacgcccctaaggtggatctgctggtgaagaattgcctcctgcccctgagagagtacttcaagtatttcagccagaatagtctgcccctgggaggcagcggcggcggcttccagggcagcctgagcttcagggacgtggccgtgggcttcaccaggaaggagtggcagcagctggaccccacccagaggaccctgtacagggacgtgatgctggagaactacagccacctggtgagcgtgggctgccaggtgaccaagcccgccgtgatcagcaggctggagcagggccaggagccctggatgaaggaggaggagatcctgaggtggagcttccccgaggtgctgcaggtgggcggcccaagcagcggcgcccctcctcccagcggcggcaggcggcccaagcagcggcgcccctcctcccagcggcggcagcccagccggctccccaacctctaccgaggagggcacctctgagtccgccacccccgagagcggccctggcacctccaccgagcccagcgagggcagcgcacccggcagccctgccggcagccccacctccacagaggagggaaccagcaccgagcccagcgaaggcagcgccccaggcaccagcaccgagcctagtgagcaggagattaaacggatcaacaagatcagaagaagacttgtgaaagacagcaacaccaagaaggccggcaagacaggccccatgaaaaccctgctggttagagtgatgacacccgatctgagagagcggctggaaaacctgagaaagaagcctgaaaatatcccccagcccatcagcaatacatctagagccaacctgaataagctgctgaccgattacaccgaaatgaagaaggcgatcctgcatgtgtactgggaagagttccagaaggaccctgtgggcctgatgagccgggtggcccagcctgccagcaagaagatcgatcagaacaagctgaaacctgagatggacgagaagggcaacctgaccaccgccggctttgcctgctctcagtgtggccagcccctgttcgtgtacaagctggagcaggtgtctgagaagggcaaggcttacaccaactacttcggacggtgcaatgtggccgagcacgaaaagctgatcctgctggcccagctgaagcccgagaaggatagcgacgaagccgtgacatatagcctgggaaagtttgggcagagggccctggatttctacagcattcatgtgaccaaggagtccacccaccccgtgaagcccctggcccagatcgccggaaacagatacgcctccggacctgtgggaaaggccctgagcgacgcatgtatgggcacaatcgcctccttcctgtctaagtaccaggacatcatcatcgaacaccagaaggtggtgaagggcaaccagaagagactggagagcctgcgggagctggccggcaaggaaaacctggaataccctagcgtgaccctgccacctcagcctcacaccaaggagggcgttgatgcctacaacgaagtgatcgcccgggtgcgaatgtgggtgaacctgaacctgtggcagaagctgaagctaagcagagatgatgccaagcctctgctgagactgaagggattcccttcctttcctctggtcgagagacaggccaacgaagtggactggtgggacatggtgtgtaacgtgaagaagctgatcaacgagaaaaaggaggatggcaaggtgttttggcagaatctggctggctacaagagacaggaagccctgagaccatacctgagcagcgaggaagatcggaagaagggaaagaaattcgctcggtaccagctgggcgacctgctgctgcacctggaaaagaagcacggcgaggactggggaaaggtgtacgacgaggcctgggagcggattgacaagaaagtggaaggcctgagcaagcacatcaagctggaagaggaacggagaagcgaggacgcccagagcaaggccgccctgaccgactggctgcgggctaaggccagcttcgtgatcgagggcctgaaggaggccgacaaggacgagttctgcagatgcgagctgaagctgcagaagtggtacggggacctgcggggaaagcccttcgccatcgaagccgagaacagcatcctggacatcagcggcttcagcaagcagtacaactgtgccttcatctggcagaaggacggcgtgaagaagctgaacctgtacctgatcatcaactacttcaagggcggcaagctgcggttcaagaagatcaaacctgaagccttcgaagccaacagattctacaccgtgatcaacaaaaagagcggcgagatcgtgcccatggaggtgaacttcaacttcgacgaccccaacctgatcatcctgcctctggcctttggcaagagacagggcagagaattcatctggaacgacctgctgtccctggaaaccggcagcctgaagctggccaacggaagagtgatcgagaagacactgtacaacagaagaacccggcaggatgagcctgccctgttcgtggccctgaccttcgagcggcgggaggtcctggactcctccaatatcaaaccaatgaacctgatcggcgtggcaagaggcgaaaacatccccgccgtgatcgccctgaccgaccccgagggctgcccactgagccggtttaaggatagcctgggaaacccaacccacatcctgagaatcggcgagagctataaggagaagcagcggaccatccaggccaagaaggaggtggagcagcggagagccggcggctacagccggaagtacgccagcaaagccaagaatctggcagacgatatggtgagaaacaccgctagagatctgctgtactacgccgtgacccaggatgccatgctgatcttcgccaacctgagccggggcttcggccggcagggcaagcggaccttcatggccgagagacagtacacacggatggaggactggctgaccgccaagctggcctacgagggcctgagcaagacctacctgtccaagacactggcccagtacacctccaagacatgcagcaactgtgggtttaccatcaccagcgccgactacgacagggtgctggagaagctgaagaagacagcaacaggctggatgaccacaattaacggcaaggagctgaaggtggagggccagattacctactacaacagatacaagagacagaacgtagtcaaggacctgtccgtcgagctggatagactgagcgaagaatctgtgaacaacgacatctcctcctggacaaagggcagaagcggagaagctctgagcctcctgaagaaaagattctcccatagacccgtgcaggagaagttcgtgtgcctgaactgcggcttcgagacacacgcagccgagcaagccgccctgaacatcgccagatcctggctgttcctgcggagccaggagtacaagaaataccagacaaacaagacaaccggcaacaccgataagagagccttcgtcgagacctggcagtccttttaccggaagaagcttaaggaggtgtggaaacctgccgtgcggtctggcggatctggcggaggctccaccagccccaagaaaaagagaaaagtctaagctgccttctgcggggcttgccttctggccatgcccttcttctctcccttgcacctgtacctcttggtctttgaataaagcctgagtaggaaggctagcaaaaaaaaaaaaaaaaaaaaaaaaaaaaaaaaaaaaaaaaaaaaaaaaaaaaaaaaaaaaaaaaaaaaaaaaaaaaaaaagcccagccggctccccaacctctaccgaggagggcacctctgagtccgccacccccgagagcggccctggcacctccaccgagcccagcgagggcagcgcacccggcagccctgccggcagccccacctccacagaggagggaaccagcaccgagcccagcgaaggcagcgccccaggcaccagcaccgagcctagtgagcaggagattaaacggatcaacaagatcagaagaagacttgtgaaagacagcaacaccaagaaggccggcaagacaggccccatgaaaaccctgctggttagagtgatgacacccgatctgagagagcggctggaaaacctgagaaagaagcctgaaaatatcccccagcccatcagcaatacatctagagccaacctgaataagctgctgaccgattacaccgaaatgaagaaggcgatcctgcatgtgtactgggaagagttccagaaggaccctgtgggcctgatgagccgggtggcccagcctgccagcaagaagatcgatcagaacaagctgaaacctgagatggacgagaagggcaacctgaccaccgccggctttgcctgctctcagtgtggccagcccctgttcgtgtacaagctggagcaggtgtctgagaagggcaaggcttacaccaactacttcggacggtgcaatgtggccgagcacgaaaagctgatcctgctggcccagctgaagcccgagaaggatagcgacgaagccgtgacatatagcctgggaaagtttgggcagagggccctggatttctacagcattcatgtgaccaaggagtccacccaccccgtgaagcccctggcccagatcgccggaaacagatacgcctccggacctgtgggaaaggccctgagcgacgcatgtatgggcacaatcgcctccttcctgtctaagtaccaggacatcatcatcgaacaccagaaggtggtgaagggcaaccagaagagactggagagcctgcgggagctggccggcaaggaaaacctggaataccctagcgtgaccctgccacctcagcctcacaccaaggagggcgttgatgcctacaacgaagtgatcgcccgggtgcgaatgtgggtgaacctgaacctgtggcagaagctgaagctaagcagagatgatgccaagcctctgctgagactgaagggattcccttcctttcctctggtcgagagacaggccaacgaagtggactggtgggacatggtgtgtaacgtgaagaagctgatcaacgagaaaaaggaggatggcaaggtgttttggcagaatctggctggctacaagagacaggaagccctgagaccatacctgagcagcgaggaagatcggaagaagggaaagaaattcgctcggtaccagctgggcgacctgctgctgcacctggaaaagaagcacggcgaggactggggaaaggtgtacgacgaggcctgggagcggattgacaagaaagtggaaggcctgagcaagcacatcaagctggaagaggaacggagaagcgaggacgcccagagcaaggccgccctgaccgactggctgcgggctaaggccagcttcgtgatcgagggcctgaaggaggccgacaaggacgagttctgcagatgcgagctgaagctgcagaagtggtacggggacctgcggggaaagcccttcgccatcgaagccgagaacagcatcctggacatcagcggcttcagcaagcagtacaactgtgccttcatctggcagaaggacggcgtgaagaagctgaacctgtacctgatcatcaactacttcaagggcggcaagctgcggttcaagaagatcaaacctgaagccttcgaagccaacagattctacaccgtgatcaacaaaaagagcggcgagatcgtgcccatggaggtgaacttcaacttcgacgaccccaacctgatcatcctgcctctggcctttggcaagagacagggcagagaattcatctggaacgacctgctgtccctggaaaccggcagcctgaagctggccaacggaagagtgatcgagaagacactgtacaacagaagaacccggcaggatgagcctgccctgttcgtggccctgaccttcgagcggcgggaggtcctggactcctccaatatcaaaccaatgaacctgatcggcgtggcaagaggcgaaaacatccccgccgtgatcgccctgaccgaccccgagggctgcccactgagccggtttaaggatagcctgggaaacccaacccacatcctgagaatcggcgagagctataaggagaagcagcggaccatccaggccaagaaggaggtggagcagcggagagccggcggctacagccggaagtacgccagcaaagccaagaatctggcagacgatatggtgagaaacaccgctagagatctgctgtactacgccgtgacccaggatgccatgctgatcttcgccaacctgagccggggcttcggccggcagggcaagcggaccttcatggccgagagacagtacacacggatggaggactggctgaccgccaagctggcctacgagggcctgagcaagacctacctgtccaagacactggcccagtacacctccaagacatgcagcaactgtgggtttaccatcaccagcgccgactacgacagggtgctggagaagctgaagaagacagcaacaggctggatgaccacaattaacggcaaggagctgaaggtggagggccagattacctactacaacagatacaagagacagaacgtagtcaaggacctgtccgtcgagctggatagactgagcgaagaatctgtgaacaacgacatctcctcctggacaaagggcagaagcggagaagctctgagcctcctgaagaaaagattctcccatagacccgtgcaggagaagttcgtgtgcctgaactgcggcttcgagacacacgcagccgagcaagccgccctgaacatcgccagatcctggctgttcctgcggagccaggagtacaagaaataccagacaaacaagacaaccggcaacaccgataagagagccttcgtcgagacctggcagtccttttaccggaagaagcttaaggaggtgtggaaacctgccgtgcggtctggcggatctggcggaggctccaccagccccaagaaaaagagaaaagtctaagctgccttctgcggggcttgccttctggccatgcccttcttctctcccttgcacctgtacctcttggtctttgaataaagcctgagtaggaaggctagcaaaaaaaaaaaaaaaaaaaaaaaaaaaaaaaaaaaaaaaaaaaaaaaaaaaaaaaaaaaaaaaaaaaaaaaaaaaaaaaa

SEQ ID NO: 10005 - RNA, 8787 nt, synthetic construct
  source 1..8787: mol_type = other RNA
aggaaataagagagaaaagaagagtaagaagaaatataagagccaccatggcccctaagaagaagcgtaaagtgagccggatgaaccacgaccaggagttcgacccccctaaggtgtaccctcccgtccccgccgagaagagaaagcccatccgggtcctgagcctgttcgatggcatcgccaccggtctgctggtgctgaaggacctgggcatccaggtggataggtacattgcctccgaggtgtgcgaggactccatcaccgtgggaatggtgcgtcatcagggcaagatcatgtacgtgggcgacgtgcggagcgtgacacagaagcatatccaggagtggggccctttcgacctggtgatcggcggcagcccttgcaatgacctgagcatcgtgaacccagcccggaagggcctgtacgagggaaccggcagactgttcttcgagttttacagactgctgcacgacgcccggcctaaggaaggcgacgaccggcccttcttttggctgttcgagaatgtggtggccatgggagtcagcgacaagcgggatattagccggttcctggagagcaaccccgtgatgatcgatgccaaggaagtgagcgccgcccaccgggccagatacttctggggcaatctgcctggcatgaacagacccctggccagcaccgtgaacgacaagctggagctgcaggagtgcctggagcacggccggatcgccaagttcagcaaggtgagaaccatcaccacccgaagcaacagcatcaaacaaggcaaggaccagcactttcctgtgttcatgaacgagaaggaggacatcctgtggtgtaccgagatggagagagtgttcgggttcccagtccactacacagatgtcagcaacatgtctagactggccagacagagactgctgggaagaagctggtccgtccctgtgatcagacacctgttcgcccctctgaaggagtacttcgcctgcgtgagcagcggcaacagcaacgccaacagccggggccccagcttctctagcggcctggtgccactgtccctgagagggagccacatgggccccatggagatctacaaaaccgtgagcgcctggaagcggcagcctgtgcgcgtgctgagcctgtttcggaatatcgataaagtcctgaaaagcctgggattcctggagagcggctctggctccggcggtggcaccctgaagtacgtggaggatgtgacaaacgtggtcagacgggatgtggagaagtggggccccttcgatctggtgtacggcagcacccaacccctgggcagctcttgtgaccggtgccctggctggtacatgtttcagttccaccggatcctgcagtacgccctgccgagacaggagtcccagcggccattcttttggattttcatggacaacttgctgctgaccgaggatgaccaggaaactaccactcggttcctgcagaccgaagccgtgaccctgcaggacgtgagaggccgggactaccagaacgccatgcgggtgtggtccaacatccctggactgaaaagcaagcacgcacctctgacccctaaagaagaggagtacctgcaggcccaggtgcggagcagaagcaagctggacgcccctaaggtggatctgctggtgaagaattgcctcctgcccctgagagagtacttcaagtatttcagccagaatagtctgcccctgggaggcagcggcggcggcgagatgagggtgatgttcgaggagatcaccgtgagcttcagccaggaggagtgggagtacctggacgagggccagaaggagctgtaccaggaggtgatgaaggagaaccacgagaccctgatcttcctggagaccaacctgcagttcgtgaaccccgacatgctgagcaagatcaggagggacagcaggatgagcaggaagaggaaggccaccaggagctacgccgccgacgacgaggccaagggcggcccaagcagcggcgcccctcctcccagcggcggcaggcggcccaagcagcggcgcccctcctcccagcggcggcagcccagccggctccccaacctctaccgaggagggcacctctgagtccgccacccccgagagcggccctggcacctccaccgagcccagcgagggcagcgcacccggcagccctgccggcagccccacctccacagaggagggaaccagcaccgagcccagcgaaggcagcgccccaggcaccagcaccgagcctagtgagcaggagattaaacggatcaacaagatcagaagaagacttgtgaaagacagcaacaccaagaaggccggcaagacaggccccatgaaaaccctgctggttagagtgatgacacccgatctgagagagcggctggaaaacctgagaaagaagcctgaaaatatcccccagcccatcagcaatacatctagagccaacctgaataagctgctgaccgattacaccgaaatgaagaaggcgatcctgcatgtgtactgggaagagttccagaaggaccctgtgggcctgatgagccgggtggcccagcctgccagcaagaagatcgatcagaacaagctgaaacctgagatggacgagaagggcaacctgaccaccgccggctttgcctgctctcagtgtggccagcccctgttcgtgtacaagctggagcaggtgtctgagaagggcaaggcttacaccaactacttcggacggtgcaatgtggccgagcacgaaaagctgatcctgctggcccagctgaagcccgagaaggatagcgacgaagccgtgacatatagcctgggaaagtttgggcagagggccctggatttctacagcattcatgtgaccaaggagtccacccaccccgtgaagcccctggcccagatcgccggaaacagatacgcctccggacctgtgggaaaggccctgagcgacgcatgtatgggcacaatcgcctccttcctgtctaagtaccaggacatcatcatcgaacaccagaaggtggtgaagggcaaccagaagagactggagagcctgcgggagctggccggcaaggaaaacctggaataccctagcgtgaccctgccacctcagcctcacaccaaggagggcgttgatgcctacaacgaagtgatcgcccgggtgcgaatgtgggtgaacctgaacctgtggcagaagctgaagctaagcagagatgatgccaagcctctgctgagactgaagggattcccttcctttcctctggtcgagagacaggccaacgaagtggactggtgggacatggtgtgtaacgtgaagaagctgatcaacgagaaaaaggaggatggcaaggtgttttggcagaatctggctggctacaagagacaggaagccctgagaccatacctgagcagcgaggaagatcggaagaagggaaagaaattcgctcggtaccagctgggcgacctgctgctgcacctggaaaagaagcacggcgaggactggggaaaggtgtacgacgaggcctgggagcggattgacaagaaagtggaaggcctgagcaagcacatcaagctggaagaggaacggagaagcgaggacgcccagagcaaggccgccctgaccgactggctgcgggctaaggccagcttcgtgatcgagggcctgaaggaggccgacaaggacgagttctgcagatgcgagctgaagctgcagaagtggtacggggacctgcggggaaagcccttcgccatcgaagccgagaacagcatcctggacatcagcggcttcagcaagcagtacaactgtgccttcatctggcagaaggacggcgtgaagaagctgaacctgtacctgatcatcaactacttcaagggcggcaagctgcggttcaagaagatcaaacctgaagccttcgaagccaacagattctacaccgtgatcaacaaaaagagcggcgagatcgtgcccatggaggtgaacttcaacttcgacgaccccaacctgatcatcctgcctctggcctttggcaagagacagggcagagaattcatctggaacgacctgctgtccctggaaaccggcagcctgaagctggccaacggaagagtgatcgagaagacactgtacaacagaagaacccggcaggatgagcctgccctgttcgtggccctgaccttcgagcggcgggaggtcctggactcctccaatatcaaaccaatgaacctgatcggcgtggcaagaggcgaaaacatccccgccgtgatcgccctgaccgaccccgagggctgcccactgagccggtttaaggatagcctgggaaacccaacccacatcctgagaatcggcgagagctataaggagaagcagcggaccatccaggccaagaaggaggtggagcagcggagagccggcggctacagccggaagtacgccagcaaagccaagaatctggcagacgatatggtgagaaacaccgctagagatctgctgtactacgccgtgacccaggatgccatgctgatcttcgccaacctgagccggggcttcggccggcagggcaagcggaccttcatggccgagagacagtacacacggatggaggactggctgaccgccaagctggcctacgagggcctgagcaagacctacctgtccaagacactggcccagtacacctccaagacatgcagcaactgtgggtttaccatcaccagcgccgactacgacagggtgctggagaagctgaagaagacagcaacaggctggatgaccacaattaacggcaaggagctgaaggtggagggccagattacctactacaacagatacaagagacagaacgtagtcaaggacctgtccgtcgagctggatagactgagcgaagaatctgtgaacaacgacatctcctcctggacaaagggcagaagcggagaagctctgagcctcctgaagaaaagattctcccatagacccgtgcaggagaagttcgtgtgcctgaactgcggcttcgagacacacgcagccgagcaagccgccctgaacatcgccagatcctggctgttcctgcggagccaggagtacaagaaataccagacaaacaagacaaccggcaacaccgataagagagccttcgtcgagacctggcagtccttttaccggaagaagcttaaggaggtgtggaaacctgccgtgcggtctggcggatctggcggaggctccaccagccccaagaaaaagagaaaagtctaagctgccttctgcggggcttgccttctggccatgcccttcttctctcccttgcacctgtacctcttggtctttgaataaagcctgagtaggaaggctagcaaaaaaaaaaaaaaaaaaaaaaaaaaaaaaaaaaaaaaaaaaaaaaaaaaaaaaaaaaaaaaaaaaaaaaaaaaaaaaaagcccagccggctccccaacctctaccgaggagggcacctctgagtccgccacccccgagagcggccctggcacctccaccgagcccagcgagggcagcgcacccggcagccctgccggcagccccacctccacagaggagggaaccagcaccgagcccagcgaaggcagcgccccaggcaccagcaccgagcctagtgagcaggagattaaacggatcaacaagatcagaagaagacttgtgaaagacagcaacaccaagaaggccggcaagacaggccccatgaaaaccctgctggttagagtgatgacacccgatctgagagagcggctggaaaacctgagaaagaagcctgaaaatatcccccagcccatcagcaatacatctagagccaacctgaataagctgctgaccgattacaccgaaatgaagaaggcgatcctgcatgtgtactgggaagagttccagaaggaccctgtgggcctgatgagccgggtggcccagcctgccagcaagaagatcgatcagaacaagctgaaacctgagatggacgagaagggcaacctgaccaccgccggctttgcctgctctcagtgtggccagcccctgttcgtgtacaagctggagcaggtgtctgagaagggcaaggcttacaccaactacttcggacggtgcaatgtggccgagcacgaaaagctgatcctgctggcccagctgaagcccgagaaggatagcgacgaagccgtgacatatagcctgggaaagtttgggcagagggccctggatttctacagcattcatgtgaccaaggagtccacccaccccgtgaagcccctggcccagatcgccggaaacagatacgcctccggacctgtgggaaaggccctgagcgacgcatgtatgggcacaatcgcctccttcctgtctaagtaccaggacatcatcatcgaacaccagaaggtggtgaagggcaaccagaagagactggagagcctgcgggagctggccggcaaggaaaacctggaataccctagcgtgaccctgccacctcagcctcacaccaaggagggcgttgatgcctacaacgaagtgatcgcccgggtgcgaatgtgggtgaacctgaacctgtggcagaagctgaagctaagcagagatgatgccaagcctctgctgagactgaagggattcccttcctttcctctggtcgagagacaggccaacgaagtggactggtgggacatggtgtgtaacgtgaagaagctgatcaacgagaaaaaggaggatggcaaggtgttttggcagaatctggctggctacaagagacaggaagccctgagaccatacctgagcagcgaggaagatcggaagaagggaaagaaattcgctcggtaccagctgggcgacctgctgctgcacctggaaaagaagcacggcgaggactggggaaaggtgtacgacgaggcctgggagcggattgacaagaaagtggaaggcctgagcaagcacatcaagctggaagaggaacggagaagcgaggacgcccagagcaaggccgccctgaccgactggctgcgggctaaggccagcttcgtgatcgagggcctgaaggaggccgacaaggacgagttctgcagatgcgagctgaagctgcagaagtggtacggggacctgcggggaaagcccttcgccatcgaagccgagaacagcatcctggacatcagcggcttcagcaagcagtacaactgtgccttcatctggcagaaggacggcgtgaagaagctgaacctgtacctgatcatcaactacttcaagggcggcaagctgcggttcaagaagatcaaacctgaagccttcgaagccaacagattctacaccgtgatcaacaaaaagagcggcgagatcgtgcccatggaggtgaacttcaacttcgacgaccccaacctgatcatcctgcctctggcctttggcaagagacagggcagagaattcatctggaacgacctgctgtccctggaaaccggcagcctgaagctggccaacggaagagtgatcgagaagacactgtacaacagaagaacccggcaggatgagcctgccctgttcgtggccctgaccttcgagcggcgggaggtcctggactcctccaatatcaaaccaatgaacctgatcggcgtggcaagaggcgaaaacatccccgccgtgatcgccctgaccgaccccgagggctgcccactgagccggtttaaggatagcctgggaaacccaacccacatcctgagaatcggcgagagctataaggagaagcagcggaccatccaggccaagaaggaggtggagcagcggagagccggcggctacagccggaagtacgccagcaaagccaagaatctggcagacgatatggtgagaaacaccgctagagatctgctgtactacgccgtgacccaggatgccatgctgatcttcgccaacctgagccggggcttcggccggcagggcaagcggaccttcatggccgagagacagtacacacggatggaggactggctgaccgccaagctggcctacgagggcctgagcaagacctacctgtccaagacactggcccagtacacctccaagacatgcagcaactgtgggtttaccatcaccagcgccgactacgacagggtgctggagaagctgaagaagacagcaacaggctggatgaccacaattaacggcaaggagctgaaggtggagggccagattacctactacaacagatacaagagacagaacgtagtcaaggacctgtccgtcgagctggatagactgagcgaagaatctgtgaacaacgacatctcctcctggacaaagggcagaagcggagaagctctgagcctcctgaagaaaagattctcccatagacccgtgcaggagaagttcgtgtgcctgaactgcggcttcgagacacacgcagccgagcaagccgccctgaacatcgccagatcctggctgttcctgcggagccaggagtacaagaaataccagacaaacaagacaaccggcaacaccgataagagagccttcgtcgagacctggcagtccttttaccggaagaagcttaaggaggtgtggaaacctgccgtgcggtctggcggatctggcggaggctccaccagccccaagaaaaagagaaaagtctaagctgccttctgcggggcttgccttctggccatgcccttcttctctcccttgcacctgtacctcttggtctttgaataaagcctgagtaggaaggctagcaaaaaaaaaaaaaaaaaaaaaaaaaaaaaaaaaaaaaaaaaaaaaaaaaaaaaaaaaaaaaaaaaaaaaaaaaaaaaaaa

SEQ ID NO: 10006 - RNA, 8787 nt, synthetic construct
  source 1..8787: mol_type = other RNA
aggaaataagagagaaaagaagagtaagaagaaatataagagccaccatggcccctaagaagaagcgtaaagtgagccggatgaaccacgaccaggagttcgacccccctaaggtgtaccctcccgtccccgccgagaagagaaagcccatccgggtcctgagcctgttcgatggcatcgccaccggtctgctggtgctgaaggacctgggcatccaggtggataggtacattgcctccgaggtgtgcgaggactccatcaccgtgggaatggtgcgtcatcagggcaagatcatgtacgtgggcgacgtgcggagcgtgacacagaagcatatccaggagtggggccctttcgacctggtgatcggcggcagcccttgcaatgacctgagcatcgtgaacccagcccggaagggcctgtacgagggaaccggcagactgttcttcgagttttacagactgctgcacgacgcccggcctaaggaaggcgacgaccggcccttcttttggctgttcgagaatgtggtggccatgggagtcagcgacaagcgggatattagccggttcctggagagcaaccccgtgatgatcgatgccaaggaagtgagcgccgcccaccgggccagatacttctggggcaatctgcctggcatgaacagacccctggccagcaccgtgaacgacaagctggagctgcaggagtgcctggagcacggccggatcgccaagttcagcaaggtgagaaccatcaccacccgaagcaacagcatcaaacaaggcaaggaccagcactttcctgtgttcatgaacgagaaggaggacatcctgtggtgtaccgagatggagagagtgttcgggttcccagtccactacacagatgtcagcaacatgtctagactggccagacagagactgctgggaagaagctggtccgtccctgtgatcagacacctgttcgcccctctgaaggagtacttcgcctgcgtgagcagcggcaacagcaacgccaacagccggggccccagcttctctagcggcctggtgccactgtccctgagagggagccacatgggccccatggagatctacaaaaccgtgagcgcctggaagcggcagcctgtgcgcgtgctgagcctgtttcggaatatcgataaagtcctgaaaagcctgggattcctggagagcggctctggctccggcggtggcaccctgaagtacgtggaggatgtgacaaacgtggtcagacgggatgtggagaagtggggccccttcgatctggtgtacggcagcacccaacccctgggcagctcttgtgaccggtgccctggctggtacatgtttcagttccaccggatcctgcagtacgccctgccgagacaggagtcccagcggccattcttttggattttcatggacaacttgctgctgaccgaggatgaccaggaaactaccactcggttcctgcagaccgaagccgtgaccctgcaggacgtgagaggccgggactaccagaacgccatgcgggtgtggtccaacatccctggactgaaaagcaagcacgcacctctgacccctaaagaagaggagtacctgcaggcccaggtgcggagcagaagcaagctggacgcccctaaggtggatctgctggtgaagaattgcctcctgcccctgagagagtacttcaagtatttcagccagaatagtctgcccctgggaggcagcggcggcggcccccaggaggccgtgaccttcaaggacgtggtggtggacttcacccaggaggagtggaagtgcctggacagcagccagaaggagttctacagggacgtgatgctggagaactacagcaacctggtgagcctgggcctggccttccccaagccctacgtgatcgaccagctggagaggagggaggccccctggatccccgagggcgacatccccaggatcagccaccccgagaggaagaagaagggcggcccaagcagcggcgcccctcctcccagcggcggcaggcggcccaagcagcggcgcccctcctcccagcggcggcagcccagccggctccccaacctctaccgaggagggcacctctgagtccgccacccccgagagcggccctggcacctccaccgagcccagcgagggcagcgcacccggcagccctgccggcagccccacctccacagaggagggaaccagcaccgagcccagcgaaggcagcgccccaggcaccagcaccgagcctagtgagcaggagattaaacggatcaacaagatcagaagaagacttgtgaaagacagcaacaccaagaaggccggcaagacaggccccatgaaaaccctgctggttagagtgatgacacccgatctgagagagcggctggaaaacctgagaaagaagcctgaaaatatcccccagcccatcagcaatacatctagagccaacctgaataagctgctgaccgattacaccgaaatgaagaaggcgatcctgcatgtgtactgggaagagttccagaaggaccctgtgggcctgatgagccgggtggcccagcctgccagcaagaagatcgatcagaacaagctgaaacctgagatggacgagaagggcaacctgaccaccgccggctttgcctgctctcagtgtggccagcccctgttcgtgtacaagctggagcaggtgtctgagaagggcaaggcttacaccaactacttcggacggtgcaatgtggccgagcacgaaaagctgatcctgctggcccagctgaagcccgagaaggatagcgacgaagccgtgacatatagcctgggaaagtttgggcagagggccctggatttctacagcattcatgtgaccaaggagtccacccaccccgtgaagcccctggcccagatcgccggaaacagatacgcctccggacctgtgggaaaggccctgagcgacgcatgtatgggcacaatcgcctccttcctgtctaagtaccaggacatcatcatcgaacaccagaaggtggtgaagggcaaccagaagagactggagagcctgcgggagctggccggcaaggaaaacctggaataccctagcgtgaccctgccacctcagcctcacaccaaggagggcgttgatgcctacaacgaagtgatcgcccgggtgcgaatgtgggtgaacctgaacctgtggcagaagctgaagctaagcagagatgatgccaagcctctgctgagactgaagggattcccttcctttcctctggtcgagagacaggccaacgaagtggactggtgggacatggtgtgtaacgtgaagaagctgatcaacgagaaaaaggaggatggcaaggtgttttggcagaatctggctggctacaagagacaggaagccctgagaccatacctgagcagcgaggaagatcggaagaagggaaagaaattcgctcggtaccagctgggcgacctgctgctgcacctggaaaagaagcacggcgaggactggggaaaggtgtacgacgaggcctgggagcggattgacaagaaagtggaaggcctgagcaagcacatcaagctggaagaggaacggagaagcgaggacgcccagagcaaggccgccctgaccgactggctgcgggctaaggccagcttcgtgatcgagggcctgaaggaggccgacaaggacgagttctgcagatgcgagctgaagctgcagaagtggtacggggacctgcggggaaagcccttcgccatcgaagccgagaacagcatcctggacatcagcggcttcagcaagcagtacaactgtgccttcatctggcagaaggacggcgtgaagaagctgaacctgtacctgatcatcaactacttcaagggcggcaagctgcggttcaagaagatcaaacctgaagccttcgaagccaacagattctacaccgtgatcaacaaaaagagcggcgagatcgtgcccatggaggtgaacttcaacttcgacgaccccaacctgatcatcctgcctctggcctttggcaagagacagggcagagaattcatctggaacgacctgctgtccctggaaaccggcagcctgaagctggccaacggaagagtgatcgagaagacactgtacaacagaagaacccggcaggatgagcctgccctgttcgtggccctgaccttcgagcggcgggaggtcctggactcctccaatatcaaaccaatgaacctgatcggcgtggcaagaggcgaaaacatccccgccgtgatcgccctgaccgaccccgagggctgcccactgagccggtttaaggatagcctgggaaacccaacccacatcctgagaatcggcgagagctataaggagaagcagcggaccatccaggccaagaaggaggtggagcagcggagagccggcggctacagccggaagtacgccagcaaagccaagaatctggcagacgatatggtgagaaacaccgctagagatctgctgtactacgccgtgacccaggatgccatgctgatcttcgccaacctgagccggggcttcggccggcagggcaagcggaccttcatggccgagagacagtacacacggatggaggactggctgaccgccaagctggcctacgagggcctgagcaagacctacctgtccaagacactggcccagtacacctccaagacatgcagcaactgtgggtttaccatcaccagcgccgactacgacagggtgctggagaagctgaagaagacagcaacaggctggatgaccacaattaacggcaaggagctgaaggtggagggccagattacctactacaacagatacaagagacagaacgtagtcaaggacctgtccgtcgagctggatagactgagcgaagaatctgtgaacaacgacatctcctcctggacaaagggcagaagcggagaagctctgagcctcctgaagaaaagattctcccatagacccgtgcaggagaagttcgtgtgcctgaactgcggcttcgagacacacgcagccgagcaagccgccctgaacatcgccagatcctggctgttcctgcggagccaggagtacaagaaataccagacaaacaagacaaccggcaacaccgataagagagccttcgtcgagacctggcagtccttttaccggaagaagcttaaggaggtgtggaaacctgccgtgcggtctggcggatctggcggaggctccaccagccccaagaaaaagagaaaagtctaagctgccttctgcggggcttgccttctggccatgcccttcttctctcccttgcacctgtacctcttggtctttgaataaagcctgagtaggaaggctagcaaaaaaaaaaaaaaaaaaaaaaaaaaaaaaaaaaaaaaaaaaaaaaaaaaaaaaaaaaaaaaaaaaaaaaaaaaaaaaaagcccagccggctccccaacctctaccgaggagggcacctctgagtccgccacccccgagagcggccctggcacctccaccgagcccagcgagggcagcgcacccggcagccctgccggcagccccacctccacagaggagggaaccagcaccgagcccagcgaaggcagcgccccaggcaccagcaccgagcctagtgagcaggagattaaacggatcaacaagatcagaagaagacttgtgaaagacagcaacaccaagaaggccggcaagacaggccccatgaaaaccctgctggttagagtgatgacacccgatctgagagagcggctggaaaacctgagaaagaagcctgaaaatatcccccagcccatcagcaatacatctagagccaacctgaataagctgctgaccgattacaccgaaatgaagaaggcgatcctgcatgtgtactgggaagagttccagaaggaccctgtgggcctgatgagccgggtggcccagcctgccagcaagaagatcgatcagaacaagctgaaacctgagatggacgagaagggcaacctgaccaccgccggctttgcctgctctcagtgtggccagcccctgttcgtgtacaagctggagcaggtgtctgagaagggcaaggcttacaccaactacttcggacggtgcaatgtggccgagcacgaaaagctgatcctgctggcccagctgaagcccgagaaggatagcgacgaagccgtgacatatagcctgggaaagtttgggcagagggccctggatttctacagcattcatgtgaccaaggagtccacccaccccgtgaagcccctggcccagatcgccggaaacagatacgcctccggacctgtgggaaaggccctgagcgacgcatgtatgggcacaatcgcctccttcctgtctaagtaccaggacatcatcatcgaacaccagaaggtggtgaagggcaaccagaagagactggagagcctgcgggagctggccggcaaggaaaacctggaataccctagcgtgaccctgccacctcagcctcacaccaaggagggcgttgatgcctacaacgaagtgatcgcccgggtgcgaatgtgggtgaacctgaacctgtggcagaagctgaagctaagcagagatgatgccaagcctctgctgagactgaagggattcccttcctttcctctggtcgagagacaggccaacgaagtggactggtgggacatggtgtgtaacgtgaagaagctgatcaacgagaaaaaggaggatggcaaggtgttttggcagaatctggctggctacaagagacaggaagccctgagaccatacctgagcagcgaggaagatcggaagaagggaaagaaattcgctcggtaccagctgggcgacctgctgctgcacctggaaaagaagcacggcgaggactggggaaaggtgtacgacgaggcctgggagcggattgacaagaaagtggaaggcctgagcaagcacatcaagctggaagaggaacggagaagcgaggacgcccagagcaaggccgccctgaccgactggctgcgggctaaggccagcttcgtgatcgagggcctgaaggaggccgacaaggacgagttctgcagatgcgagctgaagctgcagaagtggtacggggacctgcggggaaagcccttcgccatcgaagccgagaacagcatcctggacatcagcggcttcagcaagcagtacaactgtgccttcatctggcagaaggacggcgtgaagaagctgaacctgtacctgatcatcaactacttcaagggcggcaagctgcggttcaagaagatcaaacctgaagccttcgaagccaacagattctacaccgtgatcaacaaaaagagcggcgagatcgtgcccatggaggtgaacttcaacttcgacgaccccaacctgatcatcctgcctctggcctttggcaagagacagggcagagaattcatctggaacgacctgctgtccctggaaaccggcagcctgaagctggccaacggaagagtgatcgagaagacactgtacaacagaagaacccggcaggatgagcctgccctgttcgtggccctgaccttcgagcggcgggaggtcctggactcctccaatatcaaaccaatgaacctgatcggcgtggcaagaggcgaaaacatccccgccgtgatcgccctgaccgaccccgagggctgcccactgagccggtttaaggatagcctgggaaacccaacccacatcctgagaatcggcgagagctataaggagaagcagcggaccatccaggccaagaaggaggtggagcagcggagagccggcggctacagccggaagtacgccagcaaagccaagaatctggcagacgatatggtgagaaacaccgctagagatctgctgtactacgccgtgacccaggatgccatgctgatcttcgccaacctgagccggggcttcggccggcagggcaagcggaccttcatggccgagagacagtacacacggatggaggactggctgaccgccaagctggcctacgagggcctgagcaagacctacctgtccaagacactggcccagtacacctccaagacatgcagcaactgtgggtttaccatcaccagcgccgactacgacagggtgctggagaagctgaagaagacagcaacaggctggatgaccacaattaacggcaaggagctgaaggtggagggccagattacctactacaacagatacaagagacagaacgtagtcaaggacctgtccgtcgagctggatagactgagcgaagaatctgtgaacaacgacatctcctcctggacaaagggcagaagcggagaagctctgagcctcctgaagaaaagattctcccatagacccgtgcaggagaagttcgtgtgcctgaactgcggcttcgagacacacgcagccgagcaagccgccctgaacatcgccagatcctggctgttcctgcggagccaggagtacaagaaataccagacaaacaagacaaccggcaacaccgataagagagccttcgtcgagacctggcagtccttttaccggaagaagcttaaggaggtgtggaaacctgccgtgcggtctggcggatctggcggaggctccaccagccccaagaaaaagagaaaagtctaagctgccttctgcggggcttgccttctggccatgcccttcttctctcccttgcacctgtacctcttggtctttgaataaagcctgagtaggaaggctagcaaaaaaaaaaaaaaaaaaaaaaaaaaaaaaaaaaaaaaaaaaaaaaaaaaaaaaaaaaaaaaaaaaaaaaaaaaaaaaaa

SEQ ID NO: 10007 - RNA, 8787 nt, synthetic construct
  source 1..8787: mol_type = other RNA
aggaaataagagagaaaagaagagtaagaagaaatataagagccaccatggcccctaagaagaagcgtaaagtgagccggatgaaccacgaccaggagttcgacccccctaaggtgtaccctcccgtccccgccgagaagagaaagcccatccgggtcctgagcctgttcgatggcatcgccaccggtctgctggtgctgaaggacctgggcatccaggtggataggtacattgcctccgaggtgtgcgaggactccatcaccgtgggaatggtgcgtcatcagggcaagatcatgtacgtgggcgacgtgcggagcgtgacacagaagcatatccaggagtggggccctttcgacctggtgatcggcggcagcccttgcaatgacctgagcatcgtgaacccagcccggaagggcctgtacgagggaaccggcagactgttcttcgagttttacagactgctgcacgacgcccggcctaaggaaggcgacgaccggcccttcttttggctgttcgagaatgtggtggccatgggagtcagcgacaagcgggatattagccggttcctggagagcaaccccgtgatgatcgatgccaaggaagtgagcgccgcccaccgggccagatacttctggggcaatctgcctggcatgaacagacccctggccagcaccgtgaacgacaagctggagctgcaggagtgcctggagcacggccggatcgccaagttcagcaaggtgagaaccatcaccacccgaagcaacagcatcaaacaaggcaaggaccagcactttcctgtgttcatgaacgagaaggaggacatcctgtggtgtaccgagatggagagagtgttcgggttcccagtccactacacagatgtcagcaacatgtctagactggccagacagagactgctgggaagaagctggtccgtccctgtgatcagacacctgttcgcccctctgaaggagtacttcgcctgcgtgagcagcggcaacagcaacgccaacagccggggccccagcttctctagcggcctggtgccactgtccctgagagggagccacatgggccccatggagatctacaaaaccgtgagcgcctggaagcggcagcctgtgcgcgtgctgagcctgtttcggaatatcgataaagtcctgaaaagcctgggattcctggagagcggctctggctccggcggtggcaccctgaagtacgtggaggatgtgacaaacgtggtcagacgggatgtggagaagtggggccccttcgatctggtgtacggcagcacccaacccctgggcagctcttgtgaccggtgccctggctggtacatgtttcagttccaccggatcctgcagtacgccctgccgagacaggagtcccagcggccattcttttggattttcatggacaacttgctgctgaccgaggatgaccaggaaactaccactcggttcctgcagaccgaagccgtgaccctgcaggacgtgagaggccgggactaccagaacgccatgcgggtgtggtccaacatccctggactgaaaagcaagcacgcacctctgacccctaaagaagaggagtacctgcaggcccaggtgcggagcagaagcaagctggacgcccctaaggtggatctgctggtgaagaattgcctcctgcccctgagagagtacttcaagtatttcagccagaatagtctgcccctgggaggcagcggcggcggcccccagggccccgtgaccttccaggacgtggccgtggtgttcacccaggaggagtggaggtacctggaccccagccagaaggagctgtacagggacgtgatgctggagaactacaggaacctgctgtacctgggcctggtggtgagcaagcccaacgtgatctacaggttcgagcagggcgaggccagctggaggcccgaccagagggacagcggcagcacctgcagcgacgaggagaccggcggcggcccaagcagcggcgcccctcctcccagcggcggcaggcggcccaagcagcggcgcccctcctcccagcggcggcagcccagccggctccccaacctctaccgaggagggcacctctgagtccgccacccccgagagcggccctggcacctccaccgagcccagcgagggcagcgcacccggcagccctgccggcagccccacctccacagaggagggaaccagcaccgagcccagcgaaggcagcgccccaggcaccagcaccgagcctagtgagcaggagattaaacggatcaacaagatcagaagaagacttgtgaaagacagcaacaccaagaaggccggcaagacaggccccatgaaaaccctgctggttagagtgatgacacccgatctgagagagcggctggaaaacctgagaaagaagcctgaaaatatcccccagcccatcagcaatacatctagagccaacctgaataagctgctgaccgattacaccgaaatgaagaaggcgatcctgcatgtgtactgggaagagttccagaaggaccctgtgggcctgatgagccgggtggcccagcctgccagcaagaagatcgatcagaacaagctgaaacctgagatggacgagaagggcaacctgaccaccgccggctttgcctgctctcagtgtggccagcccctgttcgtgtacaagctggagcaggtgtctgagaagggcaaggcttacaccaactacttcggacggtgcaatgtggccgagcacgaaaagctgatcctgctggcccagctgaagcccgagaaggatagcgacgaagccgtgacatatagcctgggaaagtttgggcagagggccctggatttctacagcattcatgtgaccaaggagtccacccaccccgtgaagcccctggcccagatcgccggaaacagatacgcctccggacctgtgggaaaggccctgagcgacgcatgtatgggcacaatcgcctccttcctgtctaagtaccaggacatcatcatcgaacaccagaaggtggtgaagggcaaccagaagagactggagagcctgcgggagctggccggcaaggaaaacctggaataccctagcgtgaccctgccacctcagcctcacaccaaggagggcgttgatgcctacaacgaagtgatcgcccgggtgcgaatgtgggtgaacctgaacctgtggcagaagctgaagctaagcagagatgatgccaagcctctgctgagactgaagggattcccttcctttcctctggtcgagagacaggccaacgaagtggactggtgggacatggtgtgtaacgtgaagaagctgatcaacgagaaaaaggaggatggcaaggtgttttggcagaatctggctggctacaagagacaggaagccctgagaccatacctgagcagcgaggaagatcggaagaagggaaagaaattcgctcggtaccagctgggcgacctgctgctgcacctggaaaagaagcacggcgaggactggggaaaggtgtacgacgaggcctgggagcggattgacaagaaagtggaaggcctgagcaagcacatcaagctggaagaggaacggagaagcgaggacgcccagagcaaggccgccctgaccgactggctgcgggctaaggccagcttcgtgatcgagggcctgaaggaggccgacaaggacgagttctgcagatgcgagctgaagctgcagaagtggtacggggacctgcggggaaagcccttcgccatcgaagccgagaacagcatcctggacatcagcggcttcagcaagcagtacaactgtgccttcatctggcagaaggacggcgtgaagaagctgaacctgtacctgatcatcaactacttcaagggcggcaagctgcggttcaagaagatcaaacctgaagccttcgaagccaacagattctacaccgtgatcaacaaaaagagcggcgagatcgtgcccatggaggtgaacttcaacttcgacgaccccaacctgatcatcctgcctctggcctttggcaagagacagggcagagaattcatctggaacgacctgctgtccctggaaaccggcagcctgaagctggccaacggaagagtgatcgagaagacactgtacaacagaagaacccggcaggatgagcctgccctgttcgtggccctgaccttcgagcggcgggaggtcctggactcctccaatatcaaaccaatgaacctgatcggcgtggcaagaggcgaaaacatccccgccgtgatcgccctgaccgaccccgagggctgcccactgagccggtttaaggatagcctgggaaacccaacccacatcctgagaatcggcgagagctataaggagaagcagcggaccatccaggccaagaaggaggtggagcagcggagagccggcggctacagccggaagtacgccagcaaagccaagaatctggcagacgatatggtgagaaacaccgctagagatctgctgtactacgccgtgacccaggatgccatgctgatcttcgccaacctgagccggggcttcggccggcagggcaagcggaccttcatggccgagagacagtacacacggatggaggactggctgaccgccaagctggcctacgagggcctgagcaagacctacctgtccaagacactggcccagtacacctccaagacatgcagcaactgtgggtttaccatcaccagcgccgactacgacagggtgctggagaagctgaagaagacagcaacaggctggatgaccacaattaacggcaaggagctgaaggtggagggccagattacctactacaacagatacaagagacagaacgtagtcaaggacctgtccgtcgagctggatagactgagcgaagaatctgtgaacaacgacatctcctcctggacaaagggcagaagcggagaagctctgagcctcctgaagaaaagattctcccatagacccgtgcaggagaagttcgtgtgcctgaactgcggcttcgagacacacgcagccgagcaagccgccctgaacatcgccagatcctggctgttcctgcggagccaggagtacaagaaataccagacaaacaagacaaccggcaacaccgataagagagccttcgtcgagacctggcagtccttttaccggaagaagcttaaggaggtgtggaaacctgccgtgcggtctggcggatctggcggaggctccaccagccccaagaaaaagagaaaagtctaagctgccttctgcggggcttgccttctggccatgcccttcttctctcccttgcacctgtacctcttggtctttgaataaagcctgagtaggaaggctagcaaaaaaaaaaaaaaaaaaaaaaaaaaaaaaaaaaaaaaaaaaaaaaaaaaaaaaaaaaaaaaaaaaaaaaaaaaaaaaaagcccagccggctccccaacctctaccgaggagggcacctctgagtccgccacccccgagagcggccctggcacctccaccgagcccagcgagggcagcgcacccggcagccctgccggcagccccacctccacagaggagggaaccagcaccgagcccagcgaaggcagcgccccaggcaccagcaccgagcctagtgagcaggagattaaacggatcaacaagatcagaagaagacttgtgaaagacagcaacaccaagaaggccggcaagacaggccccatgaaaaccctgctggttagagtgatgacacccgatctgagagagcggctggaaaacctgagaaagaagcctgaaaatatcccccagcccatcagcaatacatctagagccaacctgaataagctgctgaccgattacaccgaaatgaagaaggcgatcctgcatgtgtactgggaagagttccagaaggaccctgtgggcctgatgagccgggtggcccagcctgccagcaagaagatcgatcagaacaagctgaaacctgagatggacgagaagggcaacctgaccaccgccggctttgcctgctctcagtgtggccagcccctgttcgtgtacaagctggagcaggtgtctgagaagggcaaggcttacaccaactacttcggacggtgcaatgtggccgagcacgaaaagctgatcctgctggcccagctgaagcccgagaaggatagcgacgaagccgtgacatatagcctgggaaagtttgggcagagggccctggatttctacagcattcatgtgaccaaggagtccacccaccccgtgaagcccctggcccagatcgccggaaacagatacgcctccggacctgtgggaaaggccctgagcgacgcatgtatgggcacaatcgcctccttcctgtctaagtaccaggacatcatcatcgaacaccagaaggtggtgaagggcaaccagaagagactggagagcctgcgggagctggccggcaaggaaaacctggaataccctagcgtgaccctgccacctcagcctcacaccaaggagggcgttgatgcctacaacgaagtgatcgcccgggtgcgaatgtgggtgaacctgaacctgtggcagaagctgaagctaagcagagatgatgccaagcctctgctgagactgaagggattcccttcctttcctctggtcgagagacaggccaacgaagtggactggtgggacatggtgtgtaacgtgaagaagctgatcaacgagaaaaaggaggatggcaaggtgttttggcagaatctggctggctacaagagacaggaagccctgagaccatacctgagcagcgaggaagatcggaagaagggaaagaaattcgctcggtaccagctgggcgacctgctgctgcacctggaaaagaagcacggcgaggactggggaaaggtgtacgacgaggcctgggagcggattgacaagaaagtggaaggcctgagcaagcacatcaagctggaagaggaacggagaagcgaggacgcccagagcaaggccgccctgaccgactggctgcgggctaaggccagcttcgtgatcgagggcctgaaggaggccgacaaggacgagttctgcagatgcgagctgaagctgcagaagtggtacggggacctgcggggaaagcccttcgccatcgaagccgagaacagcatcctggacatcagcggcttcagcaagcagtacaactgtgccttcatctggcagaaggacggcgtgaagaagctgaacctgtacctgatcatcaactacttcaagggcggcaagctgcggttcaagaagatcaaacctgaagccttcgaagccaacagattctacaccgtgatcaacaaaaagagcggcgagatcgtgcccatggaggtgaacttcaacttcgacgaccccaacctgatcatcctgcctctggcctttggcaagagacagggcagagaattcatctggaacgacctgctgtccctggaaaccggcagcctgaagctggccaacggaagagtgatcgagaagacactgtacaacagaagaacccggcaggatgagcctgccctgttcgtggccctgaccttcgagcggcgggaggtcctggactcctccaatatcaaaccaatgaacctgatcggcgtggcaagaggcgaaaacatccccgccgtgatcgccctgaccgaccccgagggctgcccactgagccggtttaaggatagcctgggaaacccaacccacatcctgagaatcggcgagagctataaggagaagcagcggaccatccaggccaagaaggaggtggagcagcggagagccggcggctacagccggaagtacgccagcaaagccaagaatctggcagacgatatggtgagaaacaccgctagagatctgctgtactacgccgtgacccaggatgccatgctgatcttcgccaacctgagccggggcttcggccggcagggcaagcggaccttcatggccgagagacagtacacacggatggaggactggctgaccgccaagctggcctacgagggcctgagcaagacctacctgtccaagacactggcccagtacacctccaagacatgcagcaactgtgggtttaccatcaccagcgccgactacgacagggtgctggagaagctgaagaagacagcaacaggctggatgaccacaattaacggcaaggagctgaaggtggagggccagattacctactacaacagatacaagagacagaacgtagtcaaggacctgtccgtcgagctggatagactgagcgaagaatctgtgaacaacgacatctcctcctggacaaagggcagaagcggagaagctctgagcctcctgaagaaaagattctcccatagacccgtgcaggagaagttcgtgtgcctgaactgcggcttcgagacacacgcagccgagcaagccgccctgaacatcgccagatcctggctgttcctgcggagccaggagtacaagaaataccagacaaacaagacaaccggcaacaccgataagagagccttcgtcgagacctggcagtccttttaccggaagaagcttaaggaggtgtggaaacctgccgtgcggtctggcggatctggcggaggctccaccagccccaagaaaaagagaaaagtctaagctgccttctgcggggcttgccttctggccatgcccttcttctctcccttgcacctgtacctcttggtctttgaataaagcctgagtaggaaggctagcaaaaaaaaaaaaaaaaaaaaaaaaaaaaaaaaaaaaaaaaaaaaaaaaaaaaaaaaaaaaaaaaaaaaaaaaaaaaaaaa

SEQ ID NO: 10008 - RNA, 8787 nt, synthetic construct
  source 1..8787: mol_type = other RNA
aggaaataagagagaaaagaagagtaagaagaaatataagagccaccatggcccctaagaagaagcgtaaagtgagccggatgaaccacgaccaggagttcgacccccctaaggtgtaccctcccgtccccgccgagaagagaaagcccatccgggtcctgagcctgttcgatggcatcgccaccggtctgctggtgctgaaggacctgggcatccaggtggataggtacattgcctccgaggtgtgcgaggactccatcaccgtgggaatggtgcgtcatcagggcaagatcatgtacgtgggcgacgtgcggagcgtgacacagaagcatatccaggagtggggccctttcgacctggtgatcggcggcagcccttgcaatgacctgagcatcgtgaacccagcccggaagggcctgtacgagggaaccggcagactgttcttcgagttttacagactgctgcacgacgcccggcctaaggaaggcgacgaccggcccttcttttggctgttcgagaatgtggtggccatgggagtcagcgacaagcgggatattagccggttcctggagagcaaccccgtgatgatcgatgccaaggaagtgagcgccgcccaccgggccagatacttctggggcaatctgcctggcatgaacagacccctggccagcaccgtgaacgacaagctggagctgcaggagtgcctggagcacggccggatcgccaagttcagcaaggtgagaaccatcaccacccgaagcaacagcatcaaacaaggcaaggaccagcactttcctgtgttcatgaacgagaaggaggacatcctgtggtgtaccgagatggagagagtgttcgggttcccagtccactacacagatgtcagcaacatgtctagactggccagacagagactgctgggaagaagctggtccgtccctgtgatcagacacctgttcgcccctctgaaggagtacttcgcctgcgtgagcagcggcaacagcaacgccaacagccggggccccagcttctctagcggcctggtgccactgtccctgagagggagccacatgggccccatggagatctacaaaaccgtgagcgcctggaagcggcagcctgtgcgcgtgctgagcctgtttcggaatatcgataaagtcctgaaaagcctgggattcctggagagcggctctggctccggcggtggcaccctgaagtacgtggaggatgtgacaaacgtggtcagacgggatgtggagaagtggggccccttcgatctggtgtacggcagcacccaacccctgggcagctcttgtgaccggtgccctggctggtacatgtttcagttccaccggatcctgcagtacgccctgccgagacaggagtcccagcggccattcttttggattttcatggacaacttgctgctgaccgaggatgaccaggaaactaccactcggttcctgcagaccgaagccgtgaccctgcaggacgtgagaggccgggactaccagaacgccatgcgggtgtggtccaacatccctggactgaaaagcaagcacgcacctctgacccctaaagaagaggagtacctgcaggcccaggtgcggagcagaagcaagctggacgcccctaaggtggatctgctggtgaagaattgcctcctgcccctgagagagtacttcaagtatttcagccagaatagtctgcccctgggaggcagcggcggcggcctgcaggtgagcgtgagcttcgaggacgtgaccgtggacttcagcagggaggagtggcagcacctggacagcgcccagaggaggctgtaccaggacgtgatgctggagaactacagccacctgctgagcctgggctacgaggtgcccaagcccgaggtgatcttcaagctggagcagggcgaggagccctgggccctgaaggagaagaccctgcaccacagctgcagcgacgacaccaccctgggcggcccaagcagcggcgcccctcctcccagcggcggcaggcggcccaagcagcggcgcccctcctcccagcggcggcagcccagccggctccccaacctctaccgaggagggcacctctgagtccgccacccccgagagcggccctggcacctccaccgagcccagcgagggcagcgcacccggcagccctgccggcagccccacctccacagaggagggaaccagcaccgagcccagcgaaggcagcgccccaggcaccagcaccgagcctagtgagcaggagattaaacggatcaacaagatcagaagaagacttgtgaaagacagcaacaccaagaaggccggcaagacaggccccatgaaaaccctgctggttagagtgatgacacccgatctgagagagcggctggaaaacctgagaaagaagcctgaaaatatcccccagcccatcagcaatacatctagagccaacctgaataagctgctgaccgattacaccgaaatgaagaaggcgatcctgcatgtgtactgggaagagttccagaaggaccctgtgggcctgatgagccgggtggcccagcctgccagcaagaagatcgatcagaacaagctgaaacctgagatggacgagaagggcaacctgaccaccgccggctttgcctgctctcagtgtggccagcccctgttcgtgtacaagctggagcaggtgtctgagaagggcaaggcttacaccaactacttcggacggtgcaatgtggccgagcacgaaaagctgatcctgctggcccagctgaagcccgagaaggatagcgacgaagccgtgacatatagcctgggaaagtttgggcagagggccctggatttctacagcattcatgtgaccaaggagtccacccaccccgtgaagcccctggcccagatcgccggaaacagatacgcctccggacctgtgggaaaggccctgagcgacgcatgtatgggcacaatcgcctccttcctgtctaagtaccaggacatcatcatcgaacaccagaaggtggtgaagggcaaccagaagagactggagagcctgcgggagctggccggcaaggaaaacctggaataccctagcgtgaccctgccacctcagcctcacaccaaggagggcgttgatgcctacaacgaagtgatcgcccgggtgcgaatgtgggtgaacctgaacctgtggcagaagctgaagctaagcagagatgatgccaagcctctgctgagactgaagggattcccttcctttcctctggtcgagagacaggccaacgaagtggactggtgggacatggtgtgtaacgtgaagaagctgatcaacgagaaaaaggaggatggcaaggtgttttggcagaatctggctggctacaagagacaggaagccctgagaccatacctgagcagcgaggaagatcggaagaagggaaagaaattcgctcggtaccagctgggcgacctgctgctgcacctggaaaagaagcacggcgaggactggggaaaggtgtacgacgaggcctgggagcggattgacaagaaagtggaaggcctgagcaagcacatcaagctggaagaggaacggagaagcgaggacgcccagagcaaggccgccctgaccgactggctgcgggctaaggccagcttcgtgatcgagggcctgaaggaggccgacaaggacgagttctgcagatgcgagctgaagctgcagaagtggtacggggacctgcggggaaagcccttcgccatcgaagccgagaacagcatcctggacatcagcggcttcagcaagcagtacaactgtgccttcatctggcagaaggacggcgtgaagaagctgaacctgtacctgatcatcaactacttcaagggcggcaagctgcggttcaagaagatcaaacctgaagccttcgaagccaacagattctacaccgtgatcaacaaaaagagcggcgagatcgtgcccatggaggtgaacttcaacttcgacgaccccaacctgatcatcctgcctctggcctttggcaagagacagggcagagaattcatctggaacgacctgctgtccctggaaaccggcagcctgaagctggccaacggaagagtgatcgagaagacactgtacaacagaagaacccggcaggatgagcctgccctgttcgtggccctgaccttcgagcggcgggaggtcctggactcctccaatatcaaaccaatgaacctgatcggcgtggcaagaggcgaaaacatccccgccgtgatcgccctgaccgaccccgagggctgcccactgagccggtttaaggatagcctgggaaacccaacccacatcctgagaatcggcgagagctataaggagaagcagcggaccatccaggccaagaaggaggtggagcagcggagagccggcggctacagccggaagtacgccagcaaagccaagaatctggcagacgatatggtgagaaacaccgctagagatctgctgtactacgccgtgacccaggatgccatgctgatcttcgccaacctgagccggggcttcggccggcagggcaagcggaccttcatggccgagagacagtacacacggatggaggactggctgaccgccaagctggcctacgagggcctgagcaagacctacctgtccaagacactggcccagtacacctccaagacatgcagcaactgtgggtttaccatcaccagcgccgactacgacagggtgctggagaagctgaagaagacagcaacaggctggatgaccacaattaacggcaaggagctgaaggtggagggccagattacctactacaacagatacaagagacagaacgtagtcaaggacctgtccgtcgagctggatagactgagcgaagaatctgtgaacaacgacatctcctcctggacaaagggcagaagcggagaagctctgagcctcctgaagaaaagattctcccatagacccgtgcaggagaagttcgtgtgcctgaactgcggcttcgagacacacgcagccgagcaagccgccctgaacatcgccagatcctggctgttcctgcggagccaggagtacaagaaataccagacaaacaagacaaccggcaacaccgataagagagccttcgtcgagacctggcagtccttttaccggaagaagcttaaggaggtgtggaaacctgccgtgcggtctggcggatctggcggaggctccaccagccccaagaaaaagagaaaagtctaagctgccttctgcggggcttgccttctggccatgcccttcttctctcccttgcacctgtacctcttggtctttgaataaagcctgagtaggaaggctagcaaaaaaaaaaaaaaaaaaaaaaaaaaaaaaaaaaaaaaaaaaaaaaaaaaaaaaaaaaaaaaaaaaaaaaaaaaaaaaaagcccagccggctccccaacctctaccgaggagggcacctctgagtccgccacccccgagagcggccctggcacctccaccgagcccagcgagggcagcgcacccggcagccctgccggcagccccacctccacagaggagggaaccagcaccgagcccagcgaaggcagcgccccaggcaccagcaccgagcctagtgagcaggagattaaacggatcaacaagatcagaagaagacttgtgaaagacagcaacaccaagaaggccggcaagacaggccccatgaaaaccctgctggttagagtgatgacacccgatctgagagagcggctggaaaacctgagaaagaagcctgaaaatatcccccagcccatcagcaatacatctagagccaacctgaataagctgctgaccgattacaccgaaatgaagaaggcgatcctgcatgtgtactgggaagagttccagaaggaccctgtgggcctgatgagccgggtggcccagcctgccagcaagaagatcgatcagaacaagctgaaacctgagatggacgagaagggcaacctgaccaccgccggctttgcctgctctcagtgtggccagcccctgttcgtgtacaagctggagcaggtgtctgagaagggcaaggcttacaccaactacttcggacggtgcaatgtggccgagcacgaaaagctgatcctgctggcccagctgaagcccgagaaggatagcgacgaagccgtgacatatagcctgggaaagtttgggcagagggccctggatttctacagcattcatgtgaccaaggagtccacccaccccgtgaagcccctggcccagatcgccggaaacagatacgcctccggacctgtgggaaaggccctgagcgacgcatgtatgggcacaatcgcctccttcctgtctaagtaccaggacatcatcatcgaacaccagaaggtggtgaagggcaaccagaagagactggagagcctgcgggagctggccggcaaggaaaacctggaataccctagcgtgaccctgccacctcagcctcacaccaaggagggcgttgatgcctacaacgaagtgatcgcccgggtgcgaatgtgggtgaacctgaacctgtggcagaagctgaagctaagcagagatgatgccaagcctctgctgagactgaagggattcccttcctttcctctggtcgagagacaggccaacgaagtggactggtgggacatggtgtgtaacgtgaagaagctgatcaacgagaaaaaggaggatggcaaggtgttttggcagaatctggctggctacaagagacaggaagccctgagaccatacctgagcagcgaggaagatcggaagaagggaaagaaattcgctcggtaccagctgggcgacctgctgctgcacctggaaaagaagcacggcgaggactggggaaaggtgtacgacgaggcctgggagcggattgacaagaaagtggaaggcctgagcaagcacatcaagctggaagaggaacggagaagcgaggacgcccagagcaaggccgccctgaccgactggctgcgggctaaggccagcttcgtgatcgagggcctgaaggaggccgacaaggacgagttctgcagatgcgagctgaagctgcagaagtggtacggggacctgcggggaaagcccttcgccatcgaagccgagaacagcatcctggacatcagcggcttcagcaagcagtacaactgtgccttcatctggcagaaggacggcgtgaagaagctgaacctgtacctgatcatcaactacttcaagggcggcaagctgcggttcaagaagatcaaacctgaagccttcgaagccaacagattctacaccgtgatcaacaaaaagagcggcgagatcgtgcccatggaggtgaacttcaacttcgacgaccccaacctgatcatcctgcctctggcctttggcaagagacagggcagagaattcatctggaacgacctgctgtccctggaaaccggcagcctgaagctggccaacggaagagtgatcgagaagacactgtacaacagaagaacccggcaggatgagcctgccctgttcgtggccctgaccttcgagcggcgggaggtcctggactcctccaatatcaaaccaatgaacctgatcggcgtggcaagaggcgaaaacatccccgccgtgatcgccctgaccgaccccgagggctgcccactgagccggtttaaggatagcctgggaaacccaacccacatcctgagaatcggcgagagctataaggagaagcagcggaccatccaggccaagaaggaggtggagcagcggagagccggcggctacagccggaagtacgccagcaaagccaagaatctggcagacgatatggtgagaaacaccgctagagatctgctgtactacgccgtgacccaggatgccatgctgatcttcgccaacctgagccggggcttcggccggcagggcaagcggaccttcatggccgagagacagtacacacggatggaggactggctgaccgccaagctggcctacgagggcctgagcaagacctacctgtccaagacactggcccagtacacctccaagacatgcagcaactgtgggtttaccatcaccagcgccgactacgacagggtgctggagaagctgaagaagacagcaacaggctggatgaccacaattaacggcaaggagctgaaggtggagggccagattacctactacaacagatacaagagacagaacgtagtcaaggacctgtccgtcgagctggatagactgagcgaagaatctgtgaacaacgacatctcctcctggacaaagggcagaagcggagaagctctgagcctcctgaagaaaagattctcccatagacccgtgcaggagaagttcgtgtgcctgaactgcggcttcgagacacacgcagccgagcaagccgccctgaacatcgccagatcctggctgttcctgcggagccaggagtacaagaaataccagacaaacaagacaaccggcaacaccgataagagagccttcgtcgagacctggcagtccttttaccggaagaagcttaaggaggtgtggaaacctgccgtgcggtctggcggatctggcggaggctccaccagccccaagaaaaagagaaaagtctaagctgccttctgcggggcttgccttctggccatgcccttcttctctcccttgcacctgtacctcttggtctttgaataaagcctgagtaggaaggctagcaaaaaaaaaaaaaaaaaaaaaaaaaaaaaaaaaaaaaaaaaaaaaaaaaaaaaaaaaaaaaaaaaaaaaaaaaaaaaaaa

SEQ ID NO: 10009 - RNA, 8787 nt, synthetic construct
  source 1..8787: mol_type = other RNA
aggaaataagagagaaaagaagagtaagaagaaatataagagccaccatggcccctaagaagaagcgtaaagtgagccggatgaaccacgaccaggagttcgacccccctaaggtgtaccctcccgtccccgccgagaagagaaagcccatccgggtcctgagcctgttcgatggcatcgccaccggtctgctggtgctgaaggacctgggcatccaggtggataggtacattgcctccgaggtgtgcgaggactccatcaccgtgggaatggtgcgtcatcagggcaagatcatgtacgtgggcgacgtgcggagcgtgacacagaagcatatccaggagtggggccctttcgacctggtgatcggcggcagcccttgcaatgacctgagcatcgtgaacccagcccggaagggcctgtacgagggaaccggcagactgttcttcgagttttacagactgctgcacgacgcccggcctaaggaaggcgacgaccggcccttcttttggctgttcgagaatgtggtggccatgggagtcagcgacaagcgggatattagccggttcctggagagcaaccccgtgatgatcgatgccaaggaagtgagcgccgcccaccgggccagatacttctggggcaatctgcctggcatgaacagacccctggccagcaccgtgaacgacaagctggagctgcaggagtgcctggagcacggccggatcgccaagttcagcaaggtgagaaccatcaccacccgaagcaacagcatcaaacaaggcaaggaccagcactttcctgtgttcatgaacgagaaggaggacatcctgtggtgtaccgagatggagagagtgttcgggttcccagtccactacacagatgtcagcaacatgtctagactggccagacagagactgctgggaagaagctggtccgtccctgtgatcagacacctgttcgcccctctgaaggagtacttcgcctgcgtgagcagcggcaacagcaacgccaacagccggggccccagcttctctagcggcctggtgccactgtccctgagagggagccacatgggccccatggagatctacaaaaccgtgagcgcctggaagcggcagcctgtgcgcgtgctgagcctgtttcggaatatcgataaagtcctgaaaagcctgggattcctggagagcggctctggctccggcggtggcaccctgaagtacgtggaggatgtgacaaacgtggtcagacgggatgtggagaagtggggccccttcgatctggtgtacggcagcacccaacccctgggcagctcttgtgaccggtgccctggctggtacatgtttcagttccaccggatcctgcagtacgccctgccgagacaggagtcccagcggccattcttttggattttcatggacaacttgctgctgaccgaggatgaccaggaaactaccactcggttcctgcagaccgaagccgtgaccctgcaggacgtgagaggccgggactaccagaacgccatgcgggtgtggtccaacatccctggactgaaaagcaagcacgcacctctgacccctaaagaagaggagtacctgcaggcccaggtgcggagcagaagcaagctggacgcccctaaggtggatctgctggtgaagaattgcctcctgcccctgagagagtacttcaagtatttcagccagaatagtctgcccctgggaggcagcggcggcggcgcccagggcctggtgcccttcgaggaggtggccgtgtacttcaccaggaccgagtgggccctgctggaccccgcccagagggccctgtacagggccgtgatgcaggagaactacgagaacgtgaccagcctgggcttcgccgtgagcaagcccgacgtgatcagccagctggagaggggcgaggagccctgggtgcccgagctgcagggcagcgagcacagggagatcctgggcggcaccggcggcggcccaagcagcggcgcccctcctcccagcggcggcaggcggcccaagcagcggcgcccctcctcccagcggcggcagcccagccggctccccaacctctaccgaggagggcacctctgagtccgccacccccgagagcggccctggcacctccaccgagcccagcgagggcagcgcacccggcagccctgccggcagccccacctccacagaggagggaaccagcaccgagcccagcgaaggcagcgccccaggcaccagcaccgagcctagtgagcaggagattaaacggatcaacaagatcagaagaagacttgtgaaagacagcaacaccaagaaggccggcaagacaggccccatgaaaaccctgctggttagagtgatgacacccgatctgagagagcggctggaaaacctgagaaagaagcctgaaaatatcccccagcccatcagcaatacatctagagccaacctgaataagctgctgaccgattacaccgaaatgaagaaggcgatcctgcatgtgtactgggaagagttccagaaggaccctgtgggcctgatgagccgggtggcccagcctgccagcaagaagatcgatcagaacaagctgaaacctgagatggacgagaagggcaacctgaccaccgccggctttgcctgctctcagtgtggccagcccctgttcgtgtacaagctggagcaggtgtctgagaagggcaaggcttacaccaactacttcggacggtgcaatgtggccgagcacgaaaagctgatcctgctggcccagctgaagcccgagaaggatagcgacgaagccgtgacatatagcctgggaaagtttgggcagagggccctggatttctacagcattcatgtgaccaaggagtccacccaccccgtgaagcccctggcccagatcgccggaaacagatacgcctccggacctgtgggaaaggccctgagcgacgcatgtatgggcacaatcgcctccttcctgtctaagtaccaggacatcatcatcgaacaccagaaggtggtgaagggcaaccagaagagactggagagcctgcgggagctggccggcaaggaaaacctggaataccctagcgtgaccctgccacctcagcctcacaccaaggagggcgttgatgcctacaacgaagtgatcgcccgggtgcgaatgtgggtgaacctgaacctgtggcagaagctgaagctaagcagagatgatgccaagcctctgctgagactgaagggattcccttcctttcctctggtcgagagacaggccaacgaagtggactggtgggacatggtgtgtaacgtgaagaagctgatcaacgagaaaaaggaggatggcaaggtgttttggcagaatctggctggctacaagagacaggaagccctgagaccatacctgagcagcgaggaagatcggaagaagggaaagaaattcgctcggtaccagctgggcgacctgctgctgcacctggaaaagaagcacggcgaggactggggaaaggtgtacgacgaggcctgggagcggattgacaagaaagtggaaggcctgagcaagcacatcaagctggaagaggaacggagaagcgaggacgcccagagcaaggccgccctgaccgactggctgcgggctaaggccagcttcgtgatcgagggcctgaaggaggccgacaaggacgagttctgcagatgcgagctgaagctgcagaagtggtacggggacctgcggggaaagcccttcgccatcgaagccgagaacagcatcctggacatcagcggcttcagcaagcagtacaactgtgccttcatctggcagaaggacggcgtgaagaagctgaacctgtacctgatcatcaactacttcaagggcggcaagctgcggttcaagaagatcaaacctgaagccttcgaagccaacagattctacaccgtgatcaacaaaaagagcggcgagatcgtgcccatggaggtgaacttcaacttcgacgaccccaacctgatcatcctgcctctggcctttggcaagagacagggcagagaattcatctggaacgacctgctgtccctggaaaccggcagcctgaagctggccaacggaagagtgatcgagaagacactgtacaacagaagaacccggcaggatgagcctgccctgttcgtggccctgaccttcgagcggcgggaggtcctggactcctccaatatcaaaccaatgaacctgatcggcgtggcaagaggcgaaaacatccccgccgtgatcgccctgaccgaccccgagggctgcccactgagccggtttaaggatagcctgggaaacccaacccacatcctgagaatcggcgagagctataaggagaagcagcggaccatccaggccaagaaggaggtggagcagcggagagccggcggctacagccggaagtacgccagcaaagccaagaatctggcagacgatatggtgagaaacaccgctagagatctgctgtactacgccgtgacccaggatgccatgctgatcttcgccaacctgagccggggcttcggccggcagggcaagcggaccttcatggccgagagacagtacacacggatggaggactggctgaccgccaagctggcctacgagggcctgagcaagacctacctgtccaagacactggcccagtacacctccaagacatgcagcaactgtgggtttaccatcaccagcgccgactacgacagggtgctggagaagctgaagaagacagcaacaggctggatgaccacaattaacggcaaggagctgaaggtggagggccagattacctactacaacagatacaagagacagaacgtagtcaaggacctgtccgtcgagctggatagactgagcgaagaatctgtgaacaacgacatctcctcctggacaaagggcagaagcggagaagctctgagcctcctgaagaaaagattctcccatagacccgtgcaggagaagttcgtgtgcctgaactgcggcttcgagacacacgcagccgagcaagccgccctgaacatcgccagatcctggctgttcctgcggagccaggagtacaagaaataccagacaaacaagacaaccggcaacaccgataagagagccttcgtcgagacctggcagtccttttaccggaagaagcttaaggaggtgtggaaacctgccgtgcggtctggcggatctggcggaggctccaccagccccaagaaaaagagaaaagtctaagctgccttctgcggggcttgccttctggccatgcccttcttctctcccttgcacctgtacctcttggtctttgaataaagcctgagtaggaaggctagcaaaaaaaaaaaaaaaaaaaaaaaaaaaaaaaaaaaaaaaaaaaaaaaaaaaaaaaaaaaaaaaaaaaaaaaaaaaaaaaagcccagccggctccccaacctctaccgaggagggcacctctgagtccgccacccccgagagcggccctggcacctccaccgagcccagcgagggcagcgcacccggcagccctgccggcagccccacctccacagaggagggaaccagcaccgagcccagcgaaggcagcgccccaggcaccagcaccgagcctagtgagcaggagattaaacggatcaacaagatcagaagaagacttgtgaaagacagcaacaccaagaaggccggcaagacaggccccatgaaaaccctgctggttagagtgatgacacccgatctgagagagcggctggaaaacctgagaaagaagcctgaaaatatcccccagcccatcagcaatacatctagagccaacctgaataagctgctgaccgattacaccgaaatgaagaaggcgatcctgcatgtgtactgggaagagttccagaaggaccctgtgggcctgatgagccgggtggcccagcctgccagcaagaagatcgatcagaacaagctgaaacctgagatggacgagaagggcaacctgaccaccgccggctttgcctgctctcagtgtggccagcccctgttcgtgtacaagctggagcaggtgtctgagaagggcaaggcttacaccaactacttcggacggtgcaatgtggccgagcacgaaaagctgatcctgctggcccagctgaagcccgagaaggatagcgacgaagccgtgacatatagcctgggaaagtttgggcagagggccctggatttctacagcattcatgtgaccaaggagtccacccaccccgtgaagcccctggcccagatcgccggaaacagatacgcctccggacctgtgggaaaggccctgagcgacgcatgtatgggcacaatcgcctccttcctgtctaagtaccaggacatcatcatcgaacaccagaaggtggtgaagggcaaccagaagagactggagagcctgcgggagctggccggcaaggaaaacctggaataccctagcgtgaccctgccacctcagcctcacaccaaggagggcgttgatgcctacaacgaagtgatcgcccgggtgcgaatgtgggtgaacctgaacctgtggcagaagctgaagctaagcagagatgatgccaagcctctgctgagactgaagggattcccttcctttcctctggtcgagagacaggccaacgaagtggactggtgggacatggtgtgtaacgtgaagaagctgatcaacgagaaaaaggaggatggcaaggtgttttggcagaatctggctggctacaagagacaggaagccctgagaccatacctgagcagcgaggaagatcggaagaagggaaagaaattcgctcggtaccagctgggcgacctgctgctgcacctggaaaagaagcacggcgaggactggggaaaggtgtacgacgaggcctgggagcggattgacaagaaagtggaaggcctgagcaagcacatcaagctggaagaggaacggagaagcgaggacgcccagagcaaggccgccctgaccgactggctgcgggctaaggccagcttcgtgatcgagggcctgaaggaggccgacaaggacgagttctgcagatgcgagctgaagctgcagaagtggtacggggacctgcggggaaagcccttcgccatcgaagccgagaacagcatcctggacatcagcggcttcagcaagcagtacaactgtgccttcatctggcagaaggacggcgtgaagaagctgaacctgtacctgatcatcaactacttcaagggcggcaagctgcggttcaagaagatcaaacctgaagccttcgaagccaacagattctacaccgtgatcaacaaaaagagcggcgagatcgtgcccatggaggtgaacttcaacttcgacgaccccaacctgatcatcctgcctctggcctttggcaagagacagggcagagaattcatctggaacgacctgctgtccctggaaaccggcagcctgaagctggccaacggaagagtgatcgagaagacactgtacaacagaagaacccggcaggatgagcctgccctgttcgtggccctgaccttcgagcggcgggaggtcctggactcctccaatatcaaaccaatgaacctgatcggcgtggcaagaggcgaaaacatccccgccgtgatcgccctgaccgaccccgagggctgcccactgagccggtttaaggatagcctgggaaacccaacccacatcctgagaatcggcgagagctataaggagaagcagcggaccatccaggccaagaaggaggtggagcagcggagagccggcggctacagccggaagtacgccagcaaagccaagaatctggcagacgatatggtgagaaacaccgctagagatctgctgtactacgccgtgacccaggatgccatgctgatcttcgccaacctgagccggggcttcggccggcagggcaagcggaccttcatggccgagagacagtacacacggatggaggactggctgaccgccaagctggcctacgagggcctgagcaagacctacctgtccaagacactggcccagtacacctccaagacatgcagcaactgtgggtttaccatcaccagcgccgactacgacagggtgctggagaagctgaagaagacagcaacaggctggatgaccacaattaacggcaaggagctgaaggtggagggccagattacctactacaacagatacaagagacagaacgtagtcaaggacctgtccgtcgagctggatagactgagcgaagaatctgtgaacaacgacatctcctcctggacaaagggcagaagcggagaagctctgagcctcctgaagaaaagattctcccatagacccgtgcaggagaagttcgtgtgcctgaactgcggcttcgagacacacgcagccgagcaagccgccctgaacatcgccagatcctggctgttcctgcggagccaggagtacaagaaataccagacaaacaagacaaccggcaacaccgataagagagccttcgtcgagacctggcagtccttttaccggaagaagcttaaggaggtgtggaaacctgccgtgcggtctggcggatctggcggaggctccaccagccccaagaaaaagagaaaagtctaagctgccttctgcggggcttgccttctggccatgcccttcttctctcccttgcacctgtacctcttggtctttgaataaagcctgagtaggaaggctagcaaaaaaaaaaaaaaaaaaaaaaaaaaaaaaaaaaaaaaaaaaaaaaaaaaaaaaaaaaaaaaaaaaaaaaaaaaaaaaaa

SEQ ID NO: 10010 - RNA, 8787 nt, synthetic construct
  source 1..8787: mol_type = other RNA
aggaaataagagagaaaagaagagtaagaagaaatataagagccaccatggcccctaagaagaagcgtaaagtgagccggatgaaccacgaccaggagttcgacccccctaaggtgtaccctcccgtccccgccgagaagagaaagcccatccgggtcctgagcctgttcgatggcatcgccaccggtctgctggtgctgaaggacctgggcatccaggtggataggtacattgcctccgaggtgtgcgaggactccatcaccgtgggaatggtgcgtcatcagggcaagatcatgtacgtgggcgacgtgcggagcgtgacacagaagcatatccaggagtggggccctttcgacctggtgatcggcggcagcccttgcaatgacctgagcatcgtgaacccagcccggaagggcctgtacgagggaaccggcagactgttcttcgagttttacagactgctgcacgacgcccggcctaaggaaggcgacgaccggcccttcttttggctgttcgagaatgtggtggccatgggagtcagcgacaagcgggatattagccggttcctggagagcaaccccgtgatgatcgatgccaaggaagtgagcgccgcccaccgggccagatacttctggggcaatctgcctggcatgaacagacccctggccagcaccgtgaacgacaagctggagctgcaggagtgcctggagcacggccggatcgccaagttcagcaaggtgagaaccatcaccacccgaagcaacagcatcaaacaaggcaaggaccagcactttcctgtgttcatgaacgagaaggaggacatcctgtggtgtaccgagatggagagagtgttcgggttcccagtccactacacagatgtcagcaacatgtctagactggccagacagagactgctgggaagaagctggtccgtccctgtgatcagacacctgttcgcccctctgaaggagtacttcgcctgcgtgagcagcggcaacagcaacgccaacagccggggccccagcttctctagcggcctggtgccactgtccctgagagggagccacatgggccccatggagatctacaaaaccgtgagcgcctggaagcggcagcctgtgcgcgtgctgagcctgtttcggaatatcgataaagtcctgaaaagcctgggattcctggagagcggctctggctccggcggtggcaccctgaagtacgtggaggatgtgacaaacgtggtcagacgggatgtggagaagtggggccccttcgatctggtgtacggcagcacccaacccctgggcagctcttgtgaccggtgccctggctggtacatgtttcagttccaccggatcctgcagtacgccctgccgagacaggagtcccagcggccattcttttggattttcatggacaacttgctgctgaccgaggatgaccaggaaactaccactcggttcctgcagaccgaagccgtgaccctgcaggacgtgagaggccgggactaccagaacgccatgcgggtgtggtccaacatccctggactgaaaagcaagcacgcacctctgacccctaaagaagaggagtacctgcaggcccaggtgcggagcagaagcaagctggacgcccctaaggtggatctgctggtgaagaattgcctcctgcccctgagagagtacttcaagtatttcagccagaatagtctgcccctgggaggcagcggcggcggcagccagggcagcgtgagcttcaaggacgtgaccgtggacttcacccaggaggagtggcagcagctggaccccgcccagaaggccctgtacagggacgtgatgctggagaactactgccacttcgtgagcgtgggcttccacatgaccaagcccgacatgatcaggaagctggagcagggcgaggagctgtggacccagaggatcttccccagctacagctacctggccgaggacggcaagaccggcggcccaagcagcggcgcccctcctcccagcggcggcaggcggcccaagcagcggcgcccctcctcccagcggcggcagcccagccggctccccaacctctaccgaggagggcacctctgagtccgccacccccgagagcggccctggcacctccaccgagcccagcgagggcagcgcacccggcagccctgccggcagccccacctccacagaggagggaaccagcaccgagcccagcgaaggcagcgccccaggcaccagcaccgagcctagtgagcaggagattaaacggatcaacaagatcagaagaagacttgtgaaagacagcaacaccaagaaggccggcaagacaggccccatgaaaaccctgctggttagagtgatgacacccgatctgagagagcggctggaaaacctgagaaagaagcctgaaaatatcccccagcccatcagcaatacatctagagccaacctgaataagctgctgaccgattacaccgaaatgaagaaggcgatcctgcatgtgtactgggaagagttccagaaggaccctgtgggcctgatgagccgggtggcccagcctgccagcaagaagatcgatcagaacaagctgaaacctgagatggacgagaagggcaacctgaccaccgccggctttgcctgctctcagtgtggccagcccctgttcgtgtacaagctggagcaggtgtctgagaagggcaaggcttacaccaactacttcggacggtgcaatgtggccgagcacgaaaagctgatcctgctggcccagctgaagcccgagaaggatagcgacgaagccgtgacatatagcctgggaaagtttgggcagagggccctggatttctacagcattcatgtgaccaaggagtccacccaccccgtgaagcccctggcccagatcgccggaaacagatacgcctccggacctgtgggaaaggccctgagcgacgcatgtatgggcacaatcgcctccttcctgtctaagtaccaggacatcatcatcgaacaccagaaggtggtgaagggcaaccagaagagactggagagcctgcgggagctggccggcaaggaaaacctggaataccctagcgtgaccctgccacctcagcctcacaccaaggagggcgttgatgcctacaacgaagtgatcgcccgggtgcgaatgtgggtgaacctgaacctgtggcagaagctgaagctaagcagagatgatgccaagcctctgctgagactgaagggattcccttcctttcctctggtcgagagacaggccaacgaagtggactggtgggacatggtgtgtaacgtgaagaagctgatcaacgagaaaaaggaggatggcaaggtgttttggcagaatctggctggctacaagagacaggaagccctgagaccatacctgagcagcgaggaagatcggaagaagggaaagaaattcgctcggtaccagctgggcgacctgctgctgcacctggaaaagaagcacggcgaggactggggaaaggtgtacgacgaggcctgggagcggattgacaagaaagtggaaggcctgagcaagcacatcaagctggaagaggaacggagaagcgaggacgcccagagcaaggccgccctgaccgactggctgcgggctaaggccagcttcgtgatcgagggcctgaaggaggccgacaaggacgagttctgcagatgcgagctgaagctgcagaagtggtacggggacctgcggggaaagcccttcgccatcgaagccgagaacagcatcctggacatcagcggcttcagcaagcagtacaactgtgccttcatctggcagaaggacggcgtgaagaagctgaacctgtacctgatcatcaactacttcaagggcggcaagctgcggttcaagaagatcaaacctgaagccttcgaagccaacagattctacaccgtgatcaacaaaaagagcggcgagatcgtgcccatggaggtgaacttcaacttcgacgaccccaacctgatcatcctgcctctggcctttggcaagagacagggcagagaattcatctggaacgacctgctgtccctggaaaccggcagcctgaagctggccaacggaagagtgatcgagaagacactgtacaacagaagaacccggcaggatgagcctgccctgttcgtggccctgaccttcgagcggcgggaggtcctggactcctccaatatcaaaccaatgaacctgatcggcgtggcaagaggcgaaaacatccccgccgtgatcgccctgaccgaccccgagggctgcccactgagccggtttaaggatagcctgggaaacccaacccacatcctgagaatcggcgagagctataaggagaagcagcggaccatccaggccaagaaggaggtggagcagcggagagccggcggctacagccggaagtacgccagcaaagccaagaatctggcagacgatatggtgagaaacaccgctagagatctgctgtactacgccgtgacccaggatgccatgctgatcttcgccaacctgagccggggcttcggccggcagggcaagcggaccttcatggccgagagacagtacacacggatggaggactggctgaccgccaagctggcctacgagggcctgagcaagacctacctgtccaagacactggcccagtacacctccaagacatgcagcaactgtgggtttaccatcaccagcgccgactacgacagggtgctggagaagctgaagaagacagcaacaggctggatgaccacaattaacggcaaggagctgaaggtggagggccagattacctactacaacagatacaagagacagaacgtagtcaaggacctgtccgtcgagctggatagactgagcgaagaatctgtgaacaacgacatctcctcctggacaaagggcagaagcggagaagctctgagcctcctgaagaaaagattctcccatagacccgtgcaggagaagttcgtgtgcctgaactgcggcttcgagacacacgcagccgagcaagccgccctgaacatcgccagatcctggctgttcctgcggagccaggagtacaagaaataccagacaaacaagacaaccggcaacaccgataagagagccttcgtcgagacctggcagtccttttaccggaagaagcttaaggaggtgtggaaacctgccgtgcggtctggcggatctggcggaggctccaccagccccaagaaaaagagaaaagtctaagctgccttctgcggggcttgccttctggccatgcccttcttctctcccttgcacctgtacctcttggtctttgaataaagcctgagtaggaaggctagcaaaaaaaaaaaaaaaaaaaaaaaaaaaaaaaaaaaaaaaaaaaaaaaaaaaaaaaaaaaaaaaaaaaaaaaaaaaaaaaagcccagccggctccccaacctctaccgaggagggcacctctgagtccgccacccccgagagcggccctggcacctccaccgagcccagcgagggcagcgcacccggcagccctgccggcagccccacctccacagaggagggaaccagcaccgagcccagcgaaggcagcgccccaggcaccagcaccgagcctagtgagcaggagattaaacggatcaacaagatcagaagaagacttgtgaaagacagcaacaccaagaaggccggcaagacaggccccatgaaaaccctgctggttagagtgatgacacccgatctgagagagcggctggaaaacctgagaaagaagcctgaaaatatcccccagcccatcagcaatacatctagagccaacctgaataagctgctgaccgattacaccgaaatgaagaaggcgatcctgcatgtgtactgggaagagttccagaaggaccctgtgggcctgatgagccgggtggcccagcctgccagcaagaagatcgatcagaacaagctgaaacctgagatggacgagaagggcaacctgaccaccgccggctttgcctgctctcagtgtggccagcccctgttcgtgtacaagctggagcaggtgtctgagaagggcaaggcttacaccaactacttcggacggtgcaatgtggccgagcacgaaaagctgatcctgctggcccagctgaagcccgagaaggatagcgacgaagccgtgacatatagcctgggaaagtttgggcagagggccctggatttctacagcattcatgtgaccaaggagtccacccaccccgtgaagcccctggcccagatcgccggaaacagatacgcctccggacctgtgggaaaggccctgagcgacgcatgtatgggcacaatcgcctccttcctgtctaagtaccaggacatcatcatcgaacaccagaaggtggtgaagggcaaccagaagagactggagagcctgcgggagctggccggcaaggaaaacctggaataccctagcgtgaccctgccacctcagcctcacaccaaggagggcgttgatgcctacaacgaagtgatcgcccgggtgcgaatgtgggtgaacctgaacctgtggcagaagctgaagctaagcagagatgatgccaagcctctgctgagactgaagggattcccttcctttcctctggtcgagagacaggccaacgaagtggactggtgggacatggtgtgtaacgtgaagaagctgatcaacgagaaaaaggaggatggcaaggtgttttggcagaatctggctggctacaagagacaggaagccctgagaccatacctgagcagcgaggaagatcggaagaagggaaagaaattcgctcggtaccagctgggcgacctgctgctgcacctggaaaagaagcacggcgaggactggggaaaggtgtacgacgaggcctgggagcggattgacaagaaagtggaaggcctgagcaagcacatcaagctggaagaggaacggagaagcgaggacgcccagagcaaggccgccctgaccgactggctgcgggctaaggccagcttcgtgatcgagggcctgaaggaggccgacaaggacgagttctgcagatgcgagctgaagctgcagaagtggtacggggacctgcggggaaagcccttcgccatcgaagccgagaacagcatcctggacatcagcggcttcagcaagcagtacaactgtgccttcatctggcagaaggacggcgtgaagaagctgaacctgtacctgatcatcaactacttcaagggcggcaagctgcggttcaagaagatcaaacctgaagccttcgaagccaacagattctacaccgtgatcaacaaaaagagcggcgagatcgtgcccatggaggtgaacttcaacttcgacgaccccaacctgatcatcctgcctctggcctttggcaagagacagggcagagaattcatctggaacgacctgctgtccctggaaaccggcagcctgaagctggccaacggaagagtgatcgagaagacactgtacaacagaagaacccggcaggatgagcctgccctgttcgtggccctgaccttcgagcggcgggaggtcctggactcctccaatatcaaaccaatgaacctgatcggcgtggcaagaggcgaaaacatccccgccgtgatcgccctgaccgaccccgagggctgcccactgagccggtttaaggatagcctgggaaacccaacccacatcctgagaatcggcgagagctataaggagaagcagcggaccatccaggccaagaaggaggtggagcagcggagagccggcggctacagccggaagtacgccagcaaagccaagaatctggcagacgatatggtgagaaacaccgctagagatctgctgtactacgccgtgacccaggatgccatgctgatcttcgccaacctgagccggggcttcggccggcagggcaagcggaccttcatggccgagagacagtacacacggatggaggactggctgaccgccaagctggcctacgagggcctgagcaagacctacctgtccaagacactggcccagtacacctccaagacatgcagcaactgtgggtttaccatcaccagcgccgactacgacagggtgctggagaagctgaagaagacagcaacaggctggatgaccacaattaacggcaaggagctgaaggtggagggccagattacctactacaacagatacaagagacagaacgtagtcaaggacctgtccgtcgagctggatagactgagcgaagaatctgtgaacaacgacatctcctcctggacaaagggcagaagcggagaagctctgagcctcctgaagaaaagattctcccatagacccgtgcaggagaagttcgtgtgcctgaactgcggcttcgagacacacgcagccgagcaagccgccctgaacatcgccagatcctggctgttcctgcggagccaggagtacaagaaataccagacaaacaagacaaccggcaacaccgataagagagccttcgtcgagacctggcagtccttttaccggaagaagcttaaggaggtgtggaaacctgccgtgcggtctggcggatctggcggaggctccaccagccccaagaaaaagagaaaagtctaagctgccttctgcggggcttgccttctggccatgcccttcttctctcccttgcacctgtacctcttggtctttgaataaagcctgagtaggaaggctagcaaaaaaaaaaaaaaaaaaaaaaaaaaaaaaaaaaaaaaaaaaaaaaaaaaaaaaaaaaaaaaaaaaaaaaaaaaaaaaaa

SEQ ID NO: 10011 - RNA, 8787 nt, synthetic construct
  source 1..8787: mol_type = other RNA
aggaaataagagagaaaagaagagtaagaagaaatataagagccaccatggcccctaagaagaagcgtaaagtgagccggatgaaccacgaccaggagttcgacccccctaaggtgtaccctcccgtccccgccgagaagagaaagcccatccgggtcctgagcctgttcgatggcatcgccaccggtctgctggtgctgaaggacctgggcatccaggtggataggtacattgcctccgaggtgtgcgaggactccatcaccgtgggaatggtgcgtcatcagggcaagatcatgtacgtgggcgacgtgcggagcgtgacacagaagcatatccaggagtggggccctttcgacctggtgatcggcggcagcccttgcaatgacctgagcatcgtgaacccagcccggaagggcctgtacgagggaaccggcagactgttcttcgagttttacagactgctgcacgacgcccggcctaaggaaggcgacgaccggcccttcttttggctgttcgagaatgtggtggccatgggagtcagcgacaagcgggatattagccggttcctggagagcaaccccgtgatgatcgatgccaaggaagtgagcgccgcccaccgggccagatacttctggggcaatctgcctggcatgaacagacccctggccagcaccgtgaacgacaagctggagctgcaggagtgcctggagcacggccggatcgccaagttcagcaaggtgagaaccatcaccacccgaagcaacagcatcaaacaaggcaaggaccagcactttcctgtgttcatgaacgagaaggaggacatcctgtggtgtaccgagatggagagagtgttcgggttcccagtccactacacagatgtcagcaacatgtctagactggccagacagagactgctgggaagaagctggtccgtccctgtgatcagacacctgttcgcccctctgaaggagtacttcgcctgcgtgagcagcggcaacagcaacgccaacagccggggccccagcttctctagcggcctggtgccactgtccctgagagggagccacatgggccccatggagatctacaaaaccgtgagcgcctggaagcggcagcctgtgcgcgtgctgagcctgtttcggaatatcgataaagtcctgaaaagcctgggattcctggagagcggctctggctccggcggtggcaccctgaagtacgtggaggatgtgacaaacgtggtcagacgggatgtggagaagtggggccccttcgatctggtgtacggcagcacccaacccctgggcagctcttgtgaccggtgccctggctggtacatgtttcagttccaccggatcctgcagtacgccctgccgagacaggagtcccagcggccattcttttggattttcatggacaacttgctgctgaccgaggatgaccaggaaactaccactcggttcctgcagaccgaagccgtgaccctgcaggacgtgagaggccgggactaccagaacgccatgcgggtgtggtccaacatccctggactgaaaagcaagcacgcacctctgacccctaaagaagaggagtacctgcaggcccaggtgcggagcagaagcaagctggacgcccctaaggtggatctgctggtgaagaattgcctcctgcccctgagagagtacttcaagtatttcagccagaatagtctgcccctgggaggcagcggcggcggcaccctgctgaccttcagggacgtggccatcgagttcagcctggaggagtggaagtgcctggaccccgcccagcagaacctgtacagggacgtgatgctggagaactacaggaacctgttcagcatcggcctgaccgtgagcaagcccggcctgatcacctgcctggagcagaggaaggagccctggaacgtgaagaggcaggaggccgtggacggccaccccgccatgagcagccacgtgaccggcggcccaagcagcggcgcccctcctcccagcggcggcaggcggcccaagcagcggcgcccctcctcccagcggcggcagcccagccggctccccaacctctaccgaggagggcacctctgagtccgccacccccgagagcggccctggcacctccaccgagcccagcgagggcagcgcacccggcagccctgccggcagccccacctccacagaggagggaaccagcaccgagcccagcgaaggcagcgccccaggcaccagcaccgagcctagtgagcaggagattaaacggatcaacaagatcagaagaagacttgtgaaagacagcaacaccaagaaggccggcaagacaggccccatgaaaaccctgctggttagagtgatgacacccgatctgagagagcggctggaaaacctgagaaagaagcctgaaaatatcccccagcccatcagcaatacatctagagccaacctgaataagctgctgaccgattacaccgaaatgaagaaggcgatcctgcatgtgtactgggaagagttccagaaggaccctgtgggcctgatgagccgggtggcccagcctgccagcaagaagatcgatcagaacaagctgaaacctgagatggacgagaagggcaacctgaccaccgccggctttgcctgctctcagtgtggccagcccctgttcgtgtacaagctggagcaggtgtctgagaagggcaaggcttacaccaactacttcggacggtgcaatgtggccgagcacgaaaagctgatcctgctggcccagctgaagcccgagaaggatagcgacgaagccgtgacatatagcctgggaaagtttgggcagagggccctggatttctacagcattcatgtgaccaaggagtccacccaccccgtgaagcccctggcccagatcgccggaaacagatacgcctccggacctgtgggaaaggccctgagcgacgcatgtatgggcacaatcgcctccttcctgtctaagtaccaggacatcatcatcgaacaccagaaggtggtgaagggcaaccagaagagactggagagcctgcgggagctggccggcaaggaaaacctggaataccctagcgtgaccctgccacctcagcctcacaccaaggagggcgttgatgcctacaacgaagtgatcgcccgggtgcgaatgtgggtgaacctgaacctgtggcagaagctgaagctaagcagagatgatgccaagcctctgctgagactgaagggattcccttcctttcctctggtcgagagacaggccaacgaagtggactggtgggacatggtgtgtaacgtgaagaagctgatcaacgagaaaaaggaggatggcaaggtgttttggcagaatctggctggctacaagagacaggaagccctgagaccatacctgagcagcgaggaagatcggaagaagggaaagaaattcgctcggtaccagctgggcgacctgctgctgcacctggaaaagaagcacggcgaggactggggaaaggtgtacgacgaggcctgggagcggattgacaagaaagtggaaggcctgagcaagcacatcaagctggaagaggaacggagaagcgaggacgcccagagcaaggccgccctgaccgactggctgcgggctaaggccagcttcgtgatcgagggcctgaaggaggccgacaaggacgagttctgcagatgcgagctgaagctgcagaagtggtacggggacctgcggggaaagcccttcgccatcgaagccgagaacagcatcctggacatcagcggcttcagcaagcagtacaactgtgccttcatctggcagaaggacggcgtgaagaagctgaacctgtacctgatcatcaactacttcaagggcggcaagctgcggttcaagaagatcaaacctgaagccttcgaagccaacagattctacaccgtgatcaacaaaaagagcggcgagatcgtgcccatggaggtgaacttcaacttcgacgaccccaacctgatcatcctgcctctggcctttggcaagagacagggcagagaattcatctggaacgacctgctgtccctggaaaccggcagcctgaagctggccaacggaagagtgatcgagaagacactgtacaacagaagaacccggcaggatgagcctgccctgttcgtggccctgaccttcgagcggcgggaggtcctggactcctccaatatcaaaccaatgaacctgatcggcgtggcaagaggcgaaaacatccccgccgtgatcgccctgaccgaccccgagggctgcccactgagccggtttaaggatagcctgggaaacccaacccacatcctgagaatcggcgagagctataaggagaagcagcggaccatccaggccaagaaggaggtggagcagcggagagccggcggctacagccggaagtacgccagcaaagccaagaatctggcagacgatatggtgagaaacaccgctagagatctgctgtactacgccgtgacccaggatgccatgctgatcttcgccaacctgagccggggcttcggccggcagggcaagcggaccttcatggccgagagacagtacacacggatggaggactggctgaccgccaagctggcctacgagggcctgagcaagacctacctgtccaagacactggcccagtacacctccaagacatgcagcaactgtgggtttaccatcaccagcgccgactacgacagggtgctggagaagctgaagaagacagcaacaggctggatgaccacaattaacggcaaggagctgaaggtggagggccagattacctactacaacagatacaagagacagaacgtagtcaaggacctgtccgtcgagctggatagactgagcgaagaatctgtgaacaacgacatctcctcctggacaaagggcagaagcggagaagctctgagcctcctgaagaaaagattctcccatagacccgtgcaggagaagttcgtgtgcctgaactgcggcttcgagacacacgcagccgagcaagccgccctgaacatcgccagatcctggctgttcctgcggagccaggagtacaagaaataccagacaaacaagacaaccggcaacaccgataagagagccttcgtcgagacctggcagtccttttaccggaagaagcttaaggaggtgtggaaacctgccgtgcggtctggcggatctggcggaggctccaccagccccaagaaaaagagaaaagtctaagctgccttctgcggggcttgccttctggccatgcccttcttctctcccttgcacctgtacctcttggtctttgaataaagcctgagtaggaaggctagcaaaaaaaaaaaaaaaaaaaaaaaaaaaaaaaaaaaaaaaaaaaaaaaaaaaaaaaaaaaaaaaaaaaaaaaaaaaaaaaagcccagccggctccccaacctctaccgaggagggcacctctgagtccgccacccccgagagcggccctggcacctccaccgagcccagcgagggcagcgcacccggcagccctgccggcagccccacctccacagaggagggaaccagcaccgagcccagcgaaggcagcgccccaggcaccagcaccgagcctagtgagcaggagattaaacggatcaacaagatcagaagaagacttgtgaaagacagcaacaccaagaaggccggcaagacaggccccatgaaaaccctgctggttagagtgatgacacccgatctgagagagcggctggaaaacctgagaaagaagcctgaaaatatcccccagcccatcagcaatacatctagagccaacctgaataagctgctgaccgattacaccgaaatgaagaaggcgatcctgcatgtgtactgggaagagttccagaaggaccctgtgggcctgatgagccgggtggcccagcctgccagcaagaagatcgatcagaacaagctgaaacctgagatggacgagaagggcaacctgaccaccgccggctttgcctgctctcagtgtggccagcccctgttcgtgtacaagctggagcaggtgtctgagaagggcaaggcttacaccaactacttcggacggtgcaatgtggccgagcacgaaaagctgatcctgctggcccagctgaagcccgagaaggatagcgacgaagccgtgacatatagcctgggaaagtttgggcagagggccctggatttctacagcattcatgtgaccaaggagtccacccaccccgtgaagcccctggcccagatcgccggaaacagatacgcctccggacctgtgggaaaggccctgagcgacgcatgtatgggcacaatcgcctccttcctgtctaagtaccaggacatcatcatcgaacaccagaaggtggtgaagggcaaccagaagagactggagagcctgcgggagctggccggcaaggaaaacctggaataccctagcgtgaccctgccacctcagcctcacaccaaggagggcgttgatgcctacaacgaagtgatcgcccgggtgcgaatgtgggtgaacctgaacctgtggcagaagctgaagctaagcagagatgatgccaagcctctgctgagactgaagggattcccttcctttcctctggtcgagagacaggccaacgaagtggactggtgggacatggtgtgtaacgtgaagaagctgatcaacgagaaaaaggaggatggcaaggtgttttggcagaatctggctggctacaagagacaggaagccctgagaccatacctgagcagcgaggaagatcggaagaagggaaagaaattcgctcggtaccagctgggcgacctgctgctgcacctggaaaagaagcacggcgaggactggggaaaggtgtacgacgaggcctgggagcggattgacaagaaagtggaaggcctgagcaagcacatcaagctggaagaggaacggagaagcgaggacgcccagagcaaggccgccctgaccgactggctgcgggctaaggccagcttcgtgatcgagggcctgaaggaggccgacaaggacgagttctgcagatgcgagctgaagctgcagaagtggtacggggacctgcggggaaagcccttcgccatcgaagccgagaacagcatcctggacatcagcggcttcagcaagcagtacaactgtgccttcatctggcagaaggacggcgtgaagaagctgaacctgtacctgatcatcaactacttcaagggcggcaagctgcggttcaagaagatcaaacctgaagccttcgaagccaacagattctacaccgtgatcaacaaaaagagcggcgagatcgtgcccatggaggtgaacttcaacttcgacgaccccaacctgatcatcctgcctctggcctttggcaagagacagggcagagaattcatctggaacgacctgctgtccctggaaaccggcagcctgaagctggccaacggaagagtgatcgagaagacactgtacaacagaagaacccggcaggatgagcctgccctgttcgtggccctgaccttcgagcggcgggaggtcctggactcctccaatatcaaaccaatgaacctgatcggcgtggcaagaggcgaaaacatccccgccgtgatcgccctgaccgaccccgagggctgcccactgagccggtttaaggatagcctgggaaacccaacccacatcctgagaatcggcgagagctataaggagaagcagcggaccatccaggccaagaaggaggtggagcagcggagagccggcggctacagccggaagtacgccagcaaagccaagaatctggcagacgatatggtgagaaacaccgctagagatctgctgtactacgccgtgacccaggatgccatgctgatcttcgccaacctgagccggggcttcggccggcagggcaagcggaccttcatggccgagagacagtacacacggatggaggactggctgaccgccaagctggcctacgagggcctgagcaagacctacctgtccaagacactggcccagtacacctccaagacatgcagcaactgtgggtttaccatcaccagcgccgactacgacagggtgctggagaagctgaagaagacagcaacaggctggatgaccacaattaacggcaaggagctgaaggtggagggccagattacctactacaacagatacaagagacagaacgtagtcaaggacctgtccgtcgagctggatagactgagcgaagaatctgtgaacaacgacatctcctcctggacaaagggcagaagcggagaagctctgagcctcctgaagaaaagattctcccatagacccgtgcaggagaagttcgtgtgcctgaactgcggcttcgagacacacgcagccgagcaagccgccctgaacatcgccagatcctggctgttcctgcggagccaggagtacaagaaataccagacaaacaagacaaccggcaacaccgataagagagccttcgtcgagacctggcagtccttttaccggaagaagcttaaggaggtgtggaaacctgccgtgcggtctggcggatctggcggaggctccaccagccccaagaaaaagagaaaagtctaagctgccttctgcggggcttgccttctggccatgcccttcttctctcccttgcacctgtacctcttggtctttgaataaagcctgagtaggaaggctagcaaaaaaaaaaaaaaaaaaaaaaaaaaaaaaaaaaaaaaaaaaaaaaaaaaaaaaaaaaaaaaaaaaaaaaaaaaaaaaaa

SEQ ID NO: 10012 - RNA, 8787 nt, synthetic construct
  source 1..8787: mol_type = other RNA
aggaaataagagagaaaagaagagtaagaagaaatataagagccaccatggcccctaagaagaagcgtaaagtgagccggatgaaccacgaccaggagttcgacccccctaaggtgtaccctcccgtccccgccgagaagagaaagcccatccgggtcctgagcctgttcgatggcatcgccaccggtctgctggtgctgaaggacctgggcatccaggtggataggtacattgcctccgaggtgtgcgaggactccatcaccgtgggaatggtgcgtcatcagggcaagatcatgtacgtgggcgacgtgcggagcgtgacacagaagcatatccaggagtggggccctttcgacctggtgatcggcggcagcccttgcaatgacctgagcatcgtgaacccagcccggaagggcctgtacgagggaaccggcagactgttcttcgagttttacagactgctgcacgacgcccggcctaaggaaggcgacgaccggcccttcttttggctgttcgagaatgtggtggccatgggagtcagcgacaagcgggatattagccggttcctggagagcaaccccgtgatgatcgatgccaaggaagtgagcgccgcccaccgggccagatacttctggggcaatctgcctggcatgaacagacccctggccagcaccgtgaacgacaagctggagctgcaggagtgcctggagcacggccggatcgccaagttcagcaaggtgagaaccatcaccacccgaagcaacagcatcaaacaaggcaaggaccagcactttcctgtgttcatgaacgagaaggaggacatcctgtggtgtaccgagatggagagagtgttcgggttcccagtccactacacagatgtcagcaacatgtctagactggccagacagagactgctgggaagaagctggtccgtccctgtgatcagacacctgttcgcccctctgaaggagtacttcgcctgcgtgagcagcggcaacagcaacgccaacagccggggccccagcttctctagcggcctggtgccactgtccctgagagggagccacatgggccccatggagatctacaaaaccgtgagcgcctggaagcggcagcctgtgcgcgtgctgagcctgtttcggaatatcgataaagtcctgaaaagcctgggattcctggagagcggctctggctccggcggtggcaccctgaagtacgtggaggatgtgacaaacgtggtcagacgggatgtggagaagtggggccccttcgatctggtgtacggcagcacccaacccctgggcagctcttgtgaccggtgccctggctggtacatgtttcagttccaccggatcctgcagtacgccctgccgagacaggagtcccagcggccattcttttggattttcatggacaacttgctgctgaccgaggatgaccaggaaactaccactcggttcctgcagaccgaagccgtgaccctgcaggacgtgagaggccgggactaccagaacgccatgcgggtgtggtccaacatccctggactgaaaagcaagcacgcacctctgacccctaaagaagaggagtacctgcaggcccaggtgcggagcagaagcaagctggacgcccctaaggtggatctgctggtgaagaattgcctcctgcccctgagagagtacttcaagtatttcagccagaatagtctgcccctgggaggcagcggcggcggcctgcagggcagcctgagcttcgaggacgtgaccgtgggcttcagccaggaggagtggcagaggctggaccccgcccagaggaccctgtacagggacgtgatgctggagaactacagccacctggtggccgtgggctgctgcgtgcccaagcccgacgtgatcttcaggctggagcagggccagcagccctggctggtggaggaggagagcctggaccagagctgccccgaggtgtgcagggtgggcggcccaagcagcggcgcccctcctcccagcggcggcaggcggcccaagcagcggcgcccctcctcccagcggcggcagcccagccggctccccaacctctaccgaggagggcacctctgagtccgccacccccgagagcggccctggcacctccaccgagcccagcgagggcagcgcacccggcagccctgccggcagccccacctccacagaggagggaaccagcaccgagcccagcgaaggcagcgccccaggcaccagcaccgagcctagtgagcaggagattaaacggatcaacaagatcagaagaagacttgtgaaagacagcaacaccaagaaggccggcaagacaggccccatgaaaaccctgctggttagagtgatgacacccgatctgagagagcggctggaaaacctgagaaagaagcctgaaaatatcccccagcccatcagcaatacatctagagccaacctgaataagctgctgaccgattacaccgaaatgaagaaggcgatcctgcatgtgtactgggaagagttccagaaggaccctgtgggcctgatgagccgggtggcccagcctgccagcaagaagatcgatcagaacaagctgaaacctgagatggacgagaagggcaacctgaccaccgccggctttgcctgctctcagtgtggccagcccctgttcgtgtacaagctggagcaggtgtctgagaagggcaaggcttacaccaactacttcggacggtgcaatgtggccgagcacgaaaagctgatcctgctggcccagctgaagcccgagaaggatagcgacgaagccgtgacatatagcctgggaaagtttgggcagagggccctggatttctacagcattcatgtgaccaaggagtccacccaccccgtgaagcccctggcccagatcgccggaaacagatacgcctccggacctgtgggaaaggccctgagcgacgcatgtatgggcacaatcgcctccttcctgtctaagtaccaggacatcatcatcgaacaccagaaggtggtgaagggcaaccagaagagactggagagcctgcgggagctggccggcaaggaaaacctggaataccctagcgtgaccctgccacctcagcctcacaccaaggagggcgttgatgcctacaacgaagtgatcgcccgggtgcgaatgtgggtgaacctgaacctgtggcagaagctgaagctaagcagagatgatgccaagcctctgctgagactgaagggattcccttcctttcctctggtcgagagacaggccaacgaagtggactggtgggacatggtgtgtaacgtgaagaagctgatcaacgagaaaaaggaggatggcaaggtgttttggcagaatctggctggctacaagagacaggaagccctgagaccatacctgagcagcgaggaagatcggaagaagggaaagaaattcgctcggtaccagctgggcgacctgctgctgcacctggaaaagaagcacggcgaggactggggaaaggtgtacgacgaggcctgggagcggattgacaagaaagtggaaggcctgagcaagcacatcaagctggaagaggaacggagaagcgaggacgcccagagcaaggccgccctgaccgactggctgcgggctaaggccagcttcgtgatcgagggcctgaaggaggccgacaaggacgagttctgcagatgcgagctgaagctgcagaagtggtacggggacctgcggggaaagcccttcgccatcgaagccgagaacagcatcctggacatcagcggcttcagcaagcagtacaactgtgccttcatctggcagaaggacggcgtgaagaagctgaacctgtacctgatcatcaactacttcaagggcggcaagctgcggttcaagaagatcaaacctgaagccttcgaagccaacagattctacaccgtgatcaacaaaaagagcggcgagatcgtgcccatggaggtgaacttcaacttcgacgaccccaacctgatcatcctgcctctggcctttggcaagagacagggcagagaattcatctggaacgacctgctgtccctggaaaccggcagcctgaagctggccaacggaagagtgatcgagaagacactgtacaacagaagaacccggcaggatgagcctgccctgttcgtggccctgaccttcgagcggcgggaggtcctggactcctccaatatcaaaccaatgaacctgatcggcgtggcaagaggcgaaaacatccccgccgtgatcgccctgaccgaccccgagggctgcccactgagccggtttaaggatagcctgggaaacccaacccacatcctgagaatcggcgagagctataaggagaagcagcggaccatccaggccaagaaggaggtggagcagcggagagccggcggctacagccggaagtacgccagcaaagccaagaatctggcagacgatatggtgagaaacaccgctagagatctgctgtactacgccgtgacccaggatgccatgctgatcttcgccaacctgagccggggcttcggccggcagggcaagcggaccttcatggccgagagacagtacacacggatggaggactggctgaccgccaagctggcctacgagggcctgagcaagacctacctgtccaagacactggcccagtacacctccaagacatgcagcaactgtgggtttaccatcaccagcgccgactacgacagggtgctggagaagctgaagaagacagcaacaggctggatgaccacaattaacggcaaggagctgaaggtggagggccagattacctactacaacagatacaagagacagaacgtagtcaaggacctgtccgtcgagctggatagactgagcgaagaatctgtgaacaacgacatctcctcctggacaaagggcagaagcggagaagctctgagcctcctgaagaaaagattctcccatagacccgtgcaggagaagttcgtgtgcctgaactgcggcttcgagacacacgcagccgagcaagccgccctgaacatcgccagatcctggctgttcctgcggagccaggagtacaagaaataccagacaaacaagacaaccggcaacaccgataagagagccttcgtcgagacctggcagtccttttaccggaagaagcttaaggaggtgtggaaacctgccgtgcggtctggcggatctggcggaggctccaccagccccaagaaaaagagaaaagtctaagctgccttctgcggggcttgccttctggccatgcccttcttctctcccttgcacctgtacctcttggtctttgaataaagcctgagtaggaaggctagcaaaaaaaaaaaaaaaaaaaaaaaaaaaaaaaaaaaaaaaaaaaaaaaaaaaaaaaaaaaaaaaaaaaaaaaaaaaaaaaagcccagccggctccccaacctctaccgaggagggcacctctgagtccgccacccccgagagcggccctggcacctccaccgagcccagcgagggcagcgcacccggcagccctgccggcagccccacctccacagaggagggaaccagcaccgagcccagcgaaggcagcgccccaggcaccagcaccgagcctagtgagcaggagattaaacggatcaacaagatcagaagaagacttgtgaaagacagcaacaccaagaaggccggcaagacaggccccatgaaaaccctgctggttagagtgatgacacccgatctgagagagcggctggaaaacctgagaaagaagcctgaaaatatcccccagcccatcagcaatacatctagagccaacctgaataagctgctgaccgattacaccgaaatgaagaaggcgatcctgcatgtgtactgggaagagttccagaaggaccctgtgggcctgatgagccgggtggcccagcctgccagcaagaagatcgatcagaacaagctgaaacctgagatggacgagaagggcaacctgaccaccgccggctttgcctgctctcagtgtggccagcccctgttcgtgtacaagctggagcaggtgtctgagaagggcaaggcttacaccaactacttcggacggtgcaatgtggccgagcacgaaaagctgatcctgctggcccagctgaagcccgagaaggatagcgacgaagccgtgacatatagcctgggaaagtttgggcagagggccctggatttctacagcattcatgtgaccaaggagtccacccaccccgtgaagcccctggcccagatcgccggaaacagatacgcctccggacctgtgggaaaggccctgagcgacgcatgtatgggcacaatcgcctccttcctgtctaagtaccaggacatcatcatcgaacaccagaaggtggtgaagggcaaccagaagagactggagagcctgcgggagctggccggcaaggaaaacctggaataccctagcgtgaccctgccacctcagcctcacaccaaggagggcgttgatgcctacaacgaagtgatcgcccgggtgcgaatgtgggtgaacctgaacctgtggcagaagctgaagctaagcagagatgatgccaagcctctgctgagactgaagggattcccttcctttcctctggtcgagagacaggccaacgaagtggactggtgggacatggtgtgtaacgtgaagaagctgatcaacgagaaaaaggaggatggcaaggtgttttggcagaatctggctggctacaagagacaggaagccctgagaccatacctgagcagcgaggaagatcggaagaagggaaagaaattcgctcggtaccagctgggcgacctgctgctgcacctggaaaagaagcacggcgaggactggggaaaggtgtacgacgaggcctgggagcggattgacaagaaagtggaaggcctgagcaagcacatcaagctggaagaggaacggagaagcgaggacgcccagagcaaggccgccctgaccgactggctgcgggctaaggccagcttcgtgatcgagggcctgaaggaggccgacaaggacgagttctgcagatgcgagctgaagctgcagaagtggtacggggacctgcggggaaagcccttcgccatcgaagccgagaacagcatcctggacatcagcggcttcagcaagcagtacaactgtgccttcatctggcagaaggacggcgtgaagaagctgaacctgtacctgatcatcaactacttcaagggcggcaagctgcggttcaagaagatcaaacctgaagccttcgaagccaacagattctacaccgtgatcaacaaaaagagcggcgagatcgtgcccatggaggtgaacttcaacttcgacgaccccaacctgatcatcctgcctctggcctttggcaagagacagggcagagaattcatctggaacgacctgctgtccctggaaaccggcagcctgaagctggccaacggaagagtgatcgagaagacactgtacaacagaagaacccggcaggatgagcctgccctgttcgtggccctgaccttcgagcggcgggaggtcctggactcctccaatatcaaaccaatgaacctgatcggcgtggcaagaggcgaaaacatccccgccgtgatcgccctgaccgaccccgagggctgcccactgagccggtttaaggatagcctgggaaacccaacccacatcctgagaatcggcgagagctataaggagaagcagcggaccatccaggccaagaaggaggtggagcagcggagagccggcggctacagccggaagtacgccagcaaagccaagaatctggcagacgatatggtgagaaacaccgctagagatctgctgtactacgccgtgacccaggatgccatgctgatcttcgccaacctgagccggggcttcggccggcagggcaagcggaccttcatggccgagagacagtacacacggatggaggactggctgaccgccaagctggcctacgagggcctgagcaagacctacctgtccaagacactggcccagtacacctccaagacatgcagcaactgtgggtttaccatcaccagcgccgactacgacagggtgctggagaagctgaagaagacagcaacaggctggatgaccacaattaacggcaaggagctgaaggtggagggccagattacctactacaacagatacaagagacagaacgtagtcaaggacctgtccgtcgagctggatagactgagcgaagaatctgtgaacaacgacatctcctcctggacaaagggcagaagcggagaagctctgagcctcctgaagaaaagattctcccatagacccgtgcaggagaagttcgtgtgcctgaactgcggcttcgagacacacgcagccgagcaagccgccctgaacatcgccagatcctggctgttcctgcggagccaggagtacaagaaataccagacaaacaagacaaccggcaacaccgataagagagccttcgtcgagacctggcagtccttttaccggaagaagcttaaggaggtgtggaaacctgccgtgcggtctggcggatctggcggaggctccaccagccccaagaaaaagagaaaagtctaagctgccttctgcggggcttgccttctggccatgcccttcttctctcccttgcacctgtacctcttggtctttgaataaagcctgagtaggaaggctagcaaaaaaaaaaaaaaaaaaaaaaaaaaaaaaaaaaaaaaaaaaaaaaaaaaaaaaaaaaaaaaaaaaaaaaaaaaaaaaaa

SEQ ID NO: 10013 - RNA, 8787 nt, synthetic construct
  source 1..8787: mol_type = other RNA
aggaaataagagagaaaagaagagtaagaagaaatataagagccaccatggcccctaagaagaagcgtaaagtgagccggatgaaccacgaccaggagttcgacccccctaaggtgtaccctcccgtccccgccgagaagagaaagcccatccgggtcctgagcctgttcgatggcatcgccaccggtctgctggtgctgaaggacctgggcatccaggtggataggtacattgcctccgaggtgtgcgaggactccatcaccgtgggaatggtgcgtcatcagggcaagatcatgtacgtgggcgacgtgcggagcgtgacacagaagcatatccaggagtggggccctttcgacctggtgatcggcggcagcccttgcaatgacctgagcatcgtgaacccagcccggaagggcctgtacgagggaaccggcagactgttcttcgagttttacagactgctgcacgacgcccggcctaaggaaggcgacgaccggcccttcttttggctgttcgagaatgtggtggccatgggagtcagcgacaagcgggatattagccggttcctggagagcaaccccgtgatgatcgatgccaaggaagtgagcgccgcccaccgggccagatacttctggggcaatctgcctggcatgaacagacccctggccagcaccgtgaacgacaagctggagctgcaggagtgcctggagcacggccggatcgccaagttcagcaaggtgagaaccatcaccacccgaagcaacagcatcaaacaaggcaaggaccagcactttcctgtgttcatgaacgagaaggaggacatcctgtggtgtaccgagatggagagagtgttcgggttcccagtccactacacagatgtcagcaacatgtctagactggccagacagagactgctgggaagaagctggtccgtccctgtgatcagacacctgttcgcccctctgaaggagtacttcgcctgcgtgagcagcggcaacagcaacgccaacagccggggccccagcttctctagcggcctggtgccactgtccctgagagggagccacatgggccccatggagatctacaaaaccgtgagcgcctggaagcggcagcctgtgcgcgtgctgagcctgtttcggaatatcgataaagtcctgaaaagcctgggattcctggagagcggctctggctccggcggtggcaccctgaagtacgtggaggatgtgacaaacgtggtcagacgggatgtggagaagtggggccccttcgatctggtgtacggcagcacccaacccctgggcagctcttgtgaccggtgccctggctggtacatgtttcagttccaccggatcctgcagtacgccctgccgagacaggagtcccagcggccattcttttggattttcatggacaacttgctgctgaccgaggatgaccaggaaactaccactcggttcctgcagaccgaagccgtgaccctgcaggacgtgagaggccgggactaccagaacgccatgcgggtgtggtccaacatccctggactgaaaagcaagcacgcacctctgacccctaaagaagaggagtacctgcaggcccaggtgcggagcagaagcaagctggacgcccctaaggtggatctgctggtgaagaattgcctcctgcccctgagagagtacttcaagtatttcagccagaatagtctgcccctgggaggcagcggcggcggcatggacatggcccaggagcccgtgaccttcagggacgtggccatctacttcagcagggaggagtgggcctgcctggagcccagccagaggaccctgtacagggacgtgatgctggacaacttcagcagcgtggccgccctgggcttctgcagccccaggcccgacctggtgagcaggctggagcagtgggaggagccctgggtggaggacagggagaggcccgagctgcaggccgtgaggaggggcggcccaagcagcggcgcccctcctcccagcggcggcaggcggcccaagcagcggcgcccctcctcccagcggcggcagcccagccggctccccaacctctaccgaggagggcacctctgagtccgccacccccgagagcggccctggcacctccaccgagcccagcgagggcagcgcacccggcagccctgccggcagccccacctccacagaggagggaaccagcaccgagcccagcgaaggcagcgccccaggcaccagcaccgagcctagtgagcaggagattaaacggatcaacaagatcagaagaagacttgtgaaagacagcaacaccaagaaggccggcaagacaggccccatgaaaaccctgctggttagagtgatgacacccgatctgagagagcggctggaaaacctgagaaagaagcctgaaaatatcccccagcccatcagcaatacatctagagccaacctgaataagctgctgaccgattacaccgaaatgaagaaggcgatcctgcatgtgtactgggaagagttccagaaggaccctgtgggcctgatgagccgggtggcccagcctgccagcaagaagatcgatcagaacaagctgaaacctgagatggacgagaagggcaacctgaccaccgccggctttgcctgctctcagtgtggccagcccctgttcgtgtacaagctggagcaggtgtctgagaagggcaaggcttacaccaactacttcggacggtgcaatgtggccgagcacgaaaagctgatcctgctggcccagctgaagcccgagaaggatagcgacgaagccgtgacatatagcctgggaaagtttgggcagagggccctggatttctacagcattcatgtgaccaaggagtccacccaccccgtgaagcccctggcccagatcgccggaaacagatacgcctccggacctgtgggaaaggccctgagcgacgcatgtatgggcacaatcgcctccttcctgtctaagtaccaggacatcatcatcgaacaccagaaggtggtgaagggcaaccagaagagactggagagcctgcgggagctggccggcaaggaaaacctggaataccctagcgtgaccctgccacctcagcctcacaccaaggagggcgttgatgcctacaacgaagtgatcgcccgggtgcgaatgtgggtgaacctgaacctgtggcagaagctgaagctaagcagagatgatgccaagcctctgctgagactgaagggattcccttcctttcctctggtcgagagacaggccaacgaagtggactggtgggacatggtgtgtaacgtgaagaagctgatcaacgagaaaaaggaggatggcaaggtgttttggcagaatctggctggctacaagagacaggaagccctgagaccatacctgagcagcgaggaagatcggaagaagggaaagaaattcgctcggtaccagctgggcgacctgctgctgcacctggaaaagaagcacggcgaggactggggaaaggtgtacgacgaggcctgggagcggattgacaagaaagtggaaggcctgagcaagcacatcaagctggaagaggaacggagaagcgaggacgcccagagcaaggccgccctgaccgactggctgcgggctaaggccagcttcgtgatcgagggcctgaaggaggccgacaaggacgagttctgcagatgcgagctgaagctgcagaagtggtacggggacctgcggggaaagcccttcgccatcgaagccgagaacagcatcctggacatcagcggcttcagcaagcagtacaactgtgccttcatctggcagaaggacggcgtgaagaagctgaacctgtacctgatcatcaactacttcaagggcggcaagctgcggttcaagaagatcaaacctgaagccttcgaagccaacagattctacaccgtgatcaacaaaaagagcggcgagatcgtgcccatggaggtgaacttcaacttcgacgaccccaacctgatcatcctgcctctggcctttggcaagagacagggcagagaattcatctggaacgacctgctgtccctggaaaccggcagcctgaagctggccaacggaagagtgatcgagaagacactgtacaacagaagaacccggcaggatgagcctgccctgttcgtggccctgaccttcgagcggcgggaggtcctggactcctccaatatcaaaccaatgaacctgatcggcgtggcaagaggcgaaaacatccccgccgtgatcgccctgaccgaccccgagggctgcccactgagccggtttaaggatagcctgggaaacccaacccacatcctgagaatcggcgagagctataaggagaagcagcggaccatccaggccaagaaggaggtggagcagcggagagccggcggctacagccggaagtacgccagcaaagccaagaatctggcagacgatatggtgagaaacaccgctagagatctgctgtactacgccgtgacccaggatgccatgctgatcttcgccaacctgagccggggcttcggccggcagggcaagcggaccttcatggccgagagacagtacacacggatggaggactggctgaccgccaagctggcctacgagggcctgagcaagacctacctgtccaagacactggcccagtacacctccaagacatgcagcaactgtgggtttaccatcaccagcgccgactacgacagggtgctggagaagctgaagaagacagcaacaggctggatgaccacaattaacggcaaggagctgaaggtggagggccagattacctactacaacagatacaagagacagaacgtagtcaaggacctgtccgtcgagctggatagactgagcgaagaatctgtgaacaacgacatctcctcctggacaaagggcagaagcggagaagctctgagcctcctgaagaaaagattctcccatagacccgtgcaggagaagttcgtgtgcctgaactgcggcttcgagacacacgcagccgagcaagccgccctgaacatcgccagatcctggctgttcctgcggagccaggagtacaagaaataccagacaaacaagacaaccggcaacaccgataagagagccttcgtcgagacctggcagtccttttaccggaagaagcttaaggaggtgtggaaacctgccgtgcggtctggcggatctggcggaggctccaccagccccaagaaaaagagaaaagtctaagctgccttctgcggggcttgccttctggccatgcccttcttctctcccttgcacctgtacctcttggtctttgaataaagcctgagtaggaaggctagcaaaaaaaaaaaaaaaaaaaaaaaaaaaaaaaaaaaaaaaaaaaaaaaaaaaaaaaaaaaaaaaaaaaaaaaaaaaaaaaagcccagccggctccccaacctctaccgaggagggcacctctgagtccgccacccccgagagcggccctggcacctccaccgagcccagcgagggcagcgcacccggcagccctgccggcagccccacctccacagaggagggaaccagcaccgagcccagcgaaggcagcgccccaggcaccagcaccgagcctagtgagcaggagattaaacggatcaacaagatcagaagaagacttgtgaaagacagcaacaccaagaaggccggcaagacaggccccatgaaaaccctgctggttagagtgatgacacccgatctgagagagcggctggaaaacctgagaaagaagcctgaaaatatcccccagcccatcagcaatacatctagagccaacctgaataagctgctgaccgattacaccgaaatgaagaaggcgatcctgcatgtgtactgggaagagttccagaaggaccctgtgggcctgatgagccgggtggcccagcctgccagcaagaagatcgatcagaacaagctgaaacctgagatggacgagaagggcaacctgaccaccgccggctttgcctgctctcagtgtggccagcccctgttcgtgtacaagctggagcaggtgtctgagaagggcaaggcttacaccaactacttcggacggtgcaatgtggccgagcacgaaaagctgatcctgctggcccagctgaagcccgagaaggatagcgacgaagccgtgacatatagcctgggaaagtttgggcagagggccctggatttctacagcattcatgtgaccaaggagtccacccaccccgtgaagcccctggcccagatcgccggaaacagatacgcctccggacctgtgggaaaggccctgagcgacgcatgtatgggcacaatcgcctccttcctgtctaagtaccaggacatcatcatcgaacaccagaaggtggtgaagggcaaccagaagagactggagagcctgcgggagctggccggcaaggaaaacctggaataccctagcgtgaccctgccacctcagcctcacaccaaggagggcgttgatgcctacaacgaagtgatcgcccgggtgcgaatgtgggtgaacctgaacctgtggcagaagctgaagctaagcagagatgatgccaagcctctgctgagactgaagggattcccttcctttcctctggtcgagagacaggccaacgaagtggactggtgggacatggtgtgtaacgtgaagaagctgatcaacgagaaaaaggaggatggcaaggtgttttggcagaatctggctggctacaagagacaggaagccctgagaccatacctgagcagcgaggaagatcggaagaagggaaagaaattcgctcggtaccagctgggcgacctgctgctgcacctggaaaagaagcacggcgaggactggggaaaggtgtacgacgaggcctgggagcggattgacaagaaagtggaaggcctgagcaagcacatcaagctggaagaggaacggagaagcgaggacgcccagagcaaggccgccctgaccgactggctgcgggctaaggccagcttcgtgatcgagggcctgaaggaggccgacaaggacgagttctgcagatgcgagctgaagctgcagaagtggtacggggacctgcggggaaagcccttcgccatcgaagccgagaacagcatcctggacatcagcggcttcagcaagcagtacaactgtgccttcatctggcagaaggacggcgtgaagaagctgaacctgtacctgatcatcaactacttcaagggcggcaagctgcggttcaagaagatcaaacctgaagccttcgaagccaacagattctacaccgtgatcaacaaaaagagcggcgagatcgtgcccatggaggtgaacttcaacttcgacgaccccaacctgatcatcctgcctctggcctttggcaagagacagggcagagaattcatctggaacgacctgctgtccctggaaaccggcagcctgaagctggccaacggaagagtgatcgagaagacactgtacaacagaagaacccggcaggatgagcctgccctgttcgtggccctgaccttcgagcggcgggaggtcctggactcctccaatatcaaaccaatgaacctgatcggcgtggcaagaggcgaaaacatccccgccgtgatcgccctgaccgaccccgagggctgcccactgagccggtttaaggatagcctgggaaacccaacccacatcctgagaatcggcgagagctataaggagaagcagcggaccatccaggccaagaaggaggtggagcagcggagagccggcggctacagccggaagtacgccagcaaagccaagaatctggcagacgatatggtgagaaacaccgctagagatctgctgtactacgccgtgacccaggatgccatgctgatcttcgccaacctgagccggggcttcggccggcagggcaagcggaccttcatggccgagagacagtacacacggatggaggactggctgaccgccaagctggcctacgagggcctgagcaagacctacctgtccaagacactggcccagtacacctccaagacatgcagcaactgtgggtttaccatcaccagcgccgactacgacagggtgctggagaagctgaagaagacagcaacaggctggatgaccacaattaacggcaaggagctgaaggtggagggccagattacctactacaacagatacaagagacagaacgtagtcaaggacctgtccgtcgagctggatagactgagcgaagaatctgtgaacaacgacatctcctcctggacaaagggcagaagcggagaagctctgagcctcctgaagaaaagattctcccatagacccgtgcaggagaagttcgtgtgcctgaactgcggcttcgagacacacgcagccgagcaagccgccctgaacatcgccagatcctggctgttcctgcggagccaggagtacaagaaataccagacaaacaagacaaccggcaacaccgataagagagccttcgtcgagacctggcagtccttttaccggaagaagcttaaggaggtgtggaaacctgccgtgcggtctggcggatctggcggaggctccaccagccccaagaaaaagagaaaagtctaagctgccttctgcggggcttgccttctggccatgcccttcttctctcccttgcacctgtacctcttggtctttgaataaagcctgagtaggaaggctagcaaaaaaaaaaaaaaaaaaaaaaaaaaaaaaaaaaaaaaaaaaaaaaaaaaaaaaaaaaaaaaaaaaaaaaaaaaaaaaaa
